United States Patent Application Publication US 2004/0214272 A1 - sequence listing, part 52

SEQ ID NO: 265884 - protein, 89 aa, Zea mays
  unsure (1)..(89): unsure at all Xaa locations
  Clone ID: MRT4577_174090C.1.pep
KQMVSRVIKDLRKMKAPNSRREDGAGVAASRSHAPSRSHLVGVAGVSHATIIEGTLXNSPSNDERVPLPVTVAPAPEAMHTATELKTPC

SEQ ID NO: 265885 - protein, 118 aa, Zea mays
  unsure (1)..(118): unsure at all Xaa locations
  Clone ID: MRT4577_174091C.1.pep
RKFFHRRVHLIPLSTANLIHGGGGGVRSLGHPRPSRPPTNPEGGKGTPHPPGQATPPXAGPPNGTGPGNPSEGPXGDTGRGPDQPWPTANPGREKPAGSPPPGKPAPSLGGYPGEPRP

SEQ ID NO: 265886 - protein, 77 aa, Zea mays
  Clone ID: MRT4577_174092C.1.pep
LVKQRDWCRTFLLYEGQNWGLTPKGNIMCRLKNTNPTTMQWKPHVYSTFLMIFRFLKGCTGMLPGALGFRLLSFLRV

SEQ ID NO: 265887 - protein, 90 aa, Zea mays
  Clone ID: MRT4577_174093C.1.pep
GGGEPLPRGGPPRDTQADMSTTGRARNSGVPIIKGRRGRTEHRPICGGGGGGLPYLPLNRFRAGGPLRKTEALPDCPAGVSQITNVTCCR

SEQ ID NO: 265888 - protein, 338 aa, Zea mays
  Clone ID: MRT4577_174094C.1.pep
GTEIRCTRGTETLWLDRISAKVTALAGNTNFWAVGCEDGYLQVYTKCGRRAMPAMMMGSAAVFIDCDDCWKLLLVTRRGLMYIWDLHNRTCILQDSLAALVASPDESSANHAGAVKVISAKFSRCGFPLVVLASRHAFLFDMSMKCWLRIADDCFPASNFASSFIFPQAGELGKLQIDVGKFMARKPIWSRVTDDGLQTRAHLETQLAASLALKSPQEYRQCLLSYIRFLAREADESRLREVCESFLGPPMGMLGSESSTDPKSPAWDSDVLGMKKHQLLREDILPSMASNRKVQRLLNEFMDLLSEYEAAKSKVDPMDITPALPQQAPEANANVVTS

SEQ ID NO: 265889 - protein, 135 aa, Zea mays
  unsure (1)..(135): unsure at all Xaa locations
  Clone ID: MRT4577_174095C.1.pep
MLAYCGIYPDEVINNXAPHIGTPDKGILAANVSTDTIDKSLSTITAHNVEENRRALRELLFCXPGALQYISVCXILFQHTLYQNTRDGTPFVDVLKEGGDLPDIKVDKGTIVVVDTDKETTTQGHDDLDKRCAKD

SEQ ID NO: 265890 - protein, 110 aa, Zea mays
  Clone ID: MRT4577_174096C.1.pep
YLDLFILGVLWGFMFGFYFYFFFLGEPQTPNQNFIKNEKGQELWGGQNSFLKNKKRGLDEIFTKNNQKRGNQPLVTQEEQAQCPSKGFFQAGGILPDTPDPQRGWAQNIE

SEQ ID NO: 265891 - protein, 125 aa, Zea mays
  Clone ID: MRT4577_174097C.1.pep
KKTGGDTPRKTFWRKNLGKTLWGKKGGKTKKRAGGGPPENPAGPPGGTPFFFRGGVKKGGKMGGIGHPGGKGTPGKTPPKNRGGEKKVKPGGAQRGAPKNICERPPPLNQREPPRPPKKKAPRGG

SEQ ID NO: 265892 - protein, 142 aa, Zea mays
  Clone ID: MRT4577_174098C.1.pep
MRSRVTGEGFFQPGFVQQFSVHNGVSAPDYGLFSEPYLFDRSEQYFDEEPPRFYSPLSSAPRRMRDRSYSHFDLPSYSRSSQLDGLLMSQWPPYSRADLAMPGFGSDTGGYSYQPQGFPSPASAQQYRLSPCMGMKVNMHWQ

SEQ ID NO: 265893 - protein, 87 aa, Zea mays
  Clone ID: MRT4577_174099C.1.pep
PVATSSVAYCRGIRERLSMSIYKLSIMLIAVHHSWEWLLFIFSSEREVWRSLEVTLFCSAIGYSVARQDSAGMTGGYLYGSMVFFVG

SEQ ID NO: 265894 - protein, 121 aa, Zea mays
  Clone ID: MRT4577_17409C.1.pep
LLLHCPKKKKKKKKKKKLTVSVALPIYLLIVKKKKKKKKKKKKKKKKKKKKKKKTKKKKKKRGPQPPLFVPIKKGKSRVRLKKGKNCSQRKIVTLQKFNQNYQPKEKSQNPGVPKNGLNPL

SEQ ID NO: 265895 - protein, 99 aa, Zea mays
  unsure (1)..(99): unsure at all Xaa locations
  Clone ID: MRT4577_1740C.1.pep
YGGPRGMALCGGYYRGTAMAVRMEKGRPAIVKVGXLRCAQLSELANVAYRRGLTGSLVGSRKMRRNXGCKGAEMAMACYWCKLQXLCKLINNRVQRAEQ

SEQ ID NO: 265896 - protein, 635 aa, Zea mays
  unsure (1)..(635): unsure at all Xaa locations
  Clone ID: MRT4577_174100C.1.pep
MHARFLSAPSPASAAPSPYVRLAFTGALPRRACWKPRGPASASAPPPRPLHSLCARASMQPASPAHDGHGGPPVHGVSNTVIGVLGGGQLGKMLCHAASQMGIRIVILDPLPGCPASSVCDEHVIGSFNDGDTVREFAKRCGVLTVEIEHVDAATLEKLEKQGVDCEPKASTITIIQDKYRQKKHFSRYEIPLPDFMEVDTLRSIEEAGEKFGYPLMVKSKRLAYDGRGNAVAKNKEELPSVVASLGGFERGLYVERWTPFVKXLSVIVARSRDNSTVCYPVVETVHKENXCHVVEAPADVSNKIKKLATSVAXEKAIKSLEGAGVFAVELFLTEDDQILLNEVAPRPHNSGHHTIESCYTSQYEQHIRAILGLPLGDPSMKAPAAIMYNILGEDEGEAGFFLAHQLISRALTIPGTSVHWYAKPEMRKQRKMGHITIVGPSKISVKSRLDNLLQRNSSDPKEVSPRVAIIMGSQSDLPVMKDAERVLKEFDIPCELTIVSAHRTPERMYDYAKSAKDRGFEVIIAGAGGAAHLPGMVASLTPLPVIGVPIKTSTLSGFDSLLSIVQMPKGIPVATVAIGNAENAGLLAARILAARDPELQDRVTKYQDDLRDMVLETAERLEDQGPEEFLKGMD

SEQ ID NO: 265897 - protein, 82 aa, Zea mays
  unsure (1)..(82): unsure at all Xaa locations
  Clone ID: MRT4577_174101C.1.pep
NLGKPFEQVVFCWTFQMGNRVVPKGPIEEGLRQTLPVNXWXIPESWLARSFKINQAGFLRGTFIVIPMGVSRTNEELWDGKF

SEQ ID NO: 265898 - protein, 381 aa, Zea mays
  unsure (1)..(381): unsure at all Xaa locations
  Clone ID: MRT4577_174102C.1.pep
MATAAAQSHPASMDARRWDESSYRRGILRARDLSSRTLFRAVFFDHSDDPDTDILLAAASSDGSLASFSLSSCISACSATSQVETAATLVDPVCIVQAHSGPAYDVRFYPDQQQPLLFSCGDDGRIKGWRWHEMQSCLVPLSLQGDHLEPALDLVNPQHEGPWGARSPVPENNAIAINKQDGSILAAAGDACAYCWDVETSKCKITFKGHADYLHSIAVRESNRQVVTGSEDGTARIWDCRSGKCTRVIXSQERARHLKXWVSCVAIDPSESWLACGTSSGISVWSLLSNECIFNLDCHAPVQDLLFDKNHILAVGAEPLLSRLTINGTVLSQVKCAPQSAFSVSIHSTGIAAVAGYGGLVDVISEVGSHLCTFGSRGLDK

SEQ ID NO: 265899 - protein, 123 aa, Zea mays
  Clone ID: MRT4577_174103C.1.pep
ELSELAALKRARVERMKALKKMKNAKQGFSGGNLCPLIVTVIFCVVILWQGFFSGHGPAVSFHGSPESSIRVARSSLISIRFYKNHSNTRPPPFSETTAAPHNVVETGPRLRNRNQARRLLAR

SEQ ID NO: 265900 - protein, 181 aa, Zea mays
  Clone ID: MRT4577_174104C.1.pep
MTSLSSYVLLLSCVATLHANAYASQEARLREFISSRKNIDSTTDTFRVRSIAERVAGSLSAESSASDQGSLKAADKITALPGQPEGVDFDQYGGYVAVDEENGRALFYYLVESPSGASDKPLVLWLNGGPGCSSLGYGAMQELGPFRVTEDNKTLSRNLNSWNNVANLIFLESPAGVGFSY

SEQ ID NO: 265901 - protein, 53 aa, Zea mays
  Clone ID: MRT4577_174105C.1.pep
IPSKVNVFVATSTFSYTFTRVSTDMFFRKFNNWITNAFTMWTTITFAAQCLSK

SEQ ID NO: 265902 - protein, 72 aa, Zea mays
  unsure (1)..(72): unsure at all Xaa locations
  Clone ID: MRT4577_174106C.1.pep
TWGIIGGPGAPDPRQNLWNGSLMGPWHSMVASKPIGFQGPHIVPFHFVVLSFRAHRHTKNTTKIAISQNLXT

SEQ ID NO: 265903 - protein, 128 aa, Zea mays
  Clone ID: MRT4577_174107C.1.pep
VEPSQSPITPWRTTILNDLLLEASDVYKSAAPLLPPDPPNLQLKSHDLPPENLYNSDGMQLDDVFTPKGGDFHHLYPSRKNFSNIHHGLGTDPANKVGGAGMGSLMTTGASGFPPLRGLPLRNLPSSI

SEQ ID NO: 265904 - protein, 127 aa, Zea mays
  Clone ID: MRT4577_174108C.1.pep
PRVRPRVRPLVRPRVRPASLRSQPRSAFLGTGLCGGPLGPCPGEVSPSPAPAGQTPSLTPVPSSGGGNGSGSGSGGTIGGNGGESGHKNKKLSGGAIAGIAIGSALGAGLLLLLLVCLCRKSGGTRT

SEQ ID NO: 265905 - protein, 64 aa, Zea mays
  Clone ID: MRT4577_174109C.1.pep
SPTRPPTRPKKKKKKKKKKKKKKKKKKKNKKKKKKKNKKKKKKKKKKRATYLKDTSLLLQNIQH

SEQ ID NO: 265906 - protein, 35 aa, Zea mays
  Clone ID: MRT4577_17410C.1.pep
RWGQKNIIYALNHSHTPNPQPTSFQPKLQILQKLG

SEQ ID NO: 265907 - protein, 61 aa, Zea mays
  Clone ID: MRT4577_174110C.1.pep
LMIYIALLMCDVEHGTSRYHSGHLQMASIKPSCLQRRSCCLVQGEVLIFHGGPSGRPRTFI

SEQ ID NO: 265908 - protein, 47 aa, Zea mays
  Clone ID: MRT4577_174112C.1.pep
PSPLTSISFRFQQRWKSTVWNWRWRTIDATAAAEVFFGWEGLKARPG

SEQ ID NO: 265909 - protein, 63 aa, Zea mays
  Clone ID: MRT4577_174113C.1.pep
SSFTNPFLATSHALEDIKIVCRCVLIWRNLFEKIATMLCKSKYSFLLIYYFVINLDCVCHYVH

SEQ ID NO: 265910 - protein, 77 aa, Zea mays
  Clone ID: MRT4577_174114C.1.pep
YFFWSLPALFTLTHVLFYPWKAIPPYPYQLLLTSPLVATHAITALITSKANPHCSINAPPLARWLQRTTGCASRSRA

SEQ ID NO: 265911 - protein, 128 aa, Zea mays
  unsure (1)..(128): unsure at all Xaa locations
  Clone ID: MRT4577_174115C.1.pep
RGHPGMESSLFGNAGCGTLPVMSVAGTLYELFVAMASSVWTLHRLAWAYDPAVGVFQVGRGAEFSMVYMENIVRSXGLAGSREPGKPARRPKVGFTVVPGFRLGGTVIQCRVYLDHGKRGEETIIDSI

SEQ ID NO: 265912 - protein, 117 aa, Zea mays
  Clone ID: MRT4577_174116C.1.pep
GSNRLHTEIKQGPCVETNIRQSLATPRAMRKVLTSNKQTARVLIAHMQLHANFPLLRNHRAGCVRKGGSTHSALHKHDVQLQRLFSAPFLMLASAIGSLKTRSSRLVRSHTKFPSDG

SEQ ID NO: 265913 - protein, 63 aa, Zea mays
  Clone ID: MRT4577_174117C.1.pep
YHQNFLFQQKQLRQTTLPPGQTTTREKKKKEKKKAGVSRIRGSHDKITRKPHEQTRPNIHGDR

SEQ ID NO: 265914 - protein, 211 aa, Zea mays
  Clone ID: MRT4577_174118C.1.pep
INMRRGYSYSPSPPRGYRRRARSPSPHDHYGGRGRDLPTSLLVRNLRRDCRPEDLRRPFGQFGRVKDIYLPRDYYTGDPRGFGFVQYYDPADAADAKYYMDGQVVLGRQITVVFAEENRKKPQEMRARDRVRGHSYDDRRYSRSRSPRYYRGRSPSRSQSYSRSPPQNPRHRLRERSYSGSPVDSRSRSGSPYEDGYRRSSRRERSLSVSG

SEQ ID NO: 265915 - protein, 233 aa, Zea mays
  unsure (1)..(233): unsure at all Xaa locations
  Clone ID: MRT4577_174119C.1.pep
INMRRGYRYSPSPPMGYRRRARSPSPHDHYGGRGRDLPTSLLVRNLRRDCSXGSSLNGTYSGTRFEDIYLLDWPEDLRRPFGQFGRVKDIYLPRDYYTGDPRGFGFVQYYDPADAADAKYYMDGQVVLGRQITVVFAEENRKKPQEMRARDRVRGHSYDDRRYSRSRSPRYYRGRSPSRSQSYSRSPPQNPRHRLRERSYSGSPVDSRSRSGSPYEDGYRRSSRRERSLSVSG

SEQ ID NO: 265916 - protein, 101 aa, Zea mays
  Clone ID: MRT4577_17411C.1.pep
KHEIFLHHQYPSIYIHWQLLLSVESPLAIKLCVVCTVLSVSMAIPDQVLGCIQADVPSGYSRLSTAVGYQICHPVFVLGVPECNSLVSWSVCQKRWICVLL

SEQ ID NO: 265917 - protein, 211 aa, Zea mays
  Clone ID: MRT4577_174120C.1.pep
INMRRGYSYSPSPPRGYRRRARSPSPHDHYGGRGRDLPTSLLVRNLRRDCRPEDLRRPFGQFGRVKDIYLPRDYYTGEPRGFGFVQYYDPADAADAKYYMDGQVVLGRQITVVFAEENRKKPQEMRARDRVRGHSYDGRRYSRSRSPRYYRGRSPSRSQSYSRSPPQNPRHRLRERSYSGSPVDSRSRSGSPYEDGYRRSSRRERSLSVSG

SEQ ID NO: 265918 - protein, 103 aa, Zea mays
  unsure (1)..(103): unsure at all Xaa locations
  Clone ID: MRT4577_174121C.1.pep
SLLLWWGXRWVXLVSLSRXFXAXAAPVSASPAXFPLAGVPRPXVRXXSPPPXRFFXPPAPAPAXXPPSCSSVXWSFLPRARGXPLXPLAPLGXGWWLPPPPPV

SEQ ID NO: 265919 - protein, 104 aa, Zea mays
  unsure (1)..(104): unsure at all Xaa locations
  Clone ID: MRT4577_174122C.1.pep
YVKQVVLSSVCLQNLLSRESREFMQIAANDKLQXLKIFSQQILNSINRCKDPQWYNLHRYFXKLESESAPHKQFKDTAIAXIQKQMSLVQRTTVSTHLFSKYIF

SEQ ID NO: 265920 - protein, 214 aa, Zea mays
  Clone ID: MRT4577_174123C.1.pep
ARLINMRRGYSYSPSPPRGYRRRARSPSPHDHYGGRGRDLPTSLLVRNLRRDCRPEDLRRPFGQFGRVKDIYLPRDYYTGDPRGFGFVQYYDPADAADAKYYMDGQVVLGRQITVVFAEENRKKPQEMRARDRVRGHSYDDRRYSRSRSPRYYRGRSPSRSQSYSRSPPQNPRHRLRERSYSGSPVDSRSRSGSPYEDGYRRSSRRERSLSVSG

SEQ ID NO: 265921 - protein, 85 aa, Zea mays
  Clone ID: MRT4577_174124C.1.pep
RVFWPPPGGGWGFSPAGKTPERAQFSFVQWKPFFYLNPPPPWEPALGNLLLPQVVFGPLFLPRGPGFFFFWGAGPLNPKRTKRGG

SEQ ID NO: 265922 - protein, 108 aa, Zea mays
  Clone ID: MRT4577_174125C.1.pep
PQNGTIKVPCRVLFPFFLTVSISCEVAQIDSGDFKSMAVTSSKCVVHSTKKSTRSRVSCGLFLVKGTPKSVPMNLCLWWSSAHPAQRNLRHVSPRDEFRARLGGGPGT

SEQ ID NO: 265923 - protein, 78 aa, Zea mays
  Clone ID: MRT4577_174126C.1.pep
CQGLIMSIKRLRKLLSNPIRCCKVLRFSRIIFPLVCLDEPAPGSCYLGDVRGCCFLAMKAVSVVACLTQVCCNLFNMI

SEQ ID NO: 265924 - protein, 65 aa, Zea mays
  Clone ID: MRT4577_174127C.1.pep
RACALPPPVHPSLWCVMNRPHGHDIMCPRYRLALGCGSLRNRRPSCCWALNMSLDLCVCVIDSFP

SEQ ID NO: 265925 - protein, 45 aa, Zea mays
  Clone ID: MRT4577_174128C.1.pep
QHVLSTQNVYFGAAKRVYLTISYVMPSHDLMTHHAPEDSCDRRTL

SEQ ID NO: 265926 - protein, 75 aa, Zea mays
  Clone ID: MRT4577_174129C.1.pep
FMMVYIGVLSRPDFSKGECCLFMYRYASELCLQWCAVYKEVLDCVVHMGQDATDSSFALSLVMCTIPNTTMMNVS

SEQ ID NO: 265927 - protein, 110 aa, Zea mays
  Clone ID: MRT4577_17412C.1.pep
MADKEKLESEEEYESDLDDAPLSALRRRDAASDDEDEDEDGGMPLRRRKAGSDADSDGQGAAEVYDEDGAYEESEEYDEYECEKELMEKSTIEETMSELMDGKIPMLQVE

SEQ ID NO: 265928 - protein, 109 aa, Zea mays
  Clone ID: MRT4577_174130C.1.pep
SAQGPLSLGPTVQARAYLHKQQQPLYFLQQGNGESTLANIEPSIDLRNIYAPPTIYHTSIIKVIPMAKKPHPLLFESVHIFLTYFFGREQSGTEESLRSHTRALSNTKF

SEQ ID NO: 265929 - protein, 78 aa, Zea mays
  Clone ID: MRT4577_174131C.1.pep
PLKIAYYINIPSHFALKSRGLLFYTGITYAIEAFKRANTKCSSWEQLAYIHEGKAIPLQKTGIGLALLHREKSQPPLR

SEQ ID NO: 265930 - protein, 158 aa, Zea mays
  unsure (1)..(158): unsure at all Xaa locations
  Clone ID: MRT4577_174132C.1.pep
SERDLFYIQLEYQNTKDTHCYLSNKSVKERTGIDRGCKAAFRPGGGDGLXGRLRVKGPQLETKGSYGGRRXRXAWLGWSXLFFQACSSSXASPLSSAXAAVXSSDLCLFPRIISXXPGSGSSRSVNAVVAKSLFXSFTCRGSGGLPCPLVHGWSFLGG

SEQ ID NO: 265931 - protein, 185 aa, Zea mays
  Clone ID: MRT4577_174133C.1.pep
MAEEAASLDDETRALVVPDAAALPASPPSAVEANFARYFVADFLNPGYDQYVYRHPNGLCVVGLAPAHVVFKEEGVISAVDFNVGKSDRSEMKVTGKRKRNAQHLQENSALCKVCVNDKSFIVRCCVKGSLLEINERLIKQPDLLNTAADREGYIAVFQPKPADWLKIKDKFLSYEDYKNLRGVC

SEQ ID NO: 265932 - protein, 183 aa, Zea mays
  unsure (1)..(183): unsure at all Xaa locations
  Clone ID: MRT4577_174134C.1.pep
MSMLFRVLLDPNEKKICTSKSKDHLFESIADPRTLETYPEKAATARKNAFIIITNPPCQAAAAPTSKTXSMMHAKCHFAGIPXIFHAIKLEDIVPSTHNCNIAHGDLTEYHLIDISEAGDETLLTVHDNTKDDLXLPADNTLGVQIKGGIEIEMNLVATAQTVMAQDLTSSMNHDGPTQLRCL

SEQ ID NO: 265933 - protein, 201 aa, Zea mays
  Clone ID: MRT4577_174135C.1.pep
MAEEAASLEAPPPLHNPSLRKSSLDDETRALVVPDAAALPASPPSAVEANFARYFVADFLNPGYDQYVYRHPNGLCVVGLAPAHVVFKEEGVISTVDFNVGKSDRSEMKVTGKRKRNAQHLQENSALCKVCVNDKSFIVRCCVKGSLLEINERLIKQPDLLNTAADREGYIAVFQPKPADWLKIKDKFLSYEDYKNLRGVC

SEQ ID NO: 265934 - protein, 48 aa, Zea mays
  unsure (1)..(48): unsure at all Xaa locations
  Clone ID: MRT4577_174136C.1.pep
SDIILYSLTPCYXAFGFIRKPNKXPTSTRKPYLSYYYQDHQNCLLICC

SEQ ID NO: 265935 - protein, 264 aa, Zea mays
  unsure (1)..(264): unsure at all Xaa locations
  Clone ID: MRT4577_174137C.1.pep
LVITSCLGRVFPSKSDVLGVSSYSADPHTLVDLKNQLLLTPNGVLYVQPEIRKGVLPRLLEEILSTRIMVKQAMKKLSPSQQVLHRIFNARQLALKLIANVTYGYTAAGFSGRMPCAELADSIVQCGRRTLETAISFVNQHPLWKARVVYGDTDSMFVLLKGRSREEAFRIGKEIASSITAMNPDPVTLKFEKVYQPCFLLTKKRYVGYSYESPEQNEPVFDAKGIETVRRDTCPTVAKILERXYQNMFXRQDLTKXQTYLERQ

SEQ ID NO: 265936 - protein, 98 aa, Zea mays
  Clone ID: MRT4577_174138C.1.pep
RPGRPHTSLSFSSRLEHSCCSDPTATGSAVRRSRSPAGTWKTAKFQKNITRRGSVPETTVKKGNDYPVGPLVLGFFIFVVIGSSLFQIIRTATSGGVA

SEQ ID NO: 265937 - protein, 68 aa, Zea mays
  Clone ID: MRT4577_174139C.1.pep
MTTSRRLADRKTAKFQKNITRRGSVPETTVKKGNDYPVGPLVLGFFIFVVIGSSLFQIIRTATSGGVA

SEQ ID NO: 265938 - protein, 282 aa, Zea mays
  unsure (1)..(282): unsure at all Xaa locations
  Clone ID: MRT4577_17413C.1.pep
ISDDMLSISNDRDXKVVKLGVMSLLAVFKDVIPSYRIRQLTEXELAVEVSKEVKKTRYYEYTLIRCYKAYLQKLISLEKQPYFYTVAVRCMCALLDTAPHFNFRESLLASVVKNLSSSDDVVRKMCCEAIRSLFINEGKHRGEATIEAVRLIADHVKLNDCQLHPDSIEVFLSLRFDEDIGKDEIQEEKVKPKRNKRWQKNQEVPKQLPVNDKKKTRQELISKARKEVDADLRAVSFTLDPKERKGIQKETLSALFETYFRILKHSMAASNSREWCKCQDKY

SEQ ID NO: 265939 - protein, 663 aa, Zea mays
  unsure (1)..(663): unsure at all Xaa locations
  Clone ID: MRT4577_174140C.1.pep
SEQYAWNDLSSPRKLVVRIVDTPALREIKIDKISPWKPFLKMRQXQALIWIFSFSGGLNSRKQRFDESFGLRVFKIGYEVYADGLTRVLRICEHADNPKIEKIQWPIANIQFRISYVCIHLLDKDQNGENVQLPSTILAARLQHVSSDSVVTNRFKQVSVAIHSLNVDEKWEGASIGTILRRNKLQDATLDENILRMIFVLNSTDSSVKQIQYCAIILQPVDLKIDEETLMKLVPFWRASLAPSGTTSTQFYFRRFEVHPIKIIASFRPGGRRTTYSSAQEALRALLHSVIKVPEISNSAVELNGVLLNHALVTFRELLLKCAQHYSWYVLRAIYVTKGSKLLPPSFASIFDDSASSVLDVFFDPSDGSLNVPGLTIGMFKFISKNMKSGGFSGTKRYLGDLGKTVKTASSNALFAAVTEISDSVVRGAETNGLNGMVTGFHQGMLRLAMEPSVLGQAIMEGGPDRKIKLDHSPGLDELYIEGYLQAMLDVMYKQEYLRVRVIDDQVILKNLPPNSALINEIVDNVKSFLVSKALLKGDSSTVRPMRHLRNEPEWRIAPTVLTLCEHLFVSFAVRVLHREASKAIAGVMSRVKKPTGEEVEGDSPASGGVLCKRNRLWTVGRFAVSGMVAYVDGRLCRHIPNPIARRIVSGFLLSFIENRGNE

SEQ ID NO: 265940 - protein, 83 aa, Zea mays
  unsure (1)..(83): unsure at all Xaa locations
  Clone ID: MRT4577_174141C.1.pep
STRIISEEYIKWLTGYCKAYFYRLRVKLLEPVPVSTTRCSFRVNENTQNLQIHAGDIPXFLKKKKPEDAFCVVGITMIDLYPR

SEQ ID NO: 265941 - protein, 114 aa, Zea mays
  Clone ID: MRT4577_174142C.1.pep
GRDIELFFFVSAPLWERRFFPMCFRLGNSGVFQRTTFLTRGQFFFLFPQLGAWGPLKDCRSPLLFICPFQISPLEGLGLFFFLKKKKNLIKNIKKKKKKKIKKAKNKKKKKKSL

SEQ ID NO: 265942 - protein, 68 aa, Zea mays; identical to SEQ ID NO: 265937
  Clone ID: MRT4577_174143C.1.pep

SEQ ID NO: 265943 - protein, 68 aa, Zea mays; identical to SEQ ID NO: 265937
  Clone ID: MRT4577_174144C.1.pep

SEQ ID NO: 265944 - protein, 51 aa, Zea mays
  Clone ID: MRT4577_174145C.1.pep
MAAKGSDGICVAQPRSADPLNWGKAAEELSGSHLDAVKRMVEEYRRPVVVM

SEQ ID NO: 265945 - protein, 68 aa, Zea mays; identical to SEQ ID NO: 265937
  Clone ID: MRT4577_174146C.1.pep

SEQ ID NO: 265946 - protein, 42 aa, Zea mays
  Clone ID: MRT4577_174147C.1.pep
SILVYSMLETIKRTYLGAAWFVVNSATLWLMLGVHNSATPVA

SEQ ID NO: 265947 - protein, 103 aa, Zea mays
  unsure (1)..(103): unsure at all Xaa locations
  Clone ID: MRT4577_174148C.1.pep
MHVAMAXETKKGLVLLDFWMSPLGQRCLISLAEKGIAYEYSEQELLGGAKSDILLRSNPVHKKMHVLLHDGRTVCESLVILEYLEEGLPEVCPKLILDADYAR

SEQ ID NO: 265948 - protein, 97 aa, Zea mays
  Clone ID: MRT4577_174149C.1.pep
LMKNGGVMGQPIFFPKPNKKGGRGKKMGHFIPQTKHTIRGLVIEGSFSGEEGTFTPPFTAQPNGFYTGHFGPHTRPLLCLGRRGRALAPWSIALGGF

SEQ ID NO: 265949 - protein, 200 aa, Zea mays
  unsure (1)..(200): unsure at all Xaa locations
  Clone ID: MRT4577_17414C.1.pep
LEPAGTRWFARPPMVLDESLLHTVHAPSFXLGKGDYSSLNWHFSTAVKQALDTDRGAAXLSREEGXHNLLFVSXFNSYXGSLGDVLXALLANVASVGKKFHERLACEIPGGVCDFAAQGTLPARNRMDLDKSSWRELLRLYPLVKYQHGYVKNDLLLESHYAXVQLREGYMLVGYQSCATNEPRVFVDTVEDFMPDRFLE

SEQ ID NO: 265950 - protein, 97 aa, Zea mays
  unsure (1)..(97): unsure at all Xaa locations
  Clone ID: MRT4577_174150C.1.pep
VVKXXLXFXXRLXHXPRSXEQXFSRXFXXPFXXTTXXAKQTPRLERQRKXXDSXXLKYSGQVPXXSPSTLYKGDXKRAAERRAKGEGNSLCETAVES

SEQ ID NO: 265951 - protein, 66 aa, Zea mays
  Clone ID: MRT4577_174151C.1.pep
LHNAYSLLCWFPVRFLSSAVLFVEILRAVSVFHFILCFLGLKQLSHFGSSVETDCTMHQASTWTSK

SEQ ID NO: 265952 - protein, 59 aa, Zea mays
  Clone ID: MRT4577_174152C.1.pep
SSKRIHKELLCLQIRLGLECMDHFVCNYEVVIIVVLIIAASHIMCKGVDHMHMHPYRSR

SEQ ID NO: 265953 - protein, 52 aa, Zea mays
  Clone ID: MRT4577_174153C.1.pep
FSSNKSLGHSHCLHAGRYSSRIEFLSSTSNVTIPNVTLMNDLFIFVLYYFTK

SEQ ID NO: 265954 - protein, 86 aa, Zea mays
  Clone ID: MRT4577_174154C.1.pep
ARGRLPARRSGAIAAGSFKYALVVAGGGGTVEGMKWRESEGGTKKIPGRRWRRRRVVLFCFASGPLLIVALRPVPVVCPARPARGP

SEQ ID NO: 265955 - protein, 75 aa, Zea mays
  Clone ID: MRT4577_174155C.1.pep
IAGGRSRHTGRQAALLNQIVCDFPPEHPIISTFRPLREPLGHSPLQVALLHTSIFYSWMQVSINYKPHLHSYVHS

SEQ ID NO: 265956 - protein, 42 aa, Zea mays
  Clone ID: MRT4577_174156C.1.pep
TSAHSLLERSYIQKISPPMGGVVIQDVQERRARNQASLNRDY

SEQ ID NO: 265957 - protein, 106 aa, Zea mays
  unsure (1)..(106): unsure at all Xaa locations
  Clone ID: MRT4577_174157C.1.pep
PFNHLAALNSASCLQLQHLPFSQLCAAYPQQFVPFKQPTALNSPAYLQQQQLLPFSQLAGVSLFTSSRSPXLSQFRPDKFSITXSLFFIHQRVPYSQSAFLNPAAF

SEQ ID NO: 265958 - protein, 101 aa, Zea mays
  Clone ID: MRT4577_174158C.1.pep
VVHLVPVKCCWALQCILSPSYDRWWTQVVLIMDCIPLSSSRKRRTRGWLWECVLSLHPRRYVVLQKPSGAAWMSITSMVARAIVQFTLKRIPLSWVEHGCE

SEQ ID NO: 265959 - protein, 72 aa, Zea mays
  Clone ID: MRT4577_174159C.1.pep
PDGLGQPPCWVFVPASGTIPGLLQVLLAPMGLVGLPCLALGRCRICFVPGGCGFWAVLCVIPVLPSFFGASY

SEQ ID NO: 265960 - protein, 133 aa, Zea mays
  unsure (1)..(133): unsure at all Xaa locations
  Clone ID: MRT4577_17415C.1.pep
MLTLPGTLRRARAPPGLPPRRHLSRLLDRYGFVAPDSLTPAPREPHSDTADSAAAAKKRRAKKPPYRPPSSLDRGGRPPAHSDLPFDFRFSYTESTPAXKPIGLREPRYSPFGPGRLDRPWTGLCARAVDATL

SEQ ID NO: 265961 - protein, 32 aa, Zea mays
  Clone ID: MRT4577_174160C.1.pep
ILFLIFLIKATKQGAECITKIPNFNLNFQTAY

SEQ ID NO: 265962 - protein, 232 aa, Zea mays
  Clone ID: MRT4577_174161C.1.pep
AFSVAWWAASLQPKAITSRARERDGARRRGIVSSEQGQHSRAATHQGAARRLLGVAEPDAGRERIAVAVSIAGRRELLRGLRVRVRVRVRARARRQAAPAQGVLLQLLPAQVLQLAGAGRPPDVRPRVRPRVRARVGGRVGHAHAALMHSLWVSPASSPIHKAAGPARAAARFLEGGGAAAAAAAWGTTVAACEEAPGSAAWPGSFRLRAQHSEHERAFETEQSKIDLDLRL

SEQ ID NO: 265963 - protein, 91 aa, Zea mays
  unsure (1)..(91): unsure at all Xaa locations
  Clone ID: MRT4577_174162C.1.pep
PLSWEKDGGTVRQDLAQLMNSSGSHKDLAGKYRQILEKAIQLSGAEQLEALKXFVEAMVNENVSLVISRQLLTDFCTHLPNLPDSTAKEIY

SEQ ID NO: 265964 - protein, 217 aa, Zea mays
  Clone ID: MRT4577_174163C.1.pep
MEQGDEASSVTKESPEQQLTRDREQQHDAGVAWLNLTLRAGESPSPDAAASCSAESGSGSGSGSGSGPEPTAKPSAAPHKVFSCNFCLRKFFSSQALGGHQNAHKRERSAAKRSYHAHRMIVGLPLHAHAALMHSLRVSPASSPIHKAAGPARAAARFLEGGGAAAAAAAWGTTVAACEEAPGSAAWPGSFRLRAQHSEHERAFETEQSKIDLDLRL

SEQ ID NO: 265965 - protein, 562 aa, Zea mays
  unsure (1)..(562): unsure at all Xaa locations
  Clone ID: MRT4577_174164C.1.pep
MVTATTTPPQCWRGLPALARAPPPLSSPLRPRAVAAAAPIYPLRRRIAITTTRGRRGTLDCSPRXFCLLCSCRCTLETAGPGFDPLGLYEEGSNSLSRSPLSTFFGIMAPVFGSSSGGGASREKASGRGAAAAIEDSSIDIGDFFKGPLPGKFLKLLGFLALSRLGVYIPLGGVNREAFAGNLDQNSLLGTLDSFSGGGIGRLGICSLGIVPFINAQIVFQLLAQLYPKLQDLQRKEGEAGRKKVLQYTRYASVGFAIVQAIGQVLYLRPYVNDFSTEWVLTSVTLLTLGSVFTTFIGERISDLKLGNGTSLLIFTSIISYLPASFGRTVAQAFQDGNYVGLLTIILSFLLLVLGIVYVQEAERKIPLNYASRYSSRTGELQRSAYLPFKVNSSGVMPIIFSTSSLALPGTLARFSGLDFLKKAAIALNPGGALYLPTNVLLIAFFNYYYTFLQLDPDDLSEQLKRQGASIPLVRPGKSTAAYIKTVLSRISVLGSAFLAVLAAGPSLVEQTSHLTAFRGFAGTSVLILVGCATDTARKVQAEIISQKYKNIEFYDVNRFGQ

SEQ ID NO: 265966 - protein, 122 aa, Zea mays
  Clone ID: MRT4577_174165C.1.pep
GRRQSSRALCASWYVGCCGPEQRECHPRRWSEASTGWYSEEATGMGGQVVGVVRPGLLGQWNAADVQMCNRRAHGSTGQVVNGGSVAGRACWILRWQTIGCWQMQRRRCMRRRRWRAATAAA

SEQ ID NO: 265967 - protein, 141 aa, Zea mays
  Clone ID: MRT4577_174166C.1.pep
KTVYRHRQTKASLGPIHHTTNGRRGSAPPPHRHHQRAVGALSPPFHPEHASIAAARRACASLLAQTRQQGLESPPNDARGHAGRGLRPALGSTAAERPSCAQPAGSARCPDACPGRQVRAAAGWPAQLTGRAAHGRAGPGS

SEQ ID NO: 265968 - protein, 63 aa, Zea mays
  Clone ID: MRT4577_174167C.1.pep
VSGRARSALSRPRFFLYFDKYQHKDETIRTNNLAELSCERPNLADYLQTVHIWIRVFRRSSTH

SEQ ID NO: 265969 - protein, 94 aa, Zea mays
  Clone ID: MRT4577_174168C.1.pep
LDLLVQRCSSTSESASVVAQQPHSGASKMCLVVTCRRGMPTVRARFSRSETAASTVSVSISGPFLNCMVEGAAILHRSRPLCPMGFLSWRFGGQ

SEQ ID NO: 265970 - protein, 88 aa, Zea mays
  unsure (1)..(88): unsure at all Xaa locations
  Clone ID: MRT4577_174169C.1.pep
FXCFSWXXARRGRXGCAPRRCRCRRRRXPSCRRSSWRGWRRPARRRPCXXAGPSPPAGPSCGCSRPSSPXGPSPPWQTPETPLLAAGG

SEQ ID NO: 265971 - protein, 61 aa, Zea mays
  Clone ID: MRT4577_17416C.1.pep
FIDTAGLYRSARAPTPSSVMVGVVPGGGGGPHHVSELRLGGPRDGEAPPTVVEAQLVLHPL

SEQ ID NO: 265972 - protein, 68 aa, Zea mays
  Clone ID: MRT4577_174170C.1.pep
WYLSSRLVYSDLLMAARWCIGTAAREATRIGASEHLTTKTVALACCCAPWIQSMLGLSTQALLQPLRM

SEQ ID NO: 265973 - protein, 90 aa, Zea mays
  Clone ID: MRT4577_174171C.1.pep
PPPARQASPPSFTWRHAKQPAPGRKITHGGSRRTSPPHARRGGPLPPGPGRWSDHAGCPPPACCCWLRSTVLISYSGPKGPEGKGRGRVG

SEQ ID NO: 265974 - protein, 60 aa, Zea mays
  Clone ID: MRT4577_174172C.1.pep
LVMPCAFVGLRVAVGVGDGSAAARGELRLSALSYVEVVPGQQRRLGVWGCGRRRARRLES

SEQ ID NO: 265975 - protein, 234 aa, Zea mays
  unsure (1)..(234): unsure at all Xaa locations
  Clone ID: MRT4577_174173C.1.pep
PFVLGFQLNPTPMDIXXGLIIPSPDDSKIFLSYYNNSLVRDGTSDRVVNFGAVAKILGGLKPNYGSSAPKVMFYSARGPDPEDNTLANADILKPNVVAPGSSIWGAWSSRGLDSAEFTGESFAMLSGTSMAAPHIAGLAALIKQKFPSFSPAAIGSALSTTTTLSDRQGNPIMSQRTYSNPDSTQTPATPFDMGNGFANATAALDPGLIFDCSYDDYLSFLCGINGSAPVVANY

SEQ ID NO: 265976 - protein, 110 aa, Zea mays
  Clone ID: MRT4577_174174C.1.pep
SNWSLGGQMLGRRRTRYPSLDAFVSSSLRRRLHPQNASEQTEGVDWMATDVVPFALAVARRRLCRSLRVSHVVTALGGPGGIRPIVTGPARVSAFEPRLNSLYRNDCLNL

SEQ ID NO: 265977 - protein, 109 aa, Zea mays
  Clone ID: MRT4577_174175C.1.pep
KRLVQPLAPPPVPPRRQLLLLILLIEFNAPRPKSNNPPSSLPKTRKKTFQIEFKPGNPPKSFCSPEIENQLSKLLIVNLLIQSKTNSSSQIPKKKKKKKKKKKKKKTQT

SEQ ID NO: 265978 - protein, 65 aa, Zea mays
  unsure (1)..(65): unsure at all Xaa locations
  Clone ID: MRT4577_174176C.1.pep
KKKRGKKSLSINEFFKPPXGERFYNPIARAPGKGPWGFPGGFNGGYRGPNSAPTIKNQAQFPALA

SEQ ID NO: 265979 - protein, 152 aa, Zea mays
  Clone ID: MRT4577_174177C.1.pep
MSTPSRKRLMRDFKRLMQDPPAGISGAPQDNNIMLWNAVIFGPDDSPWDGGTFKLTLQFNEEYPNKPPTVRFISRMFHPNIYADGSICLDILQNQWSPIYDVAAILTSIQSLLCDPNPNSPANSEAARMFSENKREYNRKVREIVEQSWTAD

SEQ ID NO: 265980 - protein, 128 aa, Zea mays
  unsure (1)..(128): unsure at all Xaa locations
  Clone ID: MRT4577_174178C.1.pep
MARAVVSAKGGAVAGKKKGSVSFSIDCTKPVYDKIMEVASLEKFLQERIKVAGGEAGNLGDSVTISREKTKVTVTSDGPFAKRDLNYLIKNYCVKRNGRDWLRAVAANYXRNVYELRYFNIADNEGQE

SEQ ID NO: 265981 - protein, 150 aa, Zea mays
  Clone ID: MRT4577_174179C.1.pep
MSVVGFDLGNESCIVAVARQRGIDVVLNEESKRETPAIVCFGDKQRFIGTAGAASSTMNPKNSISQIKRLLGRKYSDPEVQRDLASFPFRVTEGPDGFPLVHVRYLGEERTFTSTQLLAMVLSKFEGIAEGNLNAAVVDCCIGIPGYFTI

SEQ ID NO: 265982 - protein, 93 aa, Zea mays
  unsure (1)..(93): unsure at all Xaa locations
  Clone ID: MRT4577_17417C.1.pep
WGVRCEVLVSGMEESSLVLDLILLVGRCKTYWGLVGXAGGPLFLLLCFLARRPGACLPCCRASYRGTRCLDRRICLGPPPAPYSGPVLRWRTR

SEQ ID NO: 265983 - protein, 138 aa, Zea mays
  Clone ID: MRT4577_174180C.1.pep
MARGVVSAKGGAVAGKKKGSVSFTIDCTKPVEDKIMEVASLEKFLQERIKVAGGKAGNLGDSVTISREKTKVTVTSDGPFSKSGCRRRWRDSASFEPPRRSSCPGPCSKGAGMLQAPAPTDWRAEGSVQADLKSGCTN

SEQ ID NO: 265984 - protein, 53 aa, Zea mays
  Clone ID: MRT4577_174181C.1.pep
SLWFFFEQQGLHSTIQCLVQNALLYDIFMNPHEKLVLGLGFFSHLIISHLSRN

SEQ ID NO: 265985 - protein, 330 aa, Zea mays
  unsure (1)..(330): unsure at all Xaa locations
  Clone ID: MRT4577_174182C.1.pep
MSVVGFDLGNESCIVAVARQRGIDVVLNEESKRETPAIVCFGDKQRFIGTAGAASSTMNPKNSISQIKRLLGRKFSDPELQRDLASFPFRVTEGPDGFPLVHVRYLGEERTFTSTQLLAMVLSNLKGIAEGNLNAAVVDCCIGIPVYFTDLQRRAVLDAATIAGLRPLRLFHETTATALAYGIYKTDLPENDQLNVAFVDVGHASMQVSVVGYRKGQLKMLSHTYDRSLGGRDFDEALFKHFAAKFKEEYKIDVYQNARACIRLRVACEKLKKVLSANPEAPLNIECLMDEKDVRGFIKREEFEQISASVLERXEXPLEKALXEAGLTTE

SEQ ID NO: 265986 - protein, 72 aa, Zea mays
  unsure (1)..(72): unsure at all Xaa locations
  Clone ID: MRT4577_174183C.1.pep
VSCPCQEPSCVSLRLVSDGLVSMSKICYCRAAQHTLCVCLRLVSVGLVFGCXGLLCSCGLPLYIIAASDVFF

SEQ ID NO: 265987 - protein, 118 aa, Zea mays
  unsure (1)..(118): unsure at all Xaa locations
  Clone ID: MRT4577_174184C.1.pep
MQSYSIAIPKPKLMAVAVQLQHWDCQNPAETNLNGLDAHFAFWSCSNKEQADSDXPLXHMLNLNGDWHSPCTLTSSAVVVTLTLTVTVAIAIALAPVAFFPFFLVMVTCFGCPALALK

SEQ ID NO: 265988 - protein, 216 aa, Zea mays
  Clone ID: MRT4577_174185C.1.pep
MEASSKAALLLLMVIVGCLTIPAHSRNVVRFCKCQKQTCKKGAIFEAVCYCCPGGPSSHGGPAVGARAAGTQLALQACRVEDVPAAQPGPPHLSRHMSAWDEASAASPSSASCSSETGLGNAVIGTNSSALATAGTTTGSVAAPSSALLAGDGFAGLEATADWLECPVCRTQHRSQWCELAAPSPKWFRRPCLLPAMKDSMRNLSGVRGHVPHPSN

SEQ ID NO: 265989 - protein, 103 aa, Zea mays
  Clone ID: MRT4577_174186C.1.pep
NTFMAMAPTHETRLRKRTDQTEQTGVNSKLIKILNLARGYRFFQKQGLAAMMERKLKADQGTLLRIWLFLTFLGAASSLLAKDHFPQIFKDVIFSTSRCSRGS

SEQ ID NO: 265990 - protein, 54 aa, Zea mays
  Clone ID: MRT4577_174187C.1.pep
HHLSPFRAKHKHPPPRQQGHRLPSHGARDGVGRYDEDVLPTGHGAQAHHRVEPP

SEQ ID NO: 265991 - protein, 368 aa, Zea mays
  Clone ID: MRT4577_174188C.1.pep
MSPVASKGVVMDGAVAVAAVAAAVLLCLHLPAVARGQLQVGFYNTSCPNAESLVRQAVASAFANDSGIAAGLIRLHFHDCFVRGCDASVLLTSANNTAERDAPPNNPSLHGFQVIDAAKAAVEQSCPQTVSCADIVAFAARDSINLTGNLPYQVPSGRRDGNVSLDTEANSNLPAPTFNASQLVASFAAKNLTDEEMVILSGAHTVGRSFCTSFLARIYNGSTPIVDSGLSAGYATLLRALCPSNANSSTPTTTVIDPSTPAVLDNNYYKLLPLNLGLFFSDNQLRVNSTLNTSVNSFAANETLWKEKFVAAMVKMGNIQVLTGTQGQIRLNCSIVNNGSSSVGIQQMTVPNSYSGATASLDDEIATS

SEQ ID NO: 265992 - protein, 79 aa, Zea mays
  Clone ID: MRT4577_174189C.1.pep
YLTGILGFELKEHWNTVSKLDAFILSQQAAHRSSSTSHRRQGPRLAQQGLVSRYIHLGSPSRIIRPFPTNNIIRSISLS

SEQ ID NO: 265993 - protein, 65 aa, Zea mays
  Clone ID: MRT4577_17418C.1.pep
HKLGYHGRRGSSCISICLSKWTIMKSSQGYLLAQMAYSWCHHMAFPALVGDQVDDHYPDMLLEPW

SEQ ID NO: 265994 - protein, 66 aa, Zea mays
  Clone ID: MRT4577_174190C.1.pep
LSGEQEPHADLEVVDSHHQCTPRLSGRLIPFGFDQLQHGGAHAQSDRVMGTLPDRERRGVRRRCDA

SEQ ID NO: 265995 - protein, 98 aa, Zea mays
  Clone ID: MRT4577_174191C.1.pep
GPAPGADGYLMGPDYYEIAGGFWPFPLMGFPCPWPKALEPRRCPSAVIQRKAARFLVRFLKGGLCFAPLPPRSYYFSCFMGNRSPFCERQSKVCVAMV

SEQ ID NO: 265996 - protein, 92 aa, Zea mays
  unsure (1)..(92): unsure at all Xaa locations
  Clone ID: MRT4577_174192C.1.pep
LIHDVLGVRTTLATKQLAXLLTLVPLVVSATDAHIISHHSLTHMANISQDLPPATTMSIEHTIKQAYMLQLSLVISDTQQPTAHALQPSFAH

SEQ ID NO: 265997 - protein, 41 aa, Zea mays
  Clone ID: MRT4577_174193C.1.pep
HSLLASWIHYLSLPWAASDGTGSWYGHLSLFHRTLHYLTKT

SEQ ID NO: 265998 - protein, 72 aa, Zea mays
  unsure (1)..(72): unsure at all Xaa locations
  Clone ID: MRT4577_174194C.1.pep
KLNDTFFFNFANAIDLTSALKEVNGKYVGNWPIKLHKCTWKNEIDLEALEKXKYPTTEENETAEKSVFTSEN

SEQ ID NO: 265999 - protein, 63 aa, Zea mays
  Clone ID: MRT4577_174195C.1.pep
MQPIRRRHRGFALLCLSAALLAAATLLPGAAVAEGVTPSEARRLRDEVVRALRSAAPNSSTYC

SEQ ID NO: 266000 - protein, 92 aa, Zea mays
  unsure (1)..(92): unsure at all Xaa locations
  Clone ID: MRT4577_174196C.1.pep
NAGGQVPPGPRGGACKHAVGGGGRRKNRAGPTQGGGDQAGFAPAHPRRVSPKXXSPPPPTQGGVFGLFPAPMSHKGGFLSSNQGGICRPYNP

SEQ ID NO: 266001 - protein, 56 aa, Zea mays
  Clone ID: MRT4577_174197C.1.pep
VVRLKNPHVQQLSAISPPQAILDNEEVGGSIEGADLAIELLPKGGLAGEHPPIVNS

SEQ ID NO: 266002 - protein, 121 aa, Zea mays
  unsure (1)..(121): unsure at all Xaa locations
  Clone ID: MRT4577_174198C.1.pep
EAQRDDKKAPARKHACVHYRQHKDMNELHLANTTLMSFTNEKEELMNSDTTSTTLIDGYKMPDTFRFSFRAPTSYTHDPTKAKCXSRVYHSNNDTEGSGSCTVLXKDSKTGLNVSTATEVL

SEQ ID NO: 266003 - protein, 98 aa, Zea mays
  unsure (1)..(98): unsure at all Xaa locations
  Clone ID: MRT4577_174199C.1.pep
KQERQQVKKRKTREEPRXRERVKKRDRIKPSTSGGLXRRXXKNRQENQRRQXKXTTKGQGPTIXKGKKKTRLEKHEMXGIXXTPPPPHKXXREXKKLK

SEQ ID NO: 266004 - protein, 89 aa, Zea mays
  Clone ID: MRT4577_17419C.1.pep
SAGKTGKEGQHGPTGSEGNDTRQGKRSATPRLERKPKPKTQTRLTPMGQRQTARHRRTAQNKAAHTQTGGTRGPKKKERALEPRTHTCW

SEQ ID NO: 266005 - protein, 38 aa, Zea mays
  Clone ID: MRT4577_1741C.1.pep
YRAGGLTWFKKKKKKKKKKKKKKKKKKKKKIKKKKKKR

SEQ ID NO: 266006 - protein, 161 aa, Zea mays
  unsure (1)..(161): unsure at all Xaa locations
  Clone ID: MRT4577_174200C.1.pep
AFEINDAGWVVYEXNCGHRPCQGNIQTLTGXDLDIYXVHAWLVSSPCHSYTRQGLHKHADHARAFSFITITNLFPDSVYPTQMLFVENAVGCEAYDTHDQVLEALPCLNANTLELILSALQYGDPYSRPRYFCFAKREPVLXSYAFHNTRLFHTAMSLSLT

SEQ ID NO: 266007 - protein, 157 aa, Zea mays
  unsure (1)..(157): unsure at all Xaa locations
  Clone ID: MRT4577_174201C.1.pep
GLQALKRLHPRLNDFYGAIXRXLIDRPFTTILLNKTLASLDLTGLPENLVCXVIELANGSFGGCLPTSIDNMCGTLNEILLINDGXDCCVLPAVGSLQEVTVFDGSFNSLVCPLPQQVAVMRKVEQLDVAHNRLLGCVPEAICDLPRLKNLTIAYNF

SEQ ID NO: 266008 - protein, 231 aa, Zea mays
  unsure (1)..(231): unsure at all Xaa locations
  Clone ID: MRT4577_174202C.1.pep
DAWVESRWCKKGFRPVRFYVEDVRVHSLADXGDDEAPELRLTVTGPPPPPLSVVVVVVAREGEDDGDDSGWESDSSVASCPATLSSEERRRPVGSLPRPVSLNAFDIISFSRGFNLSGLFEERGNEVRFVSAHPMQTIITKLEEIAKVKSFAVRRKDWRVSLEGTRESEKGPLTIGAEVFELTPSLVVVEVRMKAGDRQEYEDFCERELKPXMQHLVHHTASVPDIPSDTD

SEQ ID NO: 266009 - protein, 142 aa, Zea mays
  Clone ID: MRT4577_174203C.1.pep
VQVYPWAVAAHELEVPLQTFRTWRSWADGPFVFNTRPLSPHDACARPAMFFLGRVRNGTARTPVTEYARRAGAGAAPSKECDKASFRAASTVHTVRVIAPRMSESDWRRAPRRQCCKTKRTRWGSVLEVRIRRCGRGELTSP

SEQ ID NO: 266010 - protein, 58 aa, Zea mays
  Clone ID: MRT4577_174204C.1.pep
GLELHIQHIFNRPLRLYIFSMGTKKKNILLKCISSMSNSIYNLFDRILTLVLLGQPDP

SEQ ID NO: 266011 - protein, 71 aa, Zea mays
  Clone ID: MRT4577_174205C.1.pep
VGRGVSHGIVCPARVARWYLLVLARPSVRVRNKPVGQVGPDVGLVHRGQLPLDPVVGLDVPFNWSLCLACG

SEQ ID NO: 266012 - protein, 254 aa, Zea mays
  Clone ID: MRT4577_174206C.1.pep
MLPTTASKGRGASRSAPPLFGPYLRRIVKWQQMDIEYTFWQMVHLCTSPKVVYQHTKYHKQTKNQWARDDPAFVVILILFLVFATSAYCAAYGESASHAALTITSVVFLHFLFAGIVLATLCWFLTNSYLREEPNSHVVEQRVECAHEILGRLYAFDVHCNSFFPAFVILYVVQYFLSPLLVAHGFFPALLSNLLFVVAISYYHYLNFLGYDVLPFLDRTTFFLYPIGLVIILSPLMILIGFNPTRYFLSLYFG

SEQ ID NO: 266013 - protein, 60 aa, Zea mays
  unsure (1)..(60): unsure at all Xaa locations
  Clone ID: MRT4577_174207C.1.pep
LLAIDSCKKKKKKKKKKKKKKKKKKKKKRKEKKKKKRXAERGDQANPTELASPNITLEAL

SEQ ID NO: 266014 - protein, 207 aa, Zea mays
  unsure (1)..(207): unsure at all Xaa locations
  Clone ID: MRT4577_174208C.1.pep
AAQRRGRGNPGPLRLMDVRPRTLAYFVVASFALVSVTFVVYTGGWWEEVEGEGAATLRKVMRSVTPLPAPRMMDLPQFQNNHKESLYWGTYRPNVYLGIRARTPLSLIAGLMWIGLKNGQYFLRHVCQDSDELRTFGWTAHNGRDYGRQVLVDHGLFLTTSFLKEKGESSGYGGDWAVRLDANNERSGLSDAEEXTTHFFLYADETE

SEQ ID NO: 266015 - protein, 47 aa, Zea mays
  Clone ID: MRT4577_174209C.1.pep
AFERIVSSCYVLRLVSIIMPNYNMHGLLQFACTYRQCENNLDMMCLM

SEQ ID NO: 266016 - protein, 94 aa, Zea mays
  Clone ID: MRT4577_17420C.1.pep
EAEGRAREGVDRCVWIRIITGIDRYYPSRRGFMRVEIVRLPRRAVGSGVSECACSEYSAGPHITLTAPAWWCWGGMRHRPPPLWKGAPGRLRGT

SEQ ID NO: 266017 - protein, 53 aa, Zea mays
  Clone ID: MRT4577_174210C.1.pep
ITRRRPSNDISDSTYSLEVLFSSETHGNKFFSMMITKKIANFMLHNALSYHLE

SEQ ID NO: 266018 - protein, 75 aa, Zea mays
  Clone ID: MRT4577_174211C.1.pep
TSCLSRGNTRNSPAEGARPDHCPLLGDVTGNTERIRGGSTAPLGEGSREEAPLPDGRGLGLLLVARGPLRPPDEG

SEQ ID NO: 266019 - protein, 35 aa, Zea mays
  Clone ID: MRT4577_174212C.1.pep
DRLVACNRPCLSPPLNDWSRWVSREALVILALPLH

SEQ ID NO: 266020 - protein, 82 aa, Zea mays
  Clone ID: MRT4577_174213C.1.pep
MAGAVAVWLLGAFAKSGRQTEPAQAAADAEDARRHRGGDGVGAVARVSNGRRVQEKRRRDSGALSGSEETVVCMLMDLYAPA

SEQ ID NO: 266021 - protein, 83 aa, Zea mays
  Clone ID: MRT4577_174214C.1.pep
MAGAVAVWLLGAFAKSGRLPEAPAQAAADAEDARRHRGDDGVGAVARVSNGRRVQEKRRRDSGALSGSEETVVCMLMDLYAPA

SEQ ID NO: 266022 - protein, 55 aa, Zea mays
  unsure (1)..(55): unsure at all Xaa locations
  Clone ID: MRT4577_174215C.1.pep
VXCAXVPXGWRSXXRLAPXXXSSSLPSXXXFPRLXXXXRXAXLPWPPGRDGCVSV

SEQ ID NO: 266023 - protein, 114 aa, Zea mays
  Clone ID: MRT4577_174216C.1.pep
MSACVLGTLLAPHVDPTATRKAALAASMADPSSFLNNTVGLLSGATYGHRDTLVDGVPYIAGLAPLPNDLSSAPQRPRRPPSGFTLAARAPMGPVVDSALVAAIAMIQIVVAAS

SEQ ID NO: 266024 - protein, 91 aa, Zea mays
  Clone ID: MRT4577_174217C.1.pep
VRLQVPVRNSRVDPRVRPTGTPKPPGVQMDQPCCRALYDFEPENEGELGFKEGDIITLTNQIDENWYEGMLHGQSGFFPINYVEILVALPH

SEQ ID NO: 266025 - protein, 44 aa, Zea mays
  unsure (1)..(44): unsure at all Xaa locations
  Clone ID: MRT4577_174218C.1.pep
LXESHYYPNYFSLLPLIPTGRVYIVKSSGSTIKPPQAILWYLST

SEQ ID NO: 266026 - protein, 47 aa, Zea mays
  Clone ID: MRT4577_174219C.1.pep
ENKKIIPLSLGGLYAACFPSLGKLNQLHLLKGGPPLFALGRGRFSLS

SEQ ID NO: 266027 - protein, 92 aa, Zea mays
  Clone ID: MRT4577_17421C.1.pep
GCRKIVVGGAAGVLIQGAIEDLFGSVGVNLIVYGGSLPRFRNADEAKGRRCFLVFRWGGIGFGSISYNFLGGWVGGVKEIFGIIFFHSILWN

SEQ ID NO: 266028 - protein, 104 aa, Zea mays
  unsure (1)..(104): unsure at all Xaa locations
  Clone ID: MRT4577_174220C.1.pep
AFRVATVCGSLVHLTARFQKAAXYEDIXKAMKAGSEGTLSRFMGSSXEDQTSTTSLGDTTSSFFGAYAGSTLNDHLSELISXYDNEWRYNTRVGYLIRHMVKTL

SEQ ID NO: 266029 - protein, 41 aa, Zea mays
  Clone ID: MRT4577_174221C.1.pep
LGEVVLMIGECFYRLLSILAVLSNVHRIVRTNGSKYQKTFR

SEQ ID NO: 266030 - protein, 80 aa, Zea mays
  Clone ID: MRT4577_174222C.1.pep
KWGWSITEYYMGITPPGAIWGFKRKQSDWSHFLFDKAFKETHGANFKQLLFGQNTPGKTTTCLMAHCFFINKGPRGHPGF

SEQ ID NO: 266031 - protein, 92 aa, Zea mays
  Clone ID: MRT4577_174223C.1.pep
GTYFHSGSECTHGVFRILCFVAAVGDGLGPLAIGRVLCECEGAQCSVAALAQQRRRFGHFVCQVDDSSLDPKVQGRLLKWIYRFKVGSAHNF

SEQ ID NO: 266032 - protein, 49 aa, Zea mays
  unsure (1)..(49): unsure at all Xaa locations
  Clone ID: MRT4577_174224C.1.pep
XLVFDDLSRRKFYCGQHIVLIGILEELEHEVXXXXXXXXXXXXXXXKKK

SEQ ID NO: 266033 - protein, 140 aa, Zea mays
  Clone ID: MRT4577_174225C.1.pep
MTSPWCLSAPPAAPPVAAAPGALGFSASASTLARVPVPGSRRRRWNALVVCAAPDGEKITKRSPLDFPIEWERPKPGRRPDIFPKFSPMKTPLPHPLPADDPLDDDEEEEEEQAPPQEEPQEDDPDKEEPEEDDPDKPTE

SEQ ID NO: 266034 - protein, 157 aa, Zea mays
  unsure (1)..(157): unsure at all Xaa locations
  Clone ID: MRT4577_174226C.1.pep
YKLLFXPHYRDTMNINSLARKALVNPDGIIEKTFLWGRYSMEMSAVIYKDWVFTDQALPNDLVKKEVAVKDPSAPHGVRLLIEDYPYASXGLEIWDAIKSWVQEYVSFYYKSDEELQKDPELQAWWKELVEVGHGDLKDKPWWQKMQTREELVEASA

SEQ ID NO: 266035 - protein, 59 aa, Zea mays
  Clone ID: MRT4577_174227C.1.pep
PSAVALEFYSGSLENPWLFALPPKFKYRVRVSASPTSQSFTGYILISFCGSSFVGHEST

SEQ ID NO: 266036 - protein, 141 aa, Zea mays
  Clone ID: MRT4577_174228C.1.pep
MAFPWCLSAPAAVPPVAPAPGAFGVSASVTALARVPVPAGRRRRWSTLVVCAAPDEEKITKRSPLDFPIEWERPKPGRRPDIFPKFSPMKTPLPHPLPADDPLDDDQEEEEEEQPPPQEEPQEDDPDKEEPEEDDPDKPTE

SEQ ID NO: 266037 - protein, 140 aa, Zea mays
  unsure (1)..(140): unsure at all Xaa locations
  Clone ID: MRT4577_174229C.1.pep
MAFPWCLSAPPAVPPVAAAPGALGVSASASALARVPVLAGRRRRWSTLVVCAAPDEEKITKRSPLDFPIEWERPKPGRRPDIFPKFSPMKTPLPHPLPADDPLDDDEEERXEQAPPQEEPQEDDPDTEEPEEDDPDKPTE

SEQ ID NO: 266038 - protein, 146 aa, Zea mays
  Clone ID: MRT4577_17422C.1.pep
MAGRKGGDRKKAVTRSVKAGLQFPVGRIGRYLKKGRYAQRVGSGAPVYLAAVLEYLAAEVLELAGNAAKDNKKTRIIPRHLLLAVRNDQELGRLLAGVTIAHGGVIPNINSVLLPKKSPAAAEKEAKSPKKKTTTKSPKKKVAAKE

SEQ ID NO: 266039 - protein, 131 aa, Zea mays
  Clone ID: MRT4577_174230C.1.pep
MTSPWCLSAPPAALGFSASASTLARVPVPGSRRRRWNALVVCAAPDEEKITKRSPLDFPIEWERPKPGRRPDIFPKFSPMKTPLPHPLPADDPLDDDEEEEEEQAPPQGEPQEDDPDKEEPEEDDPDKPTE

SEQ ID NO: 266040 - protein, 90 aa, Zea mays
  Clone ID: MRT4577_174231C.1.pep
HPMSLGEISWGQGGTPFPCFYCFLTCRFFVRACSVFFNPYVLEGIDKLWGGFFLLTPPNPNVLGHIGPCPYVGPFITCNLEILLAPLLII

SEQ ID NO: 266041 - protein, 308 aa, Zea mays
  Clone ID: MRT4577_174232C.1.pep
MQRAALVGSPLVPVGPLAQLAVRRRCRFHGGVRVRSSTGKDGTGTGTGGGSEGGDGAGAAASWLSSAVGEKVDELLRREENRALLEGVEDAERRVERARAALADIERQEAAARLAREEVRRLEKRRDEIAESQRELLQAREMIDEAQRSLSSSLDEGSFGDMSSGDVDEDNERIESVKAAAVSSVVGVLASLPISFYEVEDLPQLFLRSSIVFISCALFGVTFRYAVRRDLDNIQLKTGAPAAFAFVRGLALLESGRTFELSTDTLISVTLDAAVSVVENIFIFLPAAVALDYCFKMRFLSPFPRRKQ

SEQ ID NO: 266042 - protein, 120 aa, Zea mays
  Clone ID: MRT4577_174233C.1.pep
CSLVFLQMPLPPTFSRNAHKLLYTFLFSPHLLTPVCFVCEKPPFLTSMISTRDFRCGIFLFNPLFLSQKKYPFLKNILLLGFFGHKKKGDHNNQQHFVLNNFLFFFLKKSIFFYTNQLAG

SEQ ID NO: 266043 - protein, 39 aa, Zea mays
  Clone ID: MRT4577_174234C.1.pep
KGNKVALPLFTISAWSPPTLTSLGMNKKSFLWWCINQGC

SEQ ID NO: 266044 - protein, 102 aa, Zea mays
  Clone ID: MRT4577_174235C.1.pep
GRDLSKLVEMDGGRDGMLEYIHFFGCVCSWRGVNLVCSHSLPSVNWLVSETCTSVGYRGSSYIQSFALRQLGLFCEPIMMELYLLLISTYLSTYLLSNSCVC

SEQ ID NO: 266045 - protein, 90 aa, Zea mays
  Clone ID: MRT4577_174236C.1.pep
IASQLTFTQSYIRNALGSKNVLSPCPLESFAGDTCTSVVKRVPVQSSMFSRRVSFILQAMDLKGGGQKKIKNGRIQSRFSVNVSIVIIHD

SEQ ID NO: 266046 - protein, 90 aa, Zea mays
  Clone ID: MRT4577_174237C.1.pep
IVNIYHMRMLLLHCRFGSLLWNRRELFPLPVKQKRREKVSSIIVVSNAQACFPFTRSSFVLAEIEGKCHASPEELVDSSHAGLSGFTCRR

SEQ ID NO: 266047 - protein, 192 aa, Zea mays
  Clone ID: MRT4577_174238C.1.pep
MSSSSSFPTSRFPFAAGARAPGGRGGAGGGGSSVRPWGSTGGTSVSSSGKRIQKELLDLNASDCSAGPKGDNLYHWLSTIFGPQGSPYERGIFFLDIVFPPDYPFKPPMILVTFKTRIYHCNIDSTRKVHLDILKDGWSPAFTISKVLLAIKDIINNPDPYTPLVMSISRQYLTDRAKHDETAAEWTMRFAR

SEQ ID NO: 266048 - protein, 89 aa, Zea mays
  Clone ID: MRT4577_174239C.1.pep
RYSALFYRNPLCTGCICNLNYSDPDRFLYEPPTTTAATVDLHTRAARAAPPPTGDASAVHEPHETAQHAIKLFSGLVLLLLQLLGQELL

SEQ ID NO: 266049 - protein, 60 aa, Zea mays
  Clone ID: MRT4577_17423C.1.pep
YNFPFSFFHNKQTREGSYSNLHYPLIISSILNNTLRPPVPDYYDPEFMSLIKQCSSTQPS

SEQ ID NO: 266050 - protein, 55 aa, Zea mays
  Clone ID: MRT4577_174240C.1.pep
PPFFIFCLVAPSSIQPHFPALVYNVVSTFKGITGIYRTCVNCHTIFRILHLHHGI

SEQ ID NO: 266051 - protein, 202 aa, Zea mays
  unsure (1)..(202): unsure at all Xaa locations
  Clone ID: MRT4577_174241C.1.pep
GYLEAGRGGHVLVLFLPHLPLPLRRRRQRQGPRRQRRCRWRREQRAAVGIEWSTGGTSVSSSGKRIQKELLDLNASDCSAGPKGDNLYRWLRAPXGSPYERGIFFLDIVFPPDYPFKPPMVTFKTRIXYHCNIDSTGKVHLDILKDGWSPAFTISKVLLAIKDIINNPDPYTPLVMSISRQYVTDRAKHDETAAEWTMRFAR

SEQ ID NO: 266052 - protein, 74 aa, Zea mays
  unsure (1)..(74): unsure at all Xaa locations
  Clone ID: MRT4577_174242C.1.pep
GSFDPLGLPDDPXGFGGLKVKEIKNGPLPMFSMLGFLGRAMVPGKGPVXTLADPLVDPVNKKAWAYATNLVPGK

SEQ ID NO: 266053 - protein, 111 aa, Zea mays
  unsure (1)..(111): unsure at all Xaa locations
  Clone ID: MRT4577_174243C.1.pep
PSSSVPPVGTAFKTNFPTKFIKGRVNCKTCGAGFVTNVTEXIAGAKVRLRCKHFGTGXLERSINGVTDGNGTYTIELKDSHDEDICEVVLVXEPRKDCDQVQADRDRAGVL

SEQ ID NO: 266054 - protein, 68 aa, Zea mays
  Clone ID: MRT4577_174244C.1.pep
PVTGLLTINTPCVRCACLRRGRTDSQRRRDRAAVCIHVACLLARKKQNKYKLIAVLTKSNQTVARRRN

SEQ ID NO: 266055 - protein, 63 aa, Zea mays
  Clone ID: MRT4577_174245C.1.pep
SSVRISLNMTLAPNAGRQGDQEGAPPAPTRCGRNGKNNTMISLKRNRPNTTSTSNYAHLSHLR

SEQ ID NO: 266056 - protein, 118 aa, Zea mays
  Clone ID: MRT4577_174246C.1.pep
PKRLEDYTKQNRDYKRGDTTAMSVGLTRPTGKQENKSKMIALTKSTTERHHSSDLHSSRLLGTEFNLTDDSREYIILGRHIQASKRRPPTPREGRNPPGREERQMEKRGRPREGTMVS

SEQ ID NO: 266057 - protein, 276 aa, Zea mays
  unsure (1)..(276): unsure at all Xaa locations
  Clone ID: MRT4577_174247C.1.pep
MEPGQSGTEQASPRGNDWEVVQLTASAYAAAPAPRKPEPSDEAEAKRYGAKGDDLAAGLLMSGHFSVSQSEVESLLVGADTXTTAQGQGGXCEHTKLLEDDVPTIPFDDGKALKGMGLVGEEPAGFSSPVYSSITESRSDKRSEEPTTLHSFNPVTGSTKVVSPDEQSEPAAGSGSGSGSGPREAWWKKQLLSLYRNAKESKHLWPIVATTAALVGLAYLGRRWHKGRLHFQLLKISPSTNKEKISDAVGPLNRINDILVAGNHPSHGVHGHARAG

SEQ ID NO: 266058 - protein, 44 aa, Zea mays
  unsure (1)..(44): unsure at all Xaa locations
  Clone ID: MRT4577_174248C.1.pep
FGCFLKKKKKKKKKKKKKKKKKKKKKKKKKKKKXRRLEVQVTTR

SEQ ID NO: 266059 - protein, 123 aa, Zea mays
  unsure (1)..(123): unsure at all Xaa locations
  Clone ID: MRT4577_174249C.1.pep
TCLPEQDRHGDLLGVYEFAESIRLIDLRRITHSYKAXRLRAGLHTWSFFLTTKHAIDGSLMDAMMSVWREIFRQPADEKQKCSNLVNGSVKDYQVEGYGSDKVVPEDQVLNWSDRLLLIVNPG

SEQ ID NO: 266060 - protein, 146 aa, Zea mays
  Clone ID: MRT4577_17424C.1.pep
MAGRKGGDRKKAVTRSVKAGLQFPVGRIGRYLKKGRYAQRVGSGAPVYLAAVLEYLAAEVLELAGNAAKDNKKTRIIPRHLLLAVRNDQELGRLLAGVTIAHGGVIPNINSVLLPKKSPAAAEKEAKSPKKKTSTKSPKKKVAAKE

SEQ ID NO: 266061 - protein, 65 aa, Zea mays
  Clone ID: MRT4577_174250C.1.pep
MASKVDLVVEVKSPADKLWAALRGSTELFPTIFPEQYMTIETVEADAQARRERSASSRRLIPRPR

SEQ ID NO: 266062 - protein, 68 aa, Zea mays
  Clone ID: MRT4577_174251C.1.pep
IAIIKAPWAQRASTDSPIWGLSHVVWSLQRGLHWWLLVSALLLASVLAKVVEWGIAMCASAVRAADSA

SEQ ID NO: 266063 - protein, 99 aa, Zea mays
  Clone ID: MRT4577_174252C.1.pep
KAVEFIQDIIFRFGIPNNIITDLGSNFTSSEFFDFYEQKSIQIKYASVAHPRANGQVERANGMILEALRKKVFDKNEKFAGKWIRELPYVVWSLRTQPS

SEQ ID NO: 266064 - protein, 128 aa, Zea mays
  unsure (1)..(128): unsure at all Xaa locations
  Clone ID: MRT4577_174253C.1.pep
RTCLNLTNAVSGIGVLSMPYAVAQGGWLSLALFALVGAVCYYTGTLIERCMRADPGAIASYPDIGKFAFGSXGRSAVAFFMYVELYLVAISFLVLDGDNLDKLFTGSSVRLAGDYRLQGKQLFIVLAA

SEQ ID NO: 266065 - protein, 143 aa, Zea mays
  unsure (1)..(143): unsure at all Xaa locations
  Clone ID: MRT4577_174254C.1.pep
LVAACCAWFSSSCSPCGSRCPALLVLCSMHGLGFLGLPGSQHFLSLFSSRCVVSMGSCRAPQPVGSALLSALRRLCWVRPCPRLFFAAVRWRPWSLLLLAVCXLGAPXLWFGGGRVLPVSSVFRASGGVPGCCANCPMPGPRV

SEQ ID NO: 266066 - protein, 80 aa, Zea mays
  unsure (1)..(80): unsure at all Xaa locations
  Clone ID: MRT4577_174255C.1.pep
RGSGTTARGGTEAKXSDRERERAXXAHSHDSDQXVEHQRPHSSTSPVPEHERNPLRPPLTLLFFHAREXSCDRXPPPQRR

SEQ ID NO: 266067 - protein, 44 aa, Zea mays
  Clone ID: MRT4577_174256C.1.pep
ILFKIKSIFFFFKKKKKTTTIKKKTTKKKKKKKKKKKTARAHES

SEQ ID NO: 266068 - protein, 128 aa, Zea mays
  Clone ID: MRT4577_174257C.1.pep
SSLRACLLGIAVRRRPWMRSAERLWKTAERFLNQVQVDMASSTAVGRACCRDLDGSNRICDERRGQPDLRRSDAAQGWRVGCGRRFAVSQICYVPEGQTRADPLAVLSVSSEAVPGEPVLPPFLSLLS

SEQ ID NO: 266069 - protein, 92 aa, Zea mays
  Clone ID: MRT4577_174258C.1.pep
SLPPPPSSSLPSASEPMGPSPYSLPSSTSPAAAAAAVDLFIGFLATSTSSSHICPGAVRVVVAFWPDLVSLVQQRFLYHRHGCACVHLIPPL

SEQ ID NO: 266070 - protein, 103 aa, Zea mays
  Clone ID: MRT4577_174259C.1.pep
GRHCTARGHGWPPHRRQGEGEMCYWRQPDCLSEMCLSTVNKLLCGELHCCSTAAAVTSVYPLGVWVLDRGENLSWMLVSCGPPLCLSFLCYFTSICKHICPGN

SEQ ID NO: 266071 - protein, 148 aa, Zea mays
  Clone ID: MRT4577_17425C.1.pep
MAGRKGGDRKKAVTRSVKAGLQFPVGRIGRYLKKGRYAQRVGSGAPVYLAAVLEYLAAEVLELAGNAAKDNKKTRIIPRHLLLAVRNDQELGRLLAGVTIAHGGVIPNINSVLLPKKSPAAAEKEATKSPKKKTAAKSPKKKTAATKE

SEQ ID NO: 266072 - protein, 56 aa, Zea mays
  Clone ID: MRT4577_174260C.1.pep
VIMYHQLSGHSPCQLFIKLMRSSSMSRCYASISSNMSPVIRVSGTISHPISDYMSP

SEQ ID NO: 266073 - protein, 261 aa, Zea mays
  unsure (1)..(261): unsure at all Xaa locations
  Clone ID: MRT4577_174261C.1.pep
MRNSNFGFPRVPPTSSAAAAAAEPSSKRRRIGETTDPPSEMREEALERLRGVVRDSAGKHLYTSAIFLADKVAAATGDPGDVYMLAQALFLGRQFRHALHLLNNSRLLRDLRFRFLAAMCLEELKEWHQCLLMLGDAKVDEHGNVLDHDDDSDIYFDKDAEDHEINIKSALCFLRGKAYEALDNRDLARQWYKAAVKADPLCYEALERLVDNYMLTCEEESELLSSLQXXEEDGWLSSFYSCLITKHEKNILVEXKFRNLK

SEQ ID NO: 266074 - protein, 134 aa, Zea mays
  Clone ID: MRT4577_174262C.1.pep
ASTGPLEIFFVGAPSGHPASCGKLGTHTGTGKTLSLRTQEWTATAETHDFQTGRDCEGIAHLYEDYGQQGSELSKGMDALGLLGTRDKRLQRGVEEAPLQEPTKNLATCPVTRLSAHPGGRKTTSRRVTWMMGR

SEQ ID NO: 266075 - protein, 284 aa, Zea mays
  unsure (1)..(284): unsure at all Xaa locations
  Clone ID: MRT4577_174263C.1.pep
SRPAGVFRRLDDTLVESYGLLPSRGVSTTEALGIFSWACGGPQSFRQIKNKFGHSLETISRKYSEVLNVLYKMSSDVIKPKDPNFIEIHPRLRESRFWPHFKDCIGAIYGSHFPASVPATEQTKCIGRHGYTSQNVMVVCDFDMRFTFVVTGWPGSVHDTRVLQDTLITYADRFPHPPXYISMLYFCIIRYSFMSYVCNLIFLFXGKYYLVDSGYPNRKGYFATYKGQKYHISEWQNARQPIGSKKVFNFAHSSLRNVIERSLGVLXMKWRILLSLPSFSLKKH

SEQ ID NO: 266076 - protein, 117 aa, Zea mays
  Clone ID: MRT4577_174264C.1.pep
RPNDTPARPRRQRSEQQGEEAKCLLKIIPVWNTGTVGFTMVTELTNYTFLQASTMDLHMGKHFTPPPASIVAVFYLAVALFVPVYDLLVSRATLRRGITLLQRQGAGLVVAALASWS

SEQ ID NO: 266077 - protein, 250 aa, Zea mays
  Clone ID: MRT4577_174265C.1.pep
MSSDVIKPKDPNFIEIHPRLRETRFWPHFKDCIGAIDGSNFPASVLATEQAKYIGRHGYASQNVMAVCDFDMRFTFVVTGWPGSVHDTRVLQDTLITYGDRFPHPPEGKYYLVDSGYPNRKGYLAPYKGQKYHILEWQNARQPIGSKEVFNYAHSSLRNVIERSFGVLKMKWRILLSLPSFSLKKQSKIIIACMALHNFIRDSALHDRDFDQLVPNSLGHDVPVGESSSTTSDELDMSAFRDALANALVS

SEQ ID NO: 266078 - protein, 175 aa, Zea mays
  unsure (1)..(175): unsure at all Xaa locations
  Clone ID: MRT4577_174266C.1.pep
HIHKKKTKKNKKKKKKKKKNPRGLETPTPLFSQSPRAPTRGKGRTNAPRRVADKGGRARGKKKGAVSFXIDGPRPGGDKIWGAPPLKKSRQEPFRAPGVLFCNLGNSVTFFREKTRAPVPLEGPFPKRTRRSLPKKFLKNPTGRICFPGFVAKRTRNAXDPRYFNFVEKEAGEKI

SEQ ID NO: 266079 - protein, 817 aa, Zea mays
  Clone ID: MRT4577_174267C.1.pep
MRNSNFGFPRVLPTSSVSAEPSPKRRRIGEATDPPPEMREEALERLRGVVRDSAGKHLYTSAIFLADKVAAATGDPGDVYMLAQALFLGRQFRRALHLLNNSRLLRDLRFRFLAAKCLEELKEWHQCLLMLGDAKVDEHGNVLDHDVGSDIYFDKDAEDHEIDIKSALCCLRGKAYEALDNRDLARQWYKAAVKADPLCYEAIECLVDNYMLTCEEEVELLSSLQFGEEDGWLSAFYSCLVTKHEKEYLVEAKFKELEQEACSISSSSSGETMKNNIDVLVCKAEYYHQSGEYQKCFKLTSSLLERDPFHLKCTLVHLATAMELGHCNDLYLLACNLVKDYPQKALSWFAVGCYYYCIKKYDQARRYFGKATGLDGAFPPAWIGTGIAYAAQEEGDQAMAAFRTAARLFPGCHLPTLYMGMQYVRMHNFKLAEQFFTQAKSICPSDPLIHNELGVVAYNMKEFPYQLGVFVFGSNFQCNQDSIAGKAIGRMQEIADKIFSVARETIRPGRGLTSFDATKLRVALEDIACMMEQDSLVFQEYLDKVNNVTHQPDSNYEPSDLSSPPPGEDNLSPDWDFAEHFERFWGIEYDSDQMPSFSDNEMCDPAAHTYDHDTDDRDGQLLVALYAVDIWGRPSSEVSRRTMVETGWPGSVHDTRVLQDTLITYVDWFPHPPEGKYYLVDSGYPNRKGYLAPYKGQKYHISEWQNARQPIGSKEVFNYAHSSLRNVIERSFGVLKMKWRILLSLPSFSLKKQSKIIIACMTLHNFIRDSALHDRDFDQLGPNSLGHDVSVGESSSSTSDELDMSAFQDGIANALVS

SEQ ID NO: 266080 - protein, 119 aa, Zea mays
  unsure (1)..(119): unsure at all Xaa locations
  Clone ID: MRT4577_174268C.1.pep
GWSSCPRPPLLSPGPGRSFLCLRFLSLAPLCCLFSCGCLSSSCAGVGVLWWCRRACSVRVFGSPPLWCGXPLAVLVAFSLSPALVWVARSLPWRFASLCCVLCLPPLPWLFSAVWCPWV

SEQ ID NO: 266081 - protein, 73 aa, Zea mays
  Clone ID: MRT4577_174269C.1.pep
VSNKIPPNSTWGNPNTQEMERKSLPATSLHTPRAFTWSPNMAPINLILAQPIPGLENRLGQSQCQRDDRGHQA

SEQ ID NO: 266082 - protein, 146 aa, Zea mays
  Clone ID: MRT4577_17426C.1.pep
MAGRKGGDRKKAVTRSVKAGLQFPVGRIGRYLKKGRYAQRVGSGAPVYLAAVLEYLAAEVLELAGNAAKDNKKTRIIPRHLLLAVRNDQELGRLLAGVTIAHGGVIPNINSVLLPKKSPAAAEKEARSPKKKTSTKSPKKKVAAKE

SEQ ID NO: 266083 - protein, 57 aa, Zea mays
  Clone ID: MRT4577_174270C.1.pep
PKPCPIFFGHGGQNAQDGLLIYRLAVFSFPCPKTGNKFISVEIPGACRIREGVNLTN

SEQ ID NO: 266084 - protein, 190 aa, Zea mays
  unsure (1)..(190): unsure at all Xaa locations
  Clone ID: MRT4577_174271C.1.pep
NCRRPRLAMLLRSMLITARSPPSTSSFRNNLACSVVLLGTAATYPNSGRSDNGDRGGAGVGAGEFVPCRIQLIAEVSLAKLFTDFASPVDTSALMQQNSPPTLSKSPMPETETIPPQETLGGGDDNIDPVDPRESVTGSEEPGLPEAAVMRKDMAAVSNKDGLPTRKDDDEDAASEPTTKPCDWHNXSIT

SEQ ID NO: 266085 - protein, 95 aa, Zea mays
  unsure (1)..(95): unsure at all Xaa locations
  Clone ID: MRT4577_174272C.1.pep
LEPPAISTNFESLKISVHELRCIMRRAAXXXYTSQPYCLADRPRTECLPRSSLPLIARAPCHSVIEGGGSTDTPELHPTPAYIRSSGAISPLQPP

SEQ ID NO: 266086 - protein, 69 aa, Zea mays
  Clone ID: MRT4577_174273C.1.pep
RLVNSRSCKVRVKTRAPKISIVDSKAICHPFCRIKPDPFVFCTGANYMPAHKEPRRPSQLGLFQPQMQS

SEQ ID NO: 266087 - protein, 66 aa, Zea mays
  Clone ID: MRT4577_174274C.1.pep
VAETSPRSGGEGLRVRVGHLSGPASVVCDGSKRRRRRVGFSRTGNAGGGHWAAQRRGTFFFIRTSS

SEQ ID NO: 266088 - protein, 77 aa, Zea mays
  Clone ID: MRT4577_174275C.1.pep
DRNMGKKDKMPALAILLRTTYCCENDDKDYRCLITDIDKGKRFMTSPELRTISDSYTGMPSYTLSPCMPYTQHYIHS

SEQ ID NO: 266089 - protein, 43 aa, Zea mays
  Clone ID: MRT4577_174276C.1.pep
GNPRSVMQRRLQLGISTSDPPREPTHFPLHGLKDTGIGCRREN

SEQ ID NO: 266090 - protein, 532 aa, Zea mays
  unsure (1)..(532): unsure at all Xaa locations
  Clone ID: MRT4577_174277C.1.pep
MARRLMLALPVLLFLLLVGQCHGGKIGVCYGRNADDLPAPDKVAQLIQQQSIKYVRIYDTNIDVIKAFANTGVELMVGVPNSDLLAFAQYQSNVDTWLKNSILPYYPDTMITYITVGAEVTESPANVSALVVPAMRNVHTALKKAGLHKKITISSTHSLGILSRSFPPSAGAFNSSYAYFLKPMLQFLVENQAPFMVDLYPYYAYQNSRSNVSLNYALFSPESQDVIDPNTGLVYTNMFDAQVDSIFFALMALNFKTLKIMITESGWPNKGAVKETGATPDNAQTYNTNLIRHVVNDSGTPAKPGEEIDVYIFSLFNENRKPGIESERNWGLFFPDKSSIYSLDWTGRGNVDVMTGANITSANGTWCIASTNASETDLQNALNWACGPGNVDCSAIQPSQPCYQPDTLTSHASYAFNSYYQQNGANVVACDFGGAGIRTTKDPSYDTCVYLAAGXDEHDELNISSSSQRLWSSPTRQMLRHFAAHAGPRDGCSYAVIYGEKMLQLASLRREMKGELRNAAGNHRSSVFCHEQ

SEQ ID NO: 266091 - protein, 167 aa, Zea mays
  unsure (1)..(167): unsure at all Xaa locations
  Clone ID: MRT4577_174279C.1.pep
PPIAAPRPGGLRGADAEGRGTXRXEKXXAGTTTNDPGQGSQXXRNDAKTXRXXRXKXHKGXGRXRNXPKXKXTKAXRRXQGKDTTQETTXEXERKRNRPERNDRXXTEQTXKASPXKTKXRHEXXEKHTPNRXKXXKRKEREKDXKEPEQDNATPPKKKSNHAAEKT

SEQ ID NO: 266092 - protein, 356 aa, Zea mays
  Clone ID: MRT4577_17427C.1.pep
MRTRGGSGFAGLQVACVVAALCLLLPTGSRAQLQVGFYNTSCPNAEALVRQVVTAAFANNSGVAPGLIRLHFHDCFVRGCDASVLLSVNPAGGKTERESPANDPSLRGFDVIDAAKAAVERSCPRTVSCADVLAFAARDSVTLTGNLFYDVPAGRRDGRVSNETEANDNLLGPDSTAEILIDGFGKKNLSIEDMVVLSGSHTIGRSHCFSFLSTNRQRLANGTISPAYQALLEALCPPNPGQFTPNTTEIDVSTPTVLDNNYYKLLPLNLGLHFSDDQLIRNGTLAPFASAFAANETLWKDKFAAAMIKMGNIEVKTGTTDEIRLNCSVVNPSSSSSTAGVIEMLFPAADEVATSS

SEQ ID NO: 266093 - protein, 222 aa, Zea mays
  unsure (1)..(222): unsure at all Xaa locations
  Clone ID: MRT4577_174280C.1.pep
MAAGFQIGVIGSLALSVASSVSIVLCNKALISTLGFPFATTLTSWHLMVTFCTLHVAQRLRFFEPKAIDGQTVILFGLLNGTSIGLLNLSLGFNSIGFYQMTKLAIIPFTVLLETIFLKKRFSESIKLSLLVLLLGVGIASVTDLKLNLLGSILSXLAIATTCVGPILTNXIQKRLKVSLTQPLYPAAPYQAGILFATGPFVDQLLTDRSVFAHKYSAPVLV

SEQ ID NO: 266094 - protein, 88 aa, Zea mays
  Clone ID: MRT4577_174281C.1.pep
PFNRRKAHAPPGGGKVFVPASPVFGRGHGLGNPPPYGPVNAFGQPRYCPDPPPPFLNVRIRRLGPAFINPPNYLGIFGPILCLAPQVL

SEQ ID NO: 266095 - protein, 169 aa, Zea mays
  Clone ID: MRT4577_174282C.1.pep
PPTALSTAHRSHPYRQRAEFIGKPVKDLAAEHGPAPRAHRNNECHAAQIISIERVPDVDNTTVKNHLLLLVISMANVYLVDPYGNLRQHCRIRTGQLLKLQDRTNCPLHLGGGGLIHIIGPTYSQRVARLTRRRPHVTDEWSSDETLCTYAINTSCTTRLADPLSELPR

SEQ ID NO: 266096 - protein, 206 aa, Zea mays
  Clone ID: MRT4577_174283C.1.pep
MKLLIFALAAAALPTIEASANTALFKSTCATVTNQMWTLSGSLSQLKATADRLGHAHISRKCDEASGHVANARTTWGGISLNFGGLPWQARLSPHAGRVQSTMSSCGSALDWIYAQPEVSRYSAYRIPVSNCRRTYDSCQSGCRQIWNWPSPFGFGPKPSQRAGYYRRQLADIEQRSCPNVQETSCPISSQANGYECIDLQTESPH

SEQ ID NO: 266097 - protein, 53 aa, Zea mays
  Clone ID: MRT4577_174284C.1.pep
RSRRRVHSNILRCWPLEYLKRQPKGRKYIALILKFVKDHMGALLFGGGRTYES

SEQ ID NO: 266098 - protein, 66 aa, Zea mays
  Clone ID: MRT4577_174285C.1.pep
AVQRHAGASASAREYAVVAKGWPARGGTLQATASGGPMMSARLQRSVSKPSHPNFACSKGQCRCGG

SEQ ID NO: 266099 - protein, 59 aa, Zea mays
  Clone ID: MRT4577_174286C.1.pep
KKKKKKKKKKKKKKKKKKKKKKKKKKKKKKGGGRSWWIGILAFRTPAYAHGFFFCVGAT

SEQ ID NO: 266100 - protein, 91 aa, Zea mays
  Clone ID: MRT4577_174287C.1.pep
DRLSRRWIHPPSGRVYNLDFNQPHVHGIDDVTGEPLVQQEDDKPEAVAARLRQYEDVAKPVIELYKSRGVLHQFSGTRRTKLAYVYTFSQQ

SEQ ID NO: 266101 - protein, 42 aa, Zea mays
  Clone ID: MRT4577_174288C.1.pep
WVAQPIYEKGRKITMDTWSIINMASLPYMSHLIRFSWCRSDG

SEQ ID NO: 266102 - protein, 52 aa, Zea mays
  Clone ID: MRT4577_174289C.1.pep
GERPVVHGSAFSPNPSSNQRVYPALPVPVMASLTKCRALGIVRACAGADCAS

SEQ ID NO: 266103 - protein, 145 aa, Zea mays
  Clone ID: MRT4577_17428C.1.pep
KRRRCRSSIPRGGLGTSRPASVALWAFLTFLNLFAVLFPVGPERRRNTGKGMPDKSNEGSYCLYNTDASRGYGVSVFLGLLLQQAIVNVATGGLCLGPGLSSRGCAETAFALSWKTFLAEKACLIGGSVRNAKHTKFLGYYMKHD

SEQ ID NO: 266104 - protein, 96 aa, Zea mays
  Clone ID: MRT4577_174290C.1.pep
TWNYYRINNQIKTSNHKFTKLTSGLCSRAAVCDRRSSALRAWRCRGGDRAAGEEPRRRGRAGERAAAGDCSDRRSGEDRGGKRRGPWTSALEPGAW

SEQ ID NO: 266105 - protein, 93 aa, Zea mays
  Clone ID: MRT4577_174291C.1.pep
PPMSGPPWEARFALSPVWPVFYPRPAPNFFVRLGPPPPLFLSVPVRKGLIVFLAPVRFPKKLFRSITAKNFPCPITCPGKKKKKKKKKKKKKK

SEQ ID NO: 266106 - protein, 107 aa, Zea mays
  unsure (1)..(107): unsure at all Xaa locations
  Clone ID: MRT4577_174292C.1.pep
LALGTDKLRVHQVVXPVPHDSSTNEIGVTLDTRPFTQCQXCSRTXQVDVDTRVMLHRGQEERRVCLRMVETYPVNMYVNDLSRDERETDDHLVSLEIRTLMGHQDLA

SEQ ID NO: 266107 - protein, 132 aa, Zea mays
  unsure (1)..(132): unsure at all Xaa locations
  Clone ID: MRT4577_174293C.1.pep
LGPACWGSLFLCCSLPSWAGGXCGLSLGXLGVRFLSLCLCLVLALLVCASCLGCFALGRPCPFCAVLPPGRSARVAPPLWPSLLCVPRPLVCAPALCSVPLGLALWSVSLVFSSRGAGPGLFGFFSWLLVAL

SEQ ID NO: 266108 - protein, 93 aa, Zea mays
  Clone ID: MRT4577_174294C.1.pep
VWWGFLAGNSCSLFCLFLRRACLLVPWLLLVCSSCPSRLCVRSLLWGGSFSGSFVAWRFRLVAVGAFLFAVCLAGWQRACDFFAFGVWWFRLL

SEQ ID NO: 266109 - protein, 40 aa, Zea mays
  Clone ID: MRT4577_174295C.1.pep
LLKKTKLCVCVIQKTNMDYEYETLQFVCQKFWMKYLCILT

SEQ ID NO: 266110 - protein, 155 aa, Zea mays
  Clone ID: MRT4577_174296C.1.pep
SILLRGVCRLHLVVGSTPHPSFRTIIISRSRHTHTLLLLLSSSREQQEAAREGRLDVGDGDCVHGGSRYCGADGYRRGLESRLSKRQRRRGEPMAEQRGEEAGVLGPGSVRGIQGWSAPCIWWRGRPPWRDAKGGRGSREAEQGAARPSRPGRPR

SEQ ID NO: 266111 - protein, 37 aa, Zea mays
  unsure (1)..(37): unsure at all Xaa locations
  Clone ID: MRT4577_174297C.1.pep
SSVVARIQSTCYNNEVPAAAIVMLCCSRDXLRLCERL

SEQ ID NO: 266112 - protein, 71 aa, Zea mays
  Clone ID: MRT4577_174298C.1.pep
LPPLKMFAFICARLANNGPRPFWLQVAPPLPFENVAPPILELDPTGPREGGKIFFSSDQVIWLYWVTACSS

SEQ ID NO: 266113 - protein, 151 aa, Zea mays
  unsure (1)..(151): unsure at all Xaa locations
  Clone ID: MRT4577_174299C.1.pep
RVGGPXXCCCRGRPGPGXGXCFXRSLSXXXXSCPXAAXRPCRCXXXRXXCXXXWXCARACAPGCXXARPGXXXXRPRRXXXXXPPPAPPPRXXXXXAXRXXAXXACRCRXWXXXXCCAGXXAXARXAPXXCXXXASPRPXSAXXAKPXASS

SEQ ID NO: 266114 - protein, 146 aa, Zea mays
  Clone ID: MRT4577_17429C.1.pep
MAGRKGGDRKKAVTRSVKAGLQFPVGRIGRYLKKGRYAQRVGSGAPVYLAAVLEYLAAEMLELAGNAAKDNKKTRIIPRHLLLAVRNDQELGRLLAGVTIAHGGVIPNINSVLLPKKSPAAAEKEAKSPKKKTSTKSPKKKVAAKE

SEQ ID NO: 266115 - protein, 167 aa, Zea mays
  Clone ID: MRT4577_1742C.1.pep
MGGGSGNPLPPPPAAAAAFRVDRPLQALGFEFTRVTAEEVVGRLPVTETCCQPFDWLNGGVSALMAETTASIGGYVASGYRRLAGVQLSINHVGPARLGDLVQARATPVQLGRKIQVWEVQIWRVDPSTSERKDLVSTARVTLLTNLPTPEKMKSFEQGLKNFSSKL

SEQ ID NO: 266116 - protein, 361 aa, Zea mays
  Clone ID: MRT4577_174300C.1.pep
MSKPAAALVMLLALVAAGPAAGDGGSTRLGCFVGWSPLKTVSSLLCLLQGSSTFPSPKPAPTGQGLSVGYYNKSGSCPKAEQLVREAVTNATNGPNRGLNAGLIRLHFHDAFVRGCDASVLLDKTASGNNDTEKTGPPNKDSLRGFEVIDAAKAAVEKECPGIVSCADILAFAARDASYILSNEKIYYDVPAGRYDGRESFADETDQLPGPGSSVQDLKKSFAAQGLSLADAVTLSGAHSIGLARCLFFKDRLSAMDPGYAATLNATCNAGGDSYKVNQDYKSPDVLDNQYYKNIDKFVLFASDAALKSSETIDQVNANAGGYGKWEKDFGDAMVKMGKIGVITSPGYGAEIRKVCSQINY

SEQ ID NO: 266117 - protein, 188 aa, Zea mays
  Clone ID: MRT4577_174301C.1.pep
IHSSWTFKGEGTLTKEQVQAELERLVSAKWAWNIHDMGNNSFRVTFPSMGEMQRMIEWGVVQTKFKAKLQIKEATVDDEVKYVMPKVWVQFTGLPEELRDFPVIWAVGSILGVSKEVDMIFTRQYGRCRLQVLVLDPNIIPRYVDVVIGDFLYELRFRVEKNLEDSNPEPMDMDDITEDGNGEATNGD

SEQ ID NO: 266118 - protein, 253 aa, Zea mays
  Clone ID: MRT4577_174302C.1.pep
RPVRAVAYGAAVQAAVLTNQAGNEKTQDLLLLDVVPLSLGVEMQGGIMAVVVPRNSPIPCQKSKVFTTASDNQTTVTFPVYEGERLMTKENNLLGEFSLSGLIPAPRGTPELLCTFDLDANGILKVTAQDKTTGRKADVTISNSTRLSAADIERMVQDAEKNAESDKEREAVVQAKQDLEAYVYQVENNISDPNVNMKLRRGDRESIETALAEAMELLEISADEAKADDLKSAQSKLKRASTRAFAHVYSQRR

SEQ ID NO: 266119 - protein, 257 aa, Zea mays
  Clone ID: MRT4577_174303C.1.pep
IRHEANTVPDQIVELVNKYQELFAAPKGLPPKRLFDHDIPLLPGVNPFRLRPYRYTPQQKNEIEKQIKEMLEGGIIQQSSSPFASPVLLVKKKDGEWRLCVDYRKLNAYTVKNRFPMPVFDEIADELSGATVFTKLDHRAGYHQIRIKEGEEYKMTFHTHNGHYEYKVMPFGLTGAPATFQDFMNHILAPLLRKCVVVFLDDILVYSTTLEDHVGHLEQVFGILTQNQLKLKQSKCKFAQDKLEFLGHVISAAGIST

SEQ ID NO: 266120 - protein, 217 aa, Zea mays
  unsure (1)..(217): unsure at all Xaa locations
  Clone ID: MRT4577_174304C.1.pep
IFPPHPRHLFLSRLFSFLLSLRVRYHISLNIIVVLVLVDSVSGTPTVDMIYEVGCVDHRVVXLLTMPPTAMLKSGFRVRLXLDALCAAAVRGXVCTDIALCEYXIPGSYCAVIEAPGPRDFIMNMITGSSHVDRGALLLDSSTDGFXDGISKDGQRRXYLPLAFPLVAAXMSCCCNXMGCPSRIYSMGRXRELLXEDSSYLKIDGYNRDYGLFISIT

SEQ ID NO: 266121 - protein, 129 aa, Zea mays
  Clone ID: MRT4577_174305C.1.pep
LGTSRPGGFAWSSSHDVASSHRVARRQDPHPLLALRPSHARPAKLLGLASLTSSGRMSGVSKPSWFASTACPPTGVDEGPPPWSAFTIVGYRRVSSRHTAIHIYFTVKPPNDVFLDDLQIMFPYLMRYG

SEQ ID NO: 266122 - protein, 60 aa, Zea mays
  Clone ID: MRT4577_174306C.1.pep
SVKVASILECSQMFADLNVRFSFPDAFHIASPQDMSIAAGMTIFQDMGAHSHIGIKSEHG

SEQ ID NO: 266123 - protein, 150 aa, Zea mays
  unsure (1)..(150): unsure at all Xaa locations
  Clone ID: MRT4577_174308C.1.pep
MRTLRGSLHNGQEYCARAEQCLVQWNRHTCVLHTETLPQAQEAQDASKYITILYRGIHDPSLCDDALGTKEAALSNVTDYLTKKNTAEELRNHSTQLRPCVAAIPRAQTAHTGRAISDAAAKIPVTSDLQISLCTDMAEWTXRAEKRAFL

SEQ ID NO: 266124 - protein, 79 aa, Zea mays
  Clone ID: MRT4577_174309C.1.pep
PRCGEPRSWGGCSRPCFSIKRTASSCTPGCGREEGPRHLGSHFCPSPSSPPAWLRSAADSSTACYSPDGGREDEPKTTI

SEQ ID NO: 266125 - protein, 35 aa, Zea mays
  Clone ID: MRT4577_17430C.1.pep
YIVFKFIQCCFLILISLVFIYIFLICLIELLCNVF

SEQ ID NO: 266126 - protein, 280 aa, Zea mays
  Clone ID: MRT4577_174310C.1.pep
AIGHAPGRRQGLLVLAVDCYNGDGTPDAERMKKAVDLALSAAAAAGGRLGCVLSTGMTIAEAADALSACGVDPAGFDALVCSSGADLCYPWREVAADDEYAGHVAFRWPGNHVRAAVPRLGKAEGAQEKDLAFDEAACSGHCHAYAAAGASKVKKVDSIRQSLRMRGFRCNLVYTRACTRLNVIPLSASRPRALRYLSIQWGIDLSKVSVLVGDKGDTDRERLLPGLHRTLVLPELVCHGSEELCRDQDGFLAEDVVSMDSPNILTLAEYQAAVDILKAI

SEQ ID NO: 266127 - protein, 107 aa, Zea mays
  Clone ID: MRT4577_174311C.1.pep
LKTLTGHPGLFFGGGLFCLGGHGAVGAVPRAARRGPVWAARGRGRPPGTGAGARFPSPGGDGCDPGGRGLSRVASAVHGLDGGPAMAHGTVRSRGHRRLIPGHGAGA

SEQ ID NO: 266128 - protein, 59 aa, Zea mays
  Clone ID: MRT4577_174312C.1.pep
VILKFYRSTSKALIAAFGELERVKKLLPITDLRGFVDACHCPIHAVDRNIFKSYYILQI

SEQ ID NO: 266129 - protein, 86 aa, Zea mays
  Clone ID: MRT4577_174313C.1.pep
LPLDELPKVLNERNLQHANLLGLPNNHHAANGTNAHHITLESGLNCVCHPHWYIQSTYATNRQCLYESLHCLCSNIARHAYISHAN

SEQ ID NO: 266130 - protein, 46 aa, Zea mays
  Clone ID: MRT4577_174314C.1.pep
AYKRKGSTGQESYSFMTRLHFLGYLGPQWQELRMRPVERGLEDPGT

SEQ ID NO: 266131 - protein, 63 aa, Zea mays
  Clone ID: MRT4577_174315C.1.pep
SVPLERWLHSFTDRRGEARSGVGLKKLSFFPKTRRRSWSLWAWSWQTKRSLQETSTRPASRYP

SEQ ID NO: 266132 - protein, 139 aa, Zea mays
  unsure (1)..(139): unsure at all Xaa locations
  Clone ID: MRT4577_174316C.1.pep
RRACLKTEWRPVSLLMLLAXXACVANXTIIXXCXQAXIAXLXPPYLPSMIASVCENPALQPYXLQXAIXAGNIPLSPLXXQQSXAXSXVXXXVQTIRAXXLQQLMLPVINQXAXANLYCYSDNNKILXFKPTXYLNPGC

SEQ ID NO: 266133 - protein, 122 aa, Zea mays
  unsure (1)..(122): unsure at all Xaa locations
  Clone ID: MRT4577_174317C.1.pep
PGTVVPMLEAAISVVPXEKLAVHFHDTYGQSLSNILISLQMGVSVVDSSVAGLGGCPYAKGASGNVATEDVVYMLNGLGVKTGVDLGKVMAAGEFICRHLGRQSGSKAATALSKVTANASKL

SEQ ID NO: 266134 - protein, 92 aa, Zea mays
  unsure (1)..(92): unsure at all Xaa locations
  Clone ID: MRT4577_174318C.1.pep
ERRAGRGPHXNLKRKGQDDNDAXYRIKRTTQMKKLMNVYCDRQTANMNAIAFLIDGXRRLLGEHTPDELEMEDGDEIDAMLHHTGGSVPNTT

SEQ ID NO: 266135 - protein, 59 aa, Zea mays
  Clone ID: MRT4577_174319C.1.pep
RLHFLVSKQFMRWNWRPNHGNREAFHVHHQTVAPFVFFFFSVPFFRVRLRARRLTGLEP

SEQ ID NO: 266136 - protein, 146 aa, Zea mays
  Clone ID: MRT4577_17431C.1.pep
MAGRKGGDRKKAVTRSVKAGLQFPVGRIGRYLKKGRYAQRVGSGAPVYLAAVLEYLAAEVLELAGNAAKDNKKTRIIPRHLLLAVRNDQELGRLLAGVTIAHGGVIPNINSVLLPKKSAAAEKEAKSPKKKAATKSPKKKAAAAKE

SEQ ID NO: 266137 - protein, 435 aa, Zea mays
  Clone ID: MRT4577_174320C.1.pep
MLAASTKVGSRLASPHASLSAGAAAAALASSPVLGSGMLPGAGFGETGSHHAADAPPPLPCSSSGDSREYYQWKRLVNQRQSTLDGGKVPAALGHHVFGAGCSSRNQHIYRYFSYSSHQGSIWGRSKVLHDLPGYVKIVEVGPRDGLQNEKDIVPTPVKVELIRRLATSGLPVVEATSFVSPKWVPQLADAKDVMEAVRTMGGVRFPVLTPNLKGFEAAIAAGAKEIAIFASASEGFSKSNINCTIKESIARYNDVALAAKEKEIPVRGYVSCVVGCPVDGPVPPSNVAYVAKELYDMGCYEVSLGDTIGVGTPGTVVPMLEAAISVVPVEKLAVHFHDTYGQSLSNILISLQMGVSVVDSSVAGLGGCPYAKGASGNVATEDVVYMLNGLGVKTGVDLGKVMAAGEFICRHLGRQSGSKAATALSKVTANASKL

SEQ ID NO: 266138 - protein, 66 aa, Zea mays
  Clone ID: MRT4577_174321C.1.pep
CKSCKPSIQFIVFIVSLLKSFSLFIFCVFFFFIFFFFFFFFFFFFFFFFFFREQGCHPCFIKTKGV

SEQ ID NO: 266139 - protein, 69 aa, Zea mays
  Clone ID: MRT4577_174322C.1.pep
PRVRPRVRNNHICLELLSFQSNLCTSDKMQTSYISILCICFGLCWHQSPKRGRLKGKWPQSFPIIDFGV

SEQ ID NO: 266140 - protein, 90 aa, Zea mays
  Clone ID: MRT4577_174323C.1.pep
LAHCVLSRHGTVGPGAINMLLATKHSPLHNAKATYAPRPVYAHNPVTHRAYILHTYTPRTDPFRMGQGLLRNSPLFPKTIEDHAESKHYA

SEQ ID NO: 266141 - protein, 108 aa, Zea mays
  unsure (1)..(108): unsure at all Xaa locations
  Clone ID: MRT4577_174324C.1.pep
KYHPIIKNTHCRHLIHRMGHHRHEPLYHKQHMNYTEHYLQHFEIHDPIGVNHANIYFLCLKTAHPVVTINPPXFCELITFQAGCLANNNLHFNLLHTNGIANGIDHQA

SEQ ID NO: 266142 - protein, 43 aa, Zea mays
  Clone ID: MRT4577_174325C.1.pep
SYLGGVKNVRFSVHILHNIIWCITLSGNNYRLLNSNILYIKHI

SEQ ID NO: 266143 - protein, 112 aa, Zea mays
  Clone ID: MRT4577_174326C.1.pep
FSLPFFFFFFFFCFFFFFKEKPTPFPVPLFHVKPQPYFFPSFSKKKKMATKKKATFFFFKKKHTYVPPTPKKAFIWGIPSGKMRKKNPKPFYQWGKIISFTMEPPPTILNKP

SEQ ID NO: 266144 - protein, 114 aa, Zea mays
  unsure (1)..(114): unsure at all Xaa locations
  Clone ID: MRT4577_174327C.1.pep
LHEPSRTPSXTLPNHGGLPPLPRRRYLFFFFXXXXXTWGGVFFFFPRXXXVGEITTFHGXXPPLFCPXPLLGAFGIAXRCNATXFXXGGSEAAGXPHXAPFFSPGVXXIVSRQP

SEQ ID NO: 266145 - protein, 75 aa, Zea mays
  Clone ID: MRT4577_174328C.1.pep
FGTRAEPGCDHNSTSSGDKVACFSVCLIFCLTIEKQTTNLRIKSVLLPEVYLTLNTIYKLHKVSRLKLTDGCYLA

SEQ ID NO: 266146 - protein, 139 aa, Zea mays
  Clone ID: MRT4577_174329C.1.pep
MSGVEEEENAAELKIGEEFLKAKCLMNCEVAIILEHKWEQLQHMSDGGADQVSQVFEKSQAYVKRFSRYKNPDAVRQVRETLSRYSLVEFELCTLGNLCPDTADEAKALVPSLVPGGRFDSDDRVDKMLNDLSLIKKFE

SEQ ID NO: 266147 - protein, 147 aa, Zea mays
  Clone ID: MRT4577_17432C.1.pep
MAGRKGGDRKKAVTRSVKAGLQFPVGRIGRYLKKGRYAQRVGSGAPVYLAAVLEYLAAEVLELAGNAAKDNKKTRIIPRHLLLAVRNDQELGRLLAGVTIAHGGVIPNINSVLLPKKSPAAAEKEAKSPKKKTSTKSPKKKTAATKE

SEQ ID NO: 266148 - protein, 155 aa, Zea mays
  unsure (1)..(155): unsure at all Xaa locations
  Clone ID: MRT4577_174330C.1.pep
MTFSCPSWRTSMPNREGPLCIPTKRTFXKDSYRGADLNVLIDMCTDDLDQLFXVRASDMFKRGMKMKSMLLITKMQKAKNDAPAGYKSEPVKMHLRIMINVHQMIVSNVAVYNIKTFXHAAINAEMIDHYLAEISISYKHGVARHDRDLGHPCPR

SEQ ID NO: 266149 - protein, 220 aa, Zea mays
  unsure (1)..(220): unsure at all Xaa locations
  Clone ID: MRT4577_174331C.1.pep
MKQLHKSPTHAPSPAHAPASKISKPARPGPRTWVGYLLREQRLLFVLLGALIATSFFLLRPYLFSLSASNPTERSPIFSFVGHSSDPRGVPTGFRPPPRRVVVTGGAGFVGSHLVDRLLEQGDSVIVVDNFFTGRKENVAHHLRNPRFELLRHDVVEPILLEVDRIYHLACPASPVHYKYNPIKTIKTNVMRTLNMLGLGKXIGARLLLTSTSEVYGDPL

SEQ ID NO: 266150 - protein, 125 aa, Zea mays
  Clone ID: MRT4577_174332C.1.pep
LAKNGRMYEVDTTKHLNEYGEAGLRTLALSYRVLDESEYSSWNAEFLKAKTSIGPDRELQLERVSELIERELILVGATAVEDKLQKGVPQCIDRLAHAGLKIWVLTGDKMETAINIGYACSLLRQ

SEQ ID NO: 266151 - protein, 160 aa, Zea mays
  unsure (1)..(160): unsure at all Xaa locations
  Clone ID: MRT4577_174333C.1.pep
MNIRSCAFAVISYSPYLSWLPGARGTPGDPLDGAGAAHRHDGAGRGRHQTLLWIHSSFFAAAKGVYSTATLVPXETXAGLADIPPTVAAVNNPNPEVAYDECNPDSVLLYIPSSXAFAYFVLSGGRFIYALLLRLLVLTLVLSVAAXRTCFAFPSLAVDL

SEQ ID NO: 266152 - protein, 204 aa, Zea mays
  unsure (1)..(204): unsure at all Xaa locations
  Clone ID: MRT4577_174334C.1.pep
LSTRXARPSCRRRIIFDRLAKNGRMYEVDTTRHLNEYGEAGLRTLALSYRVLDESEYSSWNAEFLKAKTYIGPDRELQLERVSELIERELILVGATAVEDKLQKGVXQCLTFRIVKICFLVPSIMLVTVSCCFDLXYVFVLYQVPQCIDRLAQAGLKIWVLTGDKMETAINIGYACSLLRQGMKQXCLSIPTGEQVAQDAKKLQ

SEQ ID NO: 266153 - protein, 117 aa, Zea mays
  Clone ID: MRT4577_174335C.1.pep
MATFTSQVSAMAGASPSCSLFVSRRRPAVMPLQMRVARGGRPRGLAMRVTCEKVVGIDLGTTNSAVAAMEGGKPTVITNAEGQRTTPSVVAYTKGGERLVDQIAKRQDDVNPLNTFF

SEQ ID NO: 266154 - protein, 103 aa, Zea mays
  Clone ID: MRT4577_174336C.1.pep
KIYHQMSPTKLDGTRERFCGFRDPLSMQPKTIVRRKKTEGEGRGSEGHDAHLSHLLFLSLALLTRRRSVGCRLSCLLARPLFMAMVDEGGKGESDLLISRRRG

SEQ ID NO: 266155 - protein, 47 aa, Zea mays
  Clone ID: MRT4577_174337C.1.pep
PSHTTAIPRSFDLWSQLCAVLNGIALYSPTKYKPVPYIVYLEMTRRR

SEQ ID NO: 266156 - protein, 116 aa, Zea mays
  Clone ID: MRT4577_174338C.1.pep
MGVTKTVILEGNGPSPVKGDTVTMLYTGWLKEAGKKDGKGKQFDTTEKPGRGPFKTPIGVGRVIKGWDEGVVQMKLGEKARLDISSDYAYGNQDVGGGLIPAGSELIFEVELKKIN

SEQ ID NO: 266157 - protein, 48 aa, Zea mays
  Clone ID: MRT4577_174339C.1.pep
PRVRANVRFHVSPCEHFSRTRADGKKVIDRGSHFLMVGKEELEISFEA

SEQ ID NO: 266158 - protein, 96 aa, Zea mays
  Clone ID: MRT4577_17433C.1.pep
TPPSFSPSFSFSHLQNQWGSLRRSVVSAERDLRRGKVRAGGGVEQDSRKGRAIRARRGAGRQAADGVAVEPPGVRWSPATVSVGLYKRNAWVEPFS

SEQ ID NO: 266159 - protein, 140 aa, Zea mays
  unsure (1)..(140): unsure at all Xaa locations
  Clone ID: MRT4577_174340C.1.pep
RVCPRVREQTGPIIDQLSNEVANEVLHAVGQFLVEESFYDVALNWLQQNPGFSFGLEXGPSVLLGWVKVEGGNCSELTDLVMENGSGYLGIPLDAKRDLLLGLHEATVIELSDDWEGATPVQIMKQLASSWRIDLQQLIN

SEQ ID NO: 266160 - protein, 47 aa, Zea mays
  Clone ID: MRT4577_174341C.1.pep
SLRSRCPLSDPAVGYRVKRSSRFETPVVLKSIPIPVLLFATLNSYFS

SEQ ID NO: 266161 - protein, 75 aa, Zea mays
  Clone ID: MRT4577_174342C.1.pep
AWGPPQKKTPPKKKGGHPFFSFYRATKPTKGEVLLFALKKHVLIKNCVFCQVSTPRSNVGDLGVFSSAEVMCVDS

SEQ ID NO: 266162 - protein, 131 aa, Zea mays
  Clone ID: MRT4577_174343C.1.pep
PHSPPAWRTRHAQKPRPPQGHDHGHGHRPSAKHPPPPPSSSSPPPPPPPAAALVRTTCNSTPYYALCVSALSAYRALDRGVKALLENCGAKYVSARDGLAAAVDSIALDEYNSANARVSAGAEYLQVSGTL

SEQ ID NO: 266163 - protein, 70 aa, Zea mays
  unsure (1)..(70): unsure at all Xaa locations
  Clone ID: MRT4577_174344C.1.pep
MTCSSSAWFEKKKKKKKKKKKKKKKKKKKKNKKNKKNQHXPKKTPKKTLYTNVNLIEPLKKIQITGRTVK

SEQ ID NO: 266164 - protein, 60 aa, Zea mays
  Clone ID: MRT4577_174345C.1.pep
LYSIKTRNAVIGKDQVPMSSSVLDSDCLETESYPYGSFDSTHCSRCFSMISAQLGTGQSQ

SEQ ID NO: 266165 - protein, 49 aa, Zea mays
  Clone ID: MRT4577_174346C.1.pep
MAELATSSDGLVDEEASQLEPGYWSTGSSHGLHFTNEQDIRRGKAALVS

SEQ ID NO: 266166 - protein, 86 aa, Zea mays
  unsure (1)..(86): unsure at all Xaa locations
  Clone ID: MRT4577_174347C.1.pep
KVIRKDSAKKTAKKSRVKCFIKLVNFTHLMPTRYTLEVDXKRTSXGGPDALSTRDKKVEACKANKARLEERFKTGQNRWSFTKLRS

SEQ ID NO: 266167 - protein, 74 aa, Zea mays
  Clone ID: MRT4577_174348C.1.pep
MTQQDVEMAARHGTGADGARFYPQPPNGAGGETLDDDGKKKRTDWELTEQALSKKVAQNFGGIDGMWRTPFAES

SEQ ID NO: 266168 - protein, 47 aa, Zea mays
  unsure (1)..(47): unsure at all Xaa locations
  Clone ID: MRT4577_174349C.1.pep
LRVDGCVVRDAELPVSGENVPSGGLQVVNGHHQNSQRLAGRMXGSPA

SEQ ID NO: 266169 - protein, 111 aa, Zea mays
  Clone ID: MRT4577_17434C.1.pep
DAWGEVFDTTHEDNSIFSFEIGQGAVIKAWDIALRTMKVGEVAKITCKSEYAYGAAGSPPEIPPNATLIFEVELVACRPRKGSSLGSVSDEKARVQAKLDAKKGKGKGKGK

SEQ ID NO: 266170 - protein, 53 aa, Zea mays
  Clone ID: MRT4577_174350C.1.pep
PALRHWQLLWLYVAYVVVAQFIMSLYKKSGSSLSCRVSVACYGRCLPHLYNIS

SEQ ID NO: 266171 - protein, 73 aa, Zea mays
  unsure (1)..(73): unsure at all Xaa locations
  Clone ID: MRT4577_174351C.1.pep
GSVLRALPLLLVFPPSAVRFRLXLPGFPRFPAVXXASPVSGVRSPLLRPXFCXRLPPLPALLPLPSVSRXRGS

SEQ ID NO: 266172 - protein, 62 aa, Zea mays
  Clone ID: MRT4577_174352C.1.pep
KYTWLIMHILNHANSGPSAKQQYTVMNRRRSTLFRIPTRAGEFSRNGRRPRGACRRTRRPWG

SEQ ID NO: 266173 - protein, 793 aa, Zea mays
  unsure (1)..(793): unsure at all Xaa locations
  Clone ID: MRT4577_174353C.1.pep
DATRPDCPIIYASAGFYTMTGYTPKEVTGRNCRFLQGPDTDMNEVAKIRDAVKTGRSFCGRLLNYRKDGTPFWNMLTVTPIRDDNGKVIKFIGMQVEVSKYTEGLSEKRMRPNEMPVSLIHYDDRQKETAMSSITEVVQTVKHPRARSEGEQEPVEPAPPVMASPLVAPGTPSGGASLKSPLWDVKKEDSRLSRKSSRRSSLMGFKMGKRSSIGSKDALPAEVEAPAPXAPAPPESTTEKQRKNSWEQEGRERDIRQGIDLATTLERIEKNFVITDPRLPDNPIIFASDSFLELTEYTREEILGRNCRFLQGPETDMSTVDKIREAIREQKEITVQLINYTKSGKKFWNLFHLQPMRDQKGELQYFIGVQLDGSDHVEPLRNRLSENTELQSAKLVKATAENVDEAVRELPDPNLRPEDLWDIYSRYVSPKPHKRYNSSWIAMEKIIKSGVKIGLKHFKPIKPLGYGDTGSVHLVELQGSGELFAMKAMDKSVMLNRNKVHRACMEREIYSLLDHPFLPTLYTSFQTPTHVCLITDFCPGGELFALLDMQPMKLFREESARFYAAEVVIGLEYLHCLGIIYRDLKPENILLQEDGHIVLTDFDLSFLTSSKPHLXHTIVVIKHSTSRRRRSKEYLPPSFVSDPATPSNSFVGTEEYIAPEVITGVPHTSAIDWWALGILLYEMLYGRTPFRGKNRKRTFHNILHKDLTFPSSIPVSPAAKQLIHGLLQRDPSSRLGSSAAANDIKQHPFFEDIHWPLIRCMEPPELDVPLKLTRKEPEQKVKPEEDIYSCSDY

SEQ ID NO: 266174 - protein, 38 aa, Zea mays
  Clone ID: MRT4577_174354C.1.pep
ARIRLTKNQFQHCLNSINNKCSSQYMSLLILGPSGSNS

SEQ ID NO: 266175 - protein, 72 aa, Zea mays
  Clone ID: MRT4577_174355C.1.pep
QQDHSHHLFSHTTNTQLIYKCTYMHAVQEEMAAINAKAAQLEKLIKHTVTRVLIKHQLYYKYEGSKTIDTNG

SEQ ID NO: 266176 - protein, 105 aa, Zea mays
  Clone ID: MRT4577_174356C.1.pep
KNSKKIRRKKGKSGTRGKIERDQNHKKKAARNDKFKSGGALKADAIKNNSTGEKRRFPNGKPGGPFFKKNDQHPGKGLYRLGPKEVFFFNQGGGQQGMNLLPRGP

SEQ ID NO: 266177 - protein, 200 aa, Zea mays
  unsure (1)..(200): unsure at all Xaa locations
  Clone ID: MRT4577_174357C.1.pep
RAQELSSGRSGRDGEGGGGGGGGXAQEQWQGVVEANLPSTPASAAWPHIASFCALHRYLPGIDVCELAAGEDGRPGCVRYVASLVPGTTTGEVRSWAREKLLEIDDGARRLGYAVVGSSMGFGSYVATMSVVAGDADEGCRLVWAFECQPVQGWSRDGLLAYLDGGVRAIAARIEEATRAAYAAANATPEEAAASVAANA

SEQ ID NO: 266178 - protein, 147 aa, Zea mays
  unsure (1)..(147): unsure at all Xaa locations
  Clone ID: MRT4577_174358C.1.pep
SKDGSGTNDDAQVMSAIMPTLQPSLIMNLERHHSAKDMWDYLPGRYIQDSGALRPPLMQGLHELHQRDMYIEEYFXFFDRVMGPFLSMVPKCEQGCSGCCASKDWFFEKFLFYQFCHGSRPFFEPICKQLVHASPNPSIADCIVWIS

SEQ ID NO: 266179 - protein, 67 aa, Zea mays
  Clone ID: MRT4577_174359C.1.pep
ADPDLFPLQSTPCNDGTISMSTKKQNESMFKKANKGCTRGAKHPLRDPRMRPDETLIYPEVHRPRLQ

SEQ ID NO: 266180 - protein, 186 aa, Zea mays
  Clone ID: MRT4577_17435C.1.pep
MEEMIDLTGDGGVLKTVVRKAKDDAIAPSESLPLVDVHYEGTLAETGEVFDTTHEDNSIFSFEIGQGAVIKAWDIALRTMKVGEVAKITCKSEYAYGAAGSPPEIPPNATLIFEVELVACRPRKGSSLGSVSDEKARLEELKKQRELAAATKEEEKKKREEAKAAAAARVQAKLDAKKGKGKGKGK

SEQ ID NO: 266181 - protein, 86 aa, Zea mays
  Clone ID: MRT4577_174360C.1.pep
LAGSCPHAASGSRPSSNRISSHQIRSSFHPHASGEFVRPHASAGFVVLIDPFVVFLVRGCGDPESEFESLRRDWEVLVRELMWLQC

SEQ ID NO: 266182 - protein, 64 aa, Zea mays
  Clone ID: MRT4577_174361C.1.pep
MDTMILGRAPLLLLVSALLVQIRAYDPLLYQPFDDDFKGRSIVCKNDEYQGVWKHAKSDGHDDY

SEQ ID NO: 266183 - protein, 36 aa, Zea mays
  Clone ID: MRT4577_174362C.1.pep
HPSQLSFILMILTNHLRYYPKYTSDINYYLILLHFT

SEQ ID NO: 266184 - protein, 185 aa, Zea mays
  Clone ID: MRT4577_174363C.1.pep
MPLTWCSSIFQVTNANCTKKSIERPSTGELMASSSSSSHRRLILAAAVLLSVLAAASASAGTSCVPGWAIPHNPLPSCRWYVTSRTCGIGPRLPWPELKRRCCRELADIPAYCRCTALSILMDGAIPPGPDAQLEGRLEDLPGCPREVQRGFAATLVTEAECNLATISGVAECPWILGGGTMPSK

SEQ ID NO: 266185 - protein, 155 aa, Zea mays
  Clone ID: MRT4577_174364C.1.pep
MTLVEMCVHMDCPGCEKKIRKAVQRLEGVHDVEVDMAQQKVTVSGDVEQKKVLKAVRRTGRRAVLWPLPYAAGAAAGAAHVLAQQQPAAGAGAGAGPAHASHAARPTSSYNYYKHGYDDSSLYGAYYHHGANSAVAGTRSTDYFSDENAQGCSVM

SEQ ID NO: 266186 - protein, 32 aa, Zea mays
  Clone ID: MRT4577_174365C.1.pep
LWNVWYVLSRTHIMVDTHPILRSRSPCFCNYV

SEQ ID NO: 266187 - protein, 151 aa, Zea mays
  Clone ID: MRT4577_174366C.1.pep
TTTPLIPLSTASRWISSDAWADAWADAWADAWADAWAHNPLPSCRWYVTSRTCGIGPRLPWPELKRRCCRELADIPAYCRCTALSILMDGAIPPGPDAQLEGRLEDLPGCPREVQRGFAATLVTEAECNLATISGVAECPWILGGGTMPSK

SEQ ID NO: 266188 - protein, 57 aa, Zea mays
  unsure (1)..(57): unsure at all Xaa locations
  Clone ID: MRT4577_174367C.1.pep
SSLCGSCGAYHAMDQFWIWCDNXEKWSHGNCVXITPARSXHINQYKHPVCANNRVWA

SEQ ID NO: 266189 - protein, 180 aa, Zea mays
  Clone ID: MRT4577_174368C.1.pep
MFGIVFPDHTFPLDATAFAQVAPNSWVLDLSTLALAAAPRSAVVFLLPAAVTALPPGKAVSVYFQAATNRPFAFLGALGPTRPSASFPLPEAGDEPEPAVGPAKLGVAVEDAAALPPPPDEQRAERVALRVGENLFNFMQSFCGADGGKLVVPTDILDRWFRKFQERAKKDPAYLKSFDF

SEQ ID NO: 266190 - protein, 89 aa, Zea mays
  unsure (1)..(89): unsure at all Xaa locations
  Clone ID: MRT4577_174369C.1.pep
FWWQTGHVEFPGPPTQVPLXGGFSGGGFPPMIVVPSGGKYGFVQPRQPGVFFFSPLVGGLIVVIGVVFVFLPPSWSNAPKPRVSWFENR

SEQ ID NO: 266191 - protein, 53 aa, Zea mays
  Clone ID: MRT4577_174370C.1.pep
LIPMLTLSCRSKTTHNQLTNNLTIQKKLNPDTYAHPKIPNPYPQTYQPSLYSI

SEQ ID NO: 266192 - protein, 63 aa, Zea mays
  Clone ID: MRT4577_174371C.1.pep
GTSVLSSAPHDYRAFVGAYDDDGYNKTGDQKVHSLATRNKREVCFFFTLFYCAPSGTAASLCT

SEQ ID NO: 266193 - protein, 47 aa, Zea mays
  Clone ID: MRT4577_174372C.1.pep
PTRPALGGLMCYENPKHKVTAVPADEEEICGATFKVVEGSTVLTALH

SEQ ID NO: 266194 - protein, 74 aa, Zea mays
  Clone ID: MRT4577_174373C.1.pep
KFLVEVKSGQGDATLTPDMELRGLKPNFDWWKKDFSGRIREPKMFLTKLGNGNESSPNSVKRKWWGRLTPSKFS

SEQ ID NO: 266195 - protein, 229 aa, Zea mays
  Clone ID: MRT4577_174374C.1.pep
MQIFVKTLTGKTITLEVESSDTIDNVKAKIQDKEGIPPDQQRLIFAGKQLEDGRTLADYNIQKESTLHLVLRLRGGMQIFVKTLTGKTITLEVESSDTIDNVKAKIQDKEGIPPDQQRLIFAGKQLEDGRTLADYNIQKESTLHLVLRLRGGMQIFVKTLTGKTITLEVESSDTIDNVKAKIQDKEGIPPDQQRLIFAGKQLEDGRTLADYNIQKESTLHLVLRLRGGQ

SEQ ID NO: 266196 - protein, 44 aa, Zea mays
  Clone ID: MRT4577_174375C.1.pep
RCDQRALRHYPLRRSVWMSGGEESYEDYAKSGERTVSRQEGESG

SEQ ID NO: 266197 - protein, 157 aa, Zea mays
  Clone ID: MRT4577_174376C.1.pep
LRGGMQIFVKTLTGKTITLEVESSDTIDNVKAKIQDKEGIPPDQQRLIFAGKQLEDGRTLADYNIQKESTLHLVLRLRGGMQIFVKTLTGKTITLEVESSDTIDNVKAKIQDKEGIPPDQQRLIFAGKQLEDGRTLADYNIQKESTLHLVLRLRGGQ

SEQ ID NO: 266198 - protein, 242 aa, Zea mays
  Clone ID: MRT4577_174377C.1.pep
MQIFVKTLTGKTITLEVESSDTIDNVKAKIQDKEGIPPDQQRLIFAGKQLEDGRTLADYNIQKESTLHLVLRLRGGMQIFVKTLTGKTITLEVESSDTIDNVKAKIQDKEGIPPDQQRLIFAGKQLEDGRTLADYNIQKESTLHLVLRLRGGMQIFVKTLTGKTITLEVESSDTIDNVKAKIQDKEGIPPDQQRLIFAGKQLEDGRTLADYNIQKESTLHLVLRLRGGMQIFVKTLTGKTSP

SEQ ID NO: 266199 - protein, 119 aa, Zea mays
  Clone ID: MRT4577_174378C.1.pep
SLWLGDCGNTLMVPLQTATLSCNISIKMLICGEWLGQQTLGDFGLSPGSACLLLVVVVWFFMDIYVYACVWPPSGGHFLYCFCLIRPIFVLNIMMRSPPAFSREKNGRLHSCRFRIGIP

SEQ ID NO: 266200 - protein, 419 aa, Zea mays
  unsure (1)..(419): unsure at all Xaa locations
  Clone ID: MRT4577_174379C.1.pep
MAEYEALIFGLSVALSLGIQQLLVKGDSQLIIKQVHGECSCNEPRLAAYLLHVRKLEKDFTALELQHVPRADNSVVDDLSVKASTWAPVPEGIFKRWLLRPTAQPAELGEGGETSTSKLAVLVASQNPPKAVCATGGPASPLAPQPXLRVVXAWISEIRDYLKENILPEDHVSAERIVQLAKRYAVVEGDLYRRGSNGIHMRCITQEEGCELLTEIHGGECGSHSSSRTLVGKAXRHGFYWPTALQDATEXWAIGGYWYLFVAIDKFTKWPEATPVVSITQGATVAFLKSIVCRFGVPSRIITDNGTQFTSRMFQEYCKGIGTQLCFASVAHPRSNDQMERANAEILKGLKTHTYDCLKKHGANWVSGLPSMLWGNQTTPNRATEETLFFLVYGAEACLPSEIIMGSPRVQAFDESMQE

SEQ ID NO: 266201 - protein, 201 aa, Zea mays
  Clone ID: MRT4577_17437C.1.pep
MDAEAGVAGADQLPRRQYYMNLLLLAYQSFGVVYGDLSTSPLYVYKSTFSGKLNQYQDEETVFGVLSLIFWTFTLIPLLKYVTIVLSADDNGEGGPFALYSLLCRHTKLSLLPNQQAADEELSSYYRNGFAPSNGSSPWLRRFLEKHKKMRVVLLLIVLCGASMVIGDGVLTPAISVLSSMSGLQVRATGLKHNDCVSLQC

SEQ ID NO: 266202 - protein, 253 aa, Zea mays
  unsure (1)..(253): unsure at all Xaa locations
  Clone ID: MRT4577_174380C.1.pep
MQIFVKTLTGKTITLEVESSDTIDNVKAKIQDKEGIPPDQQRLIFAGKQLEDGRTLADYNIQKESTLHLVLRLRGGMQIFVKTLTGKTITLEVESSDTIDNVKAKIQDKEGIPPDQQRLIFAGKQLEDGRTLADYNIQKESTLHLVLRLRGGMQIFVKTLTGKTITLEVESSDTIDNVKAKIQDKEGIPPDQQRLIFAGKQLEDGRTLADYNIQKESTLHLVLRLRGGMQIFVKTLXXKTITLEVESSDTIDT

SEQ ID NO: 266203 - protein, 51 aa, Zea mays
  Clone ID: MRT4577_174381C.1.pep
KNILKYQMQSFLNISHNYSFTYCSYCSYAASTMLHQLYLALLSQNLGDEAF

SEQ ID NO: 266204 - protein, 65 aa, Zea mays
  Clone ID: MRT4577_174382C.1.pep
KLKTTGAKYQWQLRLIQKKKKKKKKKKKKKKKKKKKKKKKKKKKKKKKKKKKKGGALWGGPTLKY

SEQ ID NO: 266205 - protein, 80 aa, Zea mays
  Clone ID: MRT4577_174383C.1.pep
IIRMMDKVLHHNNRIFLHPGYLVLIHPFCAPIILNAYGLQMENLLLLNEVAACSKILVRPLHLWSDPRPRMSMLCVCTNS

SEQ ID NO: 266206 - protein, 276 aa, Zea mays
  unsure (1)..(276): unsure at all Xaa locations
  Clone ID: MRT4577_174384C.1.pep
QSNPAPSHLAGKSPPTDRSEGHLVLLLKMQIFVKTLTGKTITLEVESSDTIDNVKAKIQDKEGIPPDQQRLIFAGKQLEDGRTLADYNIQKESTLHLVLRLRGGMQIFVKTLTGKTITLEVESSDTIDNVKAKIQDKEGIPPDQQRLIFAGKQLEDGRTLADYNIQKESTLHLVLRLRGGMQIFVKTLTGKTITLEVESSDTIDNVKAKIQDKEGIPPDQQRLIFAGKQLEDGRTLADYNIQKESTLHLVLRXLRGGMQIFVKTLTGKTXTLEVES

SEQ ID NO: 266207 - protein, 150 aa, Zea mays
  unsure (1)..(150): unsure at all Xaa locations
  Clone ID: MRT4577_174385C.1.pep
RQQERCRLLGGSHRVHDDDGCWRRLLRPVASRRPLPWLYLPRPRYIRRRRAGRALKHCRPRPSPPHPGWAEQVPWPACAQGASEEARPGHPDYKNAYGLQMENLLLLNEVAACSKILVRPLHLWSDPRPRMSMXVCMYQQLKCKHXHYHS

SEQ ID NO: 266208 - protein, 277 aa, Zea mays
  Clone ID: MRT4577_174386C.1.pep
RELWISPGNLRSERSEGSLVLLLKMQIFVKTLTGKTITLEVESSDTIDNVKAKIQDKEGIPPDQQRLIFAGKQLEDGRTLADYNIQKESTLHLVLRLRGGMQIFVKTLTGKTITLEVESSDTIDNVKAKIQDKEGIPPDQQRLIFAGKQLEDGRTLADYNIQKESTLHLVLRLRGGMQIFVKTLTGKTITLEVESSDTIDNVKAKIQDKEGIPPDQQRLIFAGKQLEDGRTLADYNIQKESTLHLVLRLRGGMQIFVKTLTGKTITLEVESLDTSTR

SEQ ID NO: 266209 - protein, 101 aa, Zea mays
  Clone ID: MRT4577_174387C.1.pep
DEGEERQAAFQLRQGCQERGPSKHHRPMSAPARHNVRPDRLGGSRTGARARVHVHEGNRNETRDLNNLLRESSWMATHSSGASTPSTPLSPTRTRSAGTSQ

SEQ ID NO: 266210 - protein, 90 aa, Zea mays
  Clone ID: MRT4577_174388C.1.pep
KNPIVVVVYLVHHSEKHRKLIQCICLTLETLGQLMDDLFDIGNFNMHTSESSLPSGYMGSVSQNQMLKGMSNLQDQPKCIINQRMKKTTI

SEQ ID NO: 266211 - protein, 240 aa, Zea mays
  Clone ID: MRT4577_174389C.1.pep
MQIFVKTLTGKTITLEVESSDTIDNVKAKIQDKEGIPPDQQRLIFAGKQLEDGRTLADYNIQKESTLHLVLRLRGGMQIFVKTLTGKTITLEVESSDTIDNVKAKIQDKEGIPPDQQRLIFAGKQLEDGRTLADYNIQKESTLHLVLRLRGGMQIFVKTLTGKTITLEVESSDTIDNVKAKIQDKEGIPPDQQRLIFAGKQLEDGRTLADYNIQKESTLHLVLRARGGMQIFVKTLTGKT

SEQ ID NO: 266212 - protein, 70 aa, Zea mays
  Clone ID: MRT4577_17438C.1.pep
AGVFFGRNADVYSPVSATIFYTKIIKKKDLLEVTKLGPSICIQIQDARCWALWEAEETMFLLPIRHFPGP

SEQ ID NO: 266213 - protein, 244 aa, Zea mays
  unsure (1)..(244): unsure at all Xaa locations
  Clone ID: MRT4577_174390C.1.pep
MSSYEPMRVFVNTLTGQNHLCLMVQXSDTNNCVKDKIQDKEGSAPDQXCLIFAGNQLEDGRALADYNIXQKESTLHLVLRLRVGMQIFVKTLTGKTITLEVESSNTIDNVKAKIQDKEGIPPDQQRLIFAGKQLEDGRTLADYNIQKESTLHLVLRLRGGMQIFVKTLTGKTITLEVESSDTIDNVKAKIQDKEGIPPDQQRLIFAGKQLEDGRTLADYNIQKESTLHLVLRLRGGMPIFXKTL

SEQ ID NO: 266214 - protein, 81 aa, Zea mays
  Clone ID: MRT4577_174391C.1.pep
ARYLPASLCHLAECRLRFLNSHACTWLSAHGLHRVVGTLTVAQFVFHVYSPRSCSGSSPLRFRVEGGAGSCSQSVGCASSR

SEQ ID NO: 266215 - protein, 71 aa, Zea mays
  unsure (1)..(71): unsure at all Xaa locations
  Clone ID: MRT4577_174392C.1.pep
SLLXFLFXSXILYSFFLNQPPFNSLFIPFLYPLTIQCXLPQSISYFITSNLNNILPIYHXFNFFFFTPQTQ

SEQ ID NO: 266216 - protein, 252 aa, Zea mays
  unsure (1)..(252): unsure at all Xaa locations
  Clone ID: MRT4577_174393C.1.pep
MQIFVKTLTGKTITLEVESSDTIDNVKAKIQDKEGIPPDQQRLIFAGKQLEDGRTLADYNIQKESTLHLVLRLRGGMQIFVKTLTGKTITLEVESSDTIDNVKAKIQDKEGIPPDQQRLIFAGKQLEDGRTLADYNIQKESTLHLVLRXLRGGMQIFVKTLTGKTITLEVESSDTIDNVKAKIQDKXGIPPDQQRLIFAGKQLEDGRTLADYNIQKESTLHLVLRLRGGMQIFVKTLTGKTXTLEVESSDTI

SEQ ID NO: 266217 - protein, 92 aa, Zea mays
  Clone ID: MRT4577_174394C.1.pep
LPGLRAFRVWPIAAFSICPCPVSILVPVLDRRKRSILPSLAIAKVIFFLAIKWAERVISLFLFISIFLLLFYICFAVDYKKYKTPPVGLCTH

SEQ ID NO: 266218 - protein, 154 aa, Zea mays
  unsure (1)..(154): unsure at all Xaa locations
  Clone ID: MRT4577_174395C.1.pep
THIKAVFYIMHEVTKVFLGAFSGQSKGTVYPKVGTTLVSKVAQAFGGPVXVGCEGDKFYXRVQPDFKSFKELGGPNVFLKVPRDESLSNFKNWGEKKNFHFLNFKEEIPPSDYVSMLKTNYGMLPPPRVPVLVKKAPREPVWKKKPPFSLLVLF

SEQ ID NO: 266219 - protein, 76 aa, Zea mays
  Clone ID: MRT4577_174396C.1.pep
QIPLPSLQQPIHSSNEIIFIQPIHRNKTCPPLYMISKLRHIPTKINNILTHRKNPMLNPRSTQVMIPLPLSLPKPK

SEQ ID NO: 266220 - protein, 102 aa, Zea mays
  Clone ID: MRT4577_174397C.1.pep
FMHAMQIEVLLVSVDTLSKGYLGNSPSMSRSIVASLWLTSRFKVQHPRMCNGKDPARQVCAGMPVYPFESITEVLFETESTIIISVKVYCRLGPVFFNIPSS

SEQ ID NO: 266221 - protein, 65 aa, Zea mays
  unsure (1)..(65): unsure at all Xaa locations
  Clone ID: MRT4577_174398C.1.pep
LTKAFFFQLACLHTNXNFFHPLQYLHXXSYSTYDIHILSSIFNISLFLTILTINYLFFHTLYIFF

SEQ ID NO: 266222 - protein, 138 aa, Zea mays
  Clone ID: MRT4577_174399C.1.pep
FGSRCNCPSVSPAARAEEAGEFQRRLGAEPEGPRLAGPRKPDDSRPPPRVGGLLGTVAPRKHNRAHQNFRAHGPPPPRSGPPPTTKGPSNTKPGHRCSYQTAKKTPSHRFCGSKSINGHFSLPIWLEYWRAQVNSWLP

SEQ ID NO: 266223 - protein, 62 aa, Zea mays
  Clone ID: MRT4577_17439C.1.pep
PLGSCRGYDCFYGIMCGWGKRWEIMGGGECFSLPSLFINVKQAKGDVLTSKVEGGYFFSKRV

SEQ ID NO: 266224 - protein, 127 aa, Zea mays
  Clone ID: MRT4577_1743C.1.pep
EITAAREMSSIKVDDVSLKIAKNVGSAVEATNKLPSTSRNVEFRYNRKNPKRRRFLEASHEKLCFSIDSTCGPDSAATSNPISIVDHQGIGKPISGETIMSVDIDERLASLSNMVAVLCEQQLFLPL

SEQ ID NO: 266225 - protein, 94 aa, Zea mays
  unsure (1)..(94): unsure at all Xaa locations
  Clone ID: MRT4577_174400C.1.pep
CRLLLARVFPPLGRLLLSPLLCWPLVCSLSPGRLSCFGLLPCLFSCLPLFPLLLFLLVWVPVVCLPCFFAPFLSVLLSPSLGVLYLLACXFFVF

SEQ ID NO: 266226 - protein, 137 aa, Zea mays
  unsure (1)..(137): unsure at all Xaa locations
  Clone ID: MRT4577_174401C.1.pep
MADVDVEPEVAAGAPKKRTFRKYSYRGVDLDALLDMSTDDLVQLFXPLIKKLRKAKKDAPAGEKPEPVKTHLRNMIIVPEMIGSIVGVYNGKTFNQVEIKPEMIGHYLAEFSISYKPVKHGRPGIGATHSSRFIPLK

SEQ ID NO: 266227 - protein, 180 aa, Zea mays
  unsure (1)..(180): unsure at all Xaa locations
  Clone ID: MRT4577_174402C.1.pep
MADVDVESEVAAGAPKKRTFRKYSYRGVDLDALLDMSTDDLVQLFPARARRRFQRGLKRKPMAXHQETAEGARRIRENRNVSSRMSLMHLLLILPIRXEKGCSCWXKPEPVKTHLRNMIIVPEMIGSIVGVYNGKTFNQVEIKPEMIGHYLAEFSISYKPVKHGRPGIGATNSSRFIPLK

SEQ ID NO: 266228 - protein, 143 aa, Zea mays
  unsure (1)..(143): unsure at all Xaa locations
  Clone ID: MRT4577_174403C.1.pep
RDLEPLLLCLLLLAGAADAAPLLVGVFPKGTSACPEGKFYCRNIGDTPRLLFSSFVNDKICDCCDGSDEYESGIHCQNTCRNIKDTAEADGGGGDLAVTHLDSTDDFMSKHAIAMEDHIQNNSNRDLVQKIRGLRTXLVIELG

SEQ ID NO: 266229 - protein, 131 aa, Zea mays
  unsure (1)..(131): unsure at all Xaa locations
  Clone ID: MRT4577_174404C.1.pep
LAHGLICVAQADVDVEPEVAAGAPKKRTFRKYSYRGVDLDALLDMSTDDLVQLFPARARRRYLSCRDSFVSVVFLFAEFVLXFQRGLKRKPMALIKKLRKAVSFQPLSFHYHFLLACPDQDNCVDLLWCHY

SEQ ID NO: 266230 - protein, 242 aa, Zea mays
  Clone ID: MRT4577_174405C.1.pep
MWTPRPSRRVVSSASDTLLLCLLLLAGAADAAPLLVGVFPKGELRSRAYLRTSFLDLLTESFPKDEAYFATQVIACRDGSGSFPRSRLNDGYCDCGDGTDEPGTSACPEGKFYCRNIGDTPRLLFSSFVNDKICDCCDGSDEYESGIHCQNTCRNIKDTAEADGGGGDLSVTHLDSTDDFMSKHAIAMEDHIQNNSNRDLVQKIRGLRTALVIELGLVVCIFAFCIARRRTRTRRRQHILKR

SEQ ID NO: 266231 - protein, 133 aa, Zea mays
  Clone ID: MRT4577_174406C.1.pep
MYSMLAAVPFVLCQVDAVNARLYLPVIICGSLVTYTCYTISSRAISHCPQQKKNAPAGEKPEPVKTHLRNMIIVPEMIGSIVGVYNGKTFNQVEIKPEMIGPPPAEFSISYKPVKHGRPGIGAPPPSRFIPLK

SEQ ID NO: 266232 - protein, 136 aa, Zea mays
  unsure (1)..(136): unsure at all Xaa locations
  Clone ID: MRT4577_174407C.1.pep
MRVIRTWITAVPARAASPKRVRICTNPTSRMATRKEHSQEPQAADDCTIHDSKKMLHAHYRVADLDRTLQDYTQCFGIKLLRTRDGPGQKHNNDLLRFRTDNTNLAGALTFDYGADQHDIXTCFVHFTIADDHAND

SEQ ID NO: 266233 - protein, 104 aa, Zea mays
  Clone ID: MRT4577_174408C.1.pep
RRRFQRGLKRKPMALIKKLRKAKKDAPAGEKPEPVKTHLRNMIIVPEMIGSIVGVFNGKTFNQVEIKPEMIGPYPGEFSISYKPVKHGRAGIGAPPPPRFIPLK

SEQ ID NO: 266234 - protein, 131 aa, Zea mays
  Clone ID: MRT4577_174409C.1.pep
TFRSTITRSIRHPQIEPTKSSTHMILQQQLCLPQINQHQHHNLTTTRKRPQTPILSTRLSTAIRKTQSNRQTQQQHHHRSSPLLLLLLLIIITTIRHIHRAIIIPHPPQQTTLTNTIHTQRRNHHHVRRKN

SEQ ID NO: 266235 - protein, 254 aa, Zea mays
  unsure (1)..(254): unsure at all Xaa locations
  Clone ID: MRT4577_17440C.1.pep
MDAEAGVAGADQLPRRQYYLNLLLLAYQSFGVVYGDLSTSPLYVYKSTFSGKLRHYQDEETVFGVLSLIFWTFTLIPLLKYVTIVLSADDNGEGGPFALYSLLCRHAKLSLLPNQQAADEELSSYYRNGFAPRNGSSPWLRRFLEKHKKMRTLFLLIVLCGASMVIGDGVLTPAISVLSSMSGLHVRATGLHHSSVVLLSCIVXVGLFALQHRGTQKXTVSALLAFMFAPIVIIWLLSIGRNRLYNILQCDPNV

SEQ ID NO: 266236 - protein, 220 aa, Zea mays
  unsure (1)..(220): unsure at all Xaa locations
  Clone ID: MRT4577_174410C.1.pep
MADVDVEPEVAAGAPKKRTFRKYSYRGVDLDALLDMSTDDLVQLFPARARRRYLSCHDSFVSVVFLFAEFVLXFQRGLKRKPMALIKKLRKAVSFQPLSFHYHFLLACSDQDKCVDRYAVMIYPYDMRCDLGVKILIKSQRLLLFSVNIVLKEDAINQPEDCLLECLARLASMSVAITNVVARLLVLTVAITNVESCYLCLEGEFVVFCRAPISFVLSFL

SEQ ID NO: 266237 - protein, 133 aa, Zea mays
  Clone ID: MRT4577_174411C.1.pep
MYSMLAAVPSVLCQVDAVNARLCLSVIICGSLFSYTCYSISSRAISHCPEQKKDAPAGEKPEPVKTHLRNMIIVPEMIGSIVGVYNGKTFNQVEIKPEMIGHYLAEFSISYKPVKHGRPGIGATHSSRFIPLK

SEQ ID NO: 266238 - protein, 120 aa, Zea mays
  unsure (1)..(120): unsure at all Xaa locations
  Clone ID: MRT4577_174412C.1.pep
PYVDVEPVAAGAPKKRXFRKYSYRGVDLDALLDMSTDDLVQLFPARARRRYLSCHDSFVSVVFLFAEFVLXFQRGLKRKPMALIKKLRKAVSFQPLSFHYHFFLACSDQDNCVDLLCCHD

SEQ ID NO: 266239 - protein, 153 aa, Zea mays; identical to SEQ ID NO: 227917
  Clone ID: MRT4577_174413C.1.pep

SEQ ID NO: 266240 - protein, 82 aa, Zea mays
  Clone ID: MRT4577_174414C.1.pep
VLVGVLSMVRILVCIQTFIFSFIRSSLRTRQHIRGQDKVHHYLSPAYGLAYASDVPSSVKPTVRYPVRSLLCSRLSSISQSL

SEQ ID NO: 266241 - protein, 70 aa, Zea mays
  Clone ID: MRT4577_174415C.1.pep
GVHPLQVLVGQHVQAGYPRSRLFRRRIHHVPQYVLRLSSSVSSSATPYLSPSREGSLIARAFMSGWANNG

SEQ ID NO: 266242 - protein, 82 aa, Zea mays
  unsure (1)..(82): unsure at all Xaa locations
  Clone ID: MRT4577_174416C.1.pep
LLXGXSWCGXVPPPPPXXXXXXGGKRKNSPPPPSLLXFFXGFFPGXXRVCAFXXLLFXGALPSPGGCRGVXLAFVLPPPPPP

SEQ ID NO: 266243 - protein, 79 aa, Zea mays
  Clone ID: MRT4577_174417C.1.pep
SNSSLRAVFLCGAGTGYTIPAGWGVMVCPPAVHLNPDIYEDPLAFNPWRWQVRLLLDISAATSHLARVLSREVVSFSAY

SEQ ID NO: 266244 - protein, 591 aa, Zea mays
  Clone ID: MRT4577_174418C.1.pep
MAMTPHASAATVAVTPALRFPHTLSATGLSSPPLAGGCGGCRVRFRPSQRGRGTQGRRGGSHVSRVGGLLGTVFGGGGRDDGEATRKKYADTVARINSMEPEVSALSDADLRARTAALQDRARSGESLDSLLPEAFAVVREASKRVLGLRPFDVQLIGGMVLHKGEIAEMKTGEGKTLVAILPAYLNALSGKEVHVVTVNDYLARRDCEWVGQVPRFLGLQVGLIQQNMTPEQRRENYSYDITYVTNSELGFDYLRDNLAMTVDELVLRNFNYCVIDEVDSILIDEARTPLIISGLAEKPSDRYYKAAKIAEAFERDIHYTVDEKQRNVLLTEEGYADAEEILDIDDLYDPREQWASYILNAIKAKELFLKDVNYIVRSKEVLIVDEFTGRVMAGRRWSDGLHQAIEAKEGVPIQNETITLASISYQNFFLQFPKLCGMTGTAATEIQEFESIYKLKVTVVPTNKPMIRKDESDVVFRATNGKWRAVLVEISRMNKVGRPVLVGTTSVEQSESLSKQLREAGIPHEVLNAKPENVEREAEIVAQSGRLGAVTIATNMAGRGTDIILGGNAEFMARLKLREILMPRVVNPID

SEQ ID NO: 266245 - protein, 57 aa, Zea mays
  Clone ID: MRT4577_174419C.1.pep
EFVSMPWAFVQSMRIWCIGCIYLASVPLHERVVLHAQVSVLGLGLHLTQACGGAHAS

SEQ ID NO: 266246 - protein, 59 aa, Zea mays
  unsure (1)..(59): unsure at all Xaa locations
  Clone ID: MRT4577_17441C.1.pep
IGXKSSPSLPRQISGPHPVIFAGEILAPSPSSSSPTGKIAILNHSYVVTCSYVQLRASR

SEQ ID NO: 266247 - protein, 103 aa, Zea mays
  Clone ID: MRT4577_174420C.1.pep
RGLFRSLYKVIRSAAFKAKPALISIIGAASAASGGEAASAAVPCLRDALTADDWAARKAAAEALALLALEHGDDLVSHKSSCITVFEAKRFDKVGRMRCSASS

SEQ ID NO: 266248 - protein, 396 aa, Zea mays
  Clone ID: MRT4577_174421C.1.pep
GMQIFVKTLTGKTITLEVESSDTIDNVKAKIQDKEGIPPDQQRLIFAGKQLEDGRTLADYNIQKESTLHLVLRLRGGMQIFVKTLTGKTITLEVGSSDTIDNVKAKIQDKEGIPPDQQRLIFAGKQLEDGRTLADYNIQKESTLHLVLRLRGGMQIFVKTLTGKTITLEVESSDTIDNVKAKIQDKEGIPPDQQRLIFAGKQLEDGRTLADYNIQKESTLHLVLRLRGGMQIFVKTLTGKTITLEVESSDTIDNVKAKIQDKEGIPPDQQRLIFAGKQLEDGRTLADYNIQKESTLHLVLRLRGGMQIFVKTLTGKTITLEVESSDTIDNVKAKIQDKEGIPPDQQRLIFAGKQLEDGRTLADYNIQKESTLHLVLRLRGGMQIFVKTLTGKTLHL

SEQ ID NO: 266249 - protein, 69 aa, Zea mays
  Clone ID: MRT4577_174422C.1.pep
LLLVIPCSIWSSRANTVKGGAPTWTSVKLASPTLVAVNMQTQQDHCSGTRRKATLANQPPKLAQHRLHS

SEQ ID NO: 266250 - protein, 47 aa, Zea mays
  Clone ID: MRT4577_174423C.1.pep
SHPWLKMRKSRILQLHCELMDSDMQMLKGSTKVTPRKMAVCLTGYRR

SEQ ID NO: 266251 - protein, 55 aa, Zea mays
  Clone ID: MRT4577_174424C.1.pep
CYLCWSERMGLIPSLTFEQRLACNFGVWETKTMERLWRENFFDTATNNWTTNNTR

SEQ ID NO: 266252 - protein, 66 aa, Zea mays
  Clone ID: MRT4577_174425C.1.pep
SHKEGFQIFYLWGLFMLPTRKWKNVLAVATSVVGLYLLKSRGGCMNSYTLFLYNRRTLTFLEKKKK

SEQ ID NO: 266253 - protein, 75 aa, Zea mays
  Clone ID: MRT4577_174426C.1.pep
ALGTACSSTRDLLRAAHLLQLASVDDGCHRQALARCLRFYSFIPPKHLYLLRTIKRSIFQLASIRVDHTIRLKSP

SEQ ID NO: 266254 - protein, 89 aa, Zea mays
  Clone ID: MRT4577_174427C.1.pep
RDILSAAVGAGKLGAGGDAVAVEVRLPPLSEADPLLAEKKMILEKRNLSCEIQIPVACSAVDALKLLDHIIEAARVVYMDEVFQSCHSF

SEQ ID NO: 266255 - protein, 363 aa, Zea mays
  Clone ID: MRT4577_174428C.1.pep
MRDAVAKREAMKGGASSKGPVVVTGASGFVGSWLVMKLLQAGYTVRATVRDPENVGKTKPLLDLPGATERLSIWKADMADEDSFDEAIRGCTGVFHVATPTDFESKDPENEVIKPTVEGMIRILRACKEAGTVRRIVFTSSAGTVCVEERRRPVYDHDNWSDVDFCRRVKMTGWMYFVSKSLAEKAAMAYAAEHGLDLVSVIPTLVVGPFLSAAMPPSLVTALALVTGNEAHYSILKQVQFVHLDDLCDAEIFLFEHPAAAGRYVCSSHDATIHGLAAMLRDRYPEYDIPQKLRGIEDDLQPVHFSSKKLLDHGFTFRYTVEDMFDAGIRTCREKGLIPLATAGGVGSASLRTPGETDVTNGA

SEQ ID NO: 266256 - protein, 153 aa, Zea mays
  Clone ID: MRT4577_174429C.1.pep
MSTCTFATSCVLLGNARTTDVPQKALKSRVSFLGRGALQLPSLRSSSKKKLDVSAAATYKVKLVTPEGEEHEFEAPDDAYILDSAETAGVELPYSCRAGACSTCAGKIEAGAVDQSDGSFLDDAQQEEGYVLTCVAYPKSDCVIHTHKEGDLY

SEQ ID NO: 266257 - protein, 37 aa, Zea mays
  Clone ID: MRT4577_17442C.1.pep
DKAPNPKWVPPRLEQVHAGAVDQYLSRIGDPQWEGLS

SEQ ID NO: 266258 - protein, 202 aa, Zea mays
  Clone ID: MRT4577_174430C.1.pep
MALDTGTAAGIDEAYEFSAPRFFDFVVEETEEAVRAAESWFEAARSHAPSPFNPRIKESRAEVKLAVLCDFAQAEEPAPEVNKQKEPADEMSGPPAAQEERDESPPSLEFLSATDLSVKSADGGSTSTLKMQTRYPAPPTNVAPASSTCDSSSVNTDARTPKMQVNMCRAGPTAASTNVKRSVMIKGGRDLVGTGKAATAGA

SEQ ID NO: 266259 - protein, 63 aa, Zea mays
  Clone ID: MRT4577_174431C.1.pep
KLGIRLEVNLSFYALRQWILHGGCMSFKGRTCLMSGNWTSGTCCMPDRLLSLRPDPPLVWVAR

SEQ ID NO: 266260 - protein, 126 aa, Zea mays
  Clone ID: MRT4577_174432C.1.pep
ASAKSSPGGRIPRWPATTRCCGPGSSTARRWRAARSPTPSPSTFSPLPAASPTPRTHRSRKDHPRRGPTRTSLGIRSPGPGLTIQIKQYSTTATTLPALLVSCFQFSFSVSGVGFAKLLCTNYEYQ

SEQ ID NO: 266261 - protein, 55 aa, Zea mays
  Clone ID: MRT4577_174433C.1.pep
ISIKSICCCVSWHQQKKKKKKKKNLEKKKKKKKKKKKKKKKKKKKRVVPYLTLFF

SEQ ID NO: 266262 - protein, 92 aa, Zea mays
  Clone ID: MRT4577_174434C.1.pep
GKPNDMDFIHYTLVGRGKSFSNGYPQMGKRRWGQIRLPPSPNKANLGFPVKTRQRGGGGWVFKKKGGRPPPRVPPPLWGYIIKGGFFKNLSL

SEQ ID NO: 266263 - protein, 47 aa, Zea mays
  Clone ID: MRT4577_174435C.1.pep
IMQICTSCSPNMMDQNVNNINENMRRLYMFAVKQWSTCKPGRLERRT

SEQ ID NO: 266264 - protein, 81 aa, Zea mays
  Clone ID: MRT4577_174436C.1.pep
PGIPGRGQKGKEPGGWGGKLWGGADLPAIHRYCLGCVRKKKPKSLSWLSFFAGWASALVLMSDRGSTSLWVDPMAFAVPIY

SEQ ID NO: 266265 - protein, 76 aa, Zea mays
  Clone ID: MRT4577_174437C.1.pep
VYTSECIEKKKVGSYITNHQDPAGAQREHEGPQTQDQWWNALYPTDNKTTTTHRLLDAYTSLSRSRDGPTQDTFQP

SEQ ID NO: 266266 - protein, 59 aa, Zea mays
  Clone ID: MRT4577_174438C.1.pep
SRVATQSSFELTKRRYGSYQMLLTGHTNAKYLWRRVPINLIQSICMTKVPLLTGRGNGT

SEQ ID NO: 266267 - protein, 90 aa, Zea mays
  unsure (1)..(90): unsure at all Xaa locations
  Clone ID: MRT4577_174439C.1.pep
NLRNRLINTVVNQLMKHRKKRXAYQIIYPAPXKIQQLTYTKPLFVLRQAIRRVTPNICVKTKTFLNKDRLRKILIEILSKQGKALAIRWL

SEQ ID NO: 266268 - protein, 53 aa, Zea mays
  Clone ID: MRT4577_17443C.1.pep
MRRCVWQAPAQPPLEHGPEWLHYAVHCQTGGPHGRRQRRRLGLFWAPYLTTAP

SEQ ID NO: 266269 - protein, 62 aa, Zea mays
  Clone ID: MRT4577_174440C.1.pep
GTSHTHFLIAENCWTNDNATVGYMKRRCSRRSTQITSSCSVLRDAFDYLAKIMGLHEKNIKR

SEQ ID NO: 266270 - protein, 73 aa, Zea mays
  Clone ID: MRT4577_174441C.1.pep
MSDLDIQMPTAFDPFVEANARDSGAAARSNDYVHVRIQQRNGRKSLTTVHGLQNEFSYSKILKDLKNEFCCNG

SEQ ID NO: 266271 - protein, 40 aa, Zea mays
  unsure (1)..(40): unsure at all Xaa locations
  Clone ID: MRT4577_174442C.1.pep
LRXXYXACXHSYXXXEALCRXDRXXXIPSGYTVXDRGXTL

SEQ ID NO: 266272 - protein, 76 aa, Zea mays
  Clone ID: MRT4577_174443C.1.pep
DYSSIETSALTFIHLLSHIPPPVLENMRLRSQDLLAHWGKTCHQICLANTQDTKRCGTVSSIWSQRGHLSDCCANI

SEQ ID NO: 266273 - protein, 58 aa, Zea mays
  Clone ID: MRT4577_174444C.1.pep
MVGTGLRECGGQRSRPVTGHDRFIVSGVRGGISRGSEQLGRLALESGTPPLWAALQVR

SEQ ID NO: 266274 - protein, 83 aa, Zea mays
  Clone ID: MRT4577_174445C.1.pep
NIERVDYYIYGYKLIITSLEGKTPSQVSLSFPPPAWEPPWNRNSRAQQFHHLRTAGHGAMPHGGVPVDLGKIWNSRAMVDDLR

SEQ ID NO: 266275 - protein, 156 aa, Zea mays
  Clone ID: MRT4577_174446C.1.pep
PRVRGRVGFALDPSITRFRLSEPLRQPILTAEPSIYTRVLNPQDKFIIFASDGLWEHLTNQQAVEIVHSNPRSGIAKRLVRAALKQAARKREMRYDDLRKVEKGIRRFFHDDITVVAVYIDHGLLQERDTSVPELSVRGLVDSVGPSSFSGITAIS

SEQ ID NO: 266276 - protein, 89 aa, Zea mays
  unsure (1)..(89): unsure at all Xaa locations
  Clone ID: MRT4577_174447C.1.pep
IIAVTPAGLARDGCTSDMAAVLFASVKSAWDSVVQLHNKEVKGATVWARQLGGEGSKIRKWRAIVRNLPFKXKEIVDMFSSAGFVWDVT

SEQ ID NO: 266277 - protein, 238 aa, Zea mays
  unsure (1)..(238): unsure at all Xaa locations
  Clone ID: MRT4577_174448C.1.pep
MVLGKIAIVIGSGIIGTMVTGGDGSKLPDLRDVLSFSFKFMKQDKKEGSSNTSPQNDLLLSQVNYLRDQLQALSREAQCPQIINVNGGPGAGAYGLTFIAVGAIGYLYIRWKGWKISDMMFVTKRGLADACNVVGKQLDQVSESVHASKKHLXAGRIDRVDCSLDECHEIIEATGKEVTVIHGDLSAFQEEIQSVHHVVRTLETKLGRLAYTQXTQHEEYMXYVSSLKDWIGVRKPML

SEQ ID NO: 266278 - protein, 227 aa, Zea mays
  Clone ID: MRT4577_174449C.1.pep
MARGKVQLRRVENPVHRQVTFCKRRAGLLKKARELSVLCDASVGIIVFSAHGKLYDLATTGTMEELIERYKAASAGEATTDGCGRHNRMDPKHETTVLQQEINLLQKGLRYIYGNRANEHMNVDELNALERYLEIWMYNTRSAKMQIMAQEIQALKSKEGMLKAANEILQEKIVEQSSLLDVGMVVADQQNGRFSTVPLVEKVISSNPLTVLSGYSSCRGSKMGYSF

SEQ ID NO: 266279 - protein, 211 aa, Zea mays
  unsure (1)..(211): unsure at all Xaa locations
  Clone ID: MRT4577_17444C.1.pep
ISDKKLRKTDLMLWIEKIADRLPNWKARHLNLAGRTTLVKFVLSAIPIYLLIAINIPXWVIKSIDKIQRGFLWKGRKEVTSGSCLVSWEIITRPLSYGGLGVPNLQFKSWALQSKWLWLEKTDPNRPWHGMSLPVQRQVRQFFELSVLTVIGNGATTLFWSDRWVYGNTIHDIAPDVVQMVGRRAFSSRTVAQALDNWQWVSDIENPLSLK

SEQ ID NO: 266280 - protein, 343 aa, Zea mays
  unsure (1)..(343): unsure at all Xaa locations
  Clone ID: MRT4577_174450C.1.pep
MARCKVRVRRVQSPVHRQVTSAARRCGLLPKARELSVLCDASVGIIVFSAHGKLYNLATTGTMEELIERYKAASAGEATTDGCGRHNRMDPKHETTVLQQEINLLQKGLRXCLLLTALPCSSPPVQIAYXKSVCFLKNKLLLHPVTQHVNLKPRHLSKRNGETDLHXSNKNDSVQEIEXIXKKGSIVVGRYHYGSWTNVHMNDDVMNAHELYLLIGLYNSRSAKMQITAQEYQQPKRKXVRSLFLLTLRSTEAFSTHLLHXVSACTQEGMLKAANEILQEKIVEQSSLLDVGMVVADQQNGRFSTVPLVEEVISSNPLTILSGYSSCRGSEXGLLLLLITTSV

SEQ ID NO: 266281 - protein, 121 aa, Zea mays
  Clone ID: MRT4577_174451C.1.pep
KKPNPRGLGVCLAWKWNCGNWKKNSQKIMAGHGKVFSKFILGSPKNPNREGVPFFFFRKKIFVVAPGPQLDKKNPMGIWVRKKNVGLPSPTWGVMGAQRKPYSFFPQMCGNGQGKPICYLG

SEQ ID NO: 266282 - protein, 126 aa, Zea mays
  unsure (1)..(126): unsure at all Xaa locations
  Clone ID: MRT4577_174452C.1.pep
PTXQEQAVSCLLVMCSADDXCVAAVLREGVVPSLVSVSASGTGRGREKAQKLLKLFREQRQRDTAPAPQPQQQLLQSQLAEGGNGGGAIIACHHRESKPLFNVKSRKLGRTLSSLWKNRGFSLYQC

SEQ ID NO: 266283 - protein, 75 aa, Zea mays
  Clone ID: MRT4577_174453C.1.pep
GQEKVGRGDHGIQSAGQNQGPGKTSPQEGCARESLNCFLVTAGVSLVFPREKSDHPDWGFFGIRFQRFWATRPGL

SEQ ID NO: 266284 - protein, 49 aa, Zea mays
  unsure (1)..(49): unsure at all Xaa locations
  Clone ID: MRT4577_174454C.1.pep
PQRXNSQLASCEQPVRLILKLTWVHPPATSILMGARNKPWERDGGVCPL

SEQ ID NO: 266285 - protein, 92 aa, Zea mays
  unsure (1)..(92): unsure at all Xaa locations
  Clone ID: MRT4577_174455C.1.pep
MMPREPNSPPEVGATTLTPSASWPPSRCPLHKNQAESITLFIKESVDEELKGTDTSKLPXNRRLTFCIEGNIXSVGKTTFLQRIANETIELR

SEQ ID NO: 266286 - protein, 48 aa, Zea mays
  Clone ID: MRT4577_174456C.1.pep
NPYLNNLGDLCVCHLVHVAQMNSWVILPCPVGCSGLFRIVVVYCPVLF

SEQ ID NO: 266287 - protein, 551 aa, Zea mays
  Clone ID: MRT4577_174457C.1.pep
MTSVPLPPLSAALAQYRPSAAATLRFRTPSSAPGVSASSSTRARRFSVIASAREMPWPHVLTVAGSDSSAGAGIQADIKACAALGAYCSSVITAVTAQNTVGVQGIHAVPEKFVGEQLRSVLSDMSVDVVKTGMLPSAGVVKVLCESLRKFPVKALVVDPVMVSTSGDTLSGPSTLATYRDELFSMADIVTPNVKEASKLLGDVSLHTISDMCNAAESIYKLGPKYVLVKGGDMPDSSDAIDVLFDGKEFTELRGLRIKTRNTHGTGCTLASCIAAELAKGATMLHAVQAAKKFVESALYHSKDLVIGNGPQGPFDHHFELKSPSYKMGSLQKFNPDDLFLYAVTDSGMNKKWGRSIKDAVKAAIEGGATIVQLREKDAETREFLEAAKACVEICKSSGVPLLINDRVDVALACDADGVHVGQSDMPAWEVRRLLGPGKIIGVSCKTPAQAEQAWKDGADYIGCGGVFPTTTKANNPTLGFEGLRTVCLASKLPVVAIGGINAGNAGSVMELGLPNLKGVAVVSALFDRERVAAETRNLRSILMKNAYSRS

SEQ ID NO: 266288 - protein, 220 aa, Zea mays
  unsure (1)..(220): unsure at all Xaa locations
  Clone ID: MRT4577_174458C.1.pep
HRHTLVGENDRTSTGTHAPWPALLPSPPSSSSXSAAVAFAAEAPAASPKHSASTPSKAPSSSPDKSEKAPTASPENAAETPKATPAKAPATASKSEASPSEAPDSGSSAASPTSESAASEKALAGAPKDSSASPSASPSEDEAAASHDSSSGGGSAASEEPSTAEAGGESADSPPEPAHALESPAESPGPAADHESGSPSMGTGIVLAMLAAAATAMLPF

SEQ ID NO: 266289 - protein, 106 aa, Zea mays
  Clone ID: MRT4577_174459C.1.pep
VYLRSQNPFLSFKALAFCVQLETDGSPRRREEPEMMPRREEPEMMPRRAGGLGAERAMGGGGAPLVTRAGALAARAPVVLIVSWEWLTKHLAVPEPGGVGNLGGVG

SEQ ID NO: 266290 - protein, 106 aa, Zea mays
  Clone ID: MRT4577_17445C.1.pep
ERTKESAAPILTGETPPKPKRTPQGKAAPPEPPAFFLTLEIPNTRGIFQNLVTLLDYMPEEDGPRRKTWSAYRTWPGKKSCCCFPPRKKLWAPCTANPSGKVWPPP

SEQ ID NO: 266291 - protein, 72 aa, Zea mays
  Clone ID: MRT4577_174460C.1.pep
GSTHAIRPRVRGRVGKKKKKKKKKKKKKKKKKKKKKKKKKKIKNKKIKKKKKKNKKKKKGGVALRVQTLFPR

SEQ ID NO: 266292 - protein, 220 aa, Zea mays
  unsure (1)..(220): unsure at all Xaa locations
  Clone ID: MRT4577_174461C.1.pep
ETNPAPYAAWLNFSSENXSICCSSPXRFLRLDRAGVLEAKPIKGTIARGRTPEEDECLRLQLRYSEKXQAENLMIVDLLRNDLGKVCEPGSVHVPRLMDVESYRSVHTMVSTVCGTKKPDLSPVDCVKAAFPGGSMTGAPKVRSMEILDSLETSPRGVYSGSIGFFSYNHTFDLNIVIRTVILHDGEASVGAGGAIVALSSPEAEYDEMLLKAKAPTEVV

SEQ ID NO: 266293 - protein, 89 aa, Zea mays
  Clone ID: MRT4577_174462C.1.pep
KRGPRKYGSPKKGLNGEPPGRPQKKGQGGGQPAPGGNTRGGPKPVSPPPKTGGRGPRFQPGGPCPCRGGPQWGPPPPGTFGQKKGLKRL

SEQ ID NO: 266294 - protein, 142 aa, Zea mays
  Clone ID: MRT4577_174463C.1.pep
ARSLLHAAGEPFCISNAVFAIIRGHKRALDVTSVVQGKARFFSVLMLTWGLVADVDIESEKYRRVGSARLDFYHQDTNKLVIQWTKLPVTKQTGLARDFKTTVEPAVMVRRVAIWARRRSKKLVLDGDHWMGHSFHSGSALF

SEQ ID NO: 266295 - protein, 161 aa, Zea mays
  Clone ID: MRT4577_174464C.1.pep
PGNFERHWGLFYYDGTPKYPLSLGGNASSLMRPARGVKYLDKKWCVLKTSASLADQKVGDSVGYACGLADCTSLGYKTSCAGLDAKGNVSYAYNMYYQTMDQDDRACDFNGLATTTSVDPSAGTCRFIIEIDVGAAAPRSAIGFAAVLAAGLAASVLSVLL

SEQ ID NO: 266296 - protein, 75 aa, Zea mays
  unsure (1)..(75): unsure at all Xaa locations
  Clone ID: MRT4577_174465C.1.pep
MHYLISENSHIHYSACPRYFIVYIFISSXLGXXEKEXSGXXLXILSAVWGGGRRCRRRCGHGKGDXPRSPRPGNA

SEQ ID NO: 266297 - protein, 67 aa, Zea mays
  unsure (1)..(67): unsure at all Xaa locations
  Clone ID: MRT4577_174466C.1.pep
RGRVLKAFKFAXTVEAKEKEIANGRLVMXALXXFLXKSKVTGKGPFDNXVQHLFDPWHNTIIQTFXG

SEQ ID NO: 266298 - protein, 54 aa, Zea mays
  Clone ID: MRT4577_174467C.1.pep
SQLSIKLEKVKSLLLSSEFTNMLIKTKSGKIIYNVQIYLAVVSIISVLEMALGH

SEQ ID NO: 266299 - protein, 64 aa, Zea mays
  Clone ID: MRT4577_174468C.1.pep
QNKPIPYVFLFLPHYLPRSKILWFHNNSCPVYLTLKLLLISFILILYLSKILLPFFHTPNLFNN

SEQ ID NO: 266300 - protein, 47 aa, Zea mays
  unsure (1)..(47): unsure at all Xaa locations
  Clone ID: MRT4577_174469C.1.pep
EKFNFLKKKSYFMILVITRQNHMSSSRGKKTIHLLRXYIYCPNRQYY

SEQ ID NO: 266301 - protein, 175 aa, Zea mays
  unsure (1)..(175): unsure at all Xaa locations
  Clone ID: MRT4577_17446C.1.pep
MGTSPVIPATMLVVALLVASSTVCFGAXTATDTDTDGAIRLPSSSGAVGRPWECCDYVTKEPFIRPPRWRCNDVVDKCSADCQECEESPAGDGFVCRDWIFSLLEPPVCTPRPWDCCDFAVCTRDYIPYCQCGDVVESCPSNCKACKLVESDPPRYRCLDVFHGYPGPKCTPWIS

SEQ ID NO: 266302 - protein, 391 aa, Zea mays
  Clone ID: MRT4577_174470C.1.pep
MEAKPGEASVGHAPAPMAAAAPVMAAPPLEETVSFQQPLPAPAAAAERGSSSAVLVPPLATAAGGGAMALVPVLMKVPKKRGRPRKYGPDGSLIRPLNATPISASAPLPAAVAPGHYTPASAVGAAMKRGRGRPLDFAAAAAKQHQQHHHQLYQHQQQQFGFHFDSIGDMGACSAGANFTPHIITVAPGEDVMTKVISFSQQGPRAICVLSANGVISTVTLCQPDSSGGTLTYEGRFELLSLSGSFMPTENGGTRSRSGGMSVSLASPDGRVVGGGVAGLLVAASPVQIVVGSFLPSYQMEQKNKKPRVDAAPAAAVPQTPPAVPISSTDTRSSEQGQQSSASQRGVNMTVPGGTYGADQSWVLSPAPQQPMAEVSRTPSSGDLKMTTSGS

SEQ ID NO: 266303 - protein, 42 aa, Zea mays
  Clone ID: MRT4577_174471C.1.pep
DPMPLLVRILGGLIIWSGVANDIPQLSIDIEKQLIQDIGSSR

SEQ ID NO: 266304 - protein, 42 aa, Zea mays
  Clone ID: MRT4577_174472C.1.pep
PFFGSSPFLGCPNTPREQTLACHHSGCRKLLQTRIVGQSLSM

SEQ ID NO: 266305 - protein, 49 aa, Zea mays
  unsure (1)..(49): unsure at all Xaa locations
  Clone ID: MRT4577_174473C.1.pep
RRDDGAXVIKAYTVCFPRERQKVCEFAGTTPMENKRMLNSYSHRNGGKP

SEQ ID NO: 266306 - protein, 77 aa, Zea mays
  Clone ID: MRT4577_174474C.1.pep
ERQSSNGKGRNRGNQSRSTRVWPRSHELHLHESGRGNHASQYARRRLEPPRHRRSAAHVQQQRICPTSQLTLPLNSG

SEQ ID NO: 266307 - protein, 153 aa, Zea mays
  unsure (1)..(153): unsure at all Xaa locations
  Clone ID: MRT4577_174475C.1.pep
GNHDPPAGFKFVXGLPPNPHFPGGAKTQPKIFYYGTXSFRMGPPPLKXPMGKEVGSFPLWATXAXMEKKKLMGGKRVFFLSLGVFPSAPLPPLRGAVLKSPKLVLGVVHLGPSFPLFFLKMVGPLGAFQKISWGGAIFPPGVGSPPKKLFVFF

SEQ ID NO: 266308 - protein, 105 aa, Zea mays
  unsure (1)..(105): unsure at all Xaa locations
  Clone ID: MRT4577_174476C.1.pep
PGGVKNPPRSRPGPVALPEIPKSQKGPDLLSRKLPFXQPLVRGFAQAFKGVLGFQSPPVLALQEPPGASLVGLFGDPTLWAFPAKGVPFLPKNIQFAPRIPGEGG

SEQ ID NO: 266309 - protein, 226 aa, Zea mays
  unsure (1)..(226): unsure at all Xaa locations
  Clone ID: MRT4577_174477C.1.pep
RTSAGLRXLDLLEIAASDLLRFSXIASADXVNMARHLPHYPXPHAXIMSSYDHASVLCAYQVYTSSCASCHSMSLISYRDLGDLLYTEXETIGMSADIDAXDGPNDDGEMFARPGKLTDRLPQPYANDQSVRFAXNCGAYPPXDLXLITNARYNXHKYDLALLTGYHDPPAGVHIHEALHYNPYLPDVAIHMPKMLNDXADDYAYDTPATEAHMXKDDESFPARAA

SEQ ID NO: 266310 - protein, 85 aa, Zea mays
  Clone ID: MRT4577_174478C.1.pep
TPESGVYALFDNASKVTRSAVDKLMRRSARVTGVKCRHGVQRRGSAHRGRRDRLVTLVMVRTSSQRAIGGFFSPFVCIGSRIAVR

SEQ ID NO: 266311 - protein, 97 aa, Zea mays
  unsure (1)..(97): unsure at all Xaa locations
  Clone ID: MRT4577_174479C.1.pep
FCPQTTSVKGNRNLMPYRLSGDDPARVKEVTQIGLGALITFVVKQTXDVEEELHRLKRDNQAADKSELVDFLLSEWVKSQKGEQATFHLGENVGQWE

SEQ ID NO: 266312 - protein, 186 aa, Zea mays
  Clone ID: MRT4577_17447C.1.pep
MGTSPVIPATMLVVALLVATVCFGATDTDTDSDGAIRLPSSSGAVGRPWECCDYVTKDPIISRPPRWRCNDVVDKCSADCQECEESLAGDGFVCDDWIFSLLEPPVCTPRPWDCCDFAVCTREYIPNCRCGDVGESCPSNCKVCEFVESDPPGYRCLDVFHGYPGPRCTPFGSVKAISSAQLLAST

SEQ ID NO: 266313 - protein, 74 aa, Zea mays
  Clone ID: MRT4577_174480C.1.pep
SSPWGLCSSTSSQVSCGVIQKGGPCYYPDNLVSRAAVAMNLYYAANGRHPWNCYFNNSALVVQSDPSYGSCTYY

SEQ ID NO: 266314 - protein, 125 aa, Zea mays
  Clone ID: MRT4577_174481C.1.pep
FFFFFFFFFFFFFFFFFFFFFFIHNIHFYYLSTYFFKIKIYHKTYIYKSLLKLFRTASIVKHPRDQRLGKLRVTAILCFVPRTAPWLFPRASPTHGQLHNNRFLPRHTSWEHDPCSRCWRQISFQ

SEQ ID NO: 266315 - protein, 116 aa, Zea mays
  Clone ID: MRT4577_174482C.1.pep
MARGGRLLILSLGLVLLYFVSGSVAAAAAQKTWCVAKPSASNDILSLNLNYACSQVSCGVIQKGGPCYYPDNLVSRAAVAMNLYYAANGRHPWNCYFNNSALVVQSDPSYGSCTYY

SEQ ID NO: 266316 - protein, 477 aa, Zea mays
  unsure (1)..(477): unsure at all Xaa locations
  Clone ID: MRT4577_174483C.1.pep
MQPMLTLQSVQPPPAAAHLRAAASAKTPLLLPRRAAGPPPASASASASAEFPGSVPDSAQMAPRRRRRRSVAGIDQDELLDPEALADPDSGFYEINGVRLHHKVCSHEDEDSSSXTSPPVVPLPQTQXVLKSQIGLPILLLHGFGASVFSWSSVMRPLARIVRAKVLAFDRPAFGLTSRASRSADDAKPLNPYSMAFSVLATLAFIDYLGAEKAILVGHSAGCLVAVDAYFEAPERVAALVLVAPAIFAPRKAVKEGQSGEEEEGGQQTQSIPNDENSPPNLFARISGGFLELWKHVAGLVLKMITAIRDVVRSLCLKAVVAFLRSSLGVVLVRWVMDKFGILGVRNAWYDPSKVTDHVIQGYTKPLKSKGWETALLEHTVSMIIDSVSASRVPVSKRLSEISCPVLVVTGDTDRIVPAWNAERVARAIPGATFEAIKSCGHLPHEERPEEFLSVVENFLRTTFANPNEQVFQAAVS

SEQ ID NO: 266317 - protein, 225 aa, Zea mays
  Clone ID: MRT4577_174484C.1.pep
LCSHLSDAVNVLMHTIRVVPSEEQKEGIRDLKIRHAEQDKKECLGNSSIDGNKTSMEHAHISSVSCEDGGGALWDIFRREDVGKLKEYLTKHSKEFRHMYCCPVEKIFNPVHDETFYLTSGHKRKLKEEYGIEPWTFVQRLGDAVFIPAGCPHQVRNLKSCTKIALDFVSPENIQQCLSLTEDFRRLPVGHRAKEDKLEVKKMIVYAVEHALAILKEPCTPRESA

SEQ ID NO: 266318 - protein, 77 aa, Zea mays
  unsure (1)..(77): unsure at all Xaa locations
  Clone ID: MRT4577_174485C.1.pep
MAGGTGQKSKLAPEPTLEKTKGPKGSQLEPTKKALSFQCKVCMQTFFCPPLXLKSREPPEAKLPKTNLSQCFPHLKK

SEQ ID NO: 266319 - protein, 112 aa, Zea mays
  Clone ID: MRT4577_174486C.1.pep
PIDGAAAVQQSVVFVLIGVPICREVFNELVPAEGRTCLRKWLWHGARRSASVSLAVQAGGGTSSCVQGVSCPTGVRRKGATRSNPWLPFRTAAGAPLSSLRTAGCSASRPFL

SEQ ID NO: 266320 - protein, 98 aa, Zea mays
  unsure (1)..(98): unsure at all Xaa locations
  Clone ID: MRT4577_174487C.1.pep
VKSAFLNGPIREEVYFYQPPGFXDEWYPYHVCKLSKALYGLKQAPRAWYECLIDFLIANAFKVGKADPTLVTKTCDGDLFVCQIYVDDIIFXSTNQKS

SEQ ID NO: 266321 - protein, 107 aa, Zea mays
  unsure (1)..(107): unsure at all Xaa locations
  Clone ID: MRT4577_174488C.1.pep
TGRILVDFASFFXLTQLSITQCVIIYTRTSSTPHSAPNSRRHCHGRGRARVDVTPGRRTGLRAGVAARGLAGGLRAVAVPVGVADDGDDGDEDHMGDDAVDMGVQVV

SEQ ID NO: 266322 - protein, 60 aa, Zea mays
  Clone ID: MRT4577_174489C.1.pep
LCHCVVFINHNYPGWDCFVRIRRVRLSTCIEHESVCVWFAAFRRLALHSLVQYRFIRLHP

SEQ ID NO: 266323 - protein, 103 aa, Zea mays
  Clone ID: MRT4577_17448C.1.pep
MATSSRRVPLLLLSLGVLLYFSLEVLRVDPELNPCEIGMLSGIPEEHLRRKALISSPPRTASQHGSGKVGRWKINFLSSHTRENPLLGWSSTGDPYAYAFRSR

SEQ ID NO: 266324 - protein, 41 aa, Zea mays
  Clone ID: MRT4577_174490C.1.pep
VLSLCPFLCVGTASGSLGGLEPTCFARFSLFMYSYIALSNH

SEQ ID NO: 266325 - protein, 66 aa, Zea mays
  unsure (1)..(66): unsure at all Xaa locations
  Clone ID: MRT4577_174491C.1.pep
DRAKIPIDQTHRNGSMEFVEYPQRDPSTLSPTDARLSASRTRSEPKATGILPPHEGXPPKFSQRAR

SEQ ID NO: 266326 - protein, 404 aa, Zea mays
  unsure (1)..(404): unsure at all Xaa locations
  Clone ID: MRT4577_174492C.1.pep
RHGAVGQPPPAAHAYVPTPVPSLPPSVSAVAAGHYHSLAVSAAGEVWAWGRNDEGQLGRGLHSPRNTWSNAELVRGLENVQVQAVSASGVVSAAIGSDGSLWVXWGRSKRGQLGLGKDIVEAAVPSKVKALASXHLLRCHSXWGHSMALTKDGKLFGWGYSENGRLGEMGQSTRAXFLQKNTLGKTVDKYSSVMLEAVEKRLXEKIRSEDNMPIIWEPSLVHEASRLEVSDVSCGLDHSLILCSDGIVLSGGDNTYGQLGRKAGPPKLLPVGMSYRPFSMSASVGHSLALCYTTTEGTAGVETGLLSWGWNCSSQLGRSSQEDIPALVDSLSRERLVSASAGRVHSVALTSKGEVWTWGSGRNGRLGLGSSIDEAAPCLVDTLEGVEVLQVAAGMDHNLLLVAE

SEQ ID NO: 266327 - protein, 86 aa, Zea mays
  unsure (1)..(86): unsure at all Xaa locations
  Clone ID: MRT4577_174493C.1.pep
KTTFHPNTILTNHNTLVNKILHLLLXPKFXHXNKXXPPTTIKLXXXXXNKKHSGXXXXGQKPDLILLEGVGLALHGGCTQVLXGVR

SEQ ID NO: 266328 - protein, 224 aa, Zea mays
  unsure (1)..(224): unsure at all Xaa locations
  Clone ID: MRT4577_174494C.1.pep
NYSTISLNDRNTWSNAELVRGLENVQVQAVSASGVVSAAIGSDGSLWVWGRSKRGQLGLGKDIVEAAVPSKVKALASYDIVKVLIFSQKFNKLIGDDVNXGITXVSFGWGHSMALTKDGKLFGWGYSENGRLGEMGQSTRALSAEEYIGKTVDKYSSVMLEAVEKMVEEKIQSEDDMPIIWEPSLVHEVSRLEVSDVSCGLDHSLILCCEYFFLLQTELLACHL

SEQ ID NO: 266329 - protein, 51 aa, Zea mays
  Clone ID: MRT4577_174495C.1.pep
FYVWFYFIVCWVHLKKNVNRYTNIEPKMKNYFEMLYKDQNPSTNFYNICYK

SEQ ID NO: 266330 - protein, 82 aa, Zea mays
  unsure (1)..(82): unsure at all Xaa locations
  Clone ID: MRT4577_174496C.1.pep
AGHGAVPPKVPPAXNITGTFGKDWVDXKRHWIARPPVAGPNTTGAGVGYKDVNKPPFNSMGACGNIPIFKDGLGCGSCFEIK

SEQ ID NO: 266331 - protein, 108 aa, Zea mays
  Clone ID: MRT4577_174497C.1.pep
LPKGPPKKILFEQTKGETQFYANFRGCKGGGGKKIPRGQKTEKTLLCQEKNLNIFVKPGRNPLFVLRKNIKVCFMKMLGDPFNSTGLKGGKNPPFPKSFRGGAEDGDV

SEQ ID NO: 266332 - protein, 103 aa, Zea mays
  unsure (1)..(103): unsure at all Xaa locations
  Clone ID: MRT4577_174498C.1.pep
MNTTTSPVREANQAPVPPPPPSVFASAADSKAPVLSPRKTLAPATMKGKADTSKKDEGKLRAGGAAGKRKKAAASGKPKRPAFGFFVFMSEFXXEYXALHPGN

SEQ ID NO: 266333 - protein, 62 aa, Zea mays
  Clone ID: MRT4577_174499C.1.pep
AAVVKAHVHLDVGVAGSVKDLLAFHPLDGDGNFSFSSLLSQKKKPLKRALFVVAMFLPGGRV

SEQ ID NO: 266334 - protein, 93 aa, Zea mays
  Clone ID: MRT4577_17449C.1.pep
LPTVGRGGDRAKGKGPGGRTPTPPRGGGGFSRNDPKLALRDAKGALGPGNAGKGMKEGEFSEAREDRAAPEKDHKEGGAESKKGEEGHEGDEN

SEQ ID NO: 266335 - protein, 62 aa, Zea mays
  Clone ID: MRT4577_1744C.1.pep
MTINNLLLVFALVSAVLGAATAAANAFSRAFSIWVEMNQQCYALYVQDCVRDRGNEPLYKEL

SEQ ID NO: 266336 - protein, 113 aa, Zea mays
  Clone ID: MRT4577_174500C.1.pep
FVSCLRRLDLPPACPAPGAAFSIACLCLCTPWLGARIRTRPDCRSMSCKHSASMSRPAVPIRPQKSFNRQTYVHRIDLRSSLFDMVIHDPSDQLPLWRPSSQGMEPLHLDHPL

SEQ ID NO: 266337 - protein, 79 aa, Zea mays
  unsure (1)..(79): unsure at all Xaa locations
  Clone ID: MRT4577_174501C.1.pep
LLITLYISLRKGLTSKRYCTLIDPPXHPDFIKNIFTHTNLTNYSFLIISSSTHFFQTCISNNNHTRLHTLLAFTLHTHP

SEQ ID NO: 266338 - protein, 147 aa, Zea mays
  Clone ID: MRT4577_174502C.1.pep
MQIFVKTLTGKTITLEVESSDTIDNVKAKIQDKEGIPPDQQRLIFAGKQLEDGRTLADYNIQKESTLHLVLRLRGGMQIFVKTLTGKTITLEVESSDTIDNVKAKIQDKEGIPPDQQRLIFAGKQLEDGRTLADYNIQKESTLHLVL

SEQ ID NO: 266339 - protein, 69 aa, Zea mays
  Clone ID: MRT4577_174503C.1.pep
FFFFRYHSRTENQTVFVNFCQIPNGFDFFNLKHRISVVSSGFHKIPSGFHHFLGDFRCSPAIFCFFNKI

SEQ ID NO: 266340 - protein, 171 aa, Zea mays
  unsure (1)..(171): unsure at all Xaa locations
  Clone ID: MRT4577_174504C.1.pep
PGKKKKKKKKKKKKKKKKKKKKKKKKKKKKKKKPFKTIAGFEGGGEMAIWEKRELSFVFTTFLKNHRGWVKESLNFLKKTLATLKGPNDESPTLGDPKKKVVAEIIELVKPPNFFKGDWLNMPVVXQFEKDKRFRWGYKLLKIFLTKKLDSYWEFKRATSDWLKDYGLAHD

SEQ ID NO: 266341 - protein, 46 aa, Zea mays
  Clone ID: MRT4577_174505C.1.pep
SGDADANPSISHRKLQLASARRCAQRIPIALAKPPPGPVRTPSGSR

SEQ ID NO: 266342 - protein, 176 aa, Zea mays
  Clone ID: MRT4577_174506C.1.pep
MGCLTDKHQSTMKSSNTSPSRLTRKVLYLTPPILLTVFFYLHLETLTLFFTVQCASRLGNGVDDRLRASATFLPLKDTREGADTWFISTLNDTSEPPGEARNLQFPSAASAGRLLCLAAPSRRDGTKNAYALAWPGALPRGAEFRPGLALLSETFYDHSNLWHGLTSLVPLVSWHA

SEQ ID NO: 266343 - protein, 50 aa, Zea mays
  Clone ID: MRT4577_174507C.1.pep
SAGCLSGPFRPALRAYVKRFQAGLFWRLSKRQSLGVTFVQLGGFRLSACC

SEQ ID NO: 266344 - protein, 163 aa, Zea mays
  unsure (1)..(163): unsure at all Xaa locations
  Clone ID: MRT4577_174508C.1.pep
EREKKRRGGTGPKGGEAKPAATTEAGNAAGTREGGKAXKGAXXKAXEXGXRNXAAXGXGTGRRATXQKKKXXGXNKKXKPAEETXKXGDXXXEGERQEKXNKXEXEEAXGXXXXQGGKSRAPXQENTAASKAASXAEEAKKREEXDTNREKXXKAGXRRKEGR

SEQ ID NO: 266345 - protein, 72 aa, Zea mays
  unsure (1)..(72): unsure at all Xaa locations
  Clone ID: MRT4577_174509C.1.pep
FSSFXLLPNLKTIHRWGIKRPCQSFPKITFKCIQGNLFPINMHHLFYLYPKKYILNKKYVLTYAVSNESIVR

SEQ ID NO: 266346 - protein, 73 aa, Zea mays
  unsure (1)..(73): unsure at all Xaa locations
  Clone ID: MRT4577_17450C.1.pep
GLKCALYLLMLFYHRKKTVNTPAPXRRXTEFFTNITHWGGGGGPNIKFFTXETRVRKELXKPQDTQIYKLQEG

SEQ ID NO: 266347 - protein, 75 aa, Zea mays
  unsure (1)..(75): unsure at all Xaa locations
  Clone ID: MRT4577_174510C.1.pep
FTNSVNPLLPKGLKTLSILILQQFNLHLPDSVIFPRSNLWNIYSFYKGFEIXRSLTFLSXLPPLFFAQAANSNTF

SEQ ID NO: 266348 - protein, 43 aa, Zea mays
  Clone ID: MRT4577_174511C.1.pep
MLWQTYVDEHLMCEIEGHHLTLAAIVGHDGATWAQSTAFPEFK

SEQ ID NO: 266349 - protein, 499 aa, Zea mays
  Clone ID: MRT4577_174512C.1.pep
MLACPSTSSPWPQRQPPSPCPGGGGGATRHVALAARSKRRGAGPAAAEGVDEAAAEAAELVRSLLRRTAGGKERLVPVLDRHVRVVRTEHCFLLFEELGRRDAWLTRLDVCGWMQKQRWYVADNGIYSKLISVMGRKGQIRMAMWLFSQMRNSGCKPDTSVYNSLIGAHLHSRDKTKALAKALGYFEKMKCIERCQPTIVTYNILLRAFAQAGDTKQVDMLFKDLDESVVSPDVYTYNGVLDAYGKNGMIKEMESVLVRMKSTQCRPDVITFNILIDSYGRKQTFDKMEQVFKSLLRSKERPTHPTFNSMITNYGRARLREKAESVVEKMEELGFKPNYVTQECLIIMYAHCDCVSKARQVFDELVTSQTKVHLSSLNSMLEAYCMNGLHTEADRLLDTALQQCVVPNGSTYKLLYKAYTKANDKLLVQKLLKRMNKQGIVPNKKFFLDALEAFGTSDRKPRTSPGINSASKPSTDSAGDSETATSDKPEVSVWHVAAT

SEQ ID NO: 266350 - protein, 71 aa, Zea mays
  unsure (1)..(71): unsure at all Xaa locations
  Clone ID: MRT4577_174513C.1.pep
XSXAGXELYIXDLALXTGSSVXXLTXLAXKXXILTTFYYLRXIXDADXWLQLSRQEGWQSVVVGAVXSAXD

SEQ ID NO: 266351 - protein, 333 aa, Zea mays
  unsure (1)..(333): unsure at all Xaa locations
  Clone ID: MRT4577_174514C.1.pep
MGQQEGHSNPHPDEAALPTTTAAPSPSPSSSRLYTAWLVASWYASNIGVLLLNKYLLSVYGFRFPLLLTACHMSACAVLSTLAXARLAPPPQQLLXRSHRQLARVALLGAVFCASVVAGNVSLRHLPVSFNQAVGATTPFFTALLAYAVAARREACATYAALVPXVAGVAIATGGEPSFHLFGFVMCVAATVGRALKTVLQGILLSSEEEKMDSMDLLRYMAPVAVLLLVPATLAMERDAFGVVAGLAREDPSFLWLLLCNSCLAYFVNLTNFLVTKHTSPLTLQVLGNAKGAVAVVVSILIFRNPVTVVGMLGYGVTVAGVVLYGEAKKRSK

SEQ ID NO: 266352 - protein, 274 aa, Zea mays
  Clone ID: MRT4577_174515C.1.pep
MAHAAAAAAVPLRRPLLFLKEARLLSTLATPLPGLRHPRALRPTGPLPSDAEDTDDPDAGDGAAVSFKKSRNELKREARRAVKWGMDLAKFSPPQIKRILSAASLEREVFDALMLVKKFGPDVREGRRRQFNYIGSLLRDAQPELMDTLIQASKDGDERKLYTLLSEGKLLVEEEEEEEEDLPDGEEENQEYMKIADRWFDGLLCKDISVTNEVYSVHSVEFDRQELRKLVKRAHMFQESTQNKDGEESNAKLSGAKKPLMRFLRSLAKEAYAP

SEQ ID NO: 266353 - protein, 49 aa, Zea mays
  Clone ID: MRT4577_174516C.1.pep
SLQQYANIRHQFHTMTAPIFLCGSYCYNKKLHHSLSFQNINPTRPRTRA

SEQ ID NO: 266354 - protein, 79 aa, Zea mays
  unsure (1)..(79): unsure at all Xaa locations
  Clone ID: MRT4577_174517C.1.pep
MAAAARHRGTVKWLNDTKGFGFIXTPXDGSEDLFVHQSLIKSEGLRSLAEGEEVQFSNFDGDYGPSKGGPTNHRSGCIQ

SEQ ID NO: 266355 - protein, 102 aa, Zea mays
  unsure (1)..(102): unsure at all Xaa locations
  Clone ID: MRT4577_174518C.1.pep
DGGTSSATTSVAATXGKTGVSDRTDDANSCLGPGPGTVIDTGQKPYWNYIIHITTACWNPVQIPELADFAASVFCVEGLGGGHANSHAVTCPLENPCLQVAF

SEQ ID NO: 266356 - protein, 37 aa, Zea mays
  Clone ID: MRT4577_174519C.1.pep
SRNHDSWIGPEYNLKLLSAGLGHNAHEISSSVRARAE

SEQ ID NO: 266357 - protein, 108 aa, Zea mays
  Clone ID: MRT4577_17451C.1.pep
KLRGKGYYFYPYPQPPPPKSTAGSHRNKLHKKGKLDGKKKNLQRKTNLYTKLYKKPMPNTKYNGMLRTGASLNSTIKPKPKNRCYQSNITTRQFNIRDEKAETSRADQ

SEQ ID NO: 266358 - protein, 42 aa, Zea mays
  Clone ID: MRT4577_174520C.1.pep
LLHFDRHKLIRVMQLHQRCRLNQGEFIYRIVKQVTQFLGSRS

SEQ ID NO: 266359 - protein, 102 aa, Zea mays
  Clone ID: MRT4577_174521C.1.pep
HRPKSVHNERLHIPVIQHRHAERHQRQHLAVPPLVLHHQSRHLRRVIETTDVSSLSVLCNIRIVASQQLMVHVPPRPVGTLDHARLSQSLLARSAISIAPII

SEQ ID NO: 266360 - protein, 97 aa, Zea mays
  Clone ID: MRT4577_174522C.1.pep
KNETGGFPVPFFLHAPLVVPLPPVCLPVFKITFRGACHIFYNPLEQGGGTTEAGFPIPLGAGFLKNRFYLGTLWALVEPTSLGPLEAPRGGGGGPTP

SEQ ID NO: 266361 - protein, 249 aa, Zea mays
  Clone ID: MRT4577_174523C.1.pep
MALMSLGAAGYTTATAPPRPRRCTLPFRAAASPAALDRRRRPHNVAGDFFVDHRCIDCQTCRWMAPEVFKRVDGKAAVAAQPSSEEERTKALQALLSCPTSSIHTEKPPKDILKVQNMFPLPIDDKLLPVEEATADVEWKLEGNGPWNLGTDFELIHTPGHTPGSVCLYFKPLKVLFTGDHVAKSEESDDLNLFLMYSKQSVSLQLESIRKLLELEFEWLLPGHGYRIKYKDVRAKNVAMESLLANYTS

SEQ ID NO: 266362 - protein, 108 aa, Zea mays
  unsure (1)..(108): unsure at all Xaa locations
  Clone ID: MRT4577_174524C.1.pep
WXPPGFPRXXVVXPRPVXCXXPPFWXXWALXXXARPAAXVLXXSPLRPLPVEKKKSTRGASTFLTTKTAVFVKLLQILAFFIIHKNCFLNFFNKQNIVCNPQKNLLQF

SEQ ID NO: 266363 - protein, 328 aa, Zea mays
  Clone ID: MRT4577_174525C.1.pep
MALMSLGAAGYTTATAPPRPRRCTLPFRAAASPAALDRRRRPHNVAGDFFVDHRCIDCQTCRWMAPEVFKRVDGKAAVAAQPSSEEERTKALQALLSCPTSSIHTEKPPKDILKVQNMFPLPIDDKLLPGVYLCGYNSEDSYGATSYLVIHPQGNILIDSPRYTPKLANNIEKLGGARYMFLTHIDDVADHRKWAEQLKCERIIHSGDVEEATADVEWKLEGNGPWNLGTDFELIHTPGHTPGSVCLYFKPLKVLFTGDHVAKSEESDDLNLFLMYSKQSVSLQLESIRKLLELEFEWLLPGHGYRIKYKDVRAKNVAMESLLANYTS

SEQ ID NO: 266364 - protein, 53 aa, Zea mays
  Clone ID: MRT4577_174526C.1.pep
LILPGKELCFRVYTEYRPMAMRVLYPEGKAPSDSVSWYAGVSCWALDLVIFER

SEQ ID NO: 266365 - protein, 91 aa, Zea mays
  unsure (1)..(91): unsure at all Xaa locations
  Clone ID: MRT4577_174527C.1.pep
TKEFRVDTRAVISLMXLXFDEKELIDALRVNNNQQIAAFEWLLGDRXSSTDEFDHGIDPNRXLLQVMLDNPVVQLGVTSPKTLLAFXEDML

SEQ ID NO: 266366 - protein, 117 aa, Zea mays
  unsure (1)..(117): unsure at all Xaa locations
  Clone ID: MRT4577_174528C.1.pep
GTVRHASKGRLFLAAQXLLXFTLCXXACGXSCPTPNGRGXSHPPPPSCLPHPAXPPSGKCXPVNAPQVTAVCRQCRSALLKGEXGKVPXAEPCCNLIKGLADFEAAGCLCTAIKGNV

SEQ ID NO: 266367 - protein, 116 aa, Zea mays
  Clone ID: MRT4577_174529C.1.pep
PFQGRPGGGPLSLSPFPGLCPIPRVPRHPKFFPLPVFQFGKSPILICFPNLDPPVFSLFFFFFIFFRMFPWVHPLQKPPKPSVTPNPKKPPTNRKPPPPPPRGGRARGTRPAATPP

SEQ ID NO: 266368 - protein, 109 aa, Zea mays
  unsure (1)..(109): unsure at all Xaa locations
  Clone ID: MRT4577_17452C.1.pep
QRHDQQMRLKQMKIXSDLLIAVSKAERQEARMRIRQESFRLGNVAVMRAGTIISETWEDGQAIKDLNAHLKSLLETKETIERHRKSLKKRQSGDFISEVHFSLYCILLT

SEQ ID NO: 266369 - protein, 68 aa, Zea mays
  Clone ID: MRT4577_174530C.1.pep
AHPLPPGCLSMAGSSLPYSVLRRSPAPAYPPRGAKDKLFCSPGGGLCVMFPPVWWCGLRLHSFKFGND

SEQ ID NO: 266370 - protein, 106 aa, Zea mays
  unsure (1)..(106): unsure at all Xaa locations
  Clone ID: MRT4577_174531C.1.pep
WKXXXPVXNPSSXXNQEXPGSXXVEEESSGKSKWQXXEXXSXRXLAXXKQAPPRAGXXQEFKEPXXPGTXXERKXGXRGXXEXXKQGAGITXQEXXIIAXXXPFPS

SEQ ID NO: 266371 - protein, 73 aa, Zea mays
  unsure (1)..(73): unsure at all Xaa locations
  Clone ID: MRT4577_174532C.1.pep
DAWAKLKKKLFGKQSRRDQRQHQFMRQAAASNGMMKQEAAXPGRQPEAVSWQWPTTTGTTTIKPWRPCLCNQY

SEQ ID NO: 266372 - protein, 58 aa, Zea mays
  Clone ID: MRT4577_174533C.1.pep
YFWVDPIASGNIACVIIPISTGIIFFLALRCLAHGCVDLCDLFTASTSHYKDNEEGCL

SEQ ID NO: 266373 - protein, 68 aa, Zea mays
  Clone ID: MRT4577_174534C.1.pep
SAREISQRLLSFYTTPPTQTAGGIKRSLEALKPTLNAWSYGLETRSPPAPGTLSELTLDSFFTLCRLT

SEQ ID NO: 266374 - protein, 79 aa, Zea mays
  Clone ID: MRT4577_174535C.1.pep
QRRHRHMLWFSYFSFIAIKVINNFGFQKHREKFLDSNDTCRGLIRSGAALSVHAVVYNNTVEGTITDNGIQDSTEMRTN

SEQ ID NO: 266375 - protein, 64 aa, Zea mays
  Clone ID: MRT4577_174536C.1.pep
PRGNPGPCLDFKPVFCWKVLEKPPPVFKLGNPPGNCYPGWDFPVTQGFSVLKTPNGVPQSFLAF

SEQ ID NO: 266376 - protein, 60 aa, Zea mays
  unsure (1)..(60): unsure at all Xaa locations
  Clone ID: MRT4577_174537C.1.pep
KKGLGRGXGLAPPVSIKKAALVCVFNDGLCLRAAKGRPRVPRRLVKNHLRILPAAAAPGE

SEQ ID NO: 266377 - protein, 299 aa, Zea mays
  unsure (1)..(299): unsure at all Xaa locations
  Clone ID: MRT4577_174538C.1.pep
MEDLYSIHPGISRVVGGAASEASVAGAGAGGPSPSDLTELMKAQIASHPRYPSLLSAYIECRKVGAHPHVTSLLEEVSRERRPDAGAGEIGVDPELDEFMDAYCRVLVRYKEELTRPFDEAASFLSSIQAQLSDLCSGGSSPAATATHSXVRKDDMMGSSEDEQCSGDTDVPDMGQEHSSHLGDHELKEMLLKKYSGCLSRLRSEFLKKRKKGKLPKDARTVLLEWWNTHYRWPYPTEEDKVRLAAMTGLDPKQINNWFINQRKRHWKPSEDMRFALMEGVAGGSSGTTLYFDTGTIGP

SEQ ID NO: 266378 - protein, 84 aa, Zea mays
  unsure (1)..(84): unsure at all Xaa locations
  Clone ID: MRT4577_174539C.1.pep
TWSATGEGESELVHHAMVDPPDMGRDQDPDTGAVRPVDFLAGRVNGQYIIEELCYGFMFLLGGIGIXILLDHLRDRTRPRSLRV

SEQ ID NO: 266379 - protein, 65 aa, Zea mays
  Clone ID: MRT4577_17453C.1.pep
MGVMGRLKIFVVKEPVVAASCLIAGFGLFLPAVVRPMLDSWETEKNAKTPVELKDVVAGVTGKKA

SEQ ID NO: 266380 - protein, 72 aa, Zea mays
  Clone ID: MRT4577_174540C.1.pep
RRAAPGNKQPLREKAMWSTGGRTSMYVSRISYSPTAITPPELNSESSRYLARDGGRLAIGQEGQKENPHRFL

SEQ ID NO: 266381 - protein, 101 aa, Zea mays
  Clone ID: MRT4577_174541C.1.pep
LGDDDLDLSRTHLSILHAPHPAVPILDLGLEIPGTRMILQILVTSLDSACGRTAHALRCWLTTTGLTGAQDLLRARERRGCSHDASLHLSLSDEHGDTNGS

SEQ ID NO: 266382 - protein, 42 aa, Zea mays
  Clone ID: MRT4577_174542C.1.pep
AFPLRWKQSLHGFRYTGRGSVVLSNENTGENTMAGEPTVSYA

SEQ ID NO: 266383 - protein, 65 aa, Zea mays
  Clone ID: MRT4577_174543C.1.pep
GSAQHNSRCVIPPSCLYQPPLPNSYINFADLGTLAPDFLPPVCFNHVVGDGAVVGLVGERRESET

SEQ ID NO: 266384 - protein, 57 aa, Zea mays
  Clone ID: MRT4577_174544C.1.pep
QLRSTRVKHNSAQLLGGLDAELEVLERLPGQTASPPRNRTARRTAGLRRGATRESDR

SEQ ID NO: 266385 - protein, 220 aa, Zea mays
  Clone ID: MRT4577_174545C.1.pep
MGSLSGVLAFAVLAALAAGGSCASNVPPGPDITADYNQPYRPAKATWYGLPTGSGPEDNGGACGIKDVNLSPYNGLIACGNLPIFKDGKGCGSCFQIRCTNHSACSKKPVGVVITDMNYELLSPYRFDLSGKSFGAMAKSGKEQELRSAGMIDLQFRRVRCQYAPGTKIVFHVEKGSHANYLAVLVKFVAHEGTIVQMEIREKNSKQWKPMQHSWGAIWR

SEQ ID NO: 266386 - protein, 87 aa, Zea mays
  Clone ID: MRT4577_174546C.1.pep
QHAIISIRALNSSGRVLWGSISSLSSVRINKGRSCILSEPMGAVRLARDPQAVVADGAYVVLCWQGRLPCSLRLGGGIHLSSSLPVS

SEQ ID NO: 266387 - protein, 119 aa, Zea mays
  Clone ID: MRT4577_174547C.1.pep
PPPRAKDQKVGGDPGGASRGHLILVGRLAPPSWGPAPQLKLGKRGGKTAPFSPLLGILSGGPKGVAGALHPGFKLGKLEKGPAPTGRGLLNPPISGFGNFGKPPGLGQNPGPLMCPGFG

SEQ ID NO: 266388 - protein, 134 aa, Zea mays
  Clone ID: MRT4577_174548C.1.pep
RKSGGGSPPSSPALTAPGRPGRQRSGRRTESRRPPGSLVHETGSKGCPLTGRDGTGWWVFFTIGCTYRGWVFLCCSGPPWVFLWVELFFFSGGLKNTPSFCFGTSVHYKKKVDEIVLCPPPKKKQKKKNKNVLS

SEQ ID NO: 266389 - protein, 45 aa, Zea mays
  Clone ID: MRT4577_174549C.1.pep
RRITSFLSRGDIFVRFMVAGFPCKKRDMCCMELFFVHFVVAPSHR

SEQ ID NO: 266390 - protein, 70 aa, Zea mays
  Clone ID: MRT4577_17454C.1.pep
PFVDGGGSSSKGSATWPEEKLLSAAKPVESSPRLDDCLSMLSAAWSTVIVTAGRDGVIRSFPNYGLPVRL

SEQ ID NO: 266391 - protein, 165 aa, Zea mays
  Clone ID: MRT4577_174550C.1.pep
RPSSVFSPATTTHQKYLCQVGMSGITAIWRRSCPLAASQILMETYFGPSVSSGVLRWFSSGAKHSRKPDLSVANHIRVVDLHSSVNYVSTIRRLPLSCRMDTNWLITSKSRHGALPGFLGVSSFYRGYSSDTGIKPEASQSGVSNLPSTESSEVGTAGGWWGFMD

SEQ ID NO: 266392 - protein, 404 aa, Zea mays
  unsure (1)..(404): unsure at all Xaa locations
  Clone ID: MRT4577_174551C.1.pep
MSGITAIWRRSCPLAASQILMETYFGPSVSSGVLRWFSSGAKHSRKPDLSVANHIRVVDLHSSVNYVSTIRRLPLSCRMDTNWLITSKSRHGALPGFLGVSSFYRGYSSDTGIKPEASQSGVSNLPSTESSEVGTAGAGGGSWIEILDNARKSTIDATTDAGKKVKELTDAVAPHVQQLFDTYPNLEKVVVPLGGTICGTMMAWLVMPIILRRLHKYASQSPISALLGNSTKNDVLYQTSLWCALEDPAKYLITFMAFSEMATLIAPSVSTYLPQAWRGAFVLSFVWFLQRWKTNFIAKAMTKLDASSVDRDRISAFDKVSSLGLIGLGVMGLAEACGIAVQSILTVGGVGGXVATAFAARDVLGNILSGFYLQSSKPFSVYDYIKAESIEGMVVEIGLTCTSL

SEQ ID NO: 266393 - protein, 295 aa, Zea mays
  unsure (1)..(295): unsure at all Xaa locations
  Clone ID: MRT4577_174552C.1.pep
MADLALVGLRWAASPIVKELLTKASAYLSVDMVREIERLQDTVLPQFELVIQAAQKSPHRGKLESWLRRLKEAFYDAEDLLDEHEYNVLKAKAKSGKGPLLREDESSSTATTVMKPFHSAMNRARNLLPXGNRRLISKMNELKAILTEAKXQLRDLLGLPHXXNTVEWPAAAPTSVPTATSLPTSKVFGRDRDRDHIVDFLLDKTTTAQASSAKYSGLAIVGVGGMGKSTLAQYVYNDKRIEECFDVRMWVCISRKLDVHRHTREIMESAKKGECPRVDNLDTLQCKLRDILQES

SEQ ID NO: 266394 - protein, 102 aa, Zea mays
  Clone ID: MRT4577_174553C.1.pep
RIRYKSVPITNPTFYNFFPPDGKKVGFCKKKKKKKIVQGNALSKKLLEGGPSVVPVPPEKALATCFSREHVHCSLQLLSKAKPRKVAVGLLSGGQGQCQRAG

SEQ ID NO: 266395 - protein, 80 aa, Zea mays
  Clone ID: MRT4577_174554C.1.pep
VYLGQRATAAWTDYGEVLQLLDRFREEFRRVEKRITERNMYPLHKNWKGPAKAPCTLLFPDIGGKEKGITLKRIPNSVYI

SEQ ID NO: 266396 - protein, 47 aa, Zea mays
  Clone ID: MRT4577_174555C.1.pep
CLTKFILLRKPISSDIIPGLLPREKGRCLYNGRNPAGHRSQQVCTYE

SEQ ID NO: 266397 - protein, 273 aa, Zea mays
  unsure (1)..(273): unsure at all Xaa locations
  Clone ID: MRT4577_174556C.1.pep
MATTTSPPLQLASASRPHASASGGGGGGGVLLAGGSGGGVAPGWGRGRLQRRVSARSVASDRDVQGXVSPAEGLPSVLNSIGSSAIASNIKHHAEFAPLFSPDHFSPLKAYHATAKSVLDALLINWNATYDYYNKMNVKQAYYLSMEFLQGRALTNAIGNLEITGEYAEALKQLGQNLEDVASQEPDAALGNGGLGRLASCFLDSLATLNYPAWGYGLRYEYGLFKQIITKDGQEEIAENWLEMGYPWEVVRNDVSYPVKFYGKVVEGTDGRK

SEQ ID NO: 266398 - protein, 53 aa, Zea mays
  Clone ID: MRT4577_174557C.1.pep
SSLPISLLDKIQNKISSCIHPKELLIFLVVASIGTTAICLLLSSWSKQVTYYL

SEQ ID NO: 266399 - protein, 103 aa, Zea mays
  unsure (1)..(103): unsure at all Xaa locations
  Clone ID: MRT4577_174558C.1.pep
MKGLFVALALLALDASAGYSTSGGCXCQTPPSYVPSPCYMPTTTYLPTXQKPKPWQYLTQPPKLIACXQFGSCIVGSCXSTFLGQCVECLRHQCXSPAATPYS

SEQ ID NO: 266400 - protein, 105 aa, Zea mays
  Clone ID: MRT4577_174559C.1.pep
MGGSGAATCPEKVIYSKASTISPDPHGRAPDPWIYSSDLQDCWSEVRGVRDQLNCPSGPVQLVLTREFRRENPSSTARRQVQLVYGQRGSQLKLSSAEVEKAQLS

SEQ ID NO: 266401 - protein, 119 aa, Zea mays
  Clone ID: MRT4577_17455C.1.pep
TRTISSAPERRTRRPRSRTTSPRCCSSGWTTRSCSHSTGFLTYLGGARILPSARRVHLDQATFADLSSFYHNNLLPIDVRPTKTCRIASRLDLKPLPLRTERTNRREKNYPMVTCDINC

SEQ ID NO: 266402 - protein, 88 aa, Zea mays
  Clone ID: MRT4577_174560C.1.pep
LNQLTNSCFDFLGYLSSVPINTLLVRNQMLENTFLIDTRMKNFDTTVLATPLVGSLSKAQFCTGSGHPISKPVWTDLSDWDILDRFGR

SEQ ID NO: 266403 - protein, 233 aa, Zea mays
  unsure (1)..(233): unsure at all Xaa locations
  Clone ID: MRT4577_174561C.1.pep
MDGGGELGITKKEAEAEYHCHDFEWEDLRADVEANPSFSYHLSPFPTITASPQPPSSEAWRSFHRCHASGKFFKERRYLLKEFPELLNSKGCAKVLEVGCGNGSTVVPILRCSPSISVYACDCSEDTLEKANEIVCNTQGVDAKDRFHPFLLDVSKENFPGWLFCKCCQXQMEKLLISHQXSHLYVRXKNSISLKEDQCCVGGIDFITMIFMLSAIPFNTISATLERCMSVLK

SEQ ID NO: 266404 - protein, 47 aa, Zea mays
  Clone ID: MRT4577_174562C.1.pep
PSLRSFLTNKSLTSIAATTSPFCSTTSSYATSISPPSVNKAELSQLI

SEQ ID NO: 266405 - protein, 64 aa, Zea mays
  Clone ID: MRT4577_174563C.1.pep
GLLAEVALGGLDHGEAAVARERGHRHGGDGRHHGERLHRFALRAMMRLLLGAAASCTCRHGSLA

SEQ ID NO: 266406 - protein, 133 aa, Zea mays
  Clone ID: MRT4577_174564C.1.pep
NKQHKKSYPTASIHQHRPLTITLLLMLLALPTCVANATIAPQCSQAAIACLFPRYLASIIASVCDNPALQPYRLQQATAPSNIPASTLVRQQSPALSCAQALVQTIMPQQLQQLVLPVINQVGLANPYPYSAQ

SEQ ID NO: 266407 - protein, 158 aa, Zea mays
  unsure (1)..(158): unsure at all Xaa locations
  Clone ID: MRT4577_174565C.1.pep
RPAGRRRQPAAGSGAAQATANTARQEDGGGDPRSTTKKRNXSXPGDXNAKKTAAEGRRTAAAGGGPDPTXTETADRXXHXKNPHAXGXXKAHPRDXPQXGRARAQPKKEDGPPAXPRAXPKKQPRTQAAEXGPKXHGRPKKQEPAPPGQRNEHKRREK

SEQ ID NO: 266408 - protein, 64 aa, Zea mays
  Clone ID: MRT4577_174566C.1.pep
ISRKKKKKKKKKKKKKKKKKKKKKKKKKKKKKKKKKKKKKKKKKKKKKKNFFSFPGGSFKGEIF

SEQ ID NO: 266409 - protein, 166 aa, Zea mays
  unsure (1)..(166): unsure at all Xaa locations
  Clone ID: MRT4577_174567C.1.pep
PRVRPFMTEGSCLHLMKISYQEGFDEPVIGSILKETLKALEYLHRQXQIPREGKAXNILIDGAGVAKLGDFGVSACMFDRGDRQRSRNTFVGTPCWMAPEVLQPGTGYNFKADIWSFGITALELAHGHAPFSKYPPMKVLLMTLQNAPPGLDYERDRRFSKSFKEM

SEQ ID NO: 266410 - protein, 108 aa, Zea mays
  Clone ID: MRT4577_174568C.1.pep
RPTLPRTRGRTRGRTRGRTRGRTRTHGVTLTQSDAPFFQSSSSRLHRRAAAASSSSTSSQATSSQVVAIKIQDSRAPTSSRASSQAAAVQGSNVKRWSRREADSFGGG

SEQ ID NO: 266411 - protein, 104 aa, Zea mays
  unsure (1)..(104): unsure at all Xaa locations
  Clone ID: MRT4577_174569C.1.pep
PRPSRRRDQAEGKQGGDQAKXXQEEXEEXXEKAKTXXENTSXENKXXXXGXXKQATXGXXXTXRAGRXXQKDRAKXXAXKXXEGKXKXEAXXDXXTKXKQXQEE

SEQ ID NO: 266412 - protein, 85 aa, Zea mays
  Clone ID: MRT4577_17456C.1.pep
HNVKFLFLSMTYSLFMTPITQRGHRHYTLRTSSPPLAAHGRNMPSFLDTCALYTANRLTNPPPYSIPVPNIDSARTVIQTHVLFL

SEQ ID NO: 266413 - protein, 109 aa, Zea mays
  Clone ID: MRT4577_174570C.1.pep
LHFFLAFISNTAIANVSPQSTVCRGAHPDVEGRSGSRPRLRPRPKQSHLAGRGIWALIQGSASRSDSPMARRSLSGRSTGTNRRRVSSPPGDRTWIGNRVWVEARLLEF

SEQ ID NO: 266414 - protein, 108 aa, Zea mays
  Clone ID: MRT4577_174571C.1.pep
ASPSAASSAVTDAAGAHRRQHAQQRKARRCWSPGLHRRFVAALQRLGGAQVATPKQIRELMKVDGLTNDEVKSHLQKYRLHTRRASSDGGDQHAGGLWSSAPEQHYTT

SEQ ID NO: 266415 - protein, 98 aa, Zea mays
  Clone ID: MRT4577_174572C.1.pep
NSGPNPGRNHARYSGHSHLTCGKKNKTWGLETNKPTHAGPTYYYSKIGRGLMRCALPAVGRATWFSQACIELEHMALGHVRDELVHEDHPAPCAGPLV

SEQ ID NO: 266416 - protein, 112 aa, Zea mays
  unsure (1)..(112): unsure at all Xaa locations
  Clone ID: MRT4577_174573C.1.pep
PFQILTLSIIRNRWSIHLTKHFALTISLTTFSRPVVVLAGFGNLPGDMAFWDXIQKKNGSENKAECSVTSEWSPDGRHFMTATTAPRLQIDNCIKIFDHNGSLQFKKMFEKL

SEQ ID NO: 266417 - protein, 431 aa, Zea mays
  Clone ID: MRT4577_174574C.1.pep
MAPPPAGLVLVALLALVLALAPAPARGDKPARGGASSSIAAGADTEPSSAVFPLYGDVYPHGLYYVAMNIGNPPKPYFLDVDSGSDLTWLQCDAPCRSCNEVPHPLYRPTKSKLVPCVHRLCASLHNGLTGKHRCDSPHEQCDYVIKYADQGSSTGVLINDSFALRLTNGSVARPSVAFGCGYDQQVRSGDLSSPTDGVLGLGTGSVSLLSQLKQRGVTKNVVGHCLSLRGGGFLFFGDDLVPYQRATWTPMARSAFRNYYSPGSASLYFGDRSLGVRLAKVVFDSGSSFTYFAAKPYQALVTALKDGLSRTLEEEPDTSLPLCWKGQEPFKSVLDVRKEFKSLVLNFASGKKTLMEIPPENYLIVTENGNACLGILNGSEIGLKDLSIIGDITMQDHMVIYDNEKGKIGWIRAPCDRAPKFGSSSSSALL

SEQ ID NO: 266418 - protein, 543 aa, Zea mays
  Clone ID: MRT4577_174575C.1.pep
MRAGAAARGDSPRAMSAAATPRHRLGVALLLLLLLGGADAKAHNYEDALRKSLLYFEAQRSGRLPHSQRVTWRHHSGLTDGLEQGVDLVGGYYDAGDHVKFGLPMAFTVTMLSWSLIEYGADVAAAGELGHALEAVKWGTDYFVKAHTRPDELWAEVGDGDTDHYCWQRPEDMTTSRQAYKVDRDHPGSDVAGETAAALAAASIVFRRSNPHYSHLLLHHAQQLFEFGDRYRGTYDSSIDEVRSYYASVSGYQDELLWAALWLHRATGRADYLDYVVDNADSFGGTGWAINEFSWDVKYAGVQILAARLLLRGEHATRHRSTLERYRAKAERYVCACLGRNTEGGADANVERSPGGMLYVRQWNNMQYVTSAAFLLSAYSDYLAEAGVRTVSCAGGETVAAREVAALARAQVDYVLGTNPRGVSYLVGYGPKYPSRVHHRAASIVPYKHSKEFIGCTQGFDHWFGRRSSNPNVLVGAIVGGPDRRDRFRDNRENYMQTEACTYNTAPMVGMFAKLHRLARQEREQGPTPAPAPAPVTSAAADV

SEQ ID NO: 266419 - protein, 81 aa, Zea mays
  Clone ID: MRT4577_174576C.1.pep
QDAGHVFGATGLTLHSLRPGKTSIWRKDRTVLYIPTRHSLLYTTSDRTYITHSITYRKLNGGDTSRTRTTVHKHRGIYSDD

SEQ ID NO: 266420 - protein, 146 aa, Zea mays
  Clone ID: MRT4577_174577C.1.pep
RLNPRECMSLRSRWCELLRDRKTRSDQRSNTRRRFSLQFNLLLVLVASKWCAREQSVAATGTHLATSALPSSVLGIYSCECAAWLCWSDTLGRRVVQSSTLGAGCSTNRTSLLRDESECREPVVPRQRRVCPPPPPPRSLRSSINI

SEQ ID NO: 266421 - protein, 76 aa, Zea mays
  Clone ID: MRT4577_174578C.1.pep
IYGPPGKQFPPWEKKVLGEIKNPPPCFLKKRGGPKTFFKPFLFLGAFCGNLPNGEGGYPPKRGGGGKFIEQPFFRL

SEQ ID NO: 266422 - protein, 56 aa, Zea mays
  Clone ID: MRT4577_174579C.1.pep
MFLGSLPRRPSKEAAYKQLRSHIIIMASCAAVIRATPYILHFLARDGDIQELKLDL

SEQ ID NO: 266423 - protein, 116 aa, Zea mays
  unsure (1)..(116): unsure at all Xaa locations
  Clone ID: MRT4577_17457C.1.pep
GPKTWAGFEFRFPKRGFASPPPLKGGTHGPPFPSAPRVGGWAPPPPVEGGRVSPPPPLXFFGPRGPPPNVFLFFFHQRPFPPPLCAPSGLQEKFPLPLSXSRPVPPPXPMEPGCPP

SEQ ID NO: 266424 - protein, 198 aa, Zea mays
  Clone ID: MRT4577_174580C.1.pep
HMLVSKIKPCMCKYELTPPVPRRRALSVRRTAQPPQPETLAADTASEKRSKSRCFSARSRGAPSKEAASKQLRSHIIIRASCAASPSPASLPAAQPPQPETLAADRFRRREANQDVSRLAPAAPEQGGCVQAAAVAHHHHGLLRRRHPRHPLHPPFPRPRRRHPGTQARSVGPSVASPPPEVLQRQPLVRGHCKVLWS

SEQ ID NO: 266425 - protein, 47 aa, Zea mays
  Clone ID: MRT4577_174581C.1.pep
MFCGQKKKKKKKKKKKKKKKKKKKKKPKKKKKKKKKKRSLPGGPFKG

SEQ ID NO: 266426 - protein, 64 aa, Zea mays
  unsure (1)..(64): unsure at all Xaa locations
  Clone ID: MRT4577_174582C.1.pep
MRVHHPSLPVEANSMALLPLPASTHSGEGYKGGQDPLRLSXSPXSFQSSDPQPPSQVGWSPRAA

SEQ ID NO: 266427 - protein, 98 aa, Zea mays
  unsure (1)..(98): unsure at all Xaa locations
  Clone ID: MRT4577_174583C.1.pep
KGVGQLVXLSSKRGPQAWPYFKVGLFGEPGGEPSSVAFFPQTGVDYVSCSPFRVPIARLTSAPVLVLGAAPSLAPPCWGLWWFIILLWPSPFLFLKFL

SEQ ID NO: 266428 - protein, 79 aa, Zea mays
  Clone ID: MRT4577_174584C.1.pep
MGGDHHLQLRRPASIGKIAVPEKKSLFLHAASASPGHYQQQQGGASSHEAPAVSVGGGGGGGDSVGSGLQEMSSRKPGV

SEQ ID NO: 266429 - protein, 56 aa, Zea mays
  Clone ID: MRT4577_174585C.1.pep
INWLLQNKFIALMFRSVICILGPQYSINGKFPSPLCPRYALYCPKMSDTVIGHVMA

SEQ ID NO: 266430 - protein, 118 aa, Zea mays
  Clone ID: MRT4577_174587C.1.pep
MGGDHHLQLRRPASIGKIAVPEKKSLFLHAASASPGHYQQQQGGASSHEAPAVSVTPRTATNKQQLHLPASPRACLCSPTVHAGSFRCRLHRGVGGGGGGGDSVGSGLQEMSSRKPGV

SEQ ID NO: 266431 - protein, 85 aa, Zea mays
  Clone ID: MRT4577_174588C.1.pep
LLLGLLVSQAPLYLWRSRQLHRDPLLSKRPVAVPHHALVLVGVRFRQLCSPGVIWALCSFSGVQSRGTSRPFVFHVRVSGVTLLM

SEQ ID NO: 266432 - protein, 73 aa, Zea mays
  Clone ID: MRT4577_174589C.1.pep
ARATHITAFNAKHILTTKGRGHEGRSDVHKDGSQPLPSRSDDSRKLDRSHGTEHPKAAPKRMPENQQGKGRIT

SEQ ID NO: 266433 - protein, 73 aa, Zea mays
  Clone ID: MRT4577_17458C.1.pep
QKIICFFGSLFYIGAYLNFVYCIVILSDSTIFFIFSAGYPLREKQVHSTQTPVLATLYEPSSQTGMDCPRTST

SEQ ID NO: 266434 - protein, 60 aa, Zea mays
  Clone ID: MRT4577_174590C.1.pep
AAGGSNTTGEPDGGSHPRTGFVRTLHVGATKDPLSGLLNKRAANLHTPIGTVGVTYQPTG

SEQ ID NO: 266435 - protein, 44 aa, Zea mays
  unsure (1)..(44): unsure at all Xaa locations
  Clone ID: MRT4577_174591C.1.pep
GGESTSVFPAQEKATAHLKGGAKKAVXSAPSKAAPMFVVGVNEK

SEQ ID NO: 266436 - protein, 67 aa, Zea mays
  Clone ID: MRT4577_174592C.1.pep
PSSRTTPCGVPVPFRPIINFFFLGFFSIHPFLCLYVNCGTAPLIIMCGLPHKKSKKKKFWLKKKKKN

SEQ ID NO: 266437 - protein, 88 aa, Zea mays
  unsure (1)..(88): unsure at all Xaa locations
  Clone ID: MRT4577_174593C.1.pep
PHESRGSRLIGQTYPFQHGARCWDHSTRRMSELERPTTTDESDPRALTGLAATQCVFTITNALDITLEVDRXSGDRKRGLHWKGSPEP

SEQ ID NO: 266438 - protein, 53 aa, Zea mays
  Clone ID: MRT4577_174594C.1.pep
CGRRFMTRPTPNYASRWLTLTRSCSEDAHLGKMSTRTQPMRMTNDPYYNANPY

SEQ ID NO: 266439 - protein, 88 aa, Zea mays
  Clone ID: MRT4577_174595C.1.pep
FPLFLGYRGLTKGPPKKTKKTGPPPFTWVFGWEAPFLMGTPFHLLYLGHFFSCPLKGFAGPKPGFSRPNFFPVFPQWFGGFFFPFCRF

SEQ ID NO: 266440 - protein, 175 aa, Zea mays
  Clone ID: MRT4577_174596C.1.pep
SPSIWGTFCQPQNVEFNLAPPKKNGVGNWGFTSGKFPGWGKEFQGTGGGLFLVPLLGNFKKRLVNKFLKLFLEIPGEKTVGDLYCGPPKKGFSIGFKWWVQGKCPREVMMPNNRLRFWLVPPTRQGVGPSLFGLPAPAPGFVFGFFFLGGGWGFWWGGGGGGWCGGGGRGGARVP

SEQ ID NO: 266441 - protein, 96 aa, Zea mays
  unsure (1)..(96): unsure at all Xaa locations
  Clone ID: MRT4577_174597C.1.pep
TQALNQSPQGTPYAGSAPPPVTTTRGTLTTATDLTXTPLLSNKFTLIPSSSFSSTLPSXSSHHSSAHPVPYNXLNXXXYXHIHNTYNKHINQPKGP

SEQ ID NO: 266442 - protein, 61 aa, Zea mays
  Clone ID: MRT4577_174598C.1.pep
QFSIFDFYVKLVSKTCQITVSYYQRSLQKDPLGNCKTKSTCYGHVSSSGYKSQAIIVLIVA

SEQ ID NO: 266443 - protein, 67 aa, Zea mays
  Clone ID: MRT4577_174599C.1.pep
LSSARLQVCTTGRLVGGMYPGFSSMPAHSSVRSLRFKPVCLPRHKERHPGKVWPAGGRLASKFISMV

SEQ ID NO: 266444 - protein, 70 aa, Zea mays
  Clone ID: MRT4577_17459C.1.pep
MGAGPKNHKEVSPVMPDGGAAHEDEKPPEAKAPEAFNYLAHRGPVEMGKHQSVHVFRGMTWKSWNFGILC

SEQ ID NO: 266445 - protein, 59 aa, Zea mays
  unsure (1)..(59): unsure at all Xaa locations
  Clone ID: MRT4577_1745C.1.pep
PGEVRLKCRTVNLNLKVQDGESHHFELGLLFFPPKELKNLHSFNDFQFRKCCDCGSHXX

SEQ ID NO: 266446 - protein, 109 aa, Zea mays
  Clone ID: MRT4577_174600C.1.pep
LFAGRASRSTHGLRRVAPRSPWAQRRAAAVAWPPQRRTQPPLPWVRRVAAHRPDRRHPSQSHPPDMLIALVSSRALMPANCALMLTICTMSRSSLAEKDVAGSGTPLAM

SEQ ID NO: 266447 - protein, 73 aa, Zea mays
  Clone ID: MRT4577_174601C.1.pep
LLAVSLWPLPPFGAAVFFIHACLQGVPIPVCSLRSQCLLSADVLVGLPIGVAPAVRVGLSRRHGSFFVSRFKL

SEQ ID NO: 266448 - protein, 108 aa, Zea mays
  Clone ID: MRT4577_174602C.1.pep
PQKPPLFIKGFHKKFTQTGRPLGENPPAPQKLVENKWPHRGETKKPWFKNNFLPTKTRVGGQTKRHPRNRNDKKKKNPKRKSTPKPRFTHKEPHPSPQKNQTSPKKKK

SEQ ID NO: 266449 - protein, 533 aa, Zea mays
  unsure (1)..(533): unsure at all Xaa locations
  Clone ID: MRT4577_174603C.1.pep
MAFLVPFLLGLSSVLAAWIYSEFLGYRASSSHEKVHSDVHVGDKTIKENDRAVLLEEGESKPPSTKAPNMSARAKLIRFITLDESFLVGNRATLRAIAEFGIILVYFYTCDRTNIFAESKKNYNRDMFLFLYILLVVASTITSLKKHPENSVVSGKTVFYLNRNQTDEWRGWMQVLFLMYHYFAASEIYNAIRVFIACYVWMTGFGNFSYYYKKKDFSIARFAQMMWRVNFFAMSCCMVLDNDYMLYYIAPMHTLFTLMVYGSLGFLNKYNEIPSVMAIKIAGCLLTVILIWEIPGVFEIFWAPFTFLLGYKNPEPSKMNLPLLHEWRFRSGLDRYISAIGMIYAYFHPNVERWMEKLEESETKVRVLIKGTIVTASLMAGYLWYEYIYKLDKHTYNKYHPYTSWIPITIYVCLRNCTQQLRSTHLSLFVWLGKITMESYISQFHIWLRSSIPNGQPKLLLSFLPDYPMLNFLLTTTIFLSVSFRVFKLTNVLKEAFIPTRDNKCLYQNFIAGVAVFACLYCSXIILQNLPTV

SEQ ID NO: 266450 - protein, 52 aa, Zea mays
  Clone ID: MRT4577_174604C.1.pep
TSDCEIQTRAARRRQSHLLVKVIGLVQEIFRSVSDGRRRNSTFAQPYQRQQS

SEQ ID NO: 266451 - protein, 162 aa, Zea mays
  Clone ID: MRT4577_174605C.1.pep
FLWALKDEPSWREGLPSQYAEAVAGRGKIVAWSPQEDVLRHKAVGCYLTHCGWNSTLEAIQNGVRLLCYPVSGDQFINCAYIVKVWETGIRLPSTNRNVVEDCIERIMEGEEGRRMQVNVDEMRERVVMGGARCAANRNLDSFVDEIMKNENLLARRPCPLT

SEQ ID NO: 266452 - protein, 83 aa, Zea mays
  Clone ID: MRT4577_174606C.1.pep
LKSTIWSPKLDPLPFKPKLGPRKKQKKLQIKKFGKFGSQFIQKLWLKNEPLINFGICKICRGKKKNIFSHLAPFLCKITNLCF

SEQ ID NO: 266453 - protein, 75 aa, Zea mays
  Clone ID: MRT4577_174607C.1.pep
MARTAASSLVSRCLLTRAPAGAPPDVPYALRKTVPADGMHRLLPGVLHRFSTAAAVEEPITPSRHVNYTKLLING

SEQ ID NO: 266454 - protein, 100 aa, Zea mays
  Clone ID: MRT4577_174608C.1.pep
HHINRQGGGLFHCYFMRSSLKALHTITISANVYFHFVVFGACTVLYNMIQCGNVSFVSPCVQNAWLVANKIGYVVGLVIGIQNVEPCTLLFYNTIDLSIS

SEQ ID NO: 266455 - protein, 76 aa, Zea mays
  Clone ID: MRT4577_174609C.1.pep
SRVTHSLKPALIAHHILPGTGGLNSLPHPLTQGPPHLSHVQHRTHEKRRHRQADPLFSLFRTNQPRWHDSQSLIAG

SEQ ID NO: 266456 - protein, 54 aa, Zea mays
  Clone ID: MRT4577_17460C.1.pep
FSRRYYGNRFCCVSWIHHSFQKGDLFGNLLIYAYSNHFVACTPFLVSFCLCSPP

SEQ ID NO: 266457 - protein, 76 aa, Zea mays
  unsure (1)..(76): unsure at all Xaa locations
  Clone ID: MRT4577_174610C.1.pep
KKYPDLGETSTSAQATVVLGGAPEKKPAPEFXXAPAESREPAHPCGCGSSSKCDPYNFCSHRTPMDMIIIYLCGGG

SEQ ID NO: 266458 - protein, 52 aa, Zea mays
  Clone ID: MRT4577_174611C.1.pep
ESANHVCFAYARPMNNTDIMQTIVLDLLQPQCSGSTSTIKGAGVSISLIAIP

SEQ ID NO: 266459 - protein, 204 aa, Zea mays
  unsure (1)..(204): unsure at all Xaa locations
  Clone ID: MRT4577_174612C.1.pep
IRSINRSVLQYAPCSVAILVDHGLASGSACATAANSLLQRAALYFLGGADDREALAYAARMPETGTMSLTVVRFKLRNWVGMGGRDEARDEELLQEFWSRHRDNERVVYVEKTVEDAEGTASVVRAMSEKFDLLIVGRRGGKXKGDPEGSTALTSGLSDWSEFPELGVLGDMLASAEFASKVSILVIQQQPPKKTIATGSSVND

SEQ ID NO: 266460 - protein, 34 aa, Zea mays
  Clone ID: MRT4577_174613C.1.pep
QPNHNQRVVNLCSYTQPTLDKTHFQQPGTQILSL

SEQ ID NO: 266461 - protein, 133 aa, Zea mays
  Clone ID: MRT4577_174614C.1.pep
VLPKIGQTTLLPKLFLLAPVANSEKETGTFQKVPALNEGFLPSMSRRSVAAHLGHNLEIGLGAPPIYICLIEIPRGSRVKYKLDKKTALIKGNRVLTSSVVNPHNYGSIPRTLCEDSDPKDVLVIMQEPVIPG

SEQ ID NO: 266462 - protein, 154 aa, Zea mays
  unsure (1)..(154): unsure at all Xaa locations
  Clone ID: MRT4577_174615C.1.pep
TQKTPAGGPFPLKKRGPGFRGFLFPPNGPPPFGGGVRGPPLYPRGAKFEIPGAPPGGQKTTGPPPPGGAKTPGPXPFGPRPFFGLPFFPAPPPPRIRKPPPVLGPRGAPQXPRETQGPKGFFPGKGPPIPTKPAPPLGKTGGPPHMFGLGRGPP

SEQ ID NO: 266463 - protein, 173 aa, Zea mays
  Clone ID: MRT4577_174616C.1.pep
MSLAAIFVFLIVSALQLLDRYLDLARKSGGLSDEQIKVRLEIKQLLKEADQLSTPSTFAQAAKLKRLAAAKEKELAKMQEHDLKGKQSLYDKYTKFLLVTKVIIYAVLVLCFWSTPVTAVPQHLLQPFGKMFSWRGVDTATGNVVVGILPWLFLTSRVSKMLCQKLGFVLVRP

SEQ ID NO: 266464 - protein, 53 aa, Zea mays
  Clone ID: MRT4577_174617C.1.pep
KGKPIFLFGANTRKKRAPPKEKNFPFLTRLKPKMEWFEPQGFPDIFILRLGNV

SEQ ID NO: 266465 - protein, 120 aa, Zea mays
  Clone ID: MRT4577_174618C.1.pep
QTLCRGARIQEPIQPTGTTYYYTNVLSTRRRQDTKVQSCKALSLLRCCCCLPVTAAKCHCIASQIHKKNTVRTSQMVQTSHFRLQSPKFSTAVSNPLLHRNPAPVVRSPPAIASGERRVP

SEQ ID NO: 266466 - protein, 173 aa, Zea mays
  Clone ID: MRT4577_174619C.1.pep
MSMAAIFVFLIVSALQLLDRYLDLARKSGGLSDEQIKVRLEIKQLLKEADQLSTPSTFAQAAKLKRLAAAKEKELAKMQEHDLKGKQSLYDKYTKFLLVTKVIIYAVLVLCFWSTPVTAVPQHLLQPFGKMFSWRGVDTATGNVVVGILPWLFLTSRVSKMLCQKLGFVLVRP

SEQ ID NO: 266467 - protein, 119 aa, Zea mays
  unsure (1)..(119): unsure at all Xaa locations
  Clone ID: MRT4577_17461C.1.pep
NLPNPPLKRSLFLTISSPLKTTLQTPFFSNNPKTQFPQKQNLFYGSPLKHPPFFNFWKDFFLPPKPAXPXXVSTPPRAHXFFFPPLTNTKKKKKKKKHPLPPFXSXLGPPLLTNPPSFP

SEQ ID NO: 266468 - protein, 45 aa, Zea mays
  Clone ID: MRT4577_174620C.1.pep
HCRTVHKLQNESSAMEEKRSSFNTTLWPIISIYCFSFVRHHSKLF

SEQ ID NO: 266469 - protein, 136 aa, Zea mays
  Clone ID: MRT4577_174621C.1.pep
FPTANYSSLLCLYVCCRPSTFAQAAKLKRLAAAKEKELAKMQEHDLKGKQSLYDKYTKFLLVTKVIIYAVLVLCFWSTPVTAVPQHLLQPFGKMFSWRGVDTATGHVVVGILPWLFLTSRVSKLLCQKFGFVLVRP

SEQ ID NO: 266470 - protein, 192 aa, Zea mays
  Clone ID: MRT4577_174622C.1.pep
ERERPQVLAVSGGNRQLWLAESEPVARRGWFRESAEAGEAKPWPPVPTGCRLGALSRLPISPRDRDRATCRTSHPHPFQLPNSANPTGRPREPCRSLGALASSGRERKIRPDGRCVHLGGVRGPAARRAEGRADRRGFLLRRGDHQGAGGQRAEEVVDGEGKKAACRRRQCRHECRRRWRRLLAGRAAGRRS

SEQ ID NO: 266471 - protein, 91 aa, Zea mays
  Clone ID: MRT4577_174623C.1.pep
DLVCTRHGLILRNVKGTARYADILTLLTHKYVERIGCSHTPTARCALLFAVSSSSNLVLCLNFCDPVLHTRNTRTIRLQLLVILVENATSW

SEQ ID NO: 266472 - protein, 83 aa, Zea mays
  unsure (1)..(83): unsure at all Xaa locations
  Clone ID: MRT4577_174624C.1.pep
PPSLAPRPPPPPPRPPPPPPGPPPSPPGPAPPXPPRRPPPPXPGPPPTPPPLPRPXPXPPPPPILFVGRSAMPTPVPGRLRIV

SEQ ID NO: 266473 - protein, 52 aa, Zea mays
  Clone ID: MRT4577_174625C.1.pep
FGTRSPCSSRCSFYCGVLLGCACGSLACYLQHRSARCFMFLVLFAWFGAFDL

SEQ ID NO: 266474 - protein, 66 aa, Zea mays
  Clone ID: MRT4577_174626C.1.pep
RTFRKTSYRGVELDALIDMSTDDLVQLFTARSRRRFQRALKTKPMSLITTLRNAYKDAPTGEKFEP

SEQ ID NO: 266475 - protein, 128 aa, Zea mays
  Clone ID: MRT4577_174627C.1.pep
CTIDSLPFHHHHTTGIRDFAECRPLCRVPFVGHSAKGGFAESRTRRIPALGNEVVYRVQDTRHRITLGKEMFAECQTLGNCGARQRAVSGRPRADGRQPLPRAEGRHSAKDSLPSVFSRHSAKHIFIF

SEQ ID NO: 266476 - protein, 54 aa, Zea mays
  Clone ID: MRT4577_174628C.1.pep
YQQLIFPLTIKKKKKKKKKKKKKKKKKKKKKKKKKKEKKKKKKKKKRPLGCSHC

SEQ ID NO: 266477 - protein, 90 aa, Zea mays
  Clone ID: MRT4577_174629C.1.pep
EMHSSQNDSANSDIEGSFFFKPQMRASLLSPGVSIMNNTKLIGAKLMCYDPPDISHDRKLFSNGFSSTEHDFTNTVLLTNRMVLVLGAQL

SEQ ID NO: 266478 - protein, 92 aa, Zea mays
  unsure (1)..(92): unsure at all Xaa locations
  Clone ID: MRT4577_17462C.1.pep
MMKMSYWECPVAWKGMYTRGDQGVPTVILEAVASHDRWIWHAFFGVPGSNNDINVLNQSPLFVQQLXGEGPQVQYIVNGRQYNTDYYLADGI

SEQ ID NO: 266479 - protein, 113 aa, Zea mays
  unsure (1)..(113): unsure at all Xaa locations
  Clone ID: MRT4577_174630C.1.pep
PPIQFVDWCPPGFKCGINSHPPSVVPGGDLAKVQRPVCIFSPPPSVVGVFSPIAPKFALMYPKRPFVPWYVGKGMEKGQFSQAREDLAAPQKDSQEVGSXFSKGEAAPQGSEY

SEQ ID NO: 266480 - protein, 87 aa, Zea mays
  unsure (1)..(87): unsure at all Xaa locations
  Clone ID: MRT4577_174631C.1.pep
FFIALLAKPKXYYKILEVDYYASEETIRSSYIRLXLKWHPDKKQGQGEENSTSKFQEINEAYQVLSLNRHKGLILTCNGLGIRYSVW

SEQ ID NO: 266481 - protein, 91 aa, Zea mays
  Clone ID: MRT4577_174632C.1.pep
AGWLLTSRRHPTGKEEEEGRRSHRKFEHPRHGSLGFLPRKRSSRHRGKEKTLPRDDRKKPCHLTASLKYKDGGGENVREVKKTETKLHKKE

SEQ ID NO: 266482 - protein, 63 aa, Zea mays
  Clone ID: MRT4577_174633C.1.pep
SCNAETFSERGLKRAPRVICSWAAFLHQATQTALQLSGNDSDHVGQKMVKCSLKDATQLNKHG

SEQ ID NO: 266483 - protein, 64 aa, Zea mays
  Clone ID: MRT4577_174634C.1.pep
MNSSGQYLAFKHGTDALYHFQIKGFHYRFSKTADECKLWALERVHHTEYLIPRPLHVSISPLCR

SEQ ID NO: 266484 - protein, 57 aa, Zea mays
  Clone ID: MRT4577_174635C.1.pep
RVQKCLPSLPIVQLKRRMRDPFFSGEISNHRYALQNVADWRRQMPCLDLAYAMIRFG

SEQ ID NO: 266485 - protein, 132 aa, Zea mays
  Clone ID: MRT4577_174636C.1.pep
MRWEWEGDGGEAPREETPVDFDFIALLAKPKDYYKILEVDYYASEETIRSSYIRLALKWHPDKKQGQGEENSTSKFQEINEAYQVLSNPAKRQEYDKKGILYVQDQNVVDYLNRHKGLILTCNGLGIRYSVW

SEQ ID NO: 266486 - protein, 112 aa, Zea mays
  Clone ID: MRT4577_174637C.1.pep
MAFSFWRGQRRRAGGAVAMFGLIHKIEENLHMGGDPKREVEPHRRAGGHHRREEGGHHKKDGGELKEGFVEKIKAKITGRHGNKSGDPKEKKARKKKRGRKNPGRGHNPNGG

SEQ ID NO: 266487 - protein, 110 aa, Zea mays
  Clone ID: MRT4577_174638C.1.pep
MLIAHLCLQDYYKILEVDYYASEETIRSSYIRLALKWHPDKKQGQGEENSTSKFQEINEAYQVLSNPAKRQEYDKKGILYVQDQNVVDYLNRHKGLILTCNGLGIRYSVW

SEQ ID NO: 266488 - protein, 71 aa, Zea mays
  unsure (1)..(71): unsure at all Xaa locations
  Clone ID: MRT4577_174639C.1.pep
TPIGRLGSSEPAGAPSFSSGSXSGRXRXRLIRNAPVFAAPATVVGMDPXXXXLKXXXXKXXNEVYEKKTKM

SEQ ID NO: 266489 - protein, 112 aa, Zea mays
  Clone ID: MRT4577_17463C.1.pep
MKFIAAYLLAVLAGNSSPSAEDLTAILESVGCEVDNERMELLLSQLSGKDITELIAAGREKFASVPCGGGGVAVAAAAPAAGGAAPAAEAKKEEKVEEKEESDDDMGFSLFD

SEQ ID NO: 266490 - protein, 114 aa, Zea mays
  Clone ID: MRT4577_174640C.1.pep
NSSSINSPSKSPASPSCSKVSCVSSSNVFGSSTTQSASAQRWMGPRLAASRRTGALPSTGKWKSGRPRSRGSLHRRRIGSETARRRRMMTAVARLREQHIGQRERRKERLVTST

SEQ ID NO: 266491 - protein, 80 aa, Zea mays
  Clone ID: MRT4577_174641C.1.pep
KFLAGTRLHVVLTKPPELDSTNIERHCHRLRTPQTTTTATEHKGENNKQTGNIAPPSFYQQPHNPQTQQRTTTRPRAEPP

SEQ ID NO: 266492 - protein, 69 aa, Zea mays
  unsure (1)..(69): unsure at all Xaa locations
  Clone ID: MRT4577_174642C.1.pep
MPKKKKKKKKKKKKKKKKTKKKKKKQRKPKNKKXKKKKRKKXSIKKGTKRMPMKKTCHKNKGTGASDHA

SEQ ID NO: 266493 - protein, 64 aa, Zea mays
  Clone ID: MRT4577_174643C.1.pep
AVESVVLNIMIFSSSTCLIKNSLALFYCSRGPDSPMFLVSCLMWKSLRTEYFCLKKDLFSPALQ

SEQ ID NO: 266494 - protein, 71 aa, Zea mays
  Clone ID: MRT4577_174644C.1.pep
HEQDRNACAGARLPDCPAGGVDHRSSGGCRDMTAFSLPAIATATQLSFTSSDMTGGRRLDQSARSLELDWA

SEQ ID NO: 266495 - protein, 60 aa, Zea mays
  Clone ID: MRT4577_174645C.1.pep
LSRGRDVKVALELSFMEAVQGCSKTVTFQTSVTCEICGGAGVPPGTTPETCLSCRGSGLC

SEQ ID NO: 266496 - protein, 503 aa, Zea mays
  Clone ID: MRT4577_174646C.1.pep
DAGPRPTPIVPGRVQLVSKNNNMAPLEENTQKVLLELTGGDSTSDRSGLDLVAVLDVSGSMQGEKIEKMKTAMKFVVKKLSSIDRLSIVTFLDTANRICPLRQVTEYSQPQLLKLIDALQPGGHTNISDGLQTGLKVLADRKLSSGRVVGVMLMSDGQQNRGEPAANVKIGNVPVYTFGFGADYDPTVLNAVARNSMGGTFSVVNDVNLLSMAFSQCLAGLLTVVVQDLTVTVARIEDESTIQKVAAGNYPQTPDADAGSVTVAFGDLYSKEVRKVIVDLLLPAIDSDRGADILEVTYSYKTAGKLFDAPPATVTVRRSGTAFPADDPPVDVQTEEARLKTATMIQQARTMADGKKLGDARDKLAEAQNALEDVVAQSDPLLDALRTELQELLKLMKSQDVYEKQGRPYAMSSETSHDRQRFAARGDIESNRLFSTPRMDKYLEQAKKFDEDPAAPLPSADKDEEEEVAANPLAPLVGPITFYIRAAVEALQAIEKLINKGAN

SEQ ID NO: 266497 - protein, 105 aa, Zea mays
  unsure (1)..(105): unsure at all Xaa locations
  Clone ID: MRT4577_174647C.1.pep
MAKIKIGINGFGRIGRLVARVALQSDDVELVAVNDPFISTYYMTYMCKYDTVHGQWKHHEGNVKDSITLLYGEKEVDVFGCMNLEEIPXRSVGAEYAGESSVVFT

SEQ ID NO: 266498 - protein, 85 aa, Zea mays
  Clone ID: MRT4577_174648C.1.pep
YIREDRLVLDFLLLPLESSRTLNFQVSHEGPDLSHHRAAFIEFCCSYHESRDIPTVAAHISPNEDEAAAYICLAHKRSDAGESIS

SEQ ID NO: 266499 - protein, 55 aa, Zea mays
  Clone ID: MRT4577_174649C.1.pep
CLEESAATLAKMTLMKELIMEMAWFDASKSCLHVLQRLLDVGPVGPYGSLGFLLP

SEQ ID NO: 266500 - protein, 96 aa, Zea mays
  Clone ID: MRT4577_17464C.1.pep
KRPQGEHSPRGAPPRRWSVSHGSFKPLLGMGICVVCVPYGEPLYECRRLINICGLCVMNRGCGFVGLMGLLCLMCCTQRSCAAVWLAPLLSLLFEL

SEQ ID NO: 266501 - protein, 45 aa, Zea mays
  unsure (1)..(45): unsure at all Xaa locations
  Clone ID: MRT4577_174650C.1.pep
CRNMTIIMGVVCKVGGISGVLCCCGKEFEKMELCLXNKNGGLSFN

SEQ ID NO: 266502 - protein, 69 aa, Zea mays
  unsure (1)..(69): unsure at all Xaa locations
  Clone ID: MRT4577_174651C.1.pep
LKGCILGNGIRLQFLGGAIILCGVSRFGWLLIVNQANGEFSEEPNKKGWAVRNVFKSYFIGVXINIXXD

SEQ ID NO: 266503 - protein, 73 aa, Zea mays
  Clone ID: MRT4577_174652C.1.pep
SSSLLSLHNNDKTEGATRAERERGGGNSSAAEPCNPEPEAVVISCSCFEWGHHTTVDPIPLWHSSPETPQNVF

SEQ ID NO: 266504 - protein, 165 aa, Zea mays
  unsure (1)..(165): unsure at all Xaa locations
  Clone ID: MRT4577_174653C.1.pep
IASKTNSVVGDLRQLVGSLGLGAREPEREGWEHVISKSSDDVSYKAWCDKPTVVANCVHALQQIWALEAANLVAERLRHCIANHWIKEFSEWPQCXVLELQSKFLPYNNNKIFDIMNLLEDRLQHANGVVVLATIKVFLXIPMTVVHQQQEKKEDKSDKTEDEKN

SEQ ID NO: 266505 - protein, 85 aa, Zea mays
  Clone ID: MRT4577_174654C.1.pep
SLTAKLEHIMEAMAKNLTVTRKLGGRTPSQNLDGRCQQACSCLNYSFCRYKISKNFSCLARIMILTGRVGLHVNICYVFPVVFFL

SEQ ID NO: 266506 - protein, 50 aa, Zea mays
  unsure (1)..(50): unsure at all Xaa locations
  Clone ID: MRT4577_174655C.1.pep
VLYFYLXRIKEFSEWPQCXVLELQSKFLPYNNNKIFDIMNLLEDRLQHAN

SEQ ID NO: 266507 - protein, 83 aa, Zea mays
  unsure (1)..(83): unsure at all Xaa locations
  Clone ID: MRT4577_174656C.1.pep
AQSSADRAQDNGQAGKKPXARKRVTXANAAGGGGGDTTATTQAKTSAETDKIYIVKVLKQVHLDIGISXQAMCMMNCFINDIF

SEQ ID NO: 266508 - protein, 60 aa, Zea mays
  Clone ID: MRT4577_174657C.1.pep
KRSLRTSPSPTDAASGGRVLRSASITFLRRRLRKLSPLEEVRTGDPRAASLAKWEPVGSK

SEQ ID NO: 266509 - protein, 106 aa, Zea mays
  Clone ID: MRT4577_174658C.1.pep
LVESKKNEEFYNYSKTTNPFIGHTLFRYVNNGYGNRTRDLRVMIPPVFPDCSTQFCGTENWRTKEKGGIQGSTMSRQTKGIAFLYRKERIAVIDPASVACKARGYG

SEQ ID NO: 266510 - protein, 132 aa, Zea mays
  unsure (1)..(132): unsure at all Xaa locations
  Clone ID: MRT4577_174659C.1.pep
PQEGNACTELLGFERGLTEGGGEGGETTTGGREEELKKLFPXIGAGKYVFRAAFVELEPTVRHEGRTGSYRQLFHPEQVIRGKEDAANNFEEGYHTIGQEIVELCLERIRKLADTXTGLQGLLXFNAAGGGK

SEQ ID NO: 266511 - protein, 113 aa, Zea mays
  Clone ID: MRT4577_17465C.1.pep
MKFVAAYLLAVLAGNSSPSAEDLTAILESVGCEVDNEKMELLLSQLSGKDITELIAAGREKFASVPCGGGGGMAVAAAGPAAGGAAPAAEAKKEEKVEEKEESDDDMGFSLFD

SEQ ID NO: 266512 - protein, 111 aa, Zea mays
  unsure (1)..(111): unsure at all Xaa locations
  Clone ID: MRT4577_174661C.1.pep
CLASFILGSGANFGVTDTIQNKFKVXSTQXLYQSCPYQVLTLFLVETFLDXFLTNQNVFTIDYTTEVLFFIVLYSLISVYMNFSTLIVIEKTFTVTYQVLGHLTTCLITNL

SEQ ID NO: 266513 - protein, 57 aa, Zea mays
  Clone ID: MRT4577_174662C.1.pep
GLHTAADAVEYLDSRKCVAQCVVPVDLSFLPRSGHNVDQTMLDDLTHYIIALSTQNG

SEQ ID NO: 266514 - protein, 60 aa, Zea mays
  Clone ID: MRT4577_174663C.1.pep
IRECSHIPSIKKRYRFSGKRSRFAKVCAQRMDSDIDSGWYGASILGQPKAEVEACIVRTT

SEQ ID NO: 266515 - protein, 57 aa, Zea mays
  Clone ID: MRT4577_174664C.1.pep
RPGPGTRCPAPAPTPVGFPLPFRPTPDSLPLGNLLYPSLSIKICNNAVTPPPFSCVV

SEQ ID NO: 266516 - protein, 364 aa, Zea mays
  Clone ID: MRT4577_174665C.1.pep
MEGVHSLLARPNSAPFAFSPLPLRRSHRPPPPGPSTCRAASRWADRLFADFHLLPAAADPPAAASSSSSSPFVPIFPEAADRALPLPVDFYKILGAEPHFLGDGIRRAFESRIAKPPQYGYSTEALVGRRQMLQIAHDTLTNQSSRTEYDRALSEDRDAALTMDVAWDKVPGVLCVLQEAGEAQLVLATGEHLLQDRPPKRFKQDVVLAMALAYVDISRDAMAASPPDVICCCEVLERALKLLQEDGASNLAPELLSQIDETLEEITPRCVLELLALPTDEKHKNKRQEGLQGAKNILWSVGRGGIATVGGGFSREAFMNEAFLQMTSAEQMDFFSKTPNSIPPEWFEIYSVALAHIASTRKLG

SEQ ID NO: 266517 - protein, 51 aa, Zea mays
  Clone ID: MRT4577_174666C.1.pep
SLVAEGSGFYWHEEALCISRVDNGHMGFYKVIYQEVSEVYIQLLDRELWFE

SEQ ID NO: 266518 - protein, 113 aa, Zea mays
  Clone ID: MRT4577_174667C.1.pep
TRTHTRPPTRPIVSNNLSGNTVRNMLQREIYIYHQNEGFWSGAYRLSETTGGDTSQAHRRFICHRRPNFQCCLHHHHAHIDSSLIHSCRPHDPSKLYNKIHNTLFFFSLTYPT

SEQ ID NO: 266519 - protein, 56 aa, Zea mays
  Clone ID: MRT4577_174668C.1.pep
LPSDPPVAVCVHLRHQRSKSSRSELHPDSARYRMKYILLLSIQAGLVHSTEGRGSP

SEQ ID NO: 266520 - protein, 264 aa, Zea mays
  unsure (1)..(264): unsure at all Xaa locations
  Clone ID: MRT4577_174669C.1.pep
MEAEQQKQQPQRPRRKGLKRKLEDEASAAVAAAATSAAASAAAASLGSAGADDDNEEEDGSAGTPEICCRHSHAALAREVRAQVDALVRCASSWRHADRAAAKRATHVLAELAKNEEVVNVIVEGGAVAALVCHLEEPAVAAPTQEEQQLRPFEHEVEKGAAFALGLLAVKPEHQQLVVDAGALPPLVKLLKRQKNXXNSRVVNSVIKRAADAITNLAHENSNIKTSVRMGGGIPPLVQLLXIQDLKVQRAAAGALRTLALKMM

SEQ ID NO: 266521 - protein, 232 aa, Zea mays
  Clone ID: MRT4577_17466C.1.pep
CFRVRCDIAIKPFAAATAGDGDAFVAAPPSDDLHRHLGDLLARKDGADVTFQLVDAGGETFSAHRCVLAARSPVFRAQLFGEMMESSKGTGVVIPVEDMEAQVFSALLAFIYTDSLPPETGSGDDDDDDDDEAMVQYQLLLAAADRYGVDRMKLVCQEKLCKHIRADSVATMLVLADRHHCPALKEACFRFLSSSGNLGSFTQTTDGFEVLNASCPAVLKELLAKLATVLIF

SEQ ID NO: 266522 - protein, 113 aa, Zea mays
  Clone ID: MRT4577_174670C.1.pep
PHPLGGVSLALLGPVFQWMTHLGERKDGYEFPVSIWPEARCQGSVLSIRREPVLVLRNPGARCHKLGLSSTYALWCSVPILWDSCLVHLLVPGGWLTHLYVRWFQICCTETYL

SEQ ID NO: 266523 - protein, 127 aa, Zea mays
  Clone ID: MRT4577_174671C.1.pep
ENLKSPPHPSCLTRFDAHTCKSCRLLLLSRAKSCSFGLAVATTSTRRSSRPNSQHLRQRNQLWELVRQRRADRHSCVRAGRDKMEKEHIKMAMLRQEQTFRQQVQLPSCSHTGRAVEQYTFYYFITM

SEQ ID NO: 266524 - protein, 56 aa, Zea mays
  Clone ID: MRT4577_174672C.1.pep
AARCPLCLPYYACCDLISMAGSYAFNGLGGPVAVVNVLRPLRCARYSFAAVCLETE

SEQ ID NO: 266525 - protein, 203 aa, Zea mays
  Clone ID: MRT4577_174673C.1.pep
QQREALGEVDGEQGRGGNNDAGRRQRGERRSQRCCILFLAADLCRKMLRALQPSYCAPCIDLLRSPCGCAPPVMPTSCLTCASSRPCPTPSSVPPGILPPPAIKETEEGERRRRGQVEGVRSSPWNGRTGPLLPCSPLPLAEEAALGPLPFVLLRSCATKRIGGGRGTRCEHVDVKERWRRTERRVMTARREVGGGPVWRLWG

SEQ ID NO: 266526 - protein, 95 aa, Zea mays
  Clone ID: MRT4577_174674C.1.pep
GTRPPCGPPPPPPPPPPPLACKSGSHIYFWLVTVVYLSSHTLDLYNSTVIHTFSWNGVDNGVQGSVKNEKFSCRSQYQPIWLFSLLPSILPSCRI

SEQ ID NO: 266527 - protein, 37 aa, Zea mays
  Clone ID: MRT4577_174675C.1.pep
FMNDAVRSHEPSTILTVALGINQSYMICADLDSNRTL

SEQ ID NO: 266528 - protein, 137 aa, Zea mays
  Clone ID: MRT4577_174676C.1.pep
GRVGDIWREISGAGEREPGRADVYIVSWNDHFFVLKVESDCYYIIDTLGERLYEGCDKAYMLRFDGSSQMQAEGTDEVIATGKECCREFIKRFLAAIPLREELEIERRGAGGVDGGGAPHRRLQIEFHFTVLQDDNR

SEQ ID NO: 266529 - protein, 129 aa, Zea mays
  Clone ID: MRT4577_174677C.1.pep
LNFSWIVQVVSTYRLASMESDQWCGIFNPSPSREILRECNRVAHELVQLDRCAMCRAVWPPQAPVCITKLLAVFSDRPLIMINRPIVTVKLISGNDVIRATRNLIVRLNHGRSICLDWNLEILAQRSSP

SEQ ID NO: 266530 - protein, 126 aa, Zea mays
  Clone ID: MRT4577_174678C.1.pep
LIAASSASPPPSSGGGRDLVPRSDPIDRIGWWPLSAVSHSFIELRLLGSTGIQARSIHQPAACSSRKLWKTARRAMSRRLITSVHMELFNPSPSRSAGGGVGRGGAGEDGFPRREMGGHVLKIRES

SEQ ID NO: 266531 - protein, 172 aa, Zea mays
  Clone ID: MRT4577_174679C.1.pep
CSPGEILQELGDNGAAGSLPVASAGSASGGAGQDAPAMAAAAASGRRKRWRMMPVKSEEEVESQRMIHIAVERNRRKQMNEHLAALRSLMPPAHTQRGDQASIVGGAINFVKELEQLLQSLEARRRSPQCAAYAVDPDDAGPFADFLTFPQYSMCAVIAAPENTGHHEGGAV

SEQ ID NO: 266532 - protein, 428 aa, Zea mays
  unsure (1)..(428): unsure at all Xaa locations
  Clone ID: MRT4577_17467C.1.pep
GRGRLLPGCPRPDLVETECQRWKSKGVNIKYEVRGNRKGYKAGALKEGLKHDYVADCEYIAMFDADFQPDSDFLLRTIPFLVHNPEIALVQARWKFVNSDECLLTRFQEMSLDYHFKYEQEAGSSVYSFFGFNGTAGVWRISAIDDAGGWKDRTTVEDMDLAVRAMLQGWKFLYVGDIKVKSELPSTFKAYRFQQHRWSCGPANLFKKMMVEILENKRVSLWSKIYLWYNFFFVGKVAAHTVTFIYYCCAIPVSVLFPEIQIPLWGVVYVPTVITLLKALGTPSXRRYSSFHLVILWVLFENVMSLHRIKAAVSGLLDAGGRVNEWVVTEKLGDTSKAKPGTNGSDTAVKVIDVKLTEPLVPKLVKRRARFWERYHCSELFVGTCIILCGFYDLLFANKGYYIFLFLQGTAFLVVGFGYVGTLPPCTA

SEQ ID NO: 266533 - protein, 100 aa, Zea mays
  Clone ID: MRT4577_174680C.1.pep
HVTGSYRSTTATTGVPCPDEFAASPKAKGKAEGAVGLVLAFSSAAQIYAGGEGVGHGGSPREPESPREDMKEQLRTNIDYRKGQRAEAEYNHERILNNEA

SEQ ID NO: 266534 - protein, 95 aa, Zea mays
  unsure (1)..(95): unsure at all Xaa locations
  Clone ID: MRT4577_174681C.1.pep
GSPEIGYLGQRMEMAXSQAEYRCFVGGLVCATDDHSLKNGFITYRQGPQAKIMLXLRLNKTTXLGHRTLPTDRGMRNAIYGMNRKELYRRNINGN

SEQ ID NO: 266535 - protein, 132 aa, Zea mays
  Clone ID: MRT4577_174682C.1.pep
MEQQTKTTTQQEGKGLATMERSIVDKPPFTLADLRKAIPPHCFQRSLIRSCSYLAHDLAIAAGLLYLALAVIPALPGVLLRAAAWPLYWAAQGSIMFGVWVIAHECGHSSFSRYGLLNDALGLVLHSCLLAP

SEQ ID NO: 266536 - protein, 56 aa, Zea mays
  Clone ID: MRT4577_174683C.1.pep
EGKITAQLVSGTLATDPCSSVLALAQNLVEKDRKVIKKKISIFSQRNIAQTSPHTQ

SEQ ID NO: 266537 - protein, 382 aa, Zea mays
  Clone ID: MRT4577_174684C.1.pep
MEQQTKTTTQQEGKGLTTMQRSIVDKPPFTLADLRKAIPPHCFQRSLIRSCSYLAHDLAIAAGLLYLALAVIPALPGVLLRAAAWPLYWAAQGSIMFGVWVIAHECGHSSFSRYGLLNDALGLVLHSCLLAPYFSWKYSHQRHHANTASLERDEVFVPKQRPEMPWYSPLVYKRDNPVARLVLLAVQLTVGWPMYLAFNTWGRRYSRFACHFDPYSPIYGDRERAQIAVSDAGVLGVSFALYRLAAAHGLWPVVSVYGVPLLVTNAWLVVVTYLHHTHRALPHYDSSEWDWMRGALATVDRDYGVLNRVFHHIADTHIAHHLFPAIPHYHAMEATRAIRPVLGDYYRSDSTPIAEALWREAKECIYVQRDDQKGVFWYKNVF

SEQ ID NO: 266538 - protein, 155 aa, Zea mays
  Clone ID: MRT4577_174685C.1.pep
RPGREPSRLPPPNGAGGKLAVRARVGNQATLLSRPPTPRPLGGRPDVAPAEPRTSRCTTANTNRRGTPSRPCAAARGSWPTSDRSIERRSLRNKGRDDVPVDASSPTMGDCTALQHELHVLPWRLHVGRSTHPTVELAGTTHSHEAGLHIGYAPN

SEQ ID NO: 266539 - protein, 341 aa, Zea mays
  Clone ID: MRT4577_174686C.1.pep
PRVRDVSVPSELDGVVHMENHNLENNNSKIDYRPSAQDVHEYLVDAYETRVAFKEKKKLLAPLPISDDLKATITSSKREWGTSWWQQYSILFCRGIKERRHDYLSWMRITQVIATSVILGLLWWHSDPSTLKGLEDQAGLLFFIAVFWGFFPVFTAIFTFPQERAMLNKERAVDMYKLSAYFLARTTSDLPLDLFLPIIFMVIVYFMAGLKATATHFFLSMLTVFLSIIAAQGLGLAIGATLLDIKKATTLASVTVMTFMLAGGFFVKSVPPFISWLRYLSFNYHTYRLLLKVQYDPVPDILTTTRHMDSGGTEVAALVAMVIGYRVLAYLSLRRAKALGS

SEQ ID NO: 266540 - protein, 59 aa, Zea mays
  Clone ID: MRT4577_174687C.1.pep
WGGSFGRVSRVIMDPARSHVESCSQGRPLPHGFTEVADMAWENYAAVCIEFHVLKLCLS

SEQ ID NO: 266541 - protein, 61 aa, Zea mays
  Clone ID: MRT4577_174688C.1.pep
MATGITDGDLDELRGSMDLGFRFDEQKGGQDLCDTMRALDFYVDDNRQESEPKMSFATSTI

SEQ ID NO: 266542 - protein, 105 aa, Zea mays
  Clone ID: MRT4577_174689C.1.pep
MKLFCLLLVSFFAAAYASSERAIAVAGAGGLLSDPEQQCVYTVYVRTGSIWKGGTDSAIGVTLLGSDGTGVRIADLEQCGGMMGAGHDYYERGNLDIFSGRGSFF

SEQ ID NO: 266543 - protein, 131 aa, Zea mays
  unsure (1)..(131): unsure at all Xaa locations
  Clone ID: MRT4577_17468C.1.pep
VESKTCPRIGMRAAMSLSLPLRLFLGLRTTGHGRLAECSRRRRRRRQAPKAAPDGGTRRRRKPLGGSREPEPSASERPRVACRGGRQRTSAGGSSIIYHPVKCGERRQGGTGTATAREARXEGRALTKNAG

SEQ ID NO: 266544 - protein, 57 aa, Zea mays
  Clone ID: MRT4577_174690C.1.pep
SCRVVVCSSCSSTGPGRSITLQNVLNRIHPTVGDPTDGAVYRLNPEGEARRTPRVRV

SEQ ID NO: 266545 - protein, 103 aa, Zea mays
  Clone ID: MRT4577_174691C.1.pep
MAERALPPAVPASPEPASSSAVSTAFGSPLVPVAATAAATPAHDTYVVQVQKDQIYRVPPPENAYLAERYRNGRRGGGKKRRGRSEGSGACSPCVLRTLGALL

SEQ ID NO: 266546 - protein, 78 aa, Zea mays
  Clone ID: MRT4577_174692C.1.pep
GTVCRTDSRIDKAGCTMDRNILSNVLRVSTQNGSALSFAASPARFHVDRCPLGARECASCVSRPVCCAMQDFSAGSVL

SEQ ID NO: 266547 - protein, 50 aa, Zea mays
  Clone ID: MRT4577_174693C.1.pep
EELDDHKIQVTPPGFQLVFLPFDDERRKMPFTGKIMANREQVGKMRAIVE

SEQ ID NO: 266548 - protein, 372 aa, Zea mays
  Clone ID: MRT4577_174694C.1.pep
MSTVPTQLSGGVGGDRGSSSSAGPHHQHSHHPPPPPPPKILPYLTENSDFMVIGVIGPPGVGKSTIMNELYGYDASSPGMLPPFPTQTEETRLMGKHCTTGIDIRISNERVILLDAQPVYSPSVLIDMMRPDGSSTIPVLNGEPLSADLAHELMGIQIGVFLASVCNIVLVVSEGMNDLSMWELMLTVDLLKHGIPDPSVLTSSASQDKENKNEDQTGCEDYISDLCFVHTRLQGQDFSPSKFMLLRRTLEKHFNSSTFRVGSSNATGHASDSLVPSSTKVEDLTSSRQDIFLLPLRGHDDSTKFEYGTYSCMLGMIRDQILSWPARSFSKNLSERDWLRSSARIWDMVKKSPVISEYCKALQSSGWFRKQP

SEQ ID NO: 266549 - protein, 147 aa, Zea mays
  Clone ID: MRT4577_174695C.1.pep
QLSGGVGGDRGSSSTAGPGRQHSHHPPPPPPPKILLAKPPLPHASSSGADDDGGTGAAGGRARQAPQPGSLSLVSDAWEAHTDKILPYLTENNDFMVIGVIGPPGVCKSTIMNELYGYDASSPGMLPPFPTQTDETRLMGKHCTTGI

SEQ ID NO: 266550 - protein, 156 aa, Zea mays
  Clone ID: MRT4577_174696C.1.pep
CRRLNGRRLNGCSNTFMQVDLFKHGIPDPSVLTSSASQDKENKNEDQTGCEDYISDLCFVHTRLQGQDFSPSKFMLLRRTLEKHFNSSTFRVGSSNATGHASESMVPSSTKVEDLTSSRQDIFLLPLRGHDDSTKFEYGTYSCMLGMIRDQVQMLR

SEQ ID NO: 266551 - protein, 53 aa, Zea mays
  Clone ID: MRT4577_174697C.1.pep
QKDQLRLQHALDQTNPDARKELNLVSKIQLITISLLLSSYCIMSATQFDTHLP

SEQ ID NO: 266552 - protein, 65 aa, Zea mays
  Clone ID: MRT4577_174698C.1.pep
HATQPRVRQNIAKIRVQAVHAGTILTCTSAVFTGGICSNGPHYELGSPLVENWHVHSWALCTRCL

SEQ ID NO: 266553 - protein, 61 aa, Zea mays
  Clone ID: MRT4577_174699C.1.pep
EVVKTGGRAGIFNIWDLKILAVAPGKNENFQLSLFKYDKREKKKTRNFLCCLKKKKNVQIG

SEQ ID NO: 266554 - protein, 79 aa, Zea mays
  Clone ID: MRT4577_17469C.1.pep
GFDGSLLGSPFIHPRQWSILGVHSFVQCLFFLNGGFLARPFMFLAVAFFPRLLPGKEGVFFVRCLQLFVRGPRWVLLDL

SEQ ID NO: 266555 - protein, 100 aa, Zea mays
  unsure (1)..(100): unsure at all Xaa locations
  Clone ID: MRT4577_1746C.1.pep
GSPGVGVVGERIEMAEADVEYRCFVCGLAWATDDHSLRNAXSTYGEVLEPKIILDRETHRPCGFCFVTFFKEEAXMHTAIHGLNDKEVQGRNIPASQAQS

SEQ ID NO: 266556 - protein, 131 aa, Zea mays
  Clone ID: MRT4577_174700C.1.pep
LREKVHPEFVRERRAMKREYEEFKVRINTVVANSCKVPEGGWSLPEGAPWHGNNVREPCRMVQVITGNDCVMDDAGNKLPWLVYVSREKRPGHDHHKKAGALNALINMKGLDGIQDQYMLGLGFQKTCFVV

SEQ ID NO: 266557 - protein, 46 aa, Zea mays
  unsure (1)..(46): unsure at all Xaa locations
  Clone ID: MRT4577_174701C.1.pep
KTGRRTRPXQNTLYHAIVFQKHLNKHLHVLYXMTSRDTILHQYLNN

SEQ ID NO: 266558 - protein, 52 aa, Zea mays
  Clone ID: MRT4577_174702C.1.pep
HPKLILVPSFRNLDVRLYYMYDSYWVRCKIGKLNTSLSCESVKLVTWLWRKW

SEQ ID NO: 266559 - protein, 116 aa, Zea mays
  unsure (1)..(116): unsure at all Xaa locations
  Clone ID: MRT4577_174703C.1.pep
MADACLIEGNALLPPEVNWLLYLRNLPFNISGEEMYDIFXSTXSSRQIRLDNVIDTRVTAYFFYXDIYDSKNAVYHLSCFNLGNRYLIVLYYQPAKMYNKSDLNKKEDEITRLHEK

SEQ ID NO: 266560 - protein, 80 aa, Zea mays
  Clone ID: MRT4577_174704C.1.pep
SDISLFFIYVVSYHSSHQEVRKSSAFQSGSSLCSSSGRIRENTAERGHERGNSVHTIVQRVTDLSIIHVIPQMSDRDHAC

SEQ ID NO: 266561 - protein, 100 aa, Zea mays
  unsure (1)..(100): unsure at all Xaa locations
  Clone ID: MRT4577_174705C.1.pep
MATKILFLLMLLALFACVANATISPQCSQAPIASVHLPYLASMTASVXQNPPVHIYTLEQVTPAVHIPSSPMLXQSPILSLQQSLYHTHTAQLMLILMLT

SEQ ID NO: 266562 - protein, 73 aa, Zea mays
  unsure (1)..(73): unsure at all Xaa locations
  Clone ID: MRT4577_174706C.1.pep
TYYCKILPNSLVMXDFENNGDVSXITLINFKLMHMNMYDDEDMLINDVNETTHDDMNDTDDIHIGDXAGVTIT

SEQ ID NO: 266563 - protein, 87 aa, Zea mays
  unsure (1)..(87): unsure at all Xaa locations
  Clone ID: MRT4577_174707C.1.pep
MLSMRDYGGNGGAYYEWSLADLSMLGVASIGPAKLSVSXGGLALRSYCDXVKVDYFLEGTGTCGMVLPEATKENVVDRKEGDALALP

SEQ ID NO: 266564 - protein, 79 aa, Zea mays
  Clone ID: MRT4577_174708C.1.pep
VGFTTLHRPQPKALIFPTPDWSPGPKFYHLPHRDLGQQTSGGLCFFDLTIKRFVPEPLGSTFPSFIFCKPLCPTPSFSF

SEQ ID NO: 266565 - protein, 130 aa, Zea mays
  Clone ID: MRT4577_174709C.1.pep
SFSTHERSTDGLASRSPRATLLDVSSSTTTISMMLPPTLQLHVTTHRKYTTLALTLCIALVHALPASPYRLLHIILLLHNLTTFLEATILTWMLPANITIMSVWTFSSSDACSHLYMYDIPICVLINHVG

SEQ ID NO: 266566 - protein, 64 aa, Zea mays
  Clone ID: MRT4577_17470C.1.pep
QDPLSFQIRSASSTRMSQNINGPLPVACLSYMNDTRSVDNVQHTYEQDLSLPNQICIKKRIQCP

SEQ ID NO: 266567 - protein, 82 aa, Zea mays
  Clone ID: MRT4577_174710C.1.pep
SALVLLASREEDLASRSAALDEALAAADVSTSETLAALEARESSIPARLAEASAALSAAVAEAETESTGPPPTDIKGALRWI

SEQ ID NO: 266568 - protein, 74 aa, Zea mays
  Clone ID: MRT4577_174711C.1.pep
KGRAPPPFFERKPLGMNGPSMHECRYACPGVKGGSTQAFREFNRSCSRGGQASMAHLEWRDLDIGFLLIGVFLS

SEQ ID NO: 266569 - protein, 63 aa, Zea mays
  Clone ID: MRT4577_174712C.1.pep
GGGERAHTQSETGLIPQTTYFPPTTSRKPDVSRFRDWGYPVHPHRFLTRDETPRLSRCSLGTL

SEQ ID NO: 266570 - protein, 85 aa, Zea mays
  Clone ID: MRT4577_174713C.1.pep
AGTKFAPKKSMGKRFFKKKWKNMGITRGERTPSGFSTRLLPKKKKGEMAPHLFHYPHLDGTPNSFSLRYSGLQTLVHARKAFNNG

SEQ ID NO: 266571 - protein, 123 aa, Zea mays
  Clone ID: MRT4577_174714C.1.pep
MVSRRFKPIELCDSEGRSRQTVAADLDGTLLLSRSAFPYYLLIALEAGSLLRAVALLLSVPLVYLTYVTVSETLAVRAFIYVAMAGLEARDIEAVARSVLPSFYAGDVHPEGWRVFRSFGRRC

SEQ ID NO: 266572 - protein, 133 aa, Zea mays
  Clone ID: MRT4577_174715C.1.pep
KNTPWSSPNGGFWPPLLWQLPVAGSKMNSPDLVAKVIKVVERGIAFDKGPGFSAPKRARFFGNQSGLSQRWFIGGFLVAKLLIKNPAPVRILWNDEDVEILNVWSPNKKRGKKVFKKTSSVWVFPASWIKSPR

SEQ ID NO: 266573 - protein, 294 aa, Zea mays
  Clone ID: MRT4577_174716C.1.pep
MALREIESTLPPGFRFYPSDEELVCHYLHKKVANERIAQGTLVEVDLHAREPWELPEVAKLTATEWYFFSFRDRKYATGSRTNRATRTGYWKATGKDREVRSSSSATAAVVGMRKTLVFYRGRAPNGVKSGWVMHEFRLDTPHSPPREDWVLCRVFQKTKAADGDGDGGAQDGDSSSPPAAFTGPSRPRAVSEPPDHSAPPAGGGYYYGLAFGPRQVEVAQQQCYGGGGATVADHHHGFTRDSGGAAGFGATWGRGVAGGECGAGYLDMDGAFDVMMAGCFGGGDMDEFPQVWR

SEQ ID NO: 266574 - protein, 84 aa, Zea mays
  Clone ID: MRT4577_174717C.1.pep
KKTLLLQGFIKEIKGPQTMFQSNKAWKPPHNFPFSYSSGFKTQEQTCGLLHGHGPTVEAISYWVGNKEHDLHTPVYFGKGGGET

SEQ ID NO: 266575 - protein, 305 aa, Zea mays
  unsure (1)..(305): unsure at all Xaa locations
  Clone ID: MRT4577_174718C.1.pep
YLNPGRFSPSPLTXCFLSWNAAAVFLILATAASPSSIAVVPPLLFLLLSSASISNSPFPTYCRRLVSAPARFSSSLPRALLPGHRALFSVAARRCSSSPACALLLACLVPSPMALLSARFQVSTRSPVPWFLLAADVCWSPSILPPPCARSSLPARVRPQLLTMELRPGGLFFLAPGRSFLCACLGSRAQPAPPLRVVPAPLRALCSPHGVRPSSSSAGAVPYRARPHGVSLSTLLSLSATPFLTSCSDQARAGRDLAEPRLCSHPARRCSSAKLSVVELLRLCSPVQRIPPCSLPSLAMDALEQ

SEQ ID NO: 266576 - protein, 52 aa, Zea mays
  Clone ID: MRT4577_174719C.1.pep
YLTIRNLHRNQPSVLCIHRYATSVVRALLNVALHLNITYQGHWLLVNRDYNC

SEQ ID NO: 266577 - protein, 352 aa, Zea mays
  unsure (1)..(352): unsure at all Xaa locations
  Clone ID: MRT4577_17471C.1.pep
IGKIDNFLTFERGFLHGDRGGPVSDPSSHLGRVAGVAMFVDLETSSCDIIKDVNSKKLSRVRSFVSGDCVVMGPWIGRVIRAFHLVTLLFSDGAKCEILLRDSDVLKPIPPVLFEDAPYFYYPGQRVRIVDPSVSKSATWVCGSWRPSRDDGIVSHVNVGLVHVNWITSVXMFGEINHHSLQXIQDPKKLTLLSCFPYANWQLGDXWRALMTDNNGCLWMDSGKSCILSXQMCDCHAHMYFESYGSDCSQTFVVAKTKSTVDVLWQNGTVSLGLEPQALLPVSTLGDHDFWPGQFVLEKLTVEDAARCPRTAIVSDVDALERTVNVKWIGPAHSDIVSYGSDPAVETVKCYE

SEQ ID NO: 266578 - protein, 49 aa, Zea mays
  Clone ID: MRT4577_174720C.1.pep
ITLIYGQQLLGNDHFSHIDRSSVPLFVSIESTGLVVVDTDEDLVENDYA

SEQ ID NO: 266579 - protein, 100 aa, Zea mays
  Clone ID: MRT4577_174721C.1.pep
TFFWGETRSPPPKKKSFKPGIRRPDKHKILICTNRGGGLTSNEGPKGSWVLWPHTQLTGPPHHYLGGPPSFFSRLKKNCFLEAGIWIITRGYKNWGNPVR

SEQ ID NO: 266580 - protein, 71 aa, Zea mays
  Clone ID: MRT4577_174722C.1.pep
FFFFFFFFFFFFFFFFFFFFFKPNVPNTQFYTLKSDGKQPFPPISLFGWGALVPPNKNAKWFSSKITPVIF

SEQ ID NO: 266581 - protein, 393 aa, Zea mays
  Clone ID: MRT4577_174723C.1.pep
MDKKTKVIVCVAAAHKLLSMMAMIIHSRKRKRNARRTGITYAPMHERDRIRIEYLNTKIWRDDTTCINMIRMKRGCFFHLTKHFRERGLLQDTIHMCVEQQVAMFLNTIGHNLRNRLIGTNFGRSGETVSRCFNKVLRAIGELRGELIRPPSLDTPTKISGNYRWDPYFKDCIGAIDGTHVRATVPRDMEHAFRGRKSYATQNVMAAVDFDLRFTYVLAGWEGTTHDANVLRDALERVNGLRVPQGKFYLVDAGYGAKPGFLPPFRGVRYHLNEWGNNPVQNEKELFNLRHSSLRVTVERAFGSLKRRFKILDDASPFFPFPTQVDIVVACCIIHNWVIQDGSDDFIIQDSNWPSHSHATSLVGQASEHAAMVALRQGIADQMWTDHQNYNEN

SEQ ID NO: 266582 - protein, 234 aa, Zea mays
  Clone ID: MRT4577_174724C.1.pep
MVGSLIFPTPNVDPKAENPNEMVTAGVLSSLQNFLRKCLIAILSYGPMQLMEEKINELLENRSVINKINCKTNFWGNLDLLYEPVRLAAEKLTASTAGNTGLVFSICMPYNSTSEIVNAVSQVCAERMEMFQSEHIGECNGHAANNGVRSEISVADLDRHMYSAECPDPDIVIRTSGETRLSNFLLWQTTFSYLQNPDPLWPEFSFRHLVWAVLQYQRVYPALEHNRKLAKKQL

SEQ ID NO: 266583 - protein, 303 aa, Zea mays
  Clone ID: MRT4577_174725C.1.pep
MVGSLIFPTPNVDPKAENPNEMVTAGVLSSLQNFLRKCLIAILSYGPMPKHIAFIMDGNRRYAKFRSMQEGAGHRMGFSTLIASLMYCYEMGVKYITVYAFSIDNFKRDPSEVESLMQLMEEKINELLENRSVINKINCKINFWGTGRVVYEPVRLAAEKLMASTAGNTGLVFSICMPYNSTSEIVNAVSEVCVERMEMFQSEHIGDCNGHAANNGVRSEISVADLDRHMYSAGCPDPDIVIRTSGETRLSNFLLWQTTFSHLQNPDPLWPEFSFRHLVWAVLQYQRVYPALEHNRKLAKKQL

SEQ ID NO: 266584 - protein, 303 aa, Zea mays
  Clone ID: MRT4577_174726C.1.pep
MVGSLIFPTPNVDPKAENPNEMVTAGVLSSLQNFLRKCLIAILSYGPMPKHIAFIMDGNRRYAKFRSMQEGAGHRMGFSTLIASLMYCYEMGVKYITVYAFSIDNFKRDPSEVESLMQLMEEKINELLENRSVINKINCKINFWGNLDLLYEPVRLAAEKLMASTAGNTGLVFSICMPYNSTSEIVNAVSQVCAERMEMFQSEHIGECNGHAANNGVRSEISVADLDRHMYSAECPDPDIVIRTSGETRLSNFLLWQTTFSHLQNPDPLWPEFSFRHLVWAVLQYQRVYPALEHNRKLAKKQL

SEQ ID NO: 266585 - protein, 342 aa, Zea mays
  Clone ID: MRT4577_174727C.1.pep
MAASAAAAGPATFLPRLPSPRSPSPMLPPLGRRAHPVAAPLCLSAKRRACAAMGSSSSSNSGNQTSLMLPFSFTFDEDSSSSRRLYRWKRVLLKVSGEALAGNHTENIDPKITMAIAREVASVTKLGVEVAIVVGGGNIFRGASWAGCSGLDRSSADYIGMLATVMNAIFLQATMESIGIPTRVQTAFRMSEVAEPYIRRRAVRHLEKGRVVIFAAGTGNPFFTTDTAAALRCAEINAEVVLKATNVDGVYDADPRQNPNARLLETVSYHEVTTRDLSVMDMTAITLCQENNIPIVVFNLQEPGNIAKAIVGEKVGTFIGCTRDQELNGNTLVQERRLVNEA

SEQ ID NO: 266586 - protein, 304 aa, Zea mays
  unsure (1)..(304): unsure at all Xaa locations
  Clone ID: MRT4577_174728C.1.pep
MLGSLIFHAPNVDPKAXYPNEIVAAGLLXNFQHLLRKGFIVILSYGPVPKDILFIMDFSLRYAIIKSMLAGDGNRMVFSTLFXFLVYCKEIALKDINVXNYSLSIICKGKQEXDGITSALNEEENQIXLEIQSVINMLMFKINIYGELHLXYDPVRLAAAKLMASTAGNTGLVFSICMPYNSTSEIVNAVSGVCAERMVMFQSEHIGDCNGHAANNGVRSEISVAELDRHMYSAGCPDPDIVIRTSGETRLSNFLLWQTTFSHLQNPDPLWPEFSFRHLVWAILQYQRVYPALEHNRKLAKKQL

SEQ ID NO: 266587 - protein, 146 aa, Zea mays
  Clone ID: MRT4577_174729C.1.pep
FYLDDDGYGAKLGFLPAFRGVRYHINQWGNNPVQNETELVNLRHSSLRVTVERAFGSLKRRFKILDDASPFFPFPTQVDIVVACCIIHNWVIQDGSDEFIIQDSNWPSHSHATSLVVQASEHAAMVALRQGIADQMWTDHQNYNGN

SEQ ID NO: 266588 - protein, 139 aa, Zea mays
  Clone ID: MRT4577_17472C.1.pep
KLNINFTSRSPFSTNKARWNACSTSPVCRILTPRLQKSSLEQRREIWCLVRRRGGRSSACVKKRTRLCMRKLWCFIERASAMECPCSAKSLGGDGSSPRECEAMGGDGFGRETRRRQLHEREGEVAASPERSRETFPTC

SEQ ID NO: 266589 - protein, 319 aa, Zea mays
  Clone ID: MRT4577_174730C.1.pep
MVGSLIFPSPNVDPKAENPNEMVTAGVLSSLQNFLRKCLIAILSYGPMPKHIAFIMDGNRRYAKFRSMQEGAGHRMGFSTLIASLMYCYEMGVKYITVYAFSIDNFKRDPSEVESLMQLMEEKINELLENQSVINKINCKINFWGNLDLLYEPVRLAAEKLMASTAGNTGLVFSICMPYNSTSEIVNAVSQVCAERMEMFQSEHIGECNGHAANNGVRSEISVADLDRHMYSAECPDPDIAIPISGVPRQSHTVVGRSIISHWVIPDGSDEFIIQDSNWPSHTHDTSLVVQASEHAAMVALRQGIADQMWTDHQNYNGN

SEQ ID NO: 266590 - protein, 102 aa, Zea mays
  Clone ID: MRT4577_174731C.1.pep
MHLGPGVAQRLCQSTLPQFFCQRGGATRLQFKRTTHQGTRLFGLLGRRWRLCPSCCEGFKALSLDIFTPIGVRHFPANTRAPSSQCFWACLGPNNIILLPPA

SEQ ID NO: 266591 - protein, 239 aa, Zea mays
  unsure (1)..(239): unsure at all Xaa locations
  Clone ID: MRT4577_174732C.1.pep
MCVDQQVAMFLNTIGHNLRNRLIGTNFGRSGETVSRCFSKVLRAIGELRGELIRPPSLXTPTKISRNYRWDPYFKDCIGAIDGTHVRATVPRDMEHAFRGRKSYATQNVMAAVDLDLRFTYVLAGWEGTTHDANVLRDALERVNGLRVPQGKFYLVGAGYGAKPGFLPPFRGVRYHLNEWGNNPVQNEKELFNLRHSSLRVTVEHAFGSLKRIFKILDDISFLPFSNTGRYCCCLLYHS

SEQ ID NO: 266592 - protein, 161 aa, Zea mays
  unsure (1)..(161): unsure at all Xaa locations
  Clone ID: MRT4577_174733C.1.pep
THARGVCLGFYNFFFFFFFFFFRVAGTRPPGLNEQHPXGAKPXGGPHGAAHTPPPGGGRFPLRFATHPPPTGKGKGKPGPPPPXVREGGXQSSGNLKQKQKPPADRKQTMKTPPSAWPPRKEKRARDKPQNKKHYVPPAPLTPGGPRARSPRYGALGLGPA

SEQ ID NO: 266593 - protein, 49 aa, Zea mays
  Clone ID: MRT4577_174734C.1.pep
ALRNITLSFVFVSPSSKTSVGLPVTRHERPRPFSHVGSSASLHTVTPGS

SEQ ID NO: 266594 - protein, 204 aa, Zea mays
  unsure (1)..(204): unsure at all Xaa locations
  Clone ID: MRT4577_174735C.1.pep
AFADCPPPAGLXRFSVGYRSLDLVGRREVLRSLAVNYNVPRARVRDLMKQYMSVTSAEPSGVDDVEANDGKEGATSALYRMERGLRDALRPRYAGFLEDMNSQAGGLKLLTELRANLLFLLGEENVXTLRTLDSYLKEKLMTXLTPAALTLHQITXDDPAXLLEKIVAYEAVHPIRNLIDFNRRWSLNDKXFRYFHPXIPGEPL

SEQ ID NO: 266595 - protein, 103 aa, Zea mays
  unsure (1)..(103): unsure at all Xaa locations
  Clone ID: MRT4577_174736C.1.pep
FFQVQKSIPRXRRGSNISLTGMSIMCFITILSHHTCFIYLGLLKIMPAPGPNKGAFEFAWTPTPPPFPFSKSNPNHPVGFFGQPTTKGFFGGGEPAGAAARAL

SEQ ID NO: 266596 - protein, 61 aa, Zea mays
  Clone ID: MRT4577_174737C.1.pep
KIVREGINQFILQHAVSKTNSHICSQILFRLISVESCRTNYQCRNQFISVCRFLPDPKLWI

SEQ ID NO: 266597 - protein, 270 aa, Zea mays
  unsure (1)..(270): unsure at all Xaa locations
  Clone ID: MRT4577_174738C.1.pep
PFARLASNNLLNLPPFKIALNPPPPPLPTRPSVFLAPRQIPPCRSLLRSKPPPRQGVRSSTSPQLDTANTPSPPSSRQEAVAQARSCLATALQKPLNSSIPLKRQRQPRFRAEIPVVDESPGSLARLAFDVLSGGAGASRKGAPARLLLIWPSAEALSVALREFEDQGDSATAHARLGSMAPDALGACDAAVFLATGPAQVEQVKAAAAAXSPGPVVLFNPSWSFDEEGDGEKFGXARGGFVXSXFDVVYSFTGXLEVRGLLSKKRGVLL

SEQ ID NO: 266598 - protein, 54 aa, Zea mays
  Clone ID: MRT4577_174739C.1.pep
CHSKETLNRSVKIHLTIATVHFNNSMAQNTYEKNSSQDSQVHNNATSYKNSSCK

SEQ ID NO: 266599 - protein, 88 aa, Zea mays
  Clone ID: MRT4577_17473C.1.pep
MAGRDGAKSSASMEEEACGEKKYGGIAPKKKPLISKDHERAYFDSADWVLGKQAANSSTRATVESLKPKLKRTPHHQLPPRKPTCASG

SEQ ID NO: 266600 - protein, 192 aa, Zea mays
  Clone ID: MRT4577_174740C.1.pep
MRTRCNQLGPPLALLFAALLGGAQCQSSHGGGGAAANLTVVGTVFCDACSTSSFSKNSYFLPGVRVRLDCMIKVNSNSKEEIKITAEKVTNSDGAYQLDIPAIDGFECAAPGATAGESFCRAAVLDNPSALCGVPAVTTTVGHISLPSQDPSACFYSLNSLYYRPSKPGPAQCGGADGLLPSAVVLNTSLYY

SEQ ID NO: 266601 - protein, 57 aa, Zea mays
  unsure (1)..(57): unsure at all Xaa locations
  Clone ID: MRT4577_174741C.1.pep
RFFAAAVGIRYGKYCGVGWSGCDGEEPCXHDLDACCRDHNCVEKKGGFSFENKVCMV

SEQ ID NO: 266602 - protein, 287 aa, Zea mays
  Clone ID: MRT4577_174742C.1.pep
MAEHLASIFGTEKDRVNCPFYFKIGACRHGDRCSRLHNKPSISPTLLLCNMYQRPDMITPGVDAQGNPIDPERIQEDFEDFYEDIFVELSKHGEIESLHVCDNLADHMIGNVYVEFREEEQAARALQALQGRYYSGRPIIAEFSPVTDFREATCRQFEEHSCNRGGYCNFMHVKQVGRDLRRKLFGHLHRSLRSHSRGSRSPSPYRRRGSSSRSRDRDDYHDYYYHYYRSGSGSRRSSERHRSHDSDGSRRRRGRSRSRSRSPVREGSEERRAKIEQWNREREAAQV

SEQ ID NO: 266603 - protein, 80 aa, Zea mays
  Clone ID: MRT4577_174743C.1.pep
ALGCSVMVDWHRLWLYQEGSRARSRYLISIVVVVSAVNMHHSIRSAQAGDMVSTARCSHQVAAFIVDVAVSTWLHLSQSG

SEQ ID NO: 266604 - protein, 94 aa, Zea mays
  Clone ID: MRT4577_174744C.1.pep
GSGDEEYKEEDHIPVDAHRQSSSHGDKFEVEYAAEVDAEGNQEADNYGQREGESDDYETIEGHDYKSEDENAYEDDEDFDDDDDFARKVGVVFS

SEQ ID NO: 266605 - protein, 284 aa, Zea mays
  Clone ID: MRT4577_174745C.1.pep
MAEHLASIFGTEKDRVNCPFYFKIGACRHGDRCSRLHNKPSISPTLLLCNMYQRPDMITPGVDAQGNPIDPERIQEDFEDFYEDIFVELSKHGEIESLHVCDNLADHMIGNVYVEFREEEQAARALQALQGRYYSGRPIIAEFSPVTDFREATCRQFEEHSCNRGGYCNFMHVKQVGRDLRRKLFGHLHRSLRSHSRGSRSPSPYRRRGSSSRSRDRDDYYYHYYRSGSGSRRSSERHRSHDSDGSRRRRGRSRSRSRSPVREGSEERRAKIEQWNREREAAQV

SEQ ID NO: 266606 - protein, 115 aa, Zea mays
  Clone ID: MRT4577_174746C.1.pep
MAEHLASIFGTEKDRVNCPFYFKIGACRHGDRCSRLHNKPSISPTLLLCNMYQRPDMITPGVDAQGNPIDPERIQEDFEDFYEDIFVELSKHAEIESLHVCDNLADHMIGNVYVE

SEQ ID NO: 266607 - protein, 286 aa, Zea mays
  unsure (1)..(286): unsure at all Xaa locations
  Clone ID: MRT4577_174747C.1.pep
MAEHLASIFGTEKDRVNCPFYFKIGACRHGDRCSRLHNKPSISPTLLLCNMYQRPDMITPGVDAQGNPIDPERIQEDFEDFYEDIFVELSKHGEIESLHVCDNLADHMIGNVYVEFREEEQAARALQALQGRYYSGRPIIAEFSPVTDFREATCRQFEEHSCNRGGYCNFMHVKQVGRDLRRKLFGHLHRSLRSHSRGSRSPSPYRRRGSSSRSRDRDDYXYYYYYYRSGSGSRRSSERHRSHDSDGSRRRRGRSRSRSRSPVREGSEERRAKIEQWNREREAAQV

SEQ ID NO: 266608 - protein, 61 aa, Zea mays
  unsure (1)..(61): unsure at all Xaa locations
  Clone ID: MRT4577_174748C.1.pep
MFACSKFVSTPSLVKSTSQLLSRPLXSAVVLKRPEILTDESLSSLAVSCPLNSLXSSRSFK

SEQ ID NO: 266609 - protein, 138 aa, Zea mays
  Clone ID: MRT4577_174749C.1.pep
HLFPSSSNSGCPYVCISLHWSLFQSSLHVASILAEILRSGCPSPRSSCGVCDLVLCGLRVHTSNHVLRFGGSSSSAASPVCHYTLFSSVDLTGEDAFLRIEQLIPWEQPSQRRFRTVILPAPEMVSKEVERKTRHGGR

SEQ ID NO: 266610 - protein, 89 aa, Zea mays
  unsure (1)..(89): unsure at all Xaa locations
  Clone ID: MRT4577_17474C.1.pep
MAGCDGAKSSASMEEEACAEKKYGGIAPKKKPLISKDHERAYFDSADWVLGKQPAGRXVARGPXESLKPKLKVGWTAIPLGSSSTNGCP

SEQ ID NO: 266611 - protein, 81 aa, Zea mays
  Clone ID: MRT4577_174750C.1.pep
MAEHLASIFGTEKDRVNCPFYFKIGACRHGDRCSRLHNKPSISPTLLLCNMYQRPDMITPGVDAQGNPIDPERIQEDFEDF

SEQ ID NO: 266612 - protein, 104 aa, Zea mays
  unsure (1)..(104): unsure at all Xaa locations
  Clone ID: MRT4577_174751C.1.pep
VTDTTTHSQSYQSLPGGPRTLSSVSSPLLPHATPAAATIYPLKRRIAITTTRXRRNTLDXSPKRTLQTYFHGFHSLLLYDECSNSIPTSTQSTFFGIMXAPVFG

SEQ ID NO: 266613 - protein, 53 aa, Zea mays
  Clone ID: MRT4577_174752C.1.pep
NVNPLTPLRRDIAEETGAPALAKLNPAREYPTGLEHPLSLTMKDIAAGMHNTG

SEQ ID NO: 266614 - protein, 151 aa, Zea mays
  unsure (1)..(151): unsure at all Xaa locations
  Clone ID: MRT4577_174753C.1.pep
QTAVQVVKGPGPAHPAMPGYHFGDTTVIDDALTDGPSASSSRLVGRAQGTYMLASLTEPVLAVSMTVALTAGAYNGSAVVVXGRDDVSAGVRELAVVGGTGAFRRATGHVLWRTARMESRDHMVLELDVYATVPAASPAPPPRAGVARQVA

SEQ ID NO: 266615 - protein, 101 aa, Zea mays
  unsure (1)..(101): unsure at all Xaa locations
  Clone ID: MRT4577_174754C.1.pep
RCIDISRRATYLSYLIRVDFILTIPYCLLTGFTNCPLLCLLLSXSDXTIFLRLLSLDLAESDDYAGYSLPLSFPENPHFDDXNLAFIYIFADDETTTTLSS

SEQ ID NO: 266616 - protein, 64 aa, Zea mays
  Clone ID: MRT4577_174755C.1.pep
YGGRRSFFFFLFKRSQSPIQQIPGTILDELKQRRHGTSPVRPEPKPVYQHPSSNRLQLKDMRTH

SEQ ID NO: 266617 - protein, 87 aa, Zea mays
  Clone ID: MRT4577_174756C.1.pep
TFPSYKVLESRLRVRKQLQPHPRTYTDLQAFYFYIHCLTYGWEILTYPLPYILVTENKQLQSRLHVFVIVHNQQTLYQTAVYVYIIP

SEQ ID NO: 266618 - protein, 88 aa, Zea mays
  Clone ID: MRT4577_174757C.1.pep
EQTSKCLYPREKQASQATNNSAGEHPSTTRLPIPVVFLPRPRTCQLSSRPRLLRRSLRSPILNAPPSLSCPLASLPVPKANTIGPESY

SEQ ID NO: 266619 - protein, 169 aa, Zea mays
  Clone ID: MRT4577_174758C.1.pep
MTAYQADAAPVQLAAAAPPQGSRKRARASRRAPTTVLTTDTSNFRAMVQEFTGIPAPPFAGAASARSLFDHIFPLRTAAGTGSLATLPQYLRRPFAQKLHASNPYPPSFASSSTSSPAPTNVIAPATTTPGTAAVASSDSYHQLTAASTSALLWMQQDHGSNNYHPFHQ

SEQ ID NO: 266620 - protein, 285 aa, Zea mays
  unsure (1)..(285): unsure at all Xaa locations
  Clone ID: MRT4577_174759C.1.pep
MSMEDSAQPAGAASAGERASSPSPSRRLPDFLQSVRLKYVKLGYHYLITHGMYLLLTPLIVLIAVHLSTLSPGDVADLWTHLRFNLLSVIACSTLLVFLSTVYFLTRPRSVYLVDFGCYKPGPERRCSRETFMRCSKLTGNFTEANLDFQRKILERSGLGEDTYIPPALVTVPPNPSMELARQEAQVCMLGAIDNMLAKTGVKPKDIGILVVNCSLFNPTPSLSAMVVNHYKLRGNIVSYNLXGMGCSAGLLSIDLAKDLLQVHPNSYAMVVSTRDITLXXWYFG

SEQ ID NO: 266621 - protein, 202 aa, Zea mays
  unsure (1)..(202): unsure at all Xaa locations
  Clone ID: MRT4577_17475C.1.pep
RGRPGLIPRETSGFLRSVCTGRLRTGYLGGQLAFVLSEENLHYLFNLHKKDEEQPAGQYGYSETEVVTVIGEGEYDRYKKGDKEMKHKWXLGEAGAIYVVDLALYWNNDANKDPEYLVQVQDHGGWSLHAARASTAQGYCIPRSTNENREGLPCTARRIPGRINTTISSSDRNTGRLVIDVARSGDHNHTGCLIVDCMRALV

SEQ ID NO: 266622 - protein, 128 aa, Zea mays
  unsure (1)..(128): unsure at all Xaa locations
  Clone ID: MRT4577_174760C.1.pep
MAPKAEKKTAANKPAQDESAADKGPWVKKTYGQKRLPXPSQCGKEGVDENGETKADIPVDTYKIYLFEGLKQDHPDICLSSKGMSILNSFLDDVFHKFAWDGAKLARYXKNPTIPSLQIHTSVRLVLP

SEQ ID NO: 266623 - protein, 60 aa, Zea mays
  unsure (1)..(60): unsure at all Xaa locations
  Clone ID: MRT4577_174761C.1.pep
RMYVTTDLXETNTDXVFKHGCDAQMLGETPYKFKSALEGXKTLRAQATTNDHYLPPLDIF

SEQ ID NO: 266624 - protein, 64 aa, Zea mays
  Clone ID: MRT4577_174762C.1.pep
DSGPIVLAFGIGEAATAGACADPQNYVSWDGIHATEAANSRIAYAVISGSYSYPPFDLSKLCSP

SEQ ID NO: 266625 - protein, 195 aa, Zea mays
  Clone ID: MRT4577_174763C.1.pep
MSSQQGATITVHWLNKSRGQRIVWLLEELNLEYNIKVYKRDANKRAGPDLKAVHPLGKSPVVTIRPANSEKDIVIAESETIMEYICDHFGKQLVPARYPEGQEGVLGAETEEWMRYKFLMDFTEGSLFTVLIAAIISGSIKHAPVPFFLKPITGGVAAKVDGSFVDPELKTHFDFLEDYLIKSPLEGRIFVWLQT

SEQ ID NO: 266626 - protein, 60 aa, Zea mays
  unsure (1)..(60): unsure at all Xaa locations
  Clone ID: MRT4577_174764C.1.pep
QLPPKKLVFPPGPGNAFVGGFPPQLVFGKGLXSFVRAGCFSANVFFPRPGCAYPEKPFFF

SEQ ID NO: 266627 - protein, 49 aa, Zea mays
  Clone ID: MRT4577_174765C.1.pep
VTRALAPTGYVCGESQRRNIVSRTVKSVYLFAICTSLARRPISMTGLYK

SEQ ID NO: 266628 - protein, 225 aa, Zea mays
  unsure (1)..(225): unsure at all Xaa locations
  Clone ID: MRT4577_174766C.1.pep
MLQSAQEALENELQMFVEIGKESSDNSTDNSDENEWSSSPNCEDFSEEISEKLKLLESKLEEASLLIDEKDSRILELDTLNKTKPGETALYNSKLLSLQSEVDQLLMEKMEADIQCFILKRAXKLGSPRPRVRXLQEAQKTLSEDHKQLEVKLRHTENRARTLEDLVEKLESQCKELSNASEVLKLQAGASRASLFCSVQLVLLCIAVWTFVARVLPSPPEFVPT

SEQ ID NO: 266629 - protein, 259 aa, Zea mays
  Clone ID: MRT4577_174767C.1.pep
GARGVRQFIRYMISLNIGEVVRHASGAVLGMPDTLIPVQLLWVNLVTDGLPATAIGFNKPDGNIMSVKPRKVNEAVVSGWLFFRYLVIGAYVGLATIAGFVWWFVYSDNGPKLPYSELVNFDSCSTRQTSYSCSIFEDRHPSTVSMTVLVVVEMFNALNNLSENQSLLVIHPWSNLWLVGSIILTMLLHVAVLYIEPLSALFSVSPLSWVEWKIVLYLSFPVILIDEVLKFFSRRSPRGRRFPLRLWRREILPKESRDN

SEQ ID NO: 266630 - protein, 90 aa, Zea mays
  Clone ID: MRT4577_174768C.1.pep
PTARLGIKADASRGRRDHSFGGLMRFYREPLKSDGTAEHYRGLNICYVPIVVSRGVKFRTKESRQPVVLTGIVEDHFVDIYAPSRLNNGG

SEQ ID NO: 266631 - protein, 48 aa, Zea mays
  Clone ID: MRT4577_174769C.1.pep
PNTKFTHTRYNCLKTKYVYQIVLHMQESNWSWNKAMMRMSLTLSLVLS

SEQ ID NO: 266632 - protein, 116 aa, Zea mays
  Clone ID: MRT4577_17476C.1.pep
SEAHQPHHKFILAECLVTSTPQTPHLYTYEIRYHPRYLTLRTRCGTAARHQRRPGPAPSGTARAHQIRGTEAATSVPTTPATVEACWSGGAPPRRPPLHHEKRPIWERETWETRLG

SEQ ID NO: 266633 - protein, 59 aa, Zea mays
  Clone ID: MRT4577_174770C.1.pep
SGGFRGPGIWRSGTGPVTFKNLCRAQGLTRGPTINLKRGYFLKGWPSFILWGSGGHHLI

SEQ ID NO: 266634 - protein, 108 aa, Zea mays
  Clone ID: MRT4577_174771C.1.pep
FCPTALDIWSSRILPYVACPSHPPLIQRRWRPRTDSASIAGAAAERDARRCIRSVLPDISRLKEDDRETTWLFFLSGAIRNALHEQVSTTISRLCPVRESRQGRRHHI

SEQ ID NO: 266635 - protein, 53 aa, Zea mays
  Clone ID: MRT4577_174772C.1.pep
PVSSHDVISNLYLGLDSPTMATTRVRAFIGITMRLSFLKAAFNRTSTTIVDQS

SEQ ID NO: 266636 - protein, 280 aa, Zea mays
  Clone ID: MRT4577_174773C.1.pep
MSSAGPPPPLPPWSRLEGQVVLVTGASSGIGRDFCLDLARAGCRVVAAARRADRLRSLCDEINPSAASRAPRAVAVEVDVAAGGSALEAAVQKAWDAFGRIDALVNNAGIRGAVHSPLDWPEDEWDRIIKTNLTGSWLVAKHVCRRMRDAKLKGSVVNITSIAGLNRGHLPGSTGYASSKAAVHYATKIMALELGADRIRVNSIAPGLFKSEITAPLFQKRWLSTVASKIVPLKEHGATDPALTSLVRFLIHEASSYVTGNIFIVDSGATIPGVPIFSSL

SEQ ID NO: 266637 - protein, 98 aa, Zea mays
  Clone ID: MRT4577_174774C.1.pep
FITYKASTPSRAFIMTIGGCPDAVFKDGVDVLYHSISATDCAQISYDLIRIATCKAMEHRMYYSAAVVNDRPAEDSISNGAPWKHTGAQVTICRAIRT

SEQ ID NO: 266638 - protein, 95 aa, Zea mays
  Clone ID: MRT4577_174775C.1.pep
RGCDPVDEFPYMNLPQDYLQHFELYDSVSVEQANIFDVGLKMVDRVVTVSRGYLWELKTVESGRGLHDIIRSNDWKINGIVNDINALDSNYFCIS

SEQ ID NO: 266639 - protein, 54 aa, Zea mays
  Clone ID: MRT4577_174776C.1.pep
ILMRWISTFNRAIYLPTPVYFNSHLTLFLISHPSTEPLLSILNFCLNEMHATKL

SEQ ID NO: 266640 - protein, 83 aa, Zea mays
  Clone ID: MRT4577_174777C.1.pep
YIETILARSCFFIFVYHLHTFTNVILVILLSYIICHMTLLLFLFFKKVGAITQMVNKLGPCKWSTLPKLYLDVLESNAGKAMP

SEQ ID NO: 266641 - protein, 90 aa, Zea mays
  Clone ID: MRT4577_174778C.1.pep
FFFFFFFFFFTPGSNPIFFLAHFSFKHSTLQEADYMASAWRGKTIGPTVPASYIGDDRLPSDTKYGLDLYEPTAAPCIEWVDAHPPRSVV

SEQ ID NO: 266642 - protein, 141 aa, Zea mays
  unsure (1)..(141): unsure at all Xaa locations
  Clone ID: MRT4577_174779C.1.pep
FQDYKDLCAAIPVYLKTYHKDHRLMXYTRSVLVIHNIAXGRFLLMNLGCDPVDEFPYMNLPQDYLQHFELYDSVSVEQANIFDVGLKMVDRVVTVSRGYLWELKTVESGRGLHDIIRSNDWKINGIVNDINALDSNYFCIS

SEQ ID NO: 266643 - protein, 109 aa, Zea mays
  unsure (1)..(109): unsure at all Xaa locations
  Clone ID: MRT4577_17477C.1.pep
SARGALLVLRPALDLSGVVFYLVTVRCGSYDAVRLVEGPCKTRSRRPTPPPPRRXSGQMPELQQSRSLKYVMLTYHYLITHGVYLLITPLIVLMAVYLFTLSASDEFEL

SEQ ID NO: 266644 - protein, 101 aa, Zea mays
  Clone ID: MRT4577_174780C.1.pep
RLPSCLQGCDPVDEFPYMNLPQDYLQHFELYDSVSVEQANIFDVGLKMVDRVVTVSRGYLWELKTVESGRGLHDIIRSNDWKINGIVNDINALDSNYFCIS

SEQ ID NO: 266645 - protein, 432 aa, Zea mays
  Clone ID: MRT4577_174781C.1.pep
MDRIVGGKFKLGRKIGCGSFGEIYLATHVDTYEIVAVKIESSKTKHPQLFYEAKLYNTLQGGSGIANVKWCGVDGEENVLVIDLLGPSLEDLFCYCGRKFTLKTVLMLADQMITRIEFMHSKGYLHRDIKPDNFLMGLGRKANQVYIIDFGLAKRYRDSTTNRHIPYRENKSLTGTARYASCNTHLGIEQSRRDDLVSLGYVLLYFLRGSLPWQGLKAATKAQKYDKICEKKISTPIEVLCKSCPVQFSSYFHYCHSLAFDQRPDYAFVKRLFRDLFISQDYEFDYVFDWTVLKYKQGHKQKQSPGAPIARPIQAHGPKQAGVNGVINHNEAQEHVETSRPTGQAAWSQDKQATNNDRNPDVRHTVNLRQDMAAGKAQLTTSVALPSSQWKNYSDSRHKGQFDAVHHNQGIVNITSSSNSWLPTFQHNAPGK

SEQ ID NO: 266646 - protein, 49 aa, Zea mays
  Clone ID: MRT4577_174782C.1.pep
RTCALRASESNGTGHERSCKCLSGLGARVMLSALCKKTRELSDPRHGPR

SEQ ID NO: 266647 - protein, 317 aa, Zea mays
  Clone ID: MRT4577_174783C.1.pep
FGRVLEKPLSIFLLGIPSVPSSSARASVFCAASSALGHGALPLQLASARSSFLPLPWRPGPCSDWSSSRAIPMLRAMLLGRRGARPCARAPWSPCSLATSCWPALGLRPSSSMSRPFLSLSLSSLCTAPWRLRPTKLPAQAPSCSAPWRLLVPGCSSGRVLCFFFSQFSALAEQPPWPDLPAPRCSPQALSHGRRVPCSHGRSRFCLSRQPTLLLAPLRAVLLCSLSVRVLCSTSSHGARLLAVPWSQRARSCLSRSVWIQRSSCPIFCLPACSLGSLGLNSHRVVDLAKYRRSSSCCACNSPESMSPRPCCRHRSP

SEQ ID NO: 266648 - protein, 31 aa, Zea mays
  Clone ID: MRT4577_174784C.1.pep
QLELEALQLLVQALLVIGGDDSDHSDSSVYS

SEQ ID NO: 266649 - protein, 136 aa, Zea mays
  Clone ID: MRT4577_174785C.1.pep
TPKRGPATPPRTSPRACFPPRPSKPPRSRWKSFPPPFPCLGSPFRALNPRGRFAFFLRGKVPLYQFLSFWWPRVPWPCFSPPPPIIMMGFGFCFQCHQDRLPFAPSPPVWSPPRFSFGSCSQGPLLDLQCPPGVCQ

SEQ ID NO: 266650 - protein, 84 aa, Zea mays
  Clone ID: MRT4577_174786C.1.pep
HQLPASKTIDCLLVDGPPAYREDIQYSRFPAVPFFQPQLAPHSTIILDDINRRGEQEILARWQTLLNVSFDSSIGNVAIAHLSA

SEQ ID NO: 266651 - protein, 63 aa, Zea mays
  Clone ID: MRT4577_174787C.1.pep
LKFFRAPNKHNQTSQQNILHYQCQHQPTPADTPHQKTKNEWHTTTFTKPLYIDTKDNYQTNTI

SEQ ID NO: 266652 - protein, 132 aa, Zea mays
  Clone ID: MRT4577_174788C.1.pep
CRRHLLLMTSSSMTTSQSTPLSLSRSSSSQVTLTHMASRKPGSGAASAGGGTSYLTAAPLEPAAWCASTWSPCSTCGPSPPAVAQASRCAKATSSTGLPSPRRHLRLAARAEKMEFAMPMASEGRGGRLRDQ

SEQ ID NO: 266653 - protein, 115 aa, Zea mays
  Clone ID: MRT4577_174789C.1.pep
CLGDLFRQKKDQVYIYCIHGFIYILDEYQVNPFQAVREVYKVNQWLRMHETATMMSIRAGTCLNLYINVLQDTFRGRRACHHLSVALNNDSRPKFCVAPTMQGRSALLENPRFGT

SEQ ID NO: 266654 - protein, 111 aa, Zea mays
  unsure (1)..(111): unsure at all Xaa locations
  Clone ID: MRT4577_17478C.1.pep
PNLVSHVSRSQMGLFSWWRGGRRXAPRRTSKPQRLRGSXTEVAASVPHGAVEVRRQRQAADATVFEFGSAAESGAAVTLAGYCPVSDELEPCRWELVPAAVDGAPQFRIVF

SEQ ID NO: 266655 - protein, 143 aa, Zea mays
  unsure (1)..(143): unsure at all Xaa locations
  Clone ID: MRT4577_174790C.1.pep
MSKSGRGGPDGNQLRMSLIPPLASTPNXADNTGAKNLYIISAXSIKGRLXRLPTACVGDMGMATXKQRKPDLRKKVMPRTSYVRHRQASVRHHATLDYMNYQXNAGVSETAKEEMKASAITASXGKDCADLCTKITTATNAIE

SEQ ID NO: 266656 - protein, 79 aa, Zea mays
  Clone ID: MRT4577_174791C.1.pep
KNPTFLTPEPATTYLSFYCPLIFILWPFLYNALTGKPLAFPTFYSLVANPPIPLWFNIYKAPPVPPLQQLPILNGQWDF

SEQ ID NO: 266657 - protein, 108 aa, Zea mays
  unsure (1)..(108): unsure at all Xaa locations
  Clone ID: MRT4577_174792C.1.pep
XLNXKQPTXXXXTXXAAXLGHRGXCFXXACXLPPILPXSPXFTYCKQRXXQLXXKFVAXFXQDXXLNXLALLENGRPXLDSSXXFQXXRGXLIXLSSXHAXRGRVEAD

SEQ ID NO: 266658 - protein, 56 aa, Zea mays
  Clone ID: MRT4577_174793C.1.pep
WRRGTHGRCPSCCQTGASTVLALQHGAGAGHLHCKGAGISQSQACFNIDDSVHAVV

SEQ ID NO: 266659 - protein, 47 aa, Zea mays
  Clone ID: MRT4577_174794C.1.pep
VVTERHSRNKCSHVKGMKYPPYNEKGIQRNINISSCSSIHRTRGSSW

SEQ ID NO: 266660 - protein, 223 aa, Zea mays
  Clone ID: MRT4577_174795C.1.pep
MPMSIPRAAHLLVLLSVLAISLSSCGAAAALPVYDTDGHELSADADYYVLPAPPRGSGGGGGLTMAPKGLHPCPLFVAQETDPLRKGFPVRFAPLQQDQGGSDRAVRVSSDVGVHFAAATTCVQTTEWHVSGDGDGAAPRSGRRLVLTGPVLSSSPNGREKVFRVEKHSRGYKLVWCGGSSASTSCQDLGVFRDDGDRRAWLGTTETHRAHAVVFQKDTTMHA

SEQ ID NO: 266661 - protein, 82 aa, Zea mays
  Clone ID: MRT4577_174796C.1.pep
GDSSLPMAMGGSLKQYWRGTSYFMAPHVVFCKLELHAAFFTLYRIYILPIFTGDVLLHSTVRYFFYYQHSYSFYCIITSIFF

SEQ ID NO: 266662 - protein, 85 aa, Zea mays
  Clone ID: MRT4577_174797C.1.pep
SGGISKKDKQKFSSPKVPDLFSGPFFKKGFKFFRKNQRGARGPLKTLGFFQKFQNFLRFGKFQIKYPGPQSVGPGFLSPGVGFFY

SEQ ID NO: 266663 - protein, 79 aa, Zea mays
  Clone ID: MRT4577_174798C.1.pep
SSTLLHPREAKEKHLQVNADFTTVLKVSPRRPGGGPTPRRLASARRHLGIQAAVQCLGSPYHFKNHGFHYTSRFQKHHT

SEQ ID NO: 266664 - protein, 50 aa, Zea mays
  Clone ID: MRT4577_174799C.1.pep
FIFQKHQADDRRYLWDANNSSWLITASDHFEHIQGCRMLNVITPDDVFIV

SEQ ID NO: 266665 - protein, 141 aa, Zea mays
  unsure (1)..(141): unsure at all Xaa locations
  Clone ID: MRT4577_17479C.1.pep
PCNCSSIAHLVALGTLLDRSLRLCLLGLGHLSLFRLLLILGLLDVSWWRGGSXAAPRRTSKPRRLRGSXTDVAASGTHGAVEVRRQRQAADATVFEFGSAAESGAAVTLAGYCPVSDELEPCRWELVPAAVDGAPQFRIVF

SEQ ID NO: 266666 - protein, 288 aa, Zea mays
  unsure (1)..(288): unsure at all Xaa locations
  Clone ID: MRT4577_1747C.1.pep
MARPRTGTAQLLTCLGWPGPFTVSGWAPEFGPSVVEESETGVESREPRVGDRQTEDEEAERQLEDHNEAMDARQALLGVGVTHLDPVDLEDFVASRTGTATDSTSPPASTTASAGGGSRKRSKVWNNFDELTNLVNGKRVRYAARCKFCHETLSARSSSGTGHLLRHNCSAKKAHDRSGQTQTVLKYNPDGSLQRWEYCPSVARNELCRLIARDDLPLWHGDSNGDSNDITRAHNPRFVHVSRQTTARDMIKLYNERKVNLIGTLKTDVTSVXLTSDIWAGKAKEDYL

SEQ ID NO: 266667 - protein, 83 aa, Zea mays
  Clone ID: MRT4577_174800C.1.pep
VYIIPALAHMATFLPPAARENAVERPPRGLGGWAGMYAANFFVVAWVLVVGFGFGGWASTVNFVRQVNTFGLFTRCYQCPPRH

SEQ ID NO: 266668 - protein, 69 aa, Zea mays
  Clone ID: MRT4577_174801C.1.pep
RAAARAGKKKKKKKKKKKKKKKKKKKKKKKKKKKKKKKKKKKKKKKKKNPWAETPLGGIFKIFQKLGGG

SEQ ID NO: 266669 - protein, 81 aa, Zea mays
  unsure (1)..(81): unsure at all Xaa locations
  Clone ID: MRT4577_174802C.1.pep
LLLLRAGRIRTXRXXIFRTXRRGRLKTVVGLAVTPSQPLCTERRAGSQRGRPGRATRHTIRAPFMGCRSSTQFWRSIELIG

SEQ ID NO: 266670 - protein, 139 aa, Zea mays
  Clone ID: MRT4577_174803C.1.pep
VGSLTGKPSDSRLINSYNCDLEDLPMMLLQQVASQVIHWLHDEAMILGMNVTRDFLCLYFDLGQGETLGLLAHVDPDDTYGCISWYLTVDHPMEEGKMSAGSPESEKRRFLGYLSLEVLYSTLMDLIKLCSTSDQIRAS

SEQ ID NO: 266671 - protein, 81 aa, Zea mays
  Clone ID: MRT4577_174804C.1.pep
ENKIRNKRMKNKMEKEKKRKPFLVTGPNLTSLVRHCAQPGYLAPTPSPLVSHSVVPSFLSPRWQLGPACLAPPRTRTKLFL

SEQ ID NO: 266672 - protein, 151 aa, Zea mays
  Clone ID: MRT4577_174805C.1.pep
FLADPALDIAAEERHRMVSCLLNVTVQESDEPITLGYSVRLSSGEVVDVKSSRMVRWEREDSKLYVQSGDGEPSYKEKIEFATYFAEEISQGLLFEMEDQIPSLAELIKFGSLLDFQDAAVGFLLKSKNLQMFPEDEHFLKSSMLDGNNNR

SEQ ID NO: 266673 - protein, 110 aa, Zea mays
  unsure (1)..(110): unsure at all Xaa locations
  Clone ID: MRT4577_174806C.1.pep
RQTKGNRKAHRSRKQRFFGANIVTNPDQXGGVSESPPSNSGGYFYGSTPENDSYQRSKLSSSCHGHSTGSLPVGSVPKSSSQCDDVTFHILQKNXLQAQRYVTVKHHCLM

SEQ ID NO: 266674 - protein, 227 aa, Zea mays
  Clone ID: MRT4577_174807C.1.pep
MPPKSDSVEGIVLGFVNEQNRPLNSQNAADALQKFNLKKTAVQKALDALADSGQISFKEYGKQKIYIARQDQFDIPNGEELEEMKKTNAKLQEELADQKKAISEVESEVRGLQSNLTLTEITSKKSELQSEVQEMEEKLNKLRSGVTLVKPEDKKIIENSFAEKVSQWKRRKRMFKELWDNITEHSPKDQKEFKEELGIEYDEDVDVNVQSYSDMLASLNKRRKFSR

SEQ ID NO: 266675 - protein, 179 aa, Zea mays
  Clone ID: MRT4577_174808C.1.pep
MGQGAAKAKQAAAAVEEAVQKSPEKKNDGKKALKSSDADALIEFMRKNYDSKVKDVKEFDDFYHAIYELIEKFCEERGQLQYRIPPKDELKEKYERFHTGKGRNVTAQEFESIARAILKIDSFTFGKAAIDILVVLFGVPVCALLTKRIVPGLNAISDDIVIPAATSGAVVYLAKSNKL

SEQ ID NO: 266676 - protein, 65 aa, Zea mays
  Clone ID: MRT4577_174809C.1.pep
APRLLYTSPHVEWSLRHNLFHLKMLLWRRRYFLHCVLIWAEEYQPSSQHAKVERRTRVSTRLDPT

SEQ ID NO: 266677 - protein, 82 aa, Zea mays
  Clone ID: MRT4577_17480C.1.pep
GSRVVLLSIYNYYGTAQCNKDGVCPACNNLGCFLPQMPSQTRAHDMAGTSHGGEETPYPPPVPTTLAEAIAPLVNATTDNTC

SEQ ID NO: 266678 - protein, 137 aa, Zea mays
  Clone ID: MRT4577_174810C.1.pep
MAWTWRPEDLFLETLKDSLARQRAWRHRGIAWRWPGMRGQSGRGVATGRGGTTWRLDDDIARDYAVGDVGLEGVEDMQLVVLRVAKGGDGGGAAAEAEEAEEAHPADYTAGTQHCLGAFEGIGSEIFTPGKYSNMVN

SEQ ID NO: 266679 - protein, 595 aa, Zea mays
  unsure (1)..(595): unsure at all Xaa locations
  Clone ID: MRT4577_174811C.1.pep
MAVEELKELKKQLTELQEVGDSEHEEHLRLVLQKLRDNQLYTKYSKCEFWIGEVPFLGHVISNGGIVVNPAKVKEIMEWSVPTTVTEIQSFLGLVGYYRRFIEGFSKIAKPMTSLMEKGREFKWNEKCQESFDQLKKRLMSPPVLIMSDLQKGFDIYCDAYGQGLGCVLMREGHVIAYASRQLWKQELNYPTHDLELAAVVHVLKIWRHYIMGTKCQVCMDHKDLKYIFTQQDLNLRQRRWMELIKDYDLEVHYPPGKAILVADALSRKEQVHSAIVAQLPDEIVEDFRRLNLGIVARTEEVIIDMEPTLEQEIRKGKFGDTKTQEIKDLITERSRSGXFMEDEQGTXVKAEHQRPTGLLYPLKIPEWKWEENGMDFITGLPRTSKGYDSIWVIRNGLTKVAHFILTGGRQFFGHELIQEAEEQVCIIRENLRTAQSRQKSYADTRRRLLEFKEGNYVYLKVSPLRGTRRFKVKGKLSPRFIGPFLILKRVGEVAYQLELPEHLADVHDVFHVSQLKKCLTVPEEQLPMEDLSVQDDLTYAEYHIKILDTLTRVTRNKVIKMCKVQWSHHGEDEATWEREKELRIDFPHLFPRSS

SEQ ID NO: 266680 - protein, 58 aa, Zea mays
  Clone ID: MRT4577_174812C.1.pep
PSSLPMTTPFSTPSPPNPKGVFLNATALLLQPLFNSNIPPPISYTAPTLLTTYIYPTL

SEQ ID NO: 266681 - protein, 64 aa, Zea mays
  Clone ID: MRT4577_174813C.1.pep
IAGKALPEMNVFQFDALASLGLANTKVQMPPRLLLTFSATCLPNVLLGVASDKKRRLGFFFSVT

SEQ ID NO: 266682 - protein, 151 aa, Zea mays
  unsure (1)..(151): unsure at all Xaa locations
  Clone ID: MRT4577_174814C.1.pep
CHSLKQFDAGVVLSSYPSLWREARAGPVPSYPADGRTEVSPPQQPPPQPTTRRASPPGTHTRHARAPAPERSRHRPPKRASPPSCTSPIPTATHRPPPRIHHPPRSPPSPLXHRXPPRARRPGPAPHAAAAGRWRSHQARRPRGQQMGQWG

SEQ ID NO: 266683 - protein, 42 aa, Zea mays
  Clone ID: MRT4577_174815C.1.pep
TFTGLFISKVFHFAKKKKKKKKKKKKKKKKKKKKRKKKKKKR

SEQ ID NO: 266684 - protein, 33 aa, Zea mays
  unsure (1)..(33): unsure at all Xaa locations
  Clone ID: MRT4577_174816C.1.pep
FQKKKKKKKKKKKNKKKKKKKKKKKKKXKKKKX

SEQ ID NO: 266685 - protein, 71 aa, Zea mays
  Clone ID: MRT4577_174817C.1.pep
APWMSSPGAKRGTCSQPTNRGEPEGFPGQKGGKTGPMRWTMAAPKRKYSAGGPRERNRAPKNETPLVTSRT

SEQ ID NO: 266686 - protein, 138 aa, Zea mays
  Clone ID: MRT4577_174818C.1.pep
KPRHHASREASSSCKPRSDVHASLRPQLGTLHQRICRARSRGTLTFGRPPSSSMASRACDVDQPTLEPRSILKLPVTLYFADGAELSGPRGMDNSSASNGSRGTTTVGASLDRSNIVYGTSILRPRHQSSTHMIRRRD

SEQ ID NO: 266687 - protein, 87 aa, Zea mays
  Clone ID: MRT4577_174819C.1.pep
HAPMCPARDVAAPDGGKSSGNGTARVSDATTRAQVWATMGGKDYDWALDLERKGRRKQKMTAPGRRSEPNRSGAAALMASGAPSDDR

SEQ ID NO: 266688 - protein, 132 aa, Zea mays
  Clone ID: MRT4577_17481C.1.pep
RTRVDEGHRLLNKDSKLFGQRKDYNTKHRVLLTGTPVQNNLDELFMLMHFLEGESFGSITDLQEEFKDINQDKQIEKLHGMLKPHLLRRFKKDVMKELPPKKELILRVELTRKQKEYYKPSHENYDVPASRD

SEQ ID NO: 266689 - protein, 69 aa, Zea mays
  Clone ID: MRT4577_174820C.1.pep
TSPMPGFLLRCCKGAHLFQISVPAAAIPVFKMVVLFISPVSEGILNTRVFFETRRGFMMDLFGPGWGPH

SEQ ID NO: 266690 - protein, 78 aa, Zea mays
  Clone ID: MRT4577_174821C.1.pep
QDFLTTTDMHLLEPPEKLLHSMDSLAGCSLVLALFQRSAFRCALLRPYSPTVMLFNTNLNQVIYIHALTTRRCPVPIT

SEQ ID NO: 266691 - protein, 196 aa, Zea mays
  unsure (1)..(196): unsure at all Xaa locations
  Clone ID: MRT4577_174822C.1.pep
SSLLRYTFYQTRSQKRLTVLSYGIKFRPQYIPPPCGKSREPRIDGAQGPTRTPPSKKPAEKKPAAEKGWAGKKPKAPRSVPAANYADKLVVEGNRDRKKDNKSHEPYNIYFFRGIEDVHQHIHIPLKAMTIXMNSFIXDVFQKLVAQAPNLGGHNKKATITSRXESLTSGRLRLPGEITTDLVSQGTIGVDKFTAT

SEQ ID NO: 266692 - protein, 110 aa, Zea mays
  Clone ID: MRT4577_174823C.1.pep
FERNSVSNKMDGSSSSVNPQSTLIHPQNGCCESREHLIHESSKQKYLDSPEANGAFKRSLGERTAVDSGGPSQFSTPSSRSLSPNRHRKDGDYDSRLLPVSEMNSNISWS

SEQ ID NO: 266693 - protein, 99 aa, Zea mays
  Clone ID: MRT4577_174824C.1.pep
SWFDCLYVPKTTHQFRHPSIHVTARRTNELRFLPSPALVPMVSQHRAANYSHCPLTTRCCPCALHADAGAAEEEEALSVLASRRCEPDLGAVARVVYSS

SEQ ID NO: 266694 - protein, 170 aa, Zea mays
  unsure (1)..(170): unsure at all Xaa locations
  Clone ID: MRT4577_174825C.1.pep
MRAVVRLYESTCVGNTLAVERLKPDAVGCLGDGKIRCTLAGAGAITHGTNQAELRLTTIMPCHSTPSYRRCWEESLTAFXGKVTLLMGYKXLKYPGKTRXTPFIHKSTFTIPVYNPLQVCYLDENNDFQDLVIIXRPPANILLYGEWSVPHISAXLKFPFVCEQDWVPSR

SEQ ID NO: 266695 - protein, 156 aa, Zea mays
  unsure (1)..(156): unsure at all Xaa locations
  Clone ID: MRT4577_174826C.1.pep
MQLFVKSLAGNTLAFEVAPSASVENVKAMIAAREGIDTSFQCLSFAGKSLQNSQAISMYGVQDNSTLHLNAELLGGGKKRKKKTYTTPKKIKHKRKKVKMAILKYYKVDESGKITRLRRECPNXXCGAGVFMAKHKDRQYCGKCHLTYVFQKDQQA

SEQ ID NO: 266696 - protein, 133 aa, Zea mays
  Clone ID: MRT4577_174827C.1.pep
HLLYFFCILSKANKWPYWTYWCSTLPQYEENIEVEWKQIYTAAPFTCRPGNVQLLSGGLEDQQLIHRATLSEVYKYEYYFCFDIQAQLLSDLFPSPSGQQCSEKVIPASTGPLEIFKLSLNGDKAVLSEDASS

SEQ ID NO: 266697 - protein, 70 aa, Zea mays
  Clone ID: MRT4577_174828C.1.pep
SRRRNFSSGGIKLGGLPMHACIKLESHPKPACFFDGSGIQGHPSRQKTTTGGRALRSRRRGGARPPAVLA

SEQ ID NO: 266698 - protein, 88 aa, Zea mays
  Clone ID: MRT4577_174829C.1.pep
DEEKKLDFLTRELKGKRPLVPQNIEVAADVKEVLDTFKVAAELGSDSLGAYVISMASNASDVLAVELLQKDARLAVSGDLGRPCPGGT

SEQ ID NO: 266699 - protein, 89 aa, Zea mays
  Clone ID: MRT4577_17482C.1.pep
RLFNFKKDRDGYWKCVAGNLASGGAAGASSLFVVYSLDYARTRLANDAKAATDDVKAVHEQSILRRHQSMYAGLRDYTLCASCTCLTRS

SEQ ID NO: 266700 - protein, 369 aa, Zea mays
  Clone ID: MRT4577_174830C.1.pep
MSTKKVLCKFFMHGACLKGEYCEFSHDWSDQANNVCTFYQKGACSYGSRCRYDHVKVSRNPTVPPPRPTSSTSRRASTSLQLSSYNHPPHMVHQTDSSNQRHQISVDVLAHSASKPAWRNDFQHDIVSDDGIDWSSNQNLINQTSLKPVDLPICSFAAAGNCPYGEGCPQMHGDLCATCGKLCLHPYRPDEREEHIKLCEKNHKRLVALKRSQEIECSVCLDRVLSKPTAAERKFGLLSECDHPFCIECIRNWRSNSPASGMDVNSALRACPICRKLSYYVIPSVLWYFSKEEKEEITESYKSKLKSIDCKYFDFGTGSCPFGTSCFYKHAYRDGRLEEVILRHLDADDGSTVIAKSIRLSDFLGRMDL

SEQ ID NO: 266701 - protein, 228 aa, Zea mays
  unsure (1)..(228): unsure at all Xaa locations
  Clone ID: MRT4577_174831C.1.pep
ARSTMDLSSTDFVGKSVNVPSGSAFPEARVIMLKTGVXTRQMETDESHWNGPDREVYLGPLSGEATSYLTDEFPDDYGWNTEGLSAXTETIAENRQLEVIHSRMSDAXAVGCVFPELLARNGVKFYEAVWLXADSQILHEVXLDYLXNPSLIHAHSILAIWACQVVLMXAVQVYSIVGCXLGEVVDPIYPGGSFYPLVLDDDPEAFGELEVXGAQEGRLVMXSMFGFF

SEQ ID NO: 266702 - protein, 199 aa, Zea mays
  Clone ID: MRT4577_174832C.1.pep
MKSLAKQETQPKPRLIVRLGVFLASHHILFSVICCYAGIIALLLLPSLAKNTYLSENALIPGSANPLFSTEDAIEANRFMKAIEAVARDSSSVIGMANFIAQQIEDLGAEVCYQKFLPHGKNFHPLKFFTSMTNDIAIQPNGTATNFGINTIGILRAPRGDGKEAIVLVTPYNSQRVQSNELLSLALGFSGFSLLVEQH

SEQ ID NO: 266703 - protein, 718 aa, Zea mays
  Clone ID: MRT4577_174834C.1.pep
MKSLAKQETQPKPRLIVRLGVFLASHHILFSVICCYAGIIALLLLPSLAKNTYLSENALIPGSANPLFSTEDAIEANRFMKAIEAVARDSSSVIGMANFIAQQIEDLGAEVCYQKFLPHGKNFHPLKFFTSMTNDIAIQPNGTATNFGINTIGILRAPRGDGKEAIVLVTPYNSQRVQSNELLSLALGFSVFSLLSRAAWLSKDVVWLSADSQFGEYAAVSAWLNQYHNPVFLSHSVVSHTKMYGANNIYDGNSEKTEATAFKRAGTMAAALIFKVGETRRYSDRDSVTIYAEASNGQMPNLDLLNVVHYLAVHRQGFRVNIAAFSSLLSSAWLRVIAEILHTIGSVLRKINPDWKLDIAVPDYVEGTANLANSMYNQALGVPTGSHGAFRDYQVDAVSLEFSPTFHVKNENAKSLFLLKGGRLIEGVARSVNNLLEKFHQSFFLYFLTGPSKFISVGVYMIPFALLLAPLPIVAAALADGSRSMEKTADKLIGDGKTDGIADISQNKGGSWKWLRAAKVLLVVQLWAVLVSLLPYYITQIPDATPTQSTLIWVVLSIVVLISLSVLFGSPYSTGVEWKLLKATMITSISIGLGLMSIINFATAQLGALIVIPMCLFSRPLKASGMNFLPRAVLLASNVAFAVLGFPPVALLIMKGVSKGSRSWTIDVGDFWVWMEFLWERSSATYLYLFLVHLPCWLLCVLVFLHPCHQSEYKLKQE

SEQ ID NO: 266704 - protein, 179 aa, Zea mays
  Clone ID: MRT4577_174835C.1.pep
MKSLAKQETQPKSRLIVRLGVFLASHHILFSVICCYAGIIALLLLPSLAKNTYLSENALIPGSANPLFSTEDAIEANRFMKAIEAVARDSSSVIGMANFIAQQIEDLGAEVCYQKFLPHGKNFHPLKFFTSMTNDIAIQPNGTATNFGINTIGILRAPRGDGKEAIVLVTPYNSQRVQS

SEQ ID NO: 266705 - protein, 58 aa, Zea mays
  Clone ID: MRT4577_174836C.1.pep
MTDETHVPSLSHRRTSDLQYNARCEHNKTLMQAQSAFNIDDTNDQTVEASLVQEKILQ

SEQ ID NO: 266706 - protein, 111 aa, Zea mays
  unsure (1)..(111): unsure at all Xaa locations
  Clone ID: MRT4577_174837C.1.pep
XDAXIISATLCSXWQEEIRNPSWHPFKVKVVDGKEMEILKEDDEMLQELKEEHGEEIYGLVTKALLEINEYNPSGRYPVPELWNYKEGRKATLKEAVQHVMRQWKSHKRKR

SEQ ID NO: 266707 - protein, 69 aa, Zea mays
  unsure (1)..(69): unsure at all Xaa locations
  Clone ID: MRT4577_174838C.1.pep
AHYLEAFYYHVVMFYVVYCLLGVISRPVDPIAFARERDMPSDXDRTLNEXKRFISCSMPREHQKIFELG

SEQ ID NO: 266708 - protein, 425 aa, Zea mays
  Clone ID: MRT4577_174839C.1.pep
MSSWVTKSLPFLVAPAVASPTAALQLTSMDRALVSLPVSAMFVYENPIDRPAETIRRALSRALVPYYPMAGRLAVTGDQLKLACTGEGVAFVGASASCTLQDARLCDRRPVVSVEDLSISYAGQYSEDPPLLLVQVTEFSCGGFVVGVTWNHVLTDGAGMAQFLKAVGEFARGSPSPSVLPMRVDDTLSELPPPITTMTKALVSSKPRDMPSSYITVPLSFVDRIKGEFRRRSYGSGSGQVSTCTAFDVFTAAIWKCRARATIGSAASPDAPTALAFTVNVRKPAKAKDGYYGNVFAFGLAASTLREVADGDILDLVTLVRDAKARVPFTFADGAAHIADEMGGRLKGLDGYDTLYVTSWWNLGLDDVDFGSGGAERVIGCMERKVVPGCFLCGKKDKAEGVAAMALCVKQEHAEAFHAELRSLK

SEQ ID NO: 266709 - protein, 101 aa, Zea mays
  Clone ID: MRT4577_17483C.1.pep
FLAWVQLDPPRAGVRPTYFAPLNDTGLAEGDCTDRGETDDVIVRDGQVALGGHAQYVQGIAHEQDTIDGGVRLRQVLLSIELAGYGDGPWDMMHRGDDGLL

SEQ ID NO: 266710 - protein, 239 aa, Zea mays
  unsure (1)..(239): unsure at all Xaa locations
  Clone ID: MRT4577_174840C.1.pep
MCIAAWAWHCHPTHRLLLLFNRDEYHSRPTQPAQWWAAGEEAKEILGGRDELGGGTWMGCTRDAFXPLEYATEIAKEADQYNGFNLILADVNSGTMVYISNRPGGDPVIQTVAPGLHVLSNAAINSPWPKAMRLGQSFKRYLTIHDDAEASLKQMVEELMMDTARPDRSMVPDTGDDPEWEYKLSSIFIDTAKEQARYGTRSMVALAAKLEGEVTFYERYLENSLWKENLIQFQMEKAQ

SEQ ID NO: 266711 - protein, 106 aa, Zea mays
  Clone ID: MRT4577_174841C.1.pep
AESARHDLETDAGGRSVLHRRGPTLERALRRCSTTRRIRPLCPSSTLGRAPAWWSPRRSSAPPSPSRPPSTASAAPLPGPPPRPAAGRRSERPLIAGQSDRAASWC

SEQ ID NO: 266712 - protein, 270 aa, Zea mays
  Clone ID: MRT4577_174842C.1.pep
MCIAAWAWHCHPTHRLLLLFNRDEYHSRPTQPAQWWAAGEEAKEILGGRDELGGGTWMGCTRDGKLAFLTNVREPSSLIGAKTRGQLPVRFLQGSLCPLEYATEIAKEADQYNGFNLILADVNSGTMVYISNRPGGDPVIQTVAPGLHVLSNAAINSPWPKAMRLGQGFKRYLAIHDDAEASLKQMVEELMMDTARPDRSMVPDTGDDPEWEYKLSSIFIDTAKEQARYGTRSMVALAAKLEGEVTFYERYLENSLWKENLIQFQMEKAQ

SEQ ID NO: 266713 - protein, 42 aa, Zea mays
  Clone ID: MRT4577_174843C.1.pep
QKNICGTRSLYSRTQWADVSPDAWPDESVDHENSGTLTPAYV

SEQ ID NO: 266714 - protein, 78 aa, Zea mays
  unsure (1)..(78): unsure at all Xaa locations
  Clone ID: MRT4577_174844C.1.pep
LLLALLAVLVSAANVFTYRQRSLVASTIIPXFLPPVTSMSYEHPAVPAYMLQLVLAASVLQQPIAQHQQPSLSHLNPQ

SEQ ID NO: 266715 - protein, 176 aa, Zea mays
  Clone ID: MRT4577_174845C.1.pep
MSLPRYQTNTPLHPTFEKDILNTHLIYDYDATDAEGNPEKWRYEIWFFSDDRVVYAIHGGPMAGRINYQTVAYQCVRPGELWQINWLEETGTIVSLVYDITNKTISGMLGFSKGHWEHAEDAHGDKRNPADFNRWKELANIGKQTDRFILTEQAKILEVFKGQGDLKPIKEEDPTF

SEQ ID NO: 266716 - protein, 50 aa, Zea mays
  Clone ID: MRT4577_174846C.1.pep
WMSRPTMKLTCVSSTSDPVGDGDSESLRPSGIGYRGPPVMVDQQPRTPAR

SEQ ID NO: 266717 - protein, 52 aa, Zea mays
  unsure (1)..(52): unsure at all Xaa locations
  Clone ID: MRT4577_174847C.1.pep
PRLGRTLXKAAVIGDPLKDTSGPSLNILIKLIAVESQXFAPFFAARGGLIFK

SEQ ID NO: 266718 - protein, 123 aa, Zea mays
  unsure (1)..(123): unsure at all Xaa locations
  Clone ID: MRT4577_174848C.1.pep
ESPGGPHPSGSRRRRSCPIVSLGFWRASMGRPLATVGRQKAWRKKRKFELGRQPANTKLXSIKTVGRVRVLGGIVKWRVFGLVPGTSXWGREVVSRMTCYPYLVYNALYFGLVGPQSFFNSAF

SEQ ID NO: 266719 - protein, 501 aa, Zea mays
  Clone ID: MRT4577_174849C.1.pep
MAYKERLANLTGVTRRFIGNLVRAFKTNLPEVVVTLTPPASDLQHIVKSGPTTERQTVGIGGILSTATVTPPVSNVSSLQGTSALRPSSSSLLVSQETDIANDSVQERHSPTRNLAQAQHPVRPGGHGGFLSNPYPSFFGEATSTAGPLQLYMPNMVVSGGTTSTPSLAFSLSAPGQPITSTALGGSFGSNTRTAWGNSDMAAASSSQPDRMGMDQQAGTGSAMNLTIGLHPNAQQPPPKYVKIWEGDLYGQRQGQPVFISKLESWGGTVSRKVAEDWPETMQIVRLIAQEHMNKKYSESQYVGNTDFLIFRALNQHGFLGQLQERKLCGVIQLPSQTLLLSMYDKTSRMVGMLFPKNMLMFRPEALTQPSPVQQEELIHHQQQQLQQQQRNIHRLQRQLIQKQQQQHMQKLLPQRLQYQEQLHLQQQMTQQIQQQQQSLYQQHQQMQHQQQLWQQIQQQKHQLQHMDPQQQQLLSQMVGTELGSDDDTREDWVTGAGPHA

SEQ ID NO: 266720 - protein, 73 aa, Zea mays
  unsure (1)..(73): unsure at all Xaa locations
  Clone ID: MRT4577_17484C.1.pep
PFKFTGQCRGDWTIQVNDNLVSRTGLFQYKDQGTGIEILLIVILVIHGXVNLPRQVPAVWRKISCIKKYDCVI

SEQ ID NO: 266721 - protein, 220 aa, Zea mays
  unsure (1)..(220): unsure at all Xaa locations
  Clone ID: MRT4577_174850C.1.pep
WCSVLYVIGWCWVRFLAQPLYCAFKKKKKKKKKKKKKKKKKKKKKKKKKKKKKKKKKKKKTLARVPNPPAPAAAPPPNPKGPTPGKKGGARPPPPGAGPPQKREKNPPGGGRKKITPEGPPIPTQKKGGGKRPQPPPKRPPEKGGRVPPPPGGPEPGGPPPGEPPQXKKKKGNPPRNSPPKNHPPRPKKPAPKGKPGKGPGNXGRPNPRGEKAQVEVPGA

SEQ ID NO: 266722 - protein, 205 aa, Zea mays
  unsure (1)..(205): unsure at all Xaa locations
  Clone ID: MRT4577_174851C.1.pep
SLKVPSIQCGVIQLPSQTLLLSMYDKTSRMVGMLFPXNPNCSQMYTYLYHAFTEMLLFSXNMLMFRPEALTQPSPVQQEELIHHQQQQLQQQQRNIHRLQRQLIQKQQQQHMQQKLLPQRLQYQEQLHLQQQMTQQIQLQQQSLYQQHQQMQQQQQLWQQIQQQKHQLQHMDPQQQQLLSQMVGTELGSDDDTREDWVTGAGPHA

SEQ ID NO: 266723 - protein, 89 aa, Zea mays
  unsure (1)..(89): unsure at all Xaa locations
  Clone ID: MRT4577_174852C.1.pep
AWTMIEISXAALETHGMAGHAELGSFKTNDLSQIILGYSRDDVRNLMLIYLAHGILQHDLFEVVDHRGLGELVXLATNMGRTARPNLKA

SEQ ID NO: 266724 - protein, 36 aa, Zea mays
  Clone ID: MRT4577_174853C.1.pep
KVWVPQKKKKKKKKKKKKKKKKKKKKKKKKKKKKKK

SEQ ID NO: 266725 - protein, 71 aa, Zea mays
  Clone ID: MRT4577_174854C.1.pep
MLATRALSVIGKRAISTSVCLRAHGSVVKSEDYALPSYVDRRDYPLPDVAHVKLLSASQKALKEKEKADWS

SEQ ID NO: 266726 - protein, 182 aa, Zea mays
  unsure (1)..(182): unsure at all Xaa locations
  Clone ID: MRT4577_174855C.1.pep
MRGGARCATPRRDPLLGRSFDDARMVDPSNSVVLRGAAAAAGDPVDGEPPATLYRRHQRHESARRPTPMAARRAMAARSSYTYIGLRSRTQAILAAVNKLASELSFYQXKVFRVTEHAGVTLASLXDGRVLSRFLCNECINHSFVYEAPLPVSRLADKLQVRTSPCASQTPIGSSKPRDFHR

SEQ ID NO: 266727 - protein, 32 aa, Zea mays
  Clone ID: MRT4577_174856C.1.pep
GPVTASTRNESSLPLRDSGTLGLSSLLETEVG

SEQ ID NO: 266728 - protein, 94 aa, Zea mays
  Clone ID: MRT4577_174857C.1.pep
SFGLYSFIFISLIIFLSGIIKAYGGTMYRLQRSIRSIFIAEAKCSDDFVFSIVFSVIGSACTYIDMIYGMASVLFVIFMTSFLIDVCDMNDGGF

SEQ ID NO: 266729 - protein, 45 aa, Zea mays
  Clone ID: MRT4577_174858C.1.pep
TLIRQQKMGYGGHLTGRELKYTTSFLIQNMRGYNQATKGQGCGTT

SEQ ID NO: 266730 - protein, 211 aa, Zea mays
  Clone ID: MRT4577_174859C.1.pep
MEEDEARRKSEEGDCEKALIVYGNVQTVAEIPGRRGGGSSSGTKKKELTFEQLSRHFSVPIKQAARELNVGVTVLKRQCRKLGITRWPYRKLKSLEKLIDNVQGIGKQNAQENGHLTRSLVEFLDQTMKPIEERPDAMLDQRMEGLRLVCFKENVQEDENLTRSVVEFLQLTKKMIEERPDAILDQRTKDPRQACFKESFRRKRLIGHGAW

SEQ ID NO: 266731 - protein, 69 aa, Zea mays
  Clone ID: MRT4577_17485C.1.pep
ARPGMPFSEVGMVFYLPPTGSGIGLCEVSPVVRVILGWAGMEYAKAVWSVRCNLAVYLSSQARLLWRLT

SEQ ID NO: 266732 - protein, 86 aa, Zea mays
  unsure (1)..(86): unsure at all Xaa locations
  Clone ID: MRT4577_174860C.1.pep
GGSTKLEFALDFVWTTPPPGGALLILGGAIHSAFTSMTPMLIASVVLDSTQGVLSGVSRGYTWQHLASXTNLLALYNIALPIAILF

SEQ ID NO: 266733 - protein, 57 aa, Zea mays
  Clone ID: MRT4577_174861C.1.pep
SSKLTDMEIDECEEPPMHDVTNIKKKMRRNQAPPAQKAYEEDDKIPGGPQKVQCAHQ

SEQ ID NO: 266734 - protein, 92 aa, Zea mays
  Clone ID: MRT4577_174862C.1.pep
KKKKKKGQYKSSIREIQRQGATYLIFSTNYNILAGLRHTTNWVGAALCHQTRFGGRTSSSFLAGGIIAMPGPPVIQNIPGSIHIGSRAFCWD

SEQ ID NO: 266735 - protein, 74 aa, Zea mays
  Clone ID: MRT4577_174863C.1.pep
NHSPASKTRCVLNPGLNLCFSLEILGGQMPVGASCFLAFKKLSCFLDKSPQETDEPGKRTSHPGESKNFFLGFF

SEQ ID NO: 266736 - protein, 93 aa, Zea mays
  unsure (1)..(93): unsure at all Xaa locations
  Clone ID: MRT4577_174864C.1.pep
TLGTLAPWAVERSXKSFKSGVCHPKKSGQCLRYXETXCQSDWQCPGKKICCPDTCSIRCLDPVDIPDPSRKKPGKCPVTYGQWLMLKPPNFCE

SEQ ID NO: 266737 - protein, 63 aa, Zea mays
  Clone ID: MRT4577_174865C.1.pep
VQDRWLHHPTLLSGVEFCIRKDQLSRLHSSQRRSTCSNTPHGNPLHYTSSVAWSPPGASQGPA

SEQ ID NO: 266738 - protein, 91 aa, Zea mays
  Clone ID: MRT4577_174866C.1.pep
SAARCRCPRASPRAPCRCGGCWAPWGARPPRARFSRAVLSPLPLLSVGSCSGLVLPGALVPAVGSGLVCPPLFFGPPRCRAGFVVIMVAWV

SEQ ID NO: 266739 - protein, 73 aa, Zea mays
  Clone ID: MRT4577_174867C.1.pep
TSMGDGRNSYPKPRTLPWGTKAPKKSPATSWGGGRTPRLEAVSGTARDGGSKAAATEEPEPNPRSSTKITLLH

SEQ ID NO: 266740 - protein, 131 aa, Zea mays
  Clone ID: MRT4577_174868C.1.pep
CTTLLDGLTPSRNASLPLKKSLATTDNSELILKTMASKKLLLAALCLVAAALLSLPSESHSLEDFSSNDPTPEIQTFFNPQAPALPEALDPFFIPVYTIAAKPDATSIPTTNTCTTPAAAAGTLPSASTTS

SEQ ID NO: 266741 - protein, 306 aa, Zea mays
  Clone ID: MRT4577_174869C.1.pep
MLLPHSSSASATATTRGLALAAAAPPPRPTARPRRARLLPPRARAETHATGVGADRAAEALLQSGLRRESLPRHVAVVMDGNSRWARERGLTPADGHKAGGRNLERVVALSRAWGIRALTAFVCSRENLSRPKAEVDYMMGLSEWLIGDNIDKLSRQGIRLQVIGDAAKMPASLRSAAAQADEATRQNSQLHVMLAICYSGRWDMVQACRELAREAQANRLSPDDIDESIIAGKLATSAAGEFSCPDLVIRTSGEMRLSNFLLWQSAYSELFFTGKMWPDFGEAEYLEALRSFQGRDRRFGQSKLL

SEQ ID NO: 266742 - protein, 72 aa, Zea mays
  unsure (1)..(72): unsure at all Xaa locations
  Clone ID: MRT4577_17486C.1.pep
GDTNWPVRWPLGGYPGPHGPNXCGDRAHKYYWPDIADAHYTGCLYGGIYISGIXGKVMPWQSEFQVGPAVLV

SEQ ID NO: 266743 - protein, 62 aa, Zea mays
  Clone ID: MRT4577_174870C.1.pep
FPFPQVSWKGFSLLVIFTVVTRCSGLSHVKFRLLICWKVASYVCQKSVLSKFLMQKWHIVIH

SEQ ID NO: 266744 - protein, 173 aa, Zea mays
  Clone ID: MRT4577_174871C.1.pep
SCIAQCHSIPLEFFFTCSASAFRQGIRLQVIGDAAKMPASLRSAAAQADEATRQNSQLHVMLAICYSGRWDMVQACRELAREAQANRLSPDDIDESIIAGKLATSAAGEFSCPDLVIRTSGEMRLSNFLLWQSAYSELFFTAKMWPDFGEAEYLEALRSFQGRDRRFGQSKLL

SEQ ID NO: 266745 - protein, 57 aa, Zea mays
  Clone ID: MRT4577_174872C.1.pep
GSSCNGGLAIVVTPSSGRPSSPSLLMSPLCRLGDLCTCTVGLPALVVLQIEPNQVTF

SEQ ID NO: 266746 - protein, 56 aa, Zea mays
  Clone ID: MRT4577_174873C.1.pep
FMCMCMYRSRLLVSHWRSSSHGIILGQVVHLLVRRPKLMASFNSIRTVRNTMGSSL

SEQ ID NO: 266747 - protein, 64 aa, Zea mays
  unsure (1)..(64): unsure at all Xaa locations
  Clone ID: MRT4577_174874C.1.pep
RVALCQLLVMCFSSGSAVPSIYQNGLCIVGWGKSCQYFLKAPXRLLGAKKITKKKKKKKNGRPP

SEQ ID NO: 266748 - protein, 64 aa, Zea mays
  unsure (1)..(64): unsure at all Xaa locations
  Clone ID: MRT4577_174875C.1.pep
FXXIXXVTXLQGLXXCKXXYCXSHYLATXXISPXXLHSNDXEIENDKXXKPISQQRXNPPSAXP

SEQ ID NO: 266749 - protein, 92 aa, Zea mays
  Clone ID: MRT4577_174876C.1.pep
FPKKQQRALNKAREYQFKLCYQNCVENLLLHKSLKLTKKIVFLVHSLRTCGDNGPRPVASNIWVVLVKEVEHLVQQLQQKSSRSNFKKRTWA

SEQ ID NO: 266750 - protein, 199 aa, Zea mays
  unsure (1)..(199): unsure at all Xaa locations
  Clone ID: MRT4577_174877C.1.pep
MGGAVVDEGPTGIKAPDGGWGWAVLFGCFIITGFSYAFPKAVSVFFKELMHEFGIGYSDTAWISSILLAMLYGTGPLCSVCVNRFGCRPVMLVGGLFASLGMVAASFCRSIIQIYLTTGXVITGLGLALNFQPSLIMLNRYFNKRRPIANGLAAAGSPVFLCALSPLGQLLQDHYGWXRGGFLILGGLLLXCWGWAALM

SEQ ID NO: 266751 - protein, 196 aa, Zea mays
  unsure (1)..(196): unsure at all Xaa locations
  Clone ID: MRT4577_174878C.1.pep
RVPNVWLRSSSTTSMGSILKSFRSTGLAVFFLCKFVHFYLFQSREMNCASREVHEHEDSGDKDTKQHQPYTLVNQAFAAAVNKVLEGYFCSLNTLLASIRLRRSVGQSGIASKISNGMSCDPTSEVTLLEVYLHTEELRRHVKSLGNICFPKFAGLTLYKKGLNTDANVEFEXXPRGTDLLSYLYVHIRVRHHLTI

SEQ ID NO: 266752 - protein, 132 aa, Zea mays
  Clone ID: MRT4577_174879C.1.pep
LARPRARRHDYDMLLRRPGPCRWVSLNTHQRSASLICTDHTMSRAQWKLTPWTPTVLFTSPDCTAMHPVRGGTEVPPALCINYPRSGSYRALTCSALNFRPPATIISRDLSPSDATIRSATRAVLLFLCRAD

SEQ ID NO: 266753 - protein, 79 aa, Zea mays
  Clone ID: MRT4577_17487C.1.pep
GLYCCRVGPTNILASPFSGLFPQKSSVHLSFGGSASLNFLDFSWHSGTHPINKKLTVLPFQFPHVPVGPHRVLNEKFVL

SEQ ID NO: 266754 - protein, 161 aa, Zea mays
  Clone ID: MRT4577_174880C.1.pep
HASAHASAHASAHASAHASGEAVSASRPSSATHFMGMHQSLGIQLAQLGKDASAAAAARRVSGQRKAVEVESVATAGKQETREVVKKLFRAEFVERQHQGLDEDTDLRALENGFVSVTPLNVHGQVEPEIQAPASDWLSAAVSLKKEKEAAPATAEAHSAA

SEQ ID NO: 266755 - protein, 150 aa, Zea mays
  Clone ID: MRT4577_174882C.1.pep
MLFDNGFKLTKQSGYSHAQSWQAVSTSRPSSATHFMGMHQSLGIQLAQLGKDASAAAAARRVSGQRKAVEVESVATAGKQETREVVKKLFRAEVIHFLANLTQQLITLLVVQIASLTRTVLLLFIFMNLERILGTVFFSKCSLSRGNIKV

SEQ ID NO: 266756 - protein, 495 aa, Zea mays
  unsure (1)..(495): unsure at all Xaa locations
  Clone ID: MRT4577_174883C.1.pep
MASLNVLLLPEPGSGHLMSLIEAGKRLLGHGAGGGDGLGREFTVTVLVVQPPTPESAAEVGAHVRRVAESGIAGVRFHHLPAVEPPADCAGNLQEFKSRYLELHRPHVEAAARELGAAALVVDFFATAVLDVARGLAVPAYVYFTSTAALLALTLRLPALAETLAADFETFEGTVDVPGLPPVPAASVPGFLGRKDSPNFTWFVYHGRRFMDADGIVVNTVAELEPGLLAAIAGGRCVPGRPAPPLYPIGPVLNLGAGGGASGDEACVRWLDAQPRASVVFLCFGSLGWFDAARAREAAAGLERSGHRFLWALRGPPAAGSRHPSDADLDELLPAGFLERTRDRGLVWPRWAPQKAVLAHPAVGGFVTHCGWNSTMESLWHGVPLAXAWPLYAXEQHLNAFELVAVVGVAVAMEVDRRRDNFVEAAELERAVRALMGGGEEGRKAREKAHEMKAACRKAVEERGSSYAALERLRHAIRKGANTATAHFKAPQPLI

SEQ ID NO: 266757 - protein, 179 aa, Zea mays
  Clone ID: MRT4577_174884C.1.pep
PVAPRPWRVGVGGVWGAPSAIKGFKLTKQSGYSPAQSWQAVSASRPSSATHFMGMHQSLGIQLAQLGKDASAAAAARRVSGQRKAVEVESVATAGKQETREVVKKLFRAEFVERQHQGLDEDTDLRALENGFVSVTPLNVHGQVEPGIQAPASDWLSAAVSLEKEKEAAPATAEAHSAA

SEQ ID NO: 266758 - protein, 414 aa, Zea mays
  Clone ID: MRT4577_174885C.1.pep
MESTSGEDAPKRNPLPSALVSNLESVLAARRPAAAEVSTAAAAGEAEASAPEDAPSGDGAPARPIVLLTCAGGIRSAGLAALVDALVTGARCDVHVCAPESDKPACGYSITIRETITATSVDFTGAKAFEISGTPVDCVSLALSGRLFPWSSPALVISGINTGPNCGYEMFHSSAIAAAREALVYGVPSIAISLNWKKDETKDSDFKDAAQACLPLINAALDDIEKGTFLRGCLLNIGVPSAPSANKGFKLTKQSGYSPAQSWEAVSTSRPLSATHFMGMHQSLGIQLAQLGKDASAAAAARRVSAQRKAVEVESVAAAGKQEIREVVKKLFRAEFVEKRYEGLDEDIDLRALENGFISVTPLNVHGQVELEIGATASDWLSAAVSLDKEKVAASATADQQDVAAEEKEAPSAA

SEQ ID NO: 266759 - protein, 74 aa, Zea mays
  Clone ID: MRT4577_174886C.1.pep
GGPLPQIWWNSHAKKRKCMPGTQPGKNWCSGFTYNHERGGRVPPNIENPLSRLVMCKRISCNFLNGPRWECPPS

SEQ ID NO: 266760 - protein, 91 aa, Zea mays
  unsure (1)..(91): unsure at all Xaa locations
  Clone ID: MRT4577_174887C.1.pep
MAPGLYTDIGKKTRDLLYKDYNTHQKFSLTTCSPHGIAITAAGTRKNESTFGEXLHTQIKNNKLTVDVQANSESDLLTTITVDEIGTSGLK

SEQ ID NO: 266761 - protein, 85 aa, Zea mays
  unsure (1)..(85): unsure at all Xaa locations
  Clone ID: MRT4577_174888C.1.pep
PRQHGVEDSPGAPAAGXXQXXXPXTKRSXGXACGTDMRNLALGLLRRRRTESSWSERASLFFLSSRPWVALALAPHAPGRPPDAG

SEQ ID NO: 266762 - protein, 51 aa, Zea mays
  unsure (1)..(51): unsure at all Xaa locations
  Clone ID: MRT4577_174889C.1.pep
IYGGGGHRYSRGGYSRGSGYSGDDRYCGGGXLYCCSNRGGRYRNSDGNWRN

SEQ ID NO: 266763 - protein, 95 aa, Zea mays
  unsure (1)..(95): unsure at all Xaa locations
  Clone ID: MRT4577_17488C.1.pep
SVEHQASSCPAGGLPDSASCSPLLTSTPAPEQALLRSSSPSFYSAGRQVVFPIPAMAPSPMLLPTPWLCSTFTVSSPSAMAGADYTXPGCSTSSP

SEQ ID NO: 266764 - protein, 288 aa, Zea mays
  Clone ID: MRT4577_174890C.1.pep
YHNHRTLGTTERHRPARTELANNQGSCLEKVSAFVFAALCRRVLDRRDGGVDDDDRRPRGWDPGEHQGLWHRGARLPGGGDADARPREFPSSFQYNSHDAASSTTTAADRPTSDQQATRKGDKIVRGIKEHVTLGPKLSDTVKGKLSLGAKILRAGGSVEKLFRQWFSADKDEKLLRASQCHLWTTAGPIAGVLFVSTARVAFRSDRSLSLAVSTPRGDCSFRAPYKVAVPLRKVGAVRPSENRHRPEQRYVRLATTDGFEFWFMGFVSYNKSLQHLERAVACARQAR

SEQ ID NO: 266765 - protein, 89 aa, Zea mays
  unsure (1)..(89): unsure at all Xaa locations
  Clone ID: MRT4577_174891C.1.pep
MSKRGTGGSAGNQFRMSLRLPVAATVNCADNTGAKNLYIISVQGIEGRLNRVPFACLVDMVMVTVITGKPDLRXEVVPGVIVLQRNRSV

SEQ ID NO: 266766 - protein, 413 aa, Zea mays
  Clone ID: MRT4577_174892C.1.pep
MSVLLESSKDAPNVAEKVCGAIYFLAQGYEDAESMSSVLTPYLPNIIAALLSAADRADSTHSRLRASAYEALNEIVRVSNIPETSGIIGQLLQEIMRRLNLTFDLHILSSGDKEKQSDLQALLCGVLQVIIQKLSSTDAKSIVSQTADQLMMLFLRVFACHNSTVHEEAMLAIGALAYATGPDFVKYMPNFFTYLEAGLQNYEEYQVCSISVGVVGDICRALEDKILPFCDRIMTVLLKDLSSSMLNRSVKPPIFSCFGDIALAIGENFEKYLPYAMPMLQGAAELLGTLDQSDDDMVDYGNQLRRGIFEAYSGILQGIKGPKAQLMIPYATHLLQFTEAVFKDRSRDDSVTKAAVAVLGDLADTLGQSSKDLFKTHLFHVEFLRECQAQQLDDEVRETAQWAQGMINQAVVS

SEQ ID NO: 266767 - protein, 102 aa, Zea mays
  Clone ID: MRT4577_174893C.1.pep
SFGSGRWVKGPKAQLMIPYATHLLQFTEAVSKDRSRDDSVTKAAVAVLGDLADTLGQSSKDLFKTHLFHVEFLRECQAQELDDEVRETAQWAQGMINQAVVS

SEQ ID NO: 266768 - protein, 60 aa, Zea mays
  Clone ID: MRT4577_174894C.1.pep
ALSNEKMEDMRGLSSAVGRRLCIRSGWCLGENMLRSMMVLRPWRSVLIVTWLYSAEVHRP

SEQ ID NO: 266769 - protein, 89 aa, Zea mays
  Clone ID: MRT4577_174895C.1.pep
SVKLYIHFTVEFPDSLAPEQCKALESVLPPKPSSKLTDMEIDECEETTMHDVNNIEEEMRRKQAHAAQEAYEEDDEMPGGAQRVQCAQQ

SEQ ID NO: 266770 - protein, 62 aa, Zea mays
  Clone ID: MRT4577_174896C.1.pep
VKHKKTTVSKTSMDPASRVNFLESCCLHGRVLRDFSETRRLQESIPYKFLLSLGGKGRNIIE

SEQ ID NO: 266771 - protein, 419 aa, Zea mays
  Clone ID: MRT4577_174897C.1.pep
MFGRAPKKSDNTKYYEILGVPKSASQDDLKKAYRKAAIKNHPDKGGDPEKFKELAQAYEVLSDPEKREIYDQYGEDALKEGMGGGGSHADPFDIFSSFFGPSFGGGGGSSRGRRQRRGEDVVHSLKVSLEDLYNGISKKLSLSRNVICSKCKGKGSKSGASMRCPGCQGSGMKVTIRQLGPSMIQQMQQPCNECKGTGESINEKDRCPGCKGEKVVQEKKVLEVHVEKGMQHSQKITFPGEADEAPDTVTGDIVFVLQQKDHSKFKRKGEDLFYEHTLSLTEALCGFQFVLTHLDNRQLLIKSNPGEVVKPDQFKAINDEGMPIYQRPFMKGKLYIHFTVEFPDSLAPEQCKALESVLPPKPSSKLTDMEIDECEETTMHDVNNIEEEMRRKQAHAAQEAYEEDDEMPGGAQRVQCAQQ

SEQ ID NO: 266772 - protein, 59 aa, Zea mays
  Clone ID: MRT4577_174898C.1.pep
TGYFQFPIKTCVTEEPKYFKSKFKSLLEGSRHEGFRFQMISPNVGMKPVNGCPSMRCFY

SEQ ID NO: 266773 - protein, 419 aa, Zea mays; identical to SEQ ID NO: 266771
  Clone ID: MRT4577_174899C.1.pep

SEQ ID NO: 266774 - protein, 78 aa, Zea mays
  Clone ID: MRT4577_17489C.1.pep
NAGSCKTKPKTHSLKDHTRLTAPLPLYHYLKQRSTMPDSNKLSPKVNVADPAIAGHTPAIGEQNGLRALTVRAGNSIR

SEQ ID NO: 266775 - protein, 62 aa, Zea mays
  Clone ID: MRT4577_1748C.1.pep
AAVLVVVEASENMCGLCFPSDCKMLGGAATTLRVRFTHRCGVLLFSWNRKMPFDGCAAVLIC

SEQ ID NO: 266776 - protein, 420 aa, Zea mays
  unsure (1)..(420): unsure at all Xaa locations
  Clone ID: MRT4577_174900C.1.pep
MFGRAPKKSDNTKYYEILGVPKSASQDDLKKAYRKAAIKNHPDKGGDPEKFKELAQAYEVLSDPEKREIYDQYGEDALKEGMGGGGSHADPFDIFSSFFGPSFGGGGGSSRGRRQRRGEDVVHSLKVSLEDLYNGISKKLSLSRNVICSKCKGKGSKSGASMRCPGCQGSGMKVTIRQLGPSMIQQMQQPCNECKGTGESINEKDRCPGCKGEKVVQEKKVLEVHVEKGXMQHSQKITFPGEADEAPDTVTGDIVFVLQQKDHSKFKRKGEDLFYEHTLSLTEALCGFQFVLTHLDNRQLLIKSNPGEVVKPDQFKAINDEGMPIYQRPFMKGKLYIHFTVEFPDSLAPEQCKALESVLPPKPSSKLTDMEIDECEETTMHDVNNIEEEMRRKQAHAAQEAYEEDDEMPGGAQRVQCAQQ

SEQ ID NO: 266777 - protein, 634 aa, Zea mays
  unsure (1)..(634): unsure at all Xaa locations
  Clone ID: MRT4577_174901C.1.pep
MELRHFRCCASRLLLLVTLLLGFRRAGAQDSTSYTVPAQFACDVSSPCDTYVVYRTQSPGYLDLGSISDLFGTSQARIASANGLSSEDGVLQPGQPLLVPVRCGCAGAWSFANVTYPIRQGDTFYNLAKASYENLTEYHLIQNLNPGSEPTSLQIGQEVTVPLLCRCPARAERSRGVQSLITYMWQAGDTMSQVSKLMNATVDEIAEANNVTANTSASASFVGQPMLIPVRQRPRLPAPLYAAAAADGKSRSRRRAAVIGASVSGSLVALAALFVAILARRRYRKKPXAPXHGSPXTKLSWSRNQFGHDGSNSFAHVMKGGKLLTGVSQFIDKPIIFVEEEIMEATMNLDERCKIGSTYYRAKLDGEVFAVKPAKGDVSAELKMMQMVNHANLIKLAGISIGADGDYAFLVYEFAEKGSLDKWLYEKPPSALPSSSCTVATLSWGQRLSIALDVANGLLYMHEHTQPSMVHDDIRARNILLTADFRAKISGFSLAKPAMVDAAATSSDVFAFGLLLLELLSGRRAMEARIGSEIGMLWREIRGVLETGDKREAKLRKWMDPALGSEYHMDVALSLASMARACTEEDAARRPNMTEVVFSLSVLAQPLSVADGFEKLWQPSSEDNIRIAGSVAAR

SEQ ID NO: 266778 - protein, 90 aa, Zea mays
  unsure (1)..(90): unsure at all Xaa locations
  Clone ID: MRT4577_174902C.1.pep
PFLSRPPRKATGAVVALKRXDLHNTLRLTRXNIKAIIIDLMFGGTETAASAIEWAMAEMMHSPDYLRPVQQELADFVGPDRNVSESDLDR

SEQ ID NO: 266779 - protein, 104 aa, Zea mays
  unsure (1)..(104): unsure at all Xaa locations
  Clone ID: MRT4577_174903C.1.pep
MVVTPHHASKLEFGRASCLLLQCCPDLAIPLSQQQAAAMPGDHGSKADIFFDGRYXDSAIGACFADIWTIPLDTSKVRLQLQKNDVADASSGDAAPALPKYSRA

SEQ ID NO: 266780 - protein, 132 aa, Zea mays
  Clone ID: MRT4577_174904C.1.pep
ENANCYLCAIRSRVYSCLIAFCPCPFWIAVLSPTLRKNTPGCGLHFSQLLLSLCHSFLDVMMRHCLPFIYMGLSMQMSDYFVSTWRYFENIVLIFHLFQIYHDMLSLDNHMHVIIFIWFAAVKYSVYRLFYF

SEQ ID NO: 266781 - protein, 419 aa, Zea mays; identical to SEQ ID NO: 266771
  Clone ID: MRT4577_174905C.1.pep

SEQ ID NO: 266782 - protein, 638 aa, Zea mays
  Clone ID: MRT4577_174906C.1.pep
MEPRHFCRALLLLLVVLLLGFRRAGAQDSTNYTVPARFACNVSSPCDTYVVYRTQSPGYLDLGSISDLFGTSQARIASANGLSSEDGVLQPGQPLLVPVRCGCTGAWSFANATYPIRQGDTFYNLARLSYENLTEYHLIHDLNPRSEPTSLQIGQEVTVPLLCRCPPARAVQSFITYVWQPGDTLSQVSKLMNATADEIAEANNVTSSSVSSASAAGLPMLIPVQQRPRLPPLLYAASAGEGRSSRSRRRALIIIGASVSGSLVALAALLVAIMAQRRYRRKKPSMRLGSPFAVNTKLSWSVNQYGHGSSNSFAHVMKGGKLLTGVSQFIDKPIIFVEEEIVEATMNLDERCKIGSTYYRAKLDGEVFAVKPAKGDVSAELRMMQMVNHANLIKLAGISIGADGDYAFLVYEFAEKASLDKWLYHNHQKPPSALLPSSSCTVPTTLSWGQRLSIALDVANGLLYMHEHTQPSMVHGDIRARNILLTADFRAKISSFSLAKPATADAAATSSDVFAFGLLLLELMSGRRAMEARIGSEIGMLWREIRAVLEAGDKREAKLRKWMDPALGSEYQMDAALSLAGMARACTDEDAARRPNMTEVVFSLSMLAQPLSVADGFEKLWQPSSEDNIRIAGSVAAR

SEQ ID NO: 266783 - protein, 48 aa, Zea mays
  unsure (1)..(48): unsure at all Xaa locations
  Clone ID: MRT4577_174907C.1.pep
AGFFFLTKKVLGDGWDATXNYPISSLAIATSYTNHHMRYRNTLSCIMH

SEQ ID NO: 266784 - protein, 82 aa, Zea mays
  Clone ID: MRT4577_174908C.1.pep
EGYGIHEDKKDHHRDERVIRVSSFLIDEYDSCYVLGPSRCRLKIRRSSVGKTLRDIPSYLLGSGSTVHGLECSSCSHLNPKS

SEQ ID NO: 266785 - protein, 120 aa, Zea mays
  Clone ID: MRT4577_174909C.1.pep
PKGAVCFPGERRVQSRGVQVFGRGGPPPPPLFRLLFPPQGPRRGFLFRPPFGPGQGCARPGVVKLFFKAPRAGLLCPLSGTGPPLIWRGGFLKVGPILAPSESFWGVLGGAIFCTQIWFP

SEQ ID NO: 266786 - protein, 127 aa, Zea mays
  Clone ID: MRT4577_17490C.1.pep
PGVPGVQKGPKRANGVVLRGPPLCFLTSPGGAFGGEHGFCQKKARPWFFLFCPCPPDTGGGFFSCFKPMPQWGFSLLAFPYPPPGSLFFWGFNCVLPGGESFLFFFPLPPHIFGFLFGRMKRPLGFP

SEQ ID NO: 266787 - protein, 296 aa, Zea mays
  Clone ID: MRT4577_174910C.1.pep
GTPGSAGVPCPDHPDDGYDTDRYPMPEWTLPSSFDSDDPVYRYRCLVSTPNLMVRAVNNPDGWDHDCGFDGVSVQHNHNVANKYPASLWVQVNKDKRQFTIHLDSSMSVKHGDYASSLAGFDIQTMMNQLAYTLRGETKFKGFKKNITTGGLSMTFLGNNMVAGAKLEDKLLIGNRLTLSGNTGAVSMRSDAAYGVNVEATLHEKSYPVGQGLATLGASLVKWHKEWTMTANLDSHVSVGRSSNMSVHVDVNNKLTGRVSIKANTSEQLNIALLGTCSVIMYVWNKMHPSADPNAE

SEQ ID NO: 266788 - protein, 42 aa, Zea mays
  Clone ID: MRT4577_174911C.1.pep
STAGCITSIVYPGAYDSEEAAARAYNLHISSHWGSETLVNFP

SEQ ID NO: 266789 - protein, 88 aa, Zea mays
  Clone ID: MRT4577_174912C.1.pep
FGSALIQYHVAVPYLRFRMWLSGGACQGTRFTCVLMFFSRQQPATCATICMSSKQQCLYHTEHVQSHVRWQFRPGSRSLFYGLARAPQ

SEQ ID NO: 266790 - protein, 236 aa, Zea mays
  Clone ID: MRT4577_174913C.1.pep
WYAGKSIKDFQALLHRGYSRTTTTTTPSASPPVPLPLPLAPLSRSRSRACPRPAAKPKLLIFIRKQNRVLLNLPHVVTACRRAGFAPHGMNLRRQTPLAAIHAALASADAMVAVHGAAVTHFLFMRPGSVLLQIVPVGLDWAADAFYGKPAQQLGLDYLEYKVAPEESSLAAEYGLDSTVLRNPWVISSRGWWEMKKVYMDRQNVTVNIKRFGELLRTARTHLKNTTACAAAAALR

SEQ ID NO: 266791 - protein, 46 aa, Zea mays
  unsure (1)..(46): unsure at all Xaa locations
  Clone ID: MRT4577_174914C.1.pep
GFPLQFTXLTMXSEIRIECKAYGENIGYSEKDRFQGRFDVKIEVKS

SEQ ID NO: 266792 - protein, 49 aa, Zea mays
  Clone ID: MRT4577_174915C.1.pep
FHYAVDCCAFTDRQEYSRREVWCRPCSPMASDCRLRPQVIVLGFLWHMS

SEQ ID NO: 266793 - protein, 151 aa, Zea mays
  Clone ID: MRT4577_174916C.1.pep
ARRETLGAPLQQIRDSEEPLSHGGLELGDTRALGSTSPPQRSPTRRCRMRARLLGSRHSASARAQPSRSVVHPRRPSPRGGEGQEGVGNLWRRREAKWRSCGSWQRHWVLPPSPLGRAAGVGGGEARRRWWRRRAVRCGSDGNLGLRCVRP

SEQ ID NO: 266794 - protein, 75 aa, Zea mays
  unsure (1)..(75): unsure at all Xaa locations
  Clone ID: MRT4577_174917C.1.pep
TPGRPTRPAAEQAQXRFTKHHQNGERRNCARSATPPPNQHPPAPATRGMTPDPHQHNKEPNPNSTYEPQHITAST

SEQ ID NO: 266795 - protein, 64 aa, Zea mays
  Clone ID: MRT4577_174918C.1.pep
LRCHCALGRRPHIWTSFSLRNLASRGIMLRFRSSLQLFCDAHRMLCCPTLHVDRHLQGPVASRI

SEQ ID NO: 266796 - protein, 89 aa, Zea mays
  Clone ID: MRT4577_174919C.1.pep
MVSIKSRTCSCRPEGAQAQILQLRLLSCTRRGFGQVVSLTLVEHSLLTTVFVIITEFIINYRMDSSVPTILKRGCNEEDAEQRKKFPHA

SEQ ID NO: 266797 - protein, 82 aa, Zea mays
  Clone ID: MRT4577_17491C.1.pep
DLEPVFQFPYDLQLYQVFADGKKGGLIVGNVFILPEGFKLAPPDRIFPELKEKIGNLYRTLLSQSRKYLVSHLPSTIDLSSL

SEQ ID NO: 266798 - protein, 271 aa, Zea mays
  Clone ID: MRT4577_174920C.1.pep
KARNFATFRLFPRAGAADPNDRVFVRVDNNDYTVPGFADEDSFDPSRSDPSAGNGNFGSASGPLPEHVRREILELGLPDDGYNYLSHLRELRPAAAAASSFVPSSTGRPEPLPLDVKAYDASRVRIGLSEGELDEGKTMCKVAAKTAPVRRIEKAVDPDIARLLDESDVSHVGSEDEGLEEDFVIIANQAEEEEEDEDGDMEEKQEWNGVFSDVEEEEFDFEEDEPKPRVRRLLDEQFDLESPERGSLGFSLEKQLQQMASSSFMGKRNCQ

SEQ ID NO: 266799 - protein, 229 aa, Zea mays
  Clone ID: MRT4577_174921C.1.pep
MGARGGGGGGGGGRKARNFATFRLFPRAGAADPNDRVFVRVDNNDYTVPGFADEDSFDPSRSDPSAGNGNFGSASGPLPEHVRREILELGLPDDGYNYLSHLRELRPAAAAASSFVPSSTGRPEPLPLDVKAYDASRVRIGLSEGELDEGKTMCKVAAKTAPVRRIEKAVDPDIARLLDESDVSHVGSEDEGLEEDFVIIANQAEEEEEDEDEGGWRHRRKARVEWCLQ

SEQ ID NO: 266800 - protein, 93 aa, Zea mays
  Clone ID: MRT4577_174922C.1.pep
GLGLSLVLSSPLQLWGIPLWVRAFIGICPAQLYVLSKRDLPSYVFGRLQQPVGSARSDQSCWGPSSSQQWGFQICCSEYDFKSLTRFAAANMV

SEQ ID NO: 266801 - protein, 54 aa, Zea mays
  Clone ID: MRT4577_174923C.1.pep
EVGFQRRSKMRIACVGFSMDIESSCIDVFIGTPPTRLKFPKTKEMKGGRKLVGS

SEQ ID NO: 266802 - protein, 105 aa, Zea mays
  Clone ID: MRT4577_174924C.1.pep
PQVSRGREFFRSGPDSLAAVGVVFSLGEPFHISVGGARAPPFPPVEEPPAPSPKLVPGQGGFGPPPRGGPPPWGSPPIWGSRGSPPAVFPPRWGPPPGRLNAGGF

SEQ ID NO: 266803 - protein, 93 aa, Zea mays
  Clone ID: MRT4577_174925C.1.pep
HRSRYNIQKEYTLHLVLRLRGGMQILVKTLTGKTITLEVEPSDTIENVKAKIQDKEGTPMHQQRLIFAGKQLEDGRTLSDYNIQKESTLNLVL

SEQ ID NO: 266804 - protein, 76 aa, Zea mays
  unsure (1)..(76): unsure at all Xaa locations
  Clone ID: MRT4577_174926C.1.pep
KNTKKKTNNRKKKIKTTNKQNKEXRQKXKKRKKKKHYQKSTHKKENDTRTTCKTKKGESQQKRNDNYHIKINQRFK

SEQ ID NO: 266805 - protein, 160 aa, Zea mays
  unsure (1)..(160): unsure at all Xaa locations
  Clone ID: MRT4577_174927C.1.pep
MAPLKLNGMPVXPTMVRVATVLNEKGLECEIEPDYLTTGAHTQTDFLTLNPFSHTPXLADRDETLLEARAINRYIGKVLDVYEAHLDRNKYLTVDEVTLACSNHAYYLLYLSKTRKAGLVDARPHVKAWWEAIDDRPAFQKTVDHIRYVPVVLLVGWTST

SEQ ID NO: 266806 - protein, 80 aa, Zea mays
  Clone ID: MRT4577_174928C.1.pep
TKHSKGREPSLHRNWIFMYVRSNSYTIIRIPGHHHALIRRQEDMDAPSRLICQQIAKAPEAGGRMGMPVNMLNLGPRNTW

SEQ ID NO: 266807 - protein, 64 aa, Zea mays
  Clone ID: MRT4577_174929C.1.pep
LLVWERQNHSIIPLTKHIISVLRTLQMRITSQKTFNYRPLLGHNSTRGPSCRQLIFWQTLTHFK

SEQ ID NO: 266808 - protein, 108 aa, Zea mays
  unsure (1)..(108): unsure at all Xaa locations
  Clone ID: MRT4577_17492C.1.pep
PLSLFMMLMRVASSLLLYDIAGTPHVPGDIYHINCIGLVKGIMEDDQIWEALEGSHRLIICDGGPMKPRMTRDDXYNINAVHNKGLLTVIPKHCHNALDNMIKNPANS

SEQ ID NO: 266809 - protein, 74 aa, Zea mays
  Clone ID: MRT4577_174930C.1.pep
QEPGRKPSQPTISANIRDRNIKSKKSGRIKQGQKQIKCTGVLSRGAKRKTSLATNLKNIKKERKKAAAELRPRE

SEQ ID NO: 266810 - protein, 83 aa, Zea mays
  Clone ID: MRT4577_174931C.1.pep
GKNSRTPEEKKVHGFYAYLVLCTMQSKMKLQVLFLPATRRHVRGAQNTRTPSLLRSIYKVIILITRRWCRMFRQPQPWQSRTR

SEQ ID NO: 266811 - protein, 83 aa, Zea mays
  Clone ID: MRT4577_174932C.1.pep
SSRASGVVSVWLSSSLSFSALELRETDQKPTVIIVGPTPCVCLRRRRCLPTQVPRKRGAGKSSPTASLGYMHTPRLCPGVVVG

SEQ ID NO: 266812 - protein, 184 aa, Zea mays
  Clone ID: MRT4577_174933C.1.pep
VAAAFQVFNGISPFVKFSHFTANQAIQEAFEREERVHIIDLDIMQGLQWPGLFHILASRPGGPPRVRLTGLGASMEALEATGKRLSDFADTLGLPFEFCAVAEKAGNVDPEKLGVTRREAVAVHWLHHSLYDVTGSDSNTLWLIHYYSALFDSLDASYGEDSPERHVVEQQLLSREIRNVLAVG

SEQ ID NO: 266813 - protein, 58 aa, Zea mays
  Clone ID: MRT4577_174934C.1.pep
GQPGPYFRINTRYMFSEAKRPPLGPVGVGRRRRRRRRADSSLLRERAGSRSPGRDVRG

SEQ ID NO: 266814 - protein, 147 aa, Zea mays
  Clone ID: MRT4577_174935C.1.pep
PKVVTMVEQNLRQSGSFLARFVDAIHYYWALFDSLDASYGEDSPERHVVEQQLLAREIRNVLAVGGPARAGAGGARFGSWREELARSGFRAASLAGGAAAQASLLLGMFPSDGYTLVEEKGALRLGWKDLCLLTASAWRPVQTPPCR

SEQ ID NO: 266815 - protein, 91 aa, Zea mays
  Clone ID: MRT4577_174936C.1.pep
MSLWLGAPVPDIPPDSAVELWKPGAQDASSQAQGGSSCILREEARMPHSAGGTAGVGLEAAEPTALFTRAEPPSEPTEIRPQKRKKGARPP

SEQ ID NO: 266816 - protein, 125 aa, Zea mays
  Clone ID: MRT4577_174937C.1.pep
GGQMISLLIDKRFSTQDRGDYNGALGEQFLYGSKAGQGVRHQRGNPLVKKLFSGGAACSRPPVEKTPPQQKWDPLTPLYFLFQGLTQLDLTAGNPCLQNLGPKALFLHSWGPRDASFYSSNDGRV

SEQ ID NO: 266817 - protein, 69 aa, Zea mays
  unsure (1)..(69): unsure at all Xaa locations
  Clone ID: MRT4577_174938C.1.pep
TSTTYFRHPTEPXTEIFLRGFLASQTQKQPLLSSPKEKEVLEVLHPLTSMGAFHWSVHKVSVLEXCRXM

SEQ ID NO: 266818 - protein, 414 aa, Zea mays
  Clone ID: MRT4577_174939C.1.pep
EEPDPVPQSPKVPTAEETAAASAAAAKERKEVQRRKQRDEEGLHLLTLLLQCAEAVNADNLDDAHQTLLEIAELATPFGTSTQRVAAYFAEAMSARVVSSCLGLYAPLPPGSPAAARLHGRVAAAFQVFNGISPFVKFSHFTANQAIQEAFEREERVHIIDLDIMQGLQWPGLFHILASRPGGPPRVRLTGLGASMEALEATGKRLSDFADTLGLPFEFCAVDEKVGNVDPQKLGVTRREAVAVHWLHHSLYDVTGSDSNTLRLIQRLAPKVVTMVEQDLSQSGSFLARFVDAIHYYSALFDSLDASYGEDSPERHVVEQQLLAREIRNVLAVGGPARTGDGKFGSWREKLAQSGFRAASLAGSAAAQASLLLGMFPSDGYTLVEENGALKLGWKDLCLLTASAWRPIQVPPCR

SEQ ID NO: 266819 - protein, 403 aa, Zea mays
  Clone ID: MRT4577_17493C.1.pep
NALIHAYAESGLYEKARAVFDNMIKTGPLPTVDSVNGMMRALIVDGRLDELYVVVEELQDMNFKISKSTVLLLLDAFAKAGDVFEVMKIYNGMKAAGYLPNMHLYRSMISLLCHHNRFRDVELMIAEMEGAGFKPDLAILNALLNMYTAAGNFDRTTQVYRSRQEAGLEPDEDTYNTLIVMYCRSFRPEEGFTLLNEMGKRGLTPKLQSYKSLLAASAKAELREQADQIFEEMRSKSYQLNRSIYHMMMKIYRNAGNHSKAENLLAVMKEDGIEPTIATMHILMTSYGTAGQPREAENVLNNLKSSSLEVSTLPYSTVFDAYLKNGDYNHGTTKLLEMKRDGVEPDHQVWTCFIRAASLCEQTADAILLLKSLQDCGFDLPIRLLTERTPSLLSEIANYLEEL

SEQ ID NO: 266820 - protein, 138 aa, Zea mays
  Clone ID: MRT4577_174941C.1.pep
TLGLPFEFCAVAEKADNVDPQKLGVTRREAVAVHWLHHSLYDVTGSDSNTLWLIQRLAPKVVTMVEQDLSQSGSFLARFVDAIHYYSALFDSLDASYGEDSPERHVVEQQLLAREIRNVLAVGGPARAAGGQLLSQLS

SEQ ID NO: 266821 - protein, 604 aa, Zea mays
  Clone ID: MRT4577_174942C.1.pep
GDLVRCGFTSSEVRAAAPARSSGQDDPVVFRLLRSDWEQLVDELQVRLSKNVEECVDFAPEGGKVVVSATPKGHSDGSHGVELPVALQALEIIDALDYGMAKIADSMMKHILVPAISNIHVSVLVECGPEHTVSVLSVVHSEENKDNRDGSNLYSRIVDVIKFVCKFICMENSKWVQFFAKLTWPRISDLVITHFLSKAVPNEASKLIEFQDVVQSTTEFENKLRSMMFLLPDRKDGKLTQFVDDVEVHFAVRKRSEILVKARNILVQYDYDSPLESGDQGDSVVDLLFQPEKCFTSKSALLVMKLVHGALKDASLSSARVAKEFCFAARDVLLLYRAIVPVQLEKQFDSLSQVAAIVHNDFYHLSQEILGLAFQYRADFPSDLQKQVVFVDLAPIFSQMADAILRRQIQLTVDTISEAIDGAEGFQNTHQPQHYESAKFSIEQVVFILEKIRIMWESILPRSIYRKSMCNVLGSVFSRITRDMLLIDDMAAEETLQLQGLIHLALENLSSLFLSLVENNDGSTKFLDHDAWIQLDGILPSLKKFRKLAELLDMSLKSITSCWESGDLVRCGFTSSEVQNFIKAIFADSPLRKECLGWIVRTPA

SEQ ID NO: 266822 - protein, 80 aa, Zea mays
  Clone ID: MRT4577_174944C.1.pep
RLTTTRSPRWESSMCACRHVTISRRLCLIDIIYGYIEPEALFTRLCSTVLVSIISSTTHFLWQTNFYETSMLGNCLCQRK

SEQ ID NO: 266823 - protein, 169 aa, Zea mays
  unsure (1)..(169): unsure at all Xaa locations
  Clone ID: MRT4577_174945C.1.pep
MAASSATALAAALFEALDTDGDGKVSASELRGSAAAVALDEEEAAXVLAAAGADGDGLLGRDEFLRMACEAAAADQADADVRRRCLRAAFGMFADGQGQQGAAGTKEQEREQRITPASLQRMLGRLQVGAEQLPVGLDECRAMICRFDLDGDGVISFEEFRVMMHDGLM

SEQ ID NO: 266824 - protein, 133 aa, Zea mays
  Clone ID: MRT4577_174946C.1.pep
NSRSSTGSSTRSSTRPQTSFFIYSRAHGNAIYTRRVVLVALSLLALSASATSTHTSCGCGCQPPPTVHLPPSVHLPPSDHLPPAVHLPPPVHLPTPVHLPPAVHVPPAVHLPAPPCYYPTQPALPQTHPQTHP

SEQ ID NO: 266825 - protein, 158 aa, Zea mays
  unsure (1)..(158): unsure at all Xaa locations
  Clone ID: MRT4577_174947C.1.pep
MGTIDLWIDEPLVQAHCPYPWLLDKLGGLSAPKPSTKTYKSKEILSQYLIFSNKLKIATTYTEVLFILXMQRLVLADSQVATDKIYPDALMYVLHIPDTNENYXLLTHTXGPFRLIPIREXDAKSQATPRVLSAHHWARTPMPYXLNTYXDARTIRLP

SEQ ID NO: 266826 - protein, 235 aa, Zea mays
  Clone ID: MRT4577_174948C.1.pep
LRFLLGLPDTRAQVGYRAQKSPFEWSQLEDANLQTKSMPSDKGTASESTTPNFAMGSMDGNISASSSPEELLEQALQYLGTGCRDQAIPLIRTAVERNPDLYTALIGMGQTLFSNRLFPEAAVCFEHAIPKIQEDDPLLVLAYFGAGLSNKRQGDNETAIKLLERLAELKEPEKPINKSRYFQGMLALASILYREGRNSEAAKYLRMAIAYDPSVERLLKECEEGMDDQPKPEEK

SEQ ID NO: 266827 - protein, 71 aa, Zea mays
  Clone ID: MRT4577_174949C.1.pep
AFTTHEEPKNSRASRFIRSVGFPHSYERLMPCQPAGGKPGLICDSWQWWPRYLLDKDALEHRILRAFTWDT

SEQ ID NO: 266828 - protein, 108 aa, Zea mays
  unsure (1)..(108): unsure at all Xaa locations
  Clone ID: MRT4577_17494C.1.pep
MAKHSGLIWATAKDLARKRPVAMSLYSQILRALNXPHLPIGHTVPLAKKAECRAIFIFAPEERSLHNTRHLVKTARHTLGLLSRGRLPVERNKESICKIWFWCVPMNR

SEQ ID NO: 266829 - protein, 53 aa, Zea mays
  Clone ID: MRT4577_174950C.1.pep
DGHPPKEHLVIEACKLYIYRTLRVSGNPLVYSSSLQISIYNTVSSLLTACRLS

SEQ ID NO: 266830 - protein, 70 aa, Zea mays
  Clone ID: MRT4577_174951C.1.pep
ARSRSPSAQTPAASPPSLLLRRLFDETRRDEAKQLQQTQLSMNRHSNRLSPSRRSSLTQLATTKPKPRTR

SEQ ID NO: 266831 - protein, 117 aa, Zea mays
  unsure (1)..(117): unsure at all Xaa locations
  Clone ID: MRT4577_174952C.1.pep
REKKKKKKKLSDXPTPXLVIYPRSKRLXLFHFXSPLAAAAFPHKTLSXRRXRNGPXVDSRPQRQGXGGVXXVQVPXTHHRKXXPARLGGPSXXRRAQXGTLKXRXXPTXXPRPGPXA

SEQ ID NO: 266832 - protein, 140 aa, Zea mays
  unsure (1)..(140): unsure at all Xaa locations
  Clone ID: MRT4577_174953C.1.pep
KTQTPYGTPGTFFFRGNQRGKGGHFIRPLPPPWAFTPXKKKNPPPAPFFPXKPKIENPPPPKPFKNGVIKGFGTPPPPXASADPPPPPPNPXLLSSGRGVLGKPPPPPVISLXNKGPGGPHWPRPLINLXPFWGGGGPPP

SEQ ID NO: 266833 - protein, 49 aa, Zea mays
  Clone ID: MRT4577_174954C.1.pep
EKKKKNKQNYLKKKNKKKKRRIKKKKKKKKKKKKKKNKKKRPPLLKDQI

SEQ ID NO: 266834 - protein, 106 aa, Zea mays
  Clone ID: MRT4577_174955C.1.pep
RTPLLAEATSVPPGSSGWSASMISRDDTDTMRQLWRRRSSAGGSTSSSNMSQFDVRTVAVDRRDRRLRLGLIALDLDGRHASYLIYIHAGHRPARWASAWTTSEEV

SEQ ID NO: 266835 - protein, 39 aa, Zea mays
  Clone ID: MRT4577_174956C.1.pep
SRPKVHVLIDDVVMYRQEFPRQAVDEQRPVGFHHELYIV

SEQ ID NO: 266836 - protein, 91 aa, Zea mays
  Clone ID: MRT4577_174957C.1.pep
DTQDSSFFFPPLSTPQQDFFLLGGTSGGGFLQLFFGQPVKGNQLLPVSLVEKKNPLGANKQTAFSRGLGGFFFKLAGQVFFLVKGRLGPPH

SEQ ID NO: 266837 - protein, 65 aa, Zea mays
  Clone ID: MRT4577_174958C.1.pep
SYLCVYQSKRTRLVASILREQASGLYGRLILIPPDHIWALVIECQHQELVQDTRLIDGDETEDPP

SEQ ID NO: 266838 - protein, 181 aa, Zea mays
  unsure (1)..(181): unsure at all Xaa locations
  Clone ID: MRT4577_174959C.1.pep
KPESKYFMTRNSSTIIAFAVGGQYVPGNGFSLIGAHTDSPCLRVKRRSRRSQVGFQQVGVETYGGGIWSTWFDRDLTLAGRVIVKCPTSGRLEQQLVHVERPILRIPHLAIHLQRNINENFGPNTEMHLVPILATAIQEELEKGTPEPGPLNAVDERHHSVLMSLLCAHLGLSPXDIVEME

SEQ ID NO: 266839 - protein, 228 aa, Zea mays
  unsure (1)..(228): unsure at all Xaa locations
  Clone ID: MRT4577_17495C.1.pep
GESTTAGPLQECASRSPPSRPPPPPLPTPPPPPPPPPPPPPXPPPPPPPPPPPPPPPPPPPPPPPPPPPPPPPPPPPPPPPPPPPPPPPPPPHPPPPPPPPPPPPPPPXPPPPPPPPPPPPPPPPPPPXPPPPPRPPPPPPPPPPPPPPAPPPPPPRPPPPPPPPPPPTPPPPPPPPPPPPPPAPPPPPPPPPPPPPPPSPPPPPPPPPPPPPPPPPPPPPPPPPHPP

SEQ ID NO: 266840 - protein, 50 aa, Zea mays
  Clone ID: MRT4577_174960C.1.pep
KGHPPPQERIKDRYATAQKKKQKKKKKKKKKKKKRIKKKIKNKQKKKKKK

SEQ ID NO: 266841 - protein, 61 aa, Zea mays
  Clone ID: MRT4577_174961C.1.pep
PSRARARIGSDGGGRIGMQAAKAAEGSDGMQGGAKNEPYMNTDDMSYMYEFETENGQWKHH

SEQ ID NO: 266842 - protein, 182 aa, Zea mays
  Clone ID: MRT4577_174962C.1.pep
LDLFDALAVLDLGREPMDLLRMKLLLPSLISCLLLMQAALCDGAAATTTTTGENGTANWTCVCAAHPLGEPDSNSSLLSNCSSSCHCHRDENGGGGGGGAGSWNCTCASGDEGLQKEEHAELRGRELFHFLQLHVGYWNFRGREKACLKQNSHSYAPGLRGSHHHRFPRHHRILLPAKGRPL

SEQ ID NO: 266843 - protein, 190 aa, Zea mays
  unsure (1)..(190): unsure at all Xaa locations
  Clone ID: MRT4577_174963C.1.pep
MEDARVLAVVFVDGEQSVDLGTVTVQPSFGGVKRLQAVVADRVGAAPHQISASLARPRRARHVPLDDATDLAAAVAREGSGCYVIAGFRRSRRGGRSRRDRKGVNGAAVEKXHPEAPPAHGSGVSGQPSPSPSPRQCRCLARAARALRRLRGAAAGAAAAARLVLDEHRGCGSGSGPRLLALVGGGGASG

SEQ ID NO: 266844 - protein, 293 aa, Zea mays
  Clone ID: MRT4577_174964C.1.pep
MKEAQPTGCGRGEIIGSPRRGHLRHRQRHLLGSTPALCGLREREAPAAATGQDEPPPQTERAGDQCVRSWWRAWKSLAGGKQGFGRMVSLSTWFRYAAQKFEYCVSLSLKKYNDVGRISSTQLTDVLNKNLFQGKLTYVCPTKGEEAMAPIASPTGGAVLVRKLANLSPTQVFVGDVVLLKDPEKSDDLIIRRLAALEGYEMVSNDEKDEPFVLEKDQCWVLADNLALKPKEARDSRLFGPVPMTDILGRVIYSLRTAVDHGLVENSGMAMKQDGPVLAVELDVEEMAKNIKP

SEQ ID NO: 266845 - protein, 92 aa, Zea mays
  Clone ID: MRT4577_174965C.1.pep
IRSCQLPPPLSMVARSSPGFPGPGVFFKVLGVSRRGCRPPPPPPFGGGFNIRSIGVFFAFFPPKKKKKKKKKKKKKKKKKKKKKKKKIPPPP

SEQ ID NO: 266846 - protein, 189 aa, Zea mays
  unsure (1)..(189): unsure at all Xaa locations
  Clone ID: MRT4577_174966C.1.pep
PELYESSKSGRXPRYMAYACCDSRERPSSTLGPAVPCEEVNRFATTLSMVHSYDKSKYAVTGCDIEYSECALRGHAIXPIGHNCCRGIRGLLSLTDXRPITYTSTDDCVTIGYPAHTNVKKELAWEQSDDQXCCILKNDGESVWLHTLQSYXFLLEGLADVTLKLVGGHVRLLLSQHAHXEPPQDRAER

SEQ ID NO: 266847 - protein, 128 aa, Zea mays
  Clone ID: MRT4577_174967C.1.pep
NFLHREVFVGDVVLLKDPEKSGNFVIRRLAALEGYEMVSNDEKDEPFVLEKDQCWVLADNLVLKPKEARDSRLFGPVPMTDILGRVIYSLRTAVDHGLVENSGMATKLDGPVLAVELDVEELAKNNKA

SEQ ID NO: 266848 - protein, 145 aa, Zea mays
  unsure (1)..(145): unsure at all Xaa locations
  Clone ID: MRT4577_174968C.1.pep
MITKQCHKDDAMVHRSIQRLRPVSNNRIVPTHSLYTRIAFNHSCDCSQKQSAGHRLSYRHTVVYKTINEVAXGNLADNLQQQQWXAFNQLGXVNPILYLQAQHLLPFNQLEKSAYVLLLQQQLLPFHLQAVANIVAFLRQQHLLP

SEQ ID NO: 266849 - protein, 307 aa, Zea mays
  Clone ID: MRT4577_174969C.1.pep
MAGRLAGRGGRPLLGGSGGGGKRGGRPSMAVVAALLLACAALLLLLALGALSLPGASDGSGGRGAGLSLSRPRSRFRRSAFDSGLETRGEKGEPWTEVLSWEPRAFVYHNFLSKEECDHLISLAKPHMKKSTVVDSATGGSKDSRVRTSSGMFLRRGQDKIIRTIEKRIADYTFIPVEQGEGLQVLHYEVGQKYEPHFDYFHDDYNTKNGGQRIATLLMYLSDVEDGGETVFPSSTTNSSSSPFYNELSECAKGGLSVKPKMGDALLFWSMKPDGSLDPTSLHGGCPVIKGNKWSSTKWMRVHEYKV

SEQ ID NO: 266850 - protein, 59 aa, Zea mays
  Clone ID: MRT4577_17496C.1.pep
HPPSEGYPPPLVYTSPVPRDAPSGQKVGFFSPKKTCFFKGQTSFSFSKAYKALIFVSHP

SEQ ID NO: 266851 - protein, 96 aa, Zea mays
  Clone ID: MRT4577_174970C.1.pep
YNSSRPWRGPLRPVTSLRPWPSSPKHGLPRPRLFLPPSSHGSPIYSSRLSLALPSGAVEYDHGNPWRRPDTPHNGAFRGHHSSVSRGWPCLGPARS

SEQ ID NO: 266852 - protein, 43 aa, Zea mays
  Clone ID: MRT4577_174971C.1.pep
SPIYTIVIEKTLSLLIPIELKYTFIKSTIISTHTKYQDTHTTH

SEQ ID NO: 266853 - protein, 41 aa, Zea mays
  Clone ID: MRT4577_174973C.1.pep
DPKSGIGSSNSFNKNRNNQTQQQPFFRLVGSATTGRQINGY

SEQ ID NO: 266854 - protein, 139 aa, Zea mays
  Clone ID: MRT4577_174974C.1.pep
LRTSLRGPAARPFLTARPPGTVHARASVRRGTPSPPTLCDVLLSASRARSHVRSSCCGAARATKGTSPLPRTRAGPWRAFVLQRGALVGMRSAMHCSPLLIKDTGPAHNSQCLYRSTTLSVLQASYVRASVDRPYLTTN

SEQ ID NO: 266855 - protein, 153 aa, Zea mays
  Clone ID: MRT4577_174975C.1.pep
GRDPHAHHSKKPDRPRRCLLAKQGRLVPPSVLVSPHASLPLFSAERLSTHPSSPVHGRQRDPSSAHADHHPQCTKPYLKRISKSTTGTTSTLSSMMGLQTPGRSTSMPRSWTPSASAVLSSSEATASTTTSSSTISTSSPPTRSHSPSNQSLG

SEQ ID NO: 266856 - protein, 133 aa, Zea mays
  Clone ID: MRT4577_174976C.1.pep
IICGCSPVQSFILFEGSIVCGTANQQMTAKSPARSARPLSQKKSTARSLIPQANFGGHARQSTLQGYRAKPLLSTASNATKRVAACIGTMCGGRREARIKPTGRAPEDCSVQICVRRRAEEPIADDTAPRSLS

SEQ ID NO: 266857 - protein, 117 aa, Zea mays
  Clone ID: MRT4577_174977C.1.pep
PWGFFFFFFFFFWGFFFFFFFFLGFQGRIYSKKGGAFGKNKWVGPRVGIIYGTRGGKKPIRARGRPKLKKERAGAPSIKWKTGLGKRKSIRFYHWKPIPKKHKAKVEPKKKWAETPL

SEQ ID NO: 266858 - protein, 350 aa, Zea mays
  Clone ID: MRT4577_174978C.1.pep
MATPRKPIKLTLPSHETTIGKFLTHSGTFTDGDLRVNKDGLRIVSRREGGEAPPIEPLDSQLSLDDLDVIKVIGKGSSGNVQLVRHKFTGQFFALKVIQLNIDESIRKQIAKELKINLSTQCQYVVVFYQCFYFNGAISIVLEYMDGGSLADFLKTVKTIPEAYLAAICTQMLKGLIYLHNEKRVIHRDLKPSNILINHRGEVKISDFGVSAIISSSSSQRDTFIGTRNYMAPERIDGKKHGSMSDIWSLGLVILECATGIFPFPPCESFYELLVAVVDQPPPSAPPDQFSPEFCGFISACLQKDANDRSSAQALLDHPFLSMYDDLHVDLASYFTTAGSPLATFNSRQL

SEQ ID NO: 266859 - protein, 84 aa, Zea mays
  Clone ID: MRT4577_174979C.1.pep
SLSPLESFSEFFGGVVDQPPPFAPRDQFSPEFCGFISACLQKDANDRSSAQPLLDHPFLSMYDDLHVDLASYFTTAGSPLAPFK

SEQ ID NO: 266860 - protein, 148 aa, Zea mays
  unsure (1)..(148): unsure at all Xaa locations
  Clone ID: MRT4577_17497C.1.pep
GTFLPSPPPLVSLPPWRPEGGRPRTTPPRERGGPPSPPVPLHLPPPPXALPLSPPPFPTPSPPSTRWARGGRHPHPPVXGSPXYPPPAPPXGPAPDPVPVPGPGPGRAPAPGAPPNKPGGGGAGIKAVLASIATGGLIWAIPAPGRGP

SEQ ID NO: 266861 - protein, 92 aa, Zea mays
  Clone ID: MRT4577_174980C.1.pep
AHGARGVAAAVVDGMRDMPATAAVHDGDASSGGGERHRRGHHQRQQRRNCSYRWSCRRELFIADRCRTGALRLTAAQGGAPPGCTQASAEVW

SEQ ID NO: 266862 - protein, 87 aa, Zea mays
  Clone ID: MRT4577_174981C.1.pep
METMAARYGGGEIRDLQSKQEAGGGCGSYFQMPLHYPRHSREDYEAMPEWQLDRLLSEYGLPVAGTVHQKRTFAMGTFLWGAGGNIH

SEQ ID NO: 266863 - protein, 71 aa, Zea mays
  Clone ID: MRT4577_174982C.1.pep
YRRGTGSRKLFRLRTWGNIKQTSLDELVTLRMPICGHFRPNKKHGPHYTDNAQRKPAHPCLFCWADLVTTR

SEQ ID NO: 266864 - protein, 135 aa, Zea mays
  Clone ID: MRT4577_174983C.1.pep
MASRDERLPGTRSEQGTRRAEPSQGHDSREAGDQGKGSVEPGRDSLGEKSTRQRVLEAVLQLNGGHQRSGIQQPGDKAELRPDERSKGHGEQRREARSWEGAELGPSHGRGTRREEDRGWGRSSMAWRRRGRATA

SEQ ID NO: 266865 - protein, 76 aa, Zea mays
  Clone ID: MRT4577_174984C.1.pep
RTSLARHETSCPLGSEVARSAVHRPPSLRRGFVGSTTPGKHPYLCSWQPTTCRLSRALVQCRITTPSRPMDRLYEV

SEQ ID NO: 266866 - protein, 82 aa, Zea mays
  unsure (1)..(82): unsure at all Xaa locations
  Clone ID: MRT4577_174985C.1.pep
LSLLGLQVIIVPHIDKRLSGSVNLPHIPISKRTCACLADAHHDEEAXEKMELDYMNADALKKMNKNKXLAKRLANMYHAFLA

SEQ ID NO: 266867 - protein, 68 aa, Zea mays
  Clone ID: MRT4577_174986C.1.pep
ELSYLTNYRVAMNAWHIIRPMSCDTERHLPSHVVSPDVDYVDTHSGQPSEVMHRTRAVSFLERCTLIL

SEQ ID NO: 266868 - protein, 41 aa, Zea mays
  Clone ID: MRT4577_174987C.1.pep
RVRLPRLPVTVTVLELAVTVTPLGTTTCWVVLSTFISHNTG

SEQ ID NO: 266869 - protein, 155 aa, Zea mays
  Clone ID: MRT4577_174988C.1.pep
STSTLDTKPLALQFHRVTVLQALSSVHLVERHRPLLHRALGISPLVHTDATLWSSPSIAPGHQYMFPLRRRSPCCARTSVVSGEHLEKKWCMKKEFTPVPIDPVVESHLTNYRDRKVLDLLCNKVRKQQIFVAFVPRWFQMKKNRSEAVGGHGPP

SEQ ID NO: 266870 - protein, 46 aa, Zea mays
  Clone ID: MRT4577_174989C.1.pep
SITAAAPPFFFLWEESIPLGRGLEEITCDPPHKPLAEKGTEAEPGY

SEQ ID NO: 266871 - protein, 164 aa, Zea mays
  unsure (1)..(164): unsure at all Xaa locations
  Clone ID: MRT4577_17498C.1.pep
MTRSPLALALLLLCAAGAAAAVPRYREAPHFTNSAAAQCPPPLQPSDADVACSPHAAVHVAMTLDASYLRGTMAAVLSVLRHASCPESIHFHFIASASSGSTATAEALRATVRASFPSLAFRVYPFADEARVAGLISTSIRGALDXPLNYARSYLSFTLAACVR

SEQ ID NO: 266872 - protein, 524 aa, Zea mays
  Clone ID: MRT4577_174990C.1.pep
MEKLLEIVLVVSTILLGLALVYLYEILWLRLEKIRKKLRRQGINGPKPTFLYGNTQEMKRIRQELKFVQRQDKDMNGYISTIFPHFLFWRKTYGPVFLYSTGVLEILHVAQPEMVKDMGHWTPSELGKPQHIMKSRKPLFGLGILAANGDLWAYEKKILAPQFFVEKIKGMIGLIVDATIPLLQSWENMLDGTGGSKEIYVDGYLRNFSADVIARACFGSNFVEGKDIFCKLRQLQKLISEQDTLVGLSAVWKYLPTKRNREIQKLDQEVRSLILDLSREDRSRSRSNNAGTHVSTYDNLLHAIVATRPQSPSYCSAPEDFIVDNCKNIYFAGHETTAVTATWCLMLLAAHPDWQDRARAEIREVCCGQTAMDIDVLRQLKILTMVIQETLRLYPPASLIMREALTGIRLGGVDVPRGTIIQVAISLLHLDMEAWGPDANEFRPDRFANGAAAACKPAHMYMPFGYGPRLCTGQNLAMAELKVVLARLLSKFSFSVSPGYQHSPVFRLTIEPESGMPLVVTRLA

SEQ ID NO: 266873 - protein, 93 aa, Zea mays
  Clone ID: MRT4577_174991C.1.pep
CPTSSTRTATPQSTFCLTTPSTYAWGLPTSSASTRDCWSNTDYPNSLRLSFKSDTPFITWEHITLTAYYHQHLCLPSTTWILQAYSERCAARN

SEQ ID NO: 266874 - protein, 45 aa, Zea mays
  Clone ID: MRT4577_174992C.1.pep
LLRGASFFQYTFILKDSGTDVFLSTPHGFKMAPSLENSKRKILKR

SEQ ID NO: 266875 - protein, 88 aa, Zea mays
  Clone ID: MRT4577_174993C.1.pep
GAGFFFWGTLPLGFPPRFIWKKTTFFKKCPINRNPTYRSPHNKRVSLAGPPRDHLPINPLSAWGEPHLTPGHAYMHACMGHSFQGAFF

SEQ ID NO: 266876 - protein, 98 aa, Zea mays
  Clone ID: MRT4577_174994C.1.pep
MAKAPLLPLSLLVHVVLAASFPAPCTAQGRTENISAVEAAVCNGPWPPTGEPPRRELAAAASFQRKIVCGAREAYNSICMIRITDAVEIDIYSFGSTL

SEQ ID NO: 266877 - protein, 68 aa, Zea mays
  Clone ID: MRT4577_174995C.1.pep
EQLLLGIVRTSFLHTLDMMNINSARRLTMYTVHVPKRWARTMRLQEHRQQKNFLPPHHTRTSYCVTKG

SEQ ID NO: 266878 - protein, 408 aa, Zea mays
  unsure (1)..(408): unsure at all Xaa locations
  Clone ID: MRT4577_174996C.1.pep
MGAQQSVNAXXKAKVDMKVDLTHMLCEALLLPPLRSSGVTLSQIVGRISLKHPNLFGRSEKLDVILDKGINDSNFVIAYRRPRAEWLSQQSFXSGCHCTVYPGYSSTFLXVKLKHWKPIIVDNLLIEFTFFSSRSYGLSNQHSMTPEVAVHGFPADNFTRSGSRGINLSRLSFGLELNEPATSNWTSGTSVKFEAIRKLNNQCHSIARGYTGSSLTCSGNLHDNMIILKQESGYADVNDNSFLKVNFQMEQGLPLVPKSLTFNRVKCAVSKGIKLGPTFLVTSLTGGSIVGDMAPYQAFAIGGLGSVRGYGEGAVGSGRLCLIANCEYTIPLVKHLEGSIFMDCGSDLGSARHVPGNPALRQGKPGFGIGFGYGLHFNTDLGQIRVDYAMNAFNRKTIYFGINSSGGS

SEQ ID NO: 266879 - protein, 27 aa, Zea mays
  Clone ID: MRT4577_174997C.1.pep
LGNDYSTSVGVALLTIFHQSSLKFCGV

SEQ ID NO: 266880 - protein, 64 aa, Zea mays
  Clone ID: MRT4577_174998C.1.pep
PDTVQQSESTTNDLPCIPIAYKDQEFHRAHCQRDHTAQASTKLVLEQTVLTPIQISQGRVVTSG

SEQ ID NO: 266881 - protein, 60 aa, Zea mays
  Clone ID: MRT4577_174999C.1.pep
KIHGGLKKASNVMGSNPGPSMNTGGTPTLFIYDIITPSHAGDPHTYIYVWKYICIGQGQS

SEQ ID NO: 266882 - protein, 51 aa, Zea mays
  unsure (1)..(51): unsure at all Xaa locations
  Clone ID: MRT4577_17499C.1.pep
LMETANRXSGHIDPRFNTSFGTKNVTIXRKRRXRSHLSGTLHKGHASNFRR

SEQ ID NO: 266883 - protein, 63 aa, Zea mays
  Clone ID: MRT4577_1749C.1.pep
DVSPYSSWQRRHGPYNIRVCSKIHSVSEVTFSHIGRVSSSRCMSSLHHTFYVLSIEFLLYLRT

SEQ ID NO: 266884 - protein, 138 aa, Zea mays
  Clone ID: MRT4577_174C.1.pep
MKDVYTATPHAMHLVSTSQDAGCELDCLKHAMQDEAQMPRDKTIGGGDDAFNTFFSETGAGKHVPRAVFADLEPTAIDDATTGTYRQLFHPEQLIIGKEDAANNFARDHYTIVNEIDDLCLDRIMNLGDNCTGLQGFL

SEQ ID NO: 266885 - protein, 143 aa, Zea mays
  unsure (1)..(143): unsure at all Xaa locations
  Clone ID: MRT4577_175000C.1.pep
GDHVGGGPRYMRGAVLGEPGRPLTLEEFRMPWAKAGELLIKTCGXCDSGXNVLKRKLTFSTHSAFGHEITRKGGDHGTDTPNESINRIPNGSHAVGALIMPCGNGLYCAKGQTIXLAHVFSAYNRAKGTLLDGEARMPLKGKG

SEQ ID NO: 266886 - protein, 238 aa, Zea mays
  unsure (1)..(238): unsure at all Xaa locations
  Clone ID: MRT4577_175001C.1.pep
NIIKHFEVLLWVHVSREFAVEKLVEKLFEAIAGDMSDHLPLQHVSRTISDKLXEAVDSSYAYDLPFLSKEDSWKVFQQCFGIAMKALDPEFXQQCFGMKGIEEWQSICNSNLLDVQDDEHRVFACLWLSFVHLPDHLKPCFLHCSIFPRGYVINRCHLISQWIAHGFVPTNQARQAEDVGIGYFDSLLKVGFLQDHDRDQIWSTSLVHDLARQILRDEFEYEIETNKQIKRCRYLSLT

SEQ ID NO: 266887 - protein, 96 aa, Zea mays
  Clone ID: MRT4577_175002C.1.pep
NKILEEQGADRIPHIKTDRHDRSWNHKDTTAAGTISFVNPLTCVNIFWCSRASSGSILQAFVLDGVGVQKTLCLLNYQKQPQLYIAAKSQVYIKSP

SEQ ID NO: 266888 - protein, 34 aa, Zea mays
  Clone ID: MRT4577_175003C.1.pep
EWPPGKEKKKKKKKKKKKKKKKKKKKKKKKKKAC

SEQ ID NO: 266889 - protein, 366 aa, Zea mays
  unsure (1)..(366): unsure at all Xaa locations
  Clone ID: MRT4577_175004C.1.pep
IRHEDVSREFAVEKLVEKLFEAIAGDMSDHLPLQHVSRTISDKLVGKRFLAVLDDVWTEDRVEWERFMVHLKSGAPGSSILLTTRSRKVAEAVDSSYAYDLPFLSKEDSWKVFQQCFGIALKALDPEFLQTGKEIVEKCGGVPLAIKVIAGVLHGIKGIEEWRYICNKYLLDVQDDEHRVFACLLLSFVHLPDHLKPCFLHCSXFPRGYVINRRHLISQWIAHGFVPTNQARQAEDVGIGYFDSLLKVGFLQIWSTRGEVKCKMHDLVHDLARQILRDEFVSEIETNKQIKRCRYLSLTSCTGKLDNKLCGKVRALYVCGRELEFGKTMNKQCCVRTIILKYITADSLPLFVSKFEYMGYLEISDE

SEQ ID NO: 266890 - protein, 202 aa, Zea mays
  Clone ID: MRT4577_175005C.1.pep
MAGSGSGSPPCASCKLLRRRCTQECVFAPYFPPDDPHKFAIVHKVFGASNVSKMLQELPAQQRADAVSSLVYEANARMRDPVYGCVGAISYLQQQVSQLQVQLALAKAEILCVQMQHDESAAASAAPAPAKQQQLYHHHQQQQTMECEAYGSLLVQNGLMMNTLGSAGAAHQQQQMLGGFGSAGNTAMALQEACLKKETLWA

SEQ ID NO: 266891 - protein, 84 aa, Zea mays
  unsure (1)..(84): unsure at all Xaa locations
  Clone ID: MRT4577_175006C.1.pep
YEPEWCTLKYAAGTDITFCXKEDPCTTCAAAVVLTVDTLXTVHEESTRCRLQLPYITGCLALREAPLLLGLLEKAKINAPHFCP

SEQ ID NO: 266892 - protein, 59 aa, Zea mays
  Clone ID: MRT4577_175007C.1.pep
LGAAPFFFFSILNAKLVNPAVHHSSRLSPDGGKKKGGFQCSAPTPTPKFPYHSRQSRRS

SEQ ID NO: 266893 - protein, 113 aa, Zea mays
  Clone ID: MRT4577_175008C.1.pep
ITGQFYHNFLPRFRARGGVKKLFHTNFCFLGCRPKPWFYKRERASGGMPPSKSPNLLGLEHTSKKAVVGPQVYGFPVFRPHQGFFFCLCKGNWFFFQANSKTVSGFPAPKKNF

SEQ ID NO: 266894 - protein, 140 aa, Zea mays
  Clone ID: MRT4577_175009C.1.pep
AQTDTVTRARNATRRGDAYRAKSTRLRHRRTHASVKRPRLAFRFGSVPRRRGRPRRATALSAFLSIWLLCVDWRPCELAEAARFMAVAERFGTRWPPSRFFVAVLLVLLTGDPCNLLLCVSLLTIPPPPPSPVCVVPYEI

SEQ ID NO: 266895 - protein, 76 aa, Zea mays
  Clone ID: MRT4577_17500C.1.pep
ETGSTQLRAGNFHVWGQRNKGKIWDGVPICRVKKNLISQSHYRGATRPGPPQHPGDHRNPPNKCRIIWPLNPPCRN

SEQ ID NO: 266896 - protein, 48 aa, Zea mays
  Clone ID: MRT4577_175010C.1.pep
APFASLHHDLEALNHNSTHRIFAPLALQPSAMTNCVNQRLLSDYVELL

SEQ ID NO: 266897 - protein, 247 aa, Zea mays
  unsure (1)..(247): unsure at all Xaa locations
  Clone ID: MRT4577_175011C.1.pep
MPLLDVACTCSTGYGIPDHLPRPVVAPSDPQACPPPRPCSARPAPPPAAAAXHPPPPPPQARTRRRDXDSGRPNGQTAAPSLPQLQEEEEAPEKLAHVKYNLRDTQGMFPLVVYGFQHYIGLVVSMILFPLLLVPAMDGSTDIMAAVVSTMLLVTGVTTLLHMFVGTRLXPLVQGPSFVYLAPALAIINSQEFFGINDNNSKHIMKHLQGAIIIGGAFQVFLGYRGLMSLFLRLINPVAMSSTCCCL

SEQ ID NO: 266898 - protein, 71 aa, Zea mays
  Clone ID: MRT4577_175012C.1.pep
MVILFNCIQSNQTRALIALGQAYTGYAQLACGLKTSLSASNTQTHCITAEMRHRWVKKHVSVFRQLVDAAL

SEQ ID NO: 266899 - protein, 75 aa, Zea mays
  Clone ID: MRT4577_175013C.1.pep
ERVLKSMLPCLDVQLLSFDMSVIIIIAVAVCSCSVCFTCRYGVGNWRDILDNNAEALAGRTPVDLKDKLRNMLFL

SEQ ID NO: 266900 - protein, 73 aa, Zea mays
  Clone ID: MRT4577_175014C.1.pep
PFLPVVRLPPVAVSCVPVRLPSVFWWPLCRAVPLGTACARRSPSVCGPPCALAVRWWGLCAVLVLGTPASPSR

SEQ ID NO: 266901 - protein, 86 aa, Zea mays
  unsure (1)..(86): unsure at all Xaa locations
  Clone ID: MRT4577_175015C.1.pep
SRRRLAAAAPHRPRPCDRVVVLRLRSVSELRGIKDRALATKRSSFLRSTTLNTLSICLVKVAFGVIYAXVKKKSSRRIXKNSKTST

SEQ ID NO: 266902 - protein, 226 aa, Zea mays
  Clone ID: MRT4577_175016C.1.pep
PPRVRPRVRPRVRTNKISSLSEYAEPLTSYLKGLGDAEKVILVAHDLGGACISYAMEMFPSRVAKAVFLCAAMLANGNSALDMFQKQMDTNGTLQKAQEFVYSNGKDRPPTAINIDRTSLRDLLFNQSPSKDVSLASVSMRPIPFAPVLEKLVLTAENYGSVRRFYVETTEDNTIPLPLQQSMCGANPPEKVLRLKGADHAPFFSKPQALHKALVEIATMPHVRAS

SEQ ID NO: 266903 - protein, 59 aa, Zea mays
  Clone ID: MRT4577_175017C.1.pep
SIERQICACVNVVTQCQPPLISSETNQNPRRSRRRAGVCAPAGRKRGLKMPIRLPPQVF

SEQ ID NO: 266904 - protein, 96 aa, Zea mays
  Clone ID: MRT4577_175018C.1.pep
SFFQSTFFFFTVLYVYPHVDSVGERELASDSFLRTYPYTLMFWFHLQNRIRRSILCLTPYYSFEFICTVSHNAGDHRCHAKPDRYCRLLLELHNQL

SEQ ID NO: 266905 - protein, 64 aa, Zea mays
  Clone ID: MRT4577_175019C.1.pep
GRLTCHTHLLLHGPAKSAAAWARCARIGKGNKPRVSLPKGNGIKLSIDKEQMRHDFAAHAADKA

SEQ ID NO: 266906 - protein, 68 aa, Zea mays
  unsure (1)..(68): unsure at all Xaa locations
  Clone ID: MRT4577_17501C.1.pep
FARPPPPILPLSRPPYPLPPGPPPHLPLPEPPPTLLPYCPPARPPXAXPPFPRWWPRPRPPPRRARGP

SEQ ID NO: 266907 - protein, 115 aa, Zea mays
  Clone ID: MRT4577_175020C.1.pep
PLSPSRRSALAKVTRHRPAQRLPLLQSSSSVRTSPAAYILARSTLSWFDQMSNQEYARDTRGRSSLALVQLAGSLLFISVSGVPQYCRSILDACRRSVASPRCWLLHDVSNLCLH

SEQ ID NO: 266908 - protein, 87 aa, Zea mays
  Clone ID: MRT4577_175021C.1.pep
VPWSGGQRAVKDSASSSFSCGGAVVVILGPALPYLRLPRGQYARLFPRGLVVAPDRSSPQNFGRACRGAEAQQVTDPPLEMRRGLIP

SEQ ID NO: 266909 - protein, 136 aa, Zea mays
  unsure (1)..(136): unsure at all Xaa locations
  Clone ID: MRT4577_175022C.1.pep
AGAQVDVAAGHCIFELVPRRMYQMYTPLKDLMYTPTXARQSCYTKHTHTTIAKKNKTLLQSKFHSMYHTQMRTYYYLFMPMYNYVYKTMDTSFNQVDETSVRVALETIGLVHLTHMTELESVYQLRIGFASVAMRP

SEQ ID NO: 266910 - protein, 239 aa, Zea mays
  Clone ID: MRT4577_175023C.1.pep
METARKPHFVLVPWIGSISHIVPMTDIGCLLASHGASVAIITTPANASLVQSRVDRVSPRGAVIAVTAIPFPAAEAGLPEGCERLDLITSPAMVPGFFEANKKFGEAVEQYCLQDAPRRPSCIVAGMCHTWTLPMARDLGVPCYIFHGFGAFALLCIEHLYRQGRHEAIASADELVDISVLQPFECKILGGQLPPHFLPSTSMGSGLMQEVREFDMAGDGVVVNSFDELEHGSTALLAE

SEQ ID NO: 266911 - protein, 262 aa, Zea mays
  unsure (1)..(262): unsure at all Xaa locations
  Clone ID: MRT4577_175024C.1.pep
GSERSWSERRACVAMDGAEDDGTEWMMHGAGGKGKGGGALDKNKKRFSDEQTKSLESMFATQAKLEPRQKLQLARELGLQPRQVAIWFQNKRARWKSKQLEREYSALRDDYHALLCSYESLKDEKRALLKQLEKLAEMLHEPPQGKYYGGNADDVRSGGVGGTKEEEESTDACAGAALYSSECAGGXAGSSRTSWRTTTWEQPSSGRRRLRSRPLAYSRRRGRRSTSRSSSTPAAAGRRRRRSRPAAARNGGSWSPSASDVR

SEQ ID NO: 266912 - protein, 280 aa, Zea mays
  unsure (1)..(280): unsure at all Xaa locations
  Clone ID: MRT4577_175025C.1.pep
MLRRAQPQRQLLQTSFIKLRPSANPLHHLHAPFFASYSPARLVTRAYITHHRRHCTTHTPHKNSGLNLWAVAVVAGLAIGGALLVPFVPSSSGAETAKAPRSTKSAAAYDFADSYLVMAPNTPAGRPGTLTPDQEKKLRELWGIVLKIFGVEVGSDQTNGTAAPADEEVLSPTADGKKDKKKSRLHVFKRSKGDKSADDKSSTASEASTPTADLSKLSISAEDDKFGQTAEFKAAIANIPPEELRXTFWSMVKHDHPDAXLLRFLRARKWGREKALVMMI

SEQ ID NO: 266913 - protein, 237 aa, Zea mays
  unsure (1)..(237): unsure at all Xaa locations
  Clone ID: MRT4577_175026C.1.pep
MARFAALAALLLAVAVGGAAAQGVGSVITQSMYASMLPNRDNSLCPARGFYTYDAFIAAANTFPGFGTTGSADDVKRELAAFFGQTSHETTGGTRGAADQFQWGYCFKEEINKATSPPYYGRGPIQLTGQSNYDLAGRAIGKDLVSNPDLVSTDAVVSFRTAMWFWMTAQGNKPQSHDVALGRWXTPTAADTAXGXVAGXYGVITNIINGGXLECGIGQNDAHVDRIGYYMRYCSIL

SEQ ID NO: 266914 - protein, 91 aa, Zea mays
  Clone ID: MRT4577_175027C.1.pep
TPGQQEHRRWVEEGDPVIHNNVIPQRALQEALAERCQDMHQPAPPPSGRAAIARHKTAVKISTPPDSRTCTPIGQGQTLKHSNESQGTEGG

SEQ ID NO: 266915 - protein, 68 aa, Zea mays
  unsure (1)..(68): unsure at all Xaa locations
  Clone ID: MRT4577_175028C.1.pep
SSRALIQHAHDTANTSRFHTSPPAFRIWGXIXTSRPYRSVFAXSLSXHSLFAPSERARRYAGAGLGGG

SEQ ID NO: 266916 - protein, 50 aa, Zea mays
  Clone ID: MRT4577_175029C.1.pep
DRMSHFYYIIGVLYKINNYIIRRQRSINPKLIGRKLSLPLTNLSQHPPRA

SEQ ID NO: 266917 - protein, 318 aa, Zea mays
  Clone ID: MRT4577_17502C.1.pep
MDRYHRVERARNQSTIEENEIRITAQGLIRNYVSYATFLLQERRIKEIVLKAMGQAISKSVAVAEIIKKRAPELHQDTNISSVSITDVWEPIEEGLVPLEMTRHVSMISITLSPRELDKHTPGYQAPAYVEHPRQQQVPPLQRQPRRPSGQQFQQLEYEDSYARGRGRGRGRGRGRGWARGGYGGYGNNQGGYNQGGGYYDNQGGYGGYDDQGGYGGGYGYNQGRYGNYQENGGYNRGRGGGMRGRGNWGYRGGYEGGRGGGYEGGRVGGGYEGGRGGGYEGGRVGGGYEGGRGGGGPGGRGYGGRGRGRMGGGGRAN

SEQ ID NO: 266918 - protein, 138 aa, Zea mays
  Clone ID: MRT4577_175030C.1.pep
MSTMGFFQDTRVVGGGSSRTARFLQYQRLECWEDAGVAPSPRSRWRWPWLPTENGKMAPPCLFNVKRLKWSKITSALILPRKVAELSAKIRHASARTEAAATICPAVVFVSPWGLPVLSRPLLVGHKSRYQYHHGKDT

SEQ ID NO: 266919 - protein, 152 aa, Zea mays
  Clone ID: MRT4577_175031C.1.pep
RENQELELASGPPITGKLRYDEGGTRATDRARAAVLRPAALLKRRAAADRGFLGHSSRLDRAATGQPTRHSLKAGAKGEGVPDLPCRGYLDGSLPGDNGFDRLGAGEDPEILRWCGQAELGNGRGAMLGVDEMLIREVLNKAEVINGAQRYD

SEQ ID NO: 266920 - protein, 175 aa, Zea mays
  unsure (1)..(175): unsure at all Xaa locations
  Clone ID: MRT4577_175032C.1.pep
SSRPGPILSRKTVQADLEERGEREREEVLQKADGXXXXAXRGGKTSARXAASGDPGTGKXSHSGARATEQRPENXPRXRPPTRHHDDDGPERGPTTMXETEPSQEEKPKXDAKRQAAEADAXTNAGDRTATTERRRANRRHEHRRXQKKXPENGAGRKRDPRDEQQESPEQGTAP

SEQ ID NO: 266921 - protein, 110 aa, Zea mays
  unsure (1)..(110): unsure at all Xaa locations
  Clone ID: MRT4577_175033C.1.pep
LLFQPSDEGYGGSYYVLQEGXTDGVIAIFRLHVDPALPVGVGPSRPAPFTATAGQFSATIRRKGGXHASLPHXSLHPVVVAATAITMLXKSIAREVNTLHTAVISITSMK

SEQ ID NO: 266922 - protein, 99 aa, Zea mays
  Clone ID: MRT4577_175034C.1.pep
MASGGPALEPLVDQVISVITNDGRNIVGTLRGFDQATNIILDESHERVYSRKEGVQQLVLGLYIIRGDNISVVGEVDEELDSRLDMSKLRAHPLKPVIH

SEQ ID NO: 266923 - protein, 120 aa, Zea mays
  unsure (1)..(120): unsure at all Xaa locations
  Clone ID: MRT4577_175035C.1.pep
XKKKKKKKKKKKKKKKKKKKKKKKKKKKKKKRGKKKKKKKKKASLAGGALSKGAVFQNLGGPFLGDPGLGPNLGEKRAKPVPWGKLYSVQIPHQKTNPESKKGKPGGAKGGANPTLMGGG

SEQ ID NO: 266924 - protein, 58 aa, Zea mays
  Clone ID: MRT4577_175036C.1.pep
PCSCFHVIGHYSSPTSVYPQSTLQGHIQHSLLSSYMSFQRSFKRIVGSRGLFTNTWRV

SEQ ID NO: 266925 - protein, 59 aa, Zea mays
  Clone ID: MRT4577_175037C.1.pep
VSSTSVSVRRHTVGPSIMWSLISSGDPGAHGAPSMCSYIVKWRLLMSFKRSYKKSDAGL

SEQ ID NO: 266926 - protein, 124 aa, Zea mays
  Clone ID: MRT4577_175038C.1.pep
FFFFFFFFFLLNNSVYFVGTREEAKEEGEKKGDFYIRRDSNRKPNSDSRNCSRNPKGDRNSKETNRRGESTNEEISQTFITVSETKQVKIGSSAFKKPRKQEKTAAMDVDWTHSCDHHRIVPSR

SEQ ID NO: 266927 - protein, 102 aa, Zea mays
  unsure (1)..(102): unsure at all Xaa locations
  Clone ID: MRT4577_175039C.1.pep
NPPHTEGGKATQTTSPQGPPKPTSQGQQDPQXPTPXTRPHDNHRPQRQQRPQQPQHPPGGEAXPQKPQTNHQNQQHPQPPKKRPPPQPHPKQNKPTPTKHTT

SEQ ID NO: 266928 - protein, 35 aa, Zea mays
  Clone ID: MRT4577_17503C.1.pep
LLSYIQINKKLSGSIMEGACNILFHFQTNILILVS

SEQ ID NO: 266929 - protein, 291 aa, Zea mays
  unsure (1)..(291): unsure at all Xaa locations
  Clone ID: MRT4577_175040C.1.pep
NLAIAACWITIAALLQKNGEGQAAPPPPRREVITVEVPEVRLRELNEITASFSGEKLIGQGSYAKVYQATTRSGRLAVVKXLEKPSKHASNDVFLKQLGVASXRLKHDNFVRLLGYTISGDLRVLVYEFATMGTLHDVLHGDRDVXGCRRRSSWAAPPGRCCSWIHRVHIALDAARGLEYLHEMVQPPVTHKDVRSTNVLLFEGFRAKIADYNMFSQAADMARLNRSTHTLGSFGYQAPEYAMTGQMTDKSDVYSFGIVLLELLTGRKPLDRTLPPGQRSLVNWVRIIEYL

SEQ ID NO: 266930 - protein, 51 aa, Zea mays
  Clone ID: MRT4577_175041C.1.pep
FTTQLLLGLSICNGIEASHSCGFGLCLQSHGSLLITGNNRTGTSNCDGSTT

SEQ ID NO: 266931 - protein, 37 aa, Zea mays
  Clone ID: MRT4577_175042C.1.pep
SSIILLKTTLSGVVLHLETYRCAKYSLCFFLPCTCIV

SEQ ID NO: 266932 - protein, 80 aa, Zea mays
  Clone ID: MRT4577_175043C.1.pep
GQAENGHSCILLMLKLLSSYNTMIRNAVAYLRKKKCKLLLLMDKAKLDVIHTSVAPHPQRTLPLLFNPTQTRQPEKKSKI

SEQ ID NO: 266933 - protein, 46 aa, Zea mays
  Clone ID: MRT4577_175044C.1.pep
MSDHSDKNVYQTPLSLRYASKEMGYNFSDRKKFTTWRLLWVNLAAA

SEQ ID NO: 266934 - protein, 113 aa, Zea mays
  Clone ID: MRT4577_175045C.1.pep
PPSSLFCPLFFLKGISNEFGPAFVPTIFSPPSFFLWRFLVPSFVPFFSPFIFGYFAGPFSFSGFFPPPLPPLFCLLGPPFLSPPLSPPMFCQTFFPSLLAFLLVPGTCKKLMV

SEQ ID NO: 266935 - protein, 54 aa, Zea mays
  Clone ID: MRT4577_175046C.1.pep
GQWQHLSSLTTPLCRCHCSWSHPPPEGARRAALLQRRAPALPLAFTGRVSRRVG

SEQ ID NO: 266936 - protein, 97 aa, Zea mays
  Clone ID: MRT4577_175047C.1.pep
HCTHRHPWSGARDGFDGSGRLLYLLRAGPGRGHDKRNGPGSGAVLPCGAACVERNELYSMVYRTRCVAGRRFGLAELAMQERAMLERNERRTVHVRW

SEQ ID NO: 266937 - protein, 76 aa, Zea mays
  Clone ID: MRT4577_175048C.1.pep
KKKKKKKEKEKKKNNKNTKKKGPPFLRFHALGLPSFGFQVFFCGHLTPFFCSRVPNFTSCDPPCATLLFGISCFSP

SEQ ID NO: 266938 - protein, 79 aa, Zea mays
  Clone ID: MRT4577_175049C.1.pep
GIPVTPISTQKEPTNRVRRPIFNTWVGKLIFVTDFHWTNKKKGIAPYKNKKGLVKYKKQITPYLKKLKFSWGNWATKNP

SEQ ID NO: 266939 - protein, 411 aa, Zea mays
  Clone ID: MRT4577_17504C.1.pep
MAKAVPSPLALALAAVAVAALLLLCRGAEARVLLTLDDFGAVGDGIANDTQALLDAWAAACSSTQEAVLAVPAGKVYQIWPVQLSGPCKKRLKLLISGAIVAPSSPDEWAGRDPMKWLYVYGVDGLSVSGGGTIDGMGQQWWASTCKRKKTQPCYSGPRPKAVHFEECREVSVQGVTLQNAQQFQLTFTRCSCVKASFLRVVAPADSPNTDGIHLNDTSHVRITDNLISTGDDCVSMVGNCSDVRVKDISCGPGHGISIGSLGKNRTTDMVEDVKVDTCLLTNTTNGVRIKSWQGGTGFARDLRFENIVMKNVSNPIIIDQYYCDQPTPCANQTQAVEVRRVEFAGIRGTSATPQAISIACSDAVPCRDLELANVNLTLEGGGAGRATALCYRASGKSAGTVVPPSCLARS

SEQ ID NO: 266940 - protein, 127 aa, Zea mays
  Clone ID: MRT4577_175050C.1.pep
FFDKWYHFKYLPYSCSSTNILLHLLGILFDQKIWLNNLVSHTIVMSLRHLHATIRAHRLTLFHPFQYHSNIIFLDPMHKASIDVIKRLIQLKGCVPFVPVEQLVKILSPSISDLFLHQEVQRFILNA

SEQ ID NO: 266941 - protein, 81 aa, Zea mays
  Clone ID: MRT4577_175051C.1.pep
CSTELPLGLSALTVSRQAVSVLLASMLRRHVVCRPVLPSTRVFSGCTSPLLPMNPPYVRYRSRRKKTRVGRSRSVRVRAGG

SEQ ID NO: 266942 - protein, 69 aa, Zea mays
  Clone ID: MRT4577_175052C.1.pep
CSAASSLISAQIKCIPKQLLLASTPTIWQDIFPLESIIGCKDGTDFFSDHSLHKWSTVTNWVIFFHKYQ

SEQ ID NO: 266943 - protein, 718 aa, Zea mays
  Clone ID: MRT4577_175053C.1.pep
MSTTWKIKVPFGSASGRILAARSRSVSQTPKFSTRFCAPRLDEKPAAYATPEAALTPRPQKAALISLGFATRVPHDTLVPVATRRRSSPPHRISRPRARRWPKAGLIRDGHDARLVPHRISRRRARRLRRFSHQLGFFLFGSKIHCRQADSIVDKAIGRMQEIADKIFSVARETIRPGRGLTSFDATKLRVALEDIACMLEQDSRVLQENLNNVNNVINPGDSSYEPSAFSSPPPADDYLTPDWDFAEHFENFWGLEYDSDQMPSFSDNEMDKSGKVIAKWDSRATKIYTEICVEEVNARNRPQQFLNAEGAPDEWWAKQNEAMPGCTMFKIAPLENEDELKVMFGPIVCTNQTTLVPGVEDAISSSDDHVEATLGGGENSTPDPCSNATGKHKVRHDSPKPKKKKDTREEYMKRLVEAFESRSMTTNKSITSAETDPVRVEVNVQLQQVIDDGAPEGSDLHLFATHLLIEKKFRDVFATLKTKEGRNAWLRNAFEIHMGDPAAHTYDHDTDDGDAEFLVALYVVDIWGRPSSEVCRRTMVETGWPGSVHDTRVLQDTLITYADRFPHPPEGKYYLVDSSYPNRKGYLAPYKGQKYHIAEWQNTRQPIGSKEVFNYAHSSLRNVIERSFGVLKMKSRILLSLRSFSLKKQSKIIIACMTLHNFIKDSALHDRDFDELGPNSLGHDVSVGESSNSSSSSTSDELDMSAFRDAIANALVS

SEQ ID NO: 266944 - protein, 567 aa, Zea mays
  Clone ID: MRT4577_175054C.1.pep
MVFNNCCSRSRTKQGYPSEFRINSGYSSEVPRSTSAKMDSADSIADKAIGRMQEIADKIFLVARETIRPGRGLTSFDATKLHVALEDIACMLEQDSLVLQENLDIVNNMDKSGKVIAKWDSRATKIYTEICVEEVNARNRPQQFLNAEGAIGLGRDPHTGSISAPDEWWAKQNEAMPGCIMFKTAPLENEDELKIMFGPIVCTNERTLVPGIEDANSSSDDHLEATLGGGENNTPDPCSNATGKRKVRHDSPKPKRKKDSREEYMKRLVEAFESRSRTTNKSVTSTETDPVRVEMCDPYAHTSDDDEMDDTDGELLVALYAVDIWGRHFSHGPRRTLVETGIQWVQRTLENSNDCFDMFRMRRTVFRRLHDTLVENYGLLPSRGVSTMEALGIFLWACGGPQSFRQIRNKFGHSLEIISRKYSEVLNALYKMSSDIIKPKDPNYIEIHPRLREARFWPHFKDCIGAIDGSHFPATVPASEQAKYIGRHGYASQNVMAVCDFDMRFTFVVTGWPESVHDTRVLQDTLITYADRFPHPPEGKYYLVDSGYPNRKGYLAPYKGQKYHISE

SEQ ID NO: 266945 - protein, 87 aa, Zea mays
  Clone ID: MRT4577_175055C.1.pep
ATLRGACPFLPCLIKQKGGKTLPYFGPNAFIRRGFQTPKKSFLCFGTGFGPLGIPGNSGPGPAGVPLFPYGSLIKNLGKSGVQLVAV

SEQ ID NO: 266946 - protein, 114 aa, Zea mays
  Clone ID: MRT4577_175056C.1.pep
MDKSGKVIAKWDSRATKIYTEICVEEVNARNRPQQFLNAEGYANLIRKFKERTGRTYTRDQMKNRWDSLKRMFTQWKTLNERATGLGRDPHTGSISAPDEWWAKQNEVSSSFFS

SEQ ID NO: 266947 - protein, 60 aa, Zea mays
  Clone ID: MRT4577_175057C.1.pep
DALASLTSQALPHPAEVFDQRGLVGEGFSRFRFGTEPRPWSRPAPRARPREWFNRGLGDA

SEQ ID NO: 266948 - protein, 114 aa, Zea mays
  unsure (1)..(114): unsure at all Xaa locations
  Clone ID: MRT4577_175058C.1.pep
ELPFGAGNARLYYVQNSPPQSFRQLRNKFGHSLETISRKYTEVLDALFKMSSDIIKPKDPYFTEIHPRLREARFWPHFKDCIGAIDGSHFPAAVPASEQAXYIGRHXYTSQNVM

SEQ ID NO: 266949 - protein, 77 aa, Zea mays
  Clone ID: MRT4577_175059C.1.pep
TAMLHGFNPSGHLFAMLDLCIATQYLCFTQMASNDMCPDSIRAHDSTISVSDSHCYEPFSSQSIQRDSVSVSQTSYD

SEQ ID NO: 266950 - protein, 91 aa, Zea mays
  unsure (1)..(91): unsure at all Xaa locations
  Clone ID: MRT4577_17505C.1.pep
MTMAVVKNKRISKGKKGGKXKTVDPFSNKDXSNINAPSVFNVHNIAKTVLSRTHGTRIDSDGLNHRRFEVXLADLHGHEDQPYRKIKLLAE

SEQ ID NO: 266951 - protein, 627 aa, Zea mays
  unsure (1)..(627): unsure at all Xaa locations
  Clone ID: MRT4577_175060C.1.pep
MDKSGKVIAKWDSRATKIYTEICVEEVNARNRPQQFLNAEGYANLIRKFKERTGRTYSRDQMKNRWDSLKRMFTQWKTLNDRATGLGRDPHTGSISAPDEWWAKQXRVRIGAGNARLYYVQNCPPRXEDELKVMFGPIVCTNERTLVPGVEDANSSSDDHLEYTXVGVKTAHLTXTNATGKRKLRHDSPKPKKKKDSREEYMKRLVAAFESRSVTTNKSITSSDNDPMCDRFEHTSDDDKDAQTSDDEMDXTHVMKKQMQNSLLLFMLLIXGGHFSRAPRRTLVESGIQWVQRTLEISNDCYDMFRMRRTVFRRLHDTLVQNYGLLPSRGVSTMEALGIFLWACGGPQSFRQIRNKFGHSLETISRKYSDVLNALYKMSSDTMKPKDPNFVEIHERLREARFWPHFKDCIGAIDGSHFPAAVPASEQAKYIGRHGYTSQNVMAVCDFDMRFTFVVTGWPGSVHDTRVLHDTLITYADRFPHPPEGKYYLVDSGYPNRKGYLAPYKGQKYHVTEWQNARQPIGSKEVFNYAHSSLRNVIERSFGVLKMKWRILLSLPSFSLDKQSKIIIACMTLHNFIRDSALHDRDFDDLGPNSLSHVVPAGESSTSTSDELDMSDFRDAIANALVS

SEQ ID NO: 266952 - protein, 36 aa, Zea mays
  unsure (1)..(36): unsure at all Xaa locations
  Clone ID: MRT4577_175061C.1.pep
FFLPRHADITDHFFTLLAEAGNQGIXAACYILHKLN

SEQ ID NO: 266953 - protein, 63 aa, Zea mays
  Clone ID: MRT4577_175062C.1.pep
QLLLADPTHALFGYPVRSTVQKLHLPPREISYYQPNFVGAHLQITGLPTSPAVSTCALKGTAS

SEQ ID NO: 266954 - protein, 125 aa, Zea mays
  unsure (1)..(125): unsure at all Xaa locations
  Clone ID: MRT4577_175063C.1.pep
AVREPPTPTAVTRRHLSIVGKLTPNHRLRAAEEDKKPAEGGAHINLNVKGQDGNEVLFRIWRSTHLWKLMNAYCDRQPVDMNDIACLIDGRRVHXDSTPLXLQMHDGYYINAMLHQTVGSVASTS

SEQ ID NO: 266955 - protein, 232 aa, Zea mays
  unsure (1)..(232): unsure at all Xaa locations
  Clone ID: MRT4577_175064C.1.pep
PPVFRQRKPDVLQAMCKLNFWLLFLAMACGMGSGLATVNNISQIGGSLGYTTKETSTLVSLWSIWNFSGRFGAGFISDHFLRXEGWXRPFFISITLLVMSVGHAIISSGLPASLYIGSVLIGMCYGCQWALMPSITSEIFGLSHFGTIFNMVAVASPVGSYILSVRIVGYIYDIESPPDEHSCVGKQCFALSFMIMAGVCMFGSAVAFVLFIRTRTFYRRVVYARLQSFLDK

SEQ ID NO: 266956 - protein, 50 aa, Zea mays
  Clone ID: MRT4577_175065C.1.pep
KGLNKGDYIIRLGVKQGGFGYLSRGVLVAVMEKVLYARTSLVPRLGLDSR

SEQ ID NO: 266957 - protein, 189 aa, Zea mays
  Clone ID: MRT4577_175066C.1.pep
RSRPGHSSATPSHGPPRRRHSPPPCRLRQVRPSAFHPMAECSIPSSDGATHLPCSPPPPRLSRLTSRRTGPRSTLPHARTRCGSSPRGAGGPRSSSPSCGLGMSPGVVSVRWFKMKASYMSLVRRPRAQLRQRRLRSRHESRYWSVKTCVVRISRLHRLRPLLRQQNFLVPSRTKAKATAKKAKAMKKS

SEQ ID NO: 266958 - protein, 256 aa, Zea mays
  unsure (1)..(256): unsure at all Xaa locations
  Clone ID: MRT4577_175067C.1.pep
TDKKKKMSLQDEELGQQLYLQMRQRQQIALRAQQMAASQRQQAVNQMGGQMGNTMNQMNATTIHQMGSPFDDIPVQAPEDNNILYQRNVSPEVASFFSACKAGDMSTIQSIVTSQPRSPVFLHRGLINALESGNVDVARYLLQSGAPISRQTPGIVLKAPADRQIALFEALAEHGWTVNTPSYYGEVLLTRLIRSNNEHLIDWFLAQGANPNLGRQHDQRDRLGGPDTNSCQALELAASHGSVNLVQKLLXAGAEI

SEQ ID NO: 266959 - protein, 159 aa, Zea mays
  Clone ID: MRT4577_175068C.1.pep
HGAPDGTGLQCEAKVEVTDYIREWDYGDYEGIATPEIRKLRAEQGIKGSWDIWKDGCPGGEAPHDVTRRLDQLIEEIREKYHKPAMDKGSDQCGDVLLVAHGHILRAFAMRWAGYALREGPTFLLEAGGVGTLSYEHHRIEEPALLLGGAFVVELDGQD

SEQ ID NO: 266960 - protein, 92 aa, Zea mays
  unsure (1)..(92): unsure at all Xaa locations
  Clone ID: MRT4577_175069C.1.pep
MRQISSLLQGLARSLSVGRDRDRDRKGNGAGDGKTAVPAVLRTSGTLWGDGSDTFAAVCSRRGEKGINQDCSIVWEGXFGCQEGTIFCGIFD

SEQ ID NO: 266961 - protein, 116 aa, Zea mays
  Clone ID: MRT4577_17506C.1.pep
AFPGRPASAGLKDKGLDAMLALVEDETLSSFSSASSSSDEEAGRTQLRRPSSGSYGRRSAEEPVVCSPASSLVAVMVQALAHRVSYVWVLDEDSDCRLAGIVTFADVLRVFREQLL

SEQ ID NO: 266962 - protein, 71 aa, Zea mays
  Clone ID: MRT4577_175070C.1.pep
QAPDALRLVTTIRFFLYPKMVLLRGDFFYTVRALLYELTYVSMSHHYSSLLPAPYYTLFGKCSYILIISHM

SEQ ID NO: 266963 - protein, 349 aa, Zea mays
  Clone ID: MRT4577_175071C.1.pep
MRQISSLLQGLARSLSVGRDRKGNGAGDGKTAVPVPAVLRTSGTLWGDGSDTFAAVCSRRGEKGINQDCSIVWEGFGCQEGTIFCGIFDGHGPWGHYVAKAVRDSLPPSLLCHWQEALALASLIDDGEKKLGDCQFDLWKRSYVAACAAVDDELRRSRRLDAVQSGCTALSIIKQGDLMIVANVGDSRAVLGTTSGDGAIAAVQLTVDLKPNLPQEKERIRRCNGQVYCLADEPGVHRVWQPSRESPGLAMSRAFGDYCVKDCGVISTPEVTQKRISSSDQFIILATDGVWDVLSNDEAVHIVAGTPDRAKAAKRLVECAVRAWRRKRRDIAVDDCSAICLFFHPPPPS

SEQ ID NO: 266964 - protein, 68 aa, Zea mays
  unsure (1)..(68): unsure at all Xaa locations
  Clone ID: MRT4577_175072C.1.pep
IIXINLTTNDNSTQSNNGAAQHHRQYVGREATQRHRRELTARRSATYEQLRLILREISATSMSPSCRY

SEQ ID NO: 266965 - protein, 73 aa, Zea mays
  unsure (1)..(73): unsure at all Xaa locations
  Clone ID: MRT4577_175073C.1.pep
PSPLDPVVMVPAAAPGIEGRVGKGRLWIFGACWGICEVRWWKCGTGRRPRGKLXEAKCGGRWRASPGGSKYHR

SEQ ID NO: 266966 - protein, 203 aa, Zea mays
  unsure (1)..(203): unsure at all Xaa locations
  Clone ID: MRT4577_175074C.1.pep
DGRRRLLPVSTSTFSLELAIGHLIPGLEHRRVPRGACSSTAVGAALAESGFLGKKLVTSIIIRNKKNGYDSLHGATTTTIIRAMEANKETEQDRRRGLTLDTSHDQQDIFFFNPPAPPLFQGPMGDGTHLAVLSSYHYLSQGXLKHYSLHHLMDGYYIAPAVMHDLAVRLGQNFMPLPKSWWPSSRVFREATSNPTPPNPSLV

SEQ ID NO: 266967 - protein, 121 aa, Zea mays
  unsure (1)..(121): unsure at all Xaa locations
  Clone ID: MRT4577_175075C.1.pep
ERIRAGADDFLSRMVKTGGRVLEKLRGTAIIGHXLSKVSIDAXPQTIIATYIELXLHTLVTAIISTPSEPIGQTNWVEAATNNXNIDLVSXTDAHFNLELAVIFTKIGRKLTFTIGLYELI

SEQ ID NO: 266968 - protein, 76 aa, Zea mays
  Clone ID: MRT4577_175076C.1.pep
NRATGNAHQLLVHGTEGHRHSTLQRWRIEGVPKRARATPAARARGKLRGERFRGVVTSCEPRQHTKRGENTLMRGQ

SEQ ID NO: 266969 - protein, 198 aa, Zea mays
  unsure (1)..(198): unsure at all Xaa locations
  Clone ID: MRT4577_175077C.1.pep
NYTYLVDDDVPFSVRDRLASGASSQHVIINVDKIVFTITHEVSDTDIFFPLVQTCISDIRVVTQIFPSKIRILSSFKVSAQYFIARRNLWEELISPITSYTFFRFRFFTPDPVTKYGKTAMRFFFQLKQXSSSFLQVDVFINELSFDILLYLVGKLNLMGPYAVKSSAIFPNSCKIENGSRLALVCHFKDNGDAVIPG

SEQ ID NO: 266970 - protein, 70 aa, Zea mays
  Clone ID: MRT4577_175078C.1.pep
HSVAVIHLYSSGFEFSQRVWIGYSSLCVKASVSLASACHTCCGWISVLSTCWRLLIVDRCLFCSTHFVVL

SEQ ID NO: 266971 - protein, 92 aa, Zea mays
  Clone ID: MRT4577_175079C.1.pep
GEDFPRRRRRRLRRVGGRWRRRRRRLLHPRGGKAIQAWRLGDHHPFVKGGVPQPLGGKAIQAWRLGDHHHFLGKAGGLPAGHPQGFLKPGGA

SEQ ID NO: 266972 - protein, 93 aa, Zea mays
  unsure (1)..(93): unsure at all Xaa locations
  Clone ID: MRT4577_17507C.1.pep
PAPGEQERPPPPGGLRGVXGPPVGGPRPRPPGEPPPPPRRPGGQQQRGHHHPPINPPLSPAQPLGAVSRGRQGPPRPTSDDGDFPPGPPPPLM

SEQ ID NO: 266973 - protein, 49 aa, Zea mays
  Clone ID: MRT4577_175080C.1.pep
CHAYIVKGPNFLIKYLPGQLGAFEMGPGQSRITPMAQVTKAILENPNDN

SEQ ID NO: 266974 - protein, 110 aa, Zea mays
  Clone ID: MRT4577_175081C.1.pep
NNFYLSKLQRSQKKRVQTHNWKKKLQKGPLYHKFTTVPKPRQLGEEKGFFGKLTVQKGNIEVSKRTIWLGGIFAGSKLAGPPKVIWGALVWDLPPWAPSPGKPHPAFVDL

SEQ ID NO: 266975 - protein, 76 aa, Zea mays
  Clone ID: MRT4577_175082C.1.pep
TPTEETSYGWGGSGYNDSTEGLPHITTHNYARRPSQRSFTHLIKTCYYSYRTNKGYKHHKLNLKKLTSLPEHFVDK

SEQ ID NO: 266976 - protein, 52 aa, Zea mays
  Clone ID: MRT4577_175083C.1.pep
KPFALGVSLLFWDLWGWELLNKKIFFKNQWGAFQVKLKSQQIAQKILLIIQQ

SEQ ID NO: 266977 - protein, 51 aa, Zea mays
  Clone ID: MRT4577_175084C.1.pep
FLEYILEEISGQRLTLKPWKGKCGKLFFTRGSKSLVLITLTMQYIYYLFFC

SEQ ID NO: 266978 - protein, 50 aa, Zea mays
  Clone ID: MRT4577_175085C.1.pep
VDSLVIIHKNLTCFNKSEWSLLSFGINTGLFTQYWKKLVQFHVIFIEHCF

SEQ ID NO: 266979 - protein, 176 aa, Zea mays
  Clone ID: MRT4577_175086C.1.pep
MVNLRTQKRLASAVAGCGKRKIWLDPNEVNEISNANSRATVRKLISDGLIIRKPVTMHSRSRARELTAARRIGRHRGTGKRKGTADARMPSQVMWMRRLRVLRRLLVKYRAAGKIDKHLYHELYHLSKGNTFKHKRALVEHIHKGKAEAARESKLKEEMDGKRAKTKAARERRQER

SEQ ID NO: 266980 - protein, 53 aa, Zea mays
  Clone ID: MRT4577_175087C.1.pep
GFKTNAVLAFQKAVMAYFVGVLEETYFWAIHAKRVTFMAKDIQLALRIRGERV

SEQ ID NO: 266981 - protein, 76 aa, Zea mays
  Clone ID: MRT4577_175088C.1.pep
HHMHRTHADCCRSPGLEQQPRTAPPNPKAYLQKLTGTKNPGCLAPDPKRPKDYLHTRVTGEYDRKPNSMTQCIKKA

SEQ ID NO: 266982 - protein, 47 aa, Zea mays
  Clone ID: MRT4577_175089C.1.pep
FTIYTTERLSNLKGKHLSSRDHLVLFNLVLTIEGSAQEPINLYRFLI

SEQ ID NO: 266983 - protein, 249 aa, Zea mays
  Clone ID: MRT4577_17508C.1.pep
MAAALECWSGRPSTDEETVEHVLMKPHGRSDDSLPTCADSARAAGEPTPTPTPAPPKKWQRLGRNFAGAIAAFKNTLNLDGGGGGSGLPRDPSPRAEKPPPLLLRGLAQLYSRGAANQQLPEKLVADLRRHFDALPNSYAQAGYDMKDVLLHARLAEQATGSLDSPSFCCKKIQIFEKRGLTLGVVMILVQTGNEALFKNQVESALKSVVKKQRKNSGGVKLPFGLCGCQEEGSRNFDEESMFDPDDGR

SEQ ID NO: 266984 - protein, 38 aa, Zea mays
  Clone ID: MRT4577_175090C.1.pep
FKCSNHRSFCAQHDVRVVLSVFPISSISNKLLIYKPSA

SEQ ID NO: 266985 - protein, 372 aa, Zea mays
  Clone ID: MRT4577_175091C.1.pep
MANLGGGAEAHARFKQYEYRANSSLVLTTDSRPRDTHEPTGEPETLWGRIDPRSFGDRAVQNRPPELEEKLSKSRTKKSKRDAAAALDSADLPRRDAKRRRRAASAQEVSVLSLTDDAVYKPQTKETRAAYEALLSLIQQQLGGQPLDVLAGAADEVLATLKNDKVKNPDKKKDIEQLLNPISSQLFDQLVSIGKLITDFHDAAAGDASGAPSADAVDTTLDDDVGVAVEFEEDEDEESDFDQVQDELDEDEEDDMAELNGPGGMQMGGELDDDDMQNANQGLTVNVQDIDAYWLQRKISQAYGDGDIDAQQSQKLAEDILKIIAEGDDRDVENRLVMLLDYEKFDLIKLLLRNRLKIVWCTRLARAEDQEQ

SEQ ID NO: 266986 - protein, 335 aa, Zea mays
  Clone ID: MRT4577_175092C.1.pep
HASADVWGISSQTQKDHTSIAEPIAPKLSVDYPFPPHLEYAYPPPDGNILSNIVNALIAVPRFYNQVLHLMNKMNLPAPFRMALPTPPLPSQVPVIPHPQPPPGSTTTGELHSADLSSDESELESSDEDIDKRKIKRAKHEAIVGPAVDKNVAHEAVGVKSVALVSNELQVIKKKNPVLQIKITPKPIQKEPPVPSMTENEPDSTHEQLQEKHFVTPQEMSREKLPPEEILSLPMFKNYTPGNPASVLYIKNLAKDVTHDDFYYVFGSVFESMDSARLGLSVKLMQEGRMRGQAFVTFPTVELAQRALNLAHGYVFKGKPMIIQFGRNPAANKAS

SEQ ID NO: 266987 - protein, 161 aa, Zea mays
  Clone ID: MRT4577_175093C.1.pep
MADNDAQHEHTFDSADAGASKTYPMQCSALRKNGFVCIKNRPCKIVDMSTSKTGKHGHAKVHLVAIDLFTGKKLEELCPSTHNMDVPNVTRREYQLLDVTDDGFLSLMTDDGATKDDVKIPDGEVGDKITKLFTEEGKDTNVIVLTAMGEEAAIDAKEAPK

SEQ ID NO: 266988 - protein, 40 aa, Zea mays
  Clone ID: MRT4577_175094C.1.pep
ANPAHLVNSQSQGQLGAPPGLGWAQDPGKKPQFLHADHSS

SEQ ID NO: 266989 - protein, 49 aa, Zea mays
  Clone ID: MRT4577_175095C.1.pep
EQGRQVPGKQSIYMHSRYIAWGPRWSYGGYALQHTLTAGLMEPATKTQV

SEQ ID NO: 266990 - protein, 45 aa, Zea mays
  Clone ID: MRT4577_175096C.1.pep
NTYGKNEKMKIEPIMTIKCFKQKLAKISLKMVEPLQLIPVPKFLM

SEQ ID NO: 266991 - protein, 47 aa, Zea mays
  Clone ID: MRT4577_175097C.1.pep
NSKNKRSNNKERNFPSTKILNKELHSYSMLTLNIIQSLNKFFSPSKS

SEQ ID NO: 266992 - protein, 92 aa, Zea mays
  unsure (1)..(92): unsure at all Xaa locations
  Clone ID: MRT4577_175098C.1.pep
YSWLSTLESWDIPRKGAWLSFILSHINAXLLRQQTGGEADVDSHRIQEVHGEELFTHGKSLXIYITENSGHCLDILSSLLETYLHTFKKAYL

SEQ ID NO: 266993 - protein, 186 aa, Zea mays
  Clone ID: MRT4577_175099C.1.pep
MMVGGIGQVSEQEGKSPEHAFKKHKLDGKGGGAGSMAGGFGDGEDSPMLGAAAILPLEKANEPVPAVMKGFPLLNLSALHSVRPSLNGRTGADLKLHKNGMSSAAGFLSGGKRSSVVGSYDTNGCNLMLQSILDEQIVSNMKGADPTGVINSVHTTRIVPDASSWSKNIPDEQLVSNKKGVGPSVV

SEQ ID NO: 266994 - protein, 561 aa, Zea mays
  Clone ID: MRT4577_17509C.1.pep
TCADSARAAGEPTPAPAPAPAPPKKWQRLGRNFAGAIAAFKNTLSLDGGGGGGGLPRDPSPRAEKPPPLLLRGLAQLYSRGAANQQLPEKLVADLRRHFDALPNSYAQAGYDMKDVLLHARLAEQATGEDQPAVNIEEVHGRGSCEEGTVFQLTFACTAPLSWQSMSGSLDSPSFCCKKIQIFEKRGLTLGVVMILVQTGNEALFKNQVESALKSVVKKQRKNSGGVKLPFGLCGCQEEGSRNFDEESMFDPDDDRVLDNEPAHRPQLPTPLPQASVFVSVDEWQTIRSGGEELGRWMLRSEEIEFVDWFGANSFRGVYKGKKVWVNKLRGCDMGSAYDVEIRQDLLQLMSCGQRNILQLHGVCFSENHGLCIVTRMMEGGSVHDILVQRNKRLSLRDTVRIALDVADAMAFMNGYGIAYRDLNARKILLDRQGNACLGDMGIVTPCSNVGEVTEYETSGYRWLAPEIIAGDPETVSETWMSNVYSYGMVLWEMITGEEAYSTYSPVQAAVGIAACGLRPEIPRDCPPFLRSLMNRCWDSSPLKRPQFSEITSILQRQNVR

SEQ ID NO: 266995 - protein, 83 aa, Zea mays
  unsure (1)..(83): unsure at all Xaa locations
  Clone ID: MRT4577_1750C.1.pep
SFVSYIRGIIKNLTAVLEPEKAGEFKKGVXGATKFLLIKPKDLQFFGGESIKDQAFLVFDYYKDCATNSTFLYFSHGLNEIKC

SEQ ID NO: 266996 - protein, 100 aa, Zea mays
  Clone ID: MRT4577_175100C.1.pep
SPRLSAPVSLQGLCEHNRPGNHVIGSLLSHLWERADVLDSFYTYYAFIEDTGLSHVLRTAADEHKALQNLNDLLGQTVIDNHLPLFQWFKLSRTAVAADD

SEQ ID NO: 266997 - protein, 89 aa, Zea mays
  Clone ID: MRT4577_175101C.1.pep
YKNMYNRSVSMCVSCRKTPMKVCKNSFVKKSEKAFLGNSASKAHLKYRDPFASLNTYTKQMENKTMKGFAKYSAVSYGKSQAKAGCQFN

SEQ ID NO: 266998 - protein, 91 aa, Zea mays
  unsure (1)..(91): unsure at all Xaa locations
  Clone ID: MRT4577_175102C.1.pep
SARDQYLGVDINARKQELGGISKCDLPAHDNLLCRIMHGGCYADEXVXHVALNYMLASRDSCYEELSXIYWLVCRHPDLEPQKVLKLGATL

SEQ ID NO: 266999 - protein, 263 aa, Zea mays
  Clone ID: MRT4577_175103C.1.pep
MGGSECALGDAAIGEETLNYDGDDVEMADADSDTEEARAAEVSAATGGSAGGVRQAEKDGPDGKKKRKKRRNKGKKNKGRQDGAPTNIADINRFVLNTCKRLKEKKSYLVWNAVGCLGVTAVNDLVREVEAIQKCGGQTIADGSRFRTGGGILWNILKSREPKAYKEIMAKGKELEKQFRCTKRPQISRNEDASSQGSALIDDEIEARDQKETLDDPKQLDDVEIHVSDNKAQRKPLADRIRAPVAYDDLFEEGEIHDGEPRS

SEQ ID NO: 267000 - protein, 76 aa, Zea mays
  Clone ID: MRT4577_175104C.1.pep
YRVRFLDLVHAVVSVLIFAAVALLDQNLVACFYPVPSEDAKQVLTVLPVAIGVVGSMLFVTFPTTRHGIGFPLSQR

SEQ ID NO: 267001 - protein, 104 aa, Zea mays
  Clone ID: MRT4577_175105C.1.pep
CVPLPSDHHTATTHAQRHSRHSSAHPHPVTLHRSPSIFMHHALALAQTTKYEMPSRPVICISSELGHYDLVAARRRPLCPYLDMLPARMRQKNSSCFGAGAGKR

SEQ ID NO: 267002 - protein, 51 aa, Zea mays
  Clone ID: MRT4577_175106C.1.pep
LGWVGIHLFPFVTLGRPYSFLAWAPSAFSWLSAIMVRRRSLLLAAVSHYMT

SEQ ID NO: 267003 - protein, 376 aa, Zea mays
  Clone ID: MRT4577_175107C.1.pep
MNPYLENNFLVRLMEEMEEEEEELQLARHMVNRRRRAHNERRHGGSIPGRVRIHRDHMSGDARIRADYFGANPVYTDAQFRRRFRMRRHVFERLVDVVQQVDPYFIQRPNCAGEIGLSALQKVVAAVRILAYGIPADAVDEYVRIGESTAHEALKHFCTAVQTAFAPYYLRAPNAEDIARLLQVGESRGFPGSCNDINVLHRSNLFERHLSGDTPPVSFTVNGHTYNMGYYLADGIYPDWPAFVKTIRNPYDVRTQHFATIQESARKDIERAFGVLQKRWGVVRGPAYGWSPEHIGDIMKTCIILHNMIVEDEGPLSLNTTFENIGVVADTTQGSLEERNDFVNQRYNQLKDRNKYTQLQVDLIHHHWARHGSGVA

SEQ ID NO: 267004 - protein, 135 aa, Zea mays
  unsure (1)..(135): unsure at all Xaa locations
  Clone ID: MRT4577_175108C.1.pep
MXNFFLFLFAIEGYLTFGIIFGSISNRTSPTKGGRVEFTTWLYFSLALATLSIFGSTIGSTFFLIWLTFLIGASAFWGFSLILSGTGLIFGAVFLRPVLPGNAPGNLRGNFFAGSRTVFDTLMGTFCRLFFFLKF

SEQ ID NO: 267005 - protein, 121 aa, Zea mays
  unsure (1)..(121): unsure at all Xaa locations
  Clone ID: MRT4577_175109C.1.pep
MASKTLSILALIALFVSATNAFIIPQCSLAPSAIISQFLPTYTSMGFEHPSVQAYMLQQALAASVLXQPIFQLQHQXSLDHLTIQTIVTHLSSXALSHLAVVNPFXYLQQQXLLASTPHLS

SEQ ID NO: 267006 - protein, 591 aa, Zea mays
  unsure (1)..(591): unsure at all Xaa locations
  Clone ID: MRT4577_17510C.1.pep
MAAALECWSGRPSTDEEMVEQVLMKPHGRSDDSLPTCADSASAGEPTSAPAPPNPKKWQRLGRNFAGAIAAFKNTLSLDGGGLXPRPLASGREAAAAXLLRGLAQLYSRGAAANQQLPEKLVADLRRHFDALPNSYAQAGFDMKDVLLHARLVEQATGEDQPAVNIEEVXAEEXDEGTVFQLTFACTAPLSWQSMSGSLDSPSFCCKKIQIFEKRGLTLGVVMILVQTGNETLFKNRVESALKSVAKKQRKNSGGGVKLPFGXLCGCQEEGSRNFDEESXLIRTMARYSTMSLRAGHSSPLGLPQSSVFVSVDEWQTIRSGGEELGRWMLRSEEIEFIDWVGANSFRGVYRGKKVWVNKLRGCDMGSAYEVEIRQDLLQLMSCGQRNILQFHGICFNGNHGLCIVTRMMEGGSVHDILTQRNKRLSLRDTVRIALDVADALAFMNSYGIAYRDLNARKILLDRQGNACLGDMGIVTPCSNVGEVTEYETSGYRWLAPEIIAGDPETVSETWMSNVYSYGMVLWEMITGEEAYSAYSPVQAAVGIAACGLRPEIPRECPPFLRSLMNRCWDNSPLKRPQFSXHIHPTKAAER

SEQ ID NO: 267007 - protein, 146 aa, Zea mays
  Clone ID: MRT4577_175110C.1.pep
PRVRPRVRVDVVQQVDPYFGQRPNCAGEIGLSALQKVVVAVRILAYGIPADAVDEYVRIGESTAHEALKHFCTVVQTAFAPYYLCAPNAEDIARLLQVGESRGFPAMLGSVGNCPSSWNGMFTGRGKHPTMILEACASYDLWIWHA

SEQ ID NO: 267008 - protein, 282 aa, Zea mays
  Clone ID: MRT4577_175111C.1.pep
VSCVFLSLSALLSIVVEVASLFQRPNCAGEIGLSALQKVVAAVRILAYGIPADAVDEYVRIGESTAHEALKHFCTAVQTAFAPYYLRAANAEDIARLLQVGESRGFPGMLGSVDCMHWEWRNCPSSWKGMFTGRGKHPTMILEAVASYDLWIWHAYFGLPGSCNDINVLHRSNLFERHLSGDTPPVSFTVNGHTYNMGYYLADGIYPDWPAFVKTIRNPYDVRTQHFATIQESARKDIERAFGVLQKRWGVVRGPAYGWSPEPIGDIMKTCIISSKSGTPVF

SEQ ID NO: 267009 - protein, 173 aa, Zea mays
  unsure (1)..(173): unsure at all Xaa locations
  Clone ID: MRT4577_175112C.1.pep
MEEMEEEEEELQLARHMVNRRRRARNERRHGGSISGRVRIHRDHMSGDARIRADYFGANPVYTDAQFRRRYLQLTHSFYHVQNFMTPIMTHEFYGRFAXCVAMSLSAXVRILAYGIPADAVDEYVRIXESTAHEALKHFCNGXVQTAFAPYYLCAPNAEDIARLLVGEYXGFP

SEQ ID NO: 267010 - protein, 81 aa, Zea mays
  unsure (1)..(81): unsure at all Xaa locations
  Clone ID: MRT4577_175113C.1.pep
RRPARLRLRGRALRAPAARRQGRRRAPRVRRGALSAAAECXVWISELHGNIFRAEEMRFLTVADGTDRADSYRKSSTIISR

SEQ ID NO: 267011 - protein, 74 aa, Zea mays
  unsure (1)..(74): unsure at all Xaa locations
  Clone ID: MRT4577_175114C.1.pep
INVDSNAKTFSLIYYEPSNPFFRLDYFKSWSRNPPXFPQQSPVFIFYLLGMPLLHFTLFYLLFSTFSLFFNFFF

SEQ ID NO: 267012 - protein, 73 aa, Zea mays
  unsure (1)..(73): unsure at all Xaa locations
  Clone ID: MRT4577_175115C.1.pep
IGAIMKTCIILXNMIVEDEGPLSLNTTFENIGVLADTTQGSMEERNDFVNQRYNQLKDRNKYTQLQVDLIHHH

SEQ ID NO: 267013 - protein, 266 aa, Zea mays
  Clone ID: MRT4577_175116C.1.pep
MNPYLENNFLVRLMEEMEEEEEELQLARHMVNRRRRARNERRHGGSIPGRVRIHRDHMSDDARIRADYFGAHPVYTDAQFRRRFRMRRHVFERLVDVVQQVDPYFIQRPNCAGEIGLSALQKVVAAVRILAYGIPADAVDEYVRIGESTAHEALKHFCTAVQTAFAPYYLRAPNAEDIARLLQVGESRGFPGMLGSVDCMHWERRNCPSSWKGMFTGRGKHPTMILEVVASYDLWIWHAYFGLPGSCNDINVLHLSNLFERHLIHA

SEQ ID NO: 267014 - protein, 38 aa, Zea mays
  Clone ID: MRT4577_175117C.1.pep
GSMKTSCQLNNGSQLLHAEARVQDHGRVKTGLRYQCGR

SEQ ID NO: 267015 - protein, 119 aa, Zea mays
  Clone ID: MRT4577_175118C.1.pep
SAMVRYELSRISAAVFIALGKGKVQCRGDVRSLVFRGWFSTMLLDFGWLQRCPKGLDLRSLEENLGRGILTLPLRQQQCLFEEWFQFYSTKGAECPNLIRAFQVWWRRSFVRSSVEPQR

SEQ ID NO: 267016 - protein, 59 aa, Zea mays
  Clone ID: MRT4577_175119C.1.pep
PSSRSDREVSVSSASEKPRFSGSSSSHLSLVGGGSIAGEGKREGSIGLAREDELAPSVR

SEQ ID NO: 267017 - protein, 72 aa, Zea mays
  Clone ID: MRT4577_17511C.1.pep
QTSDCFDLRTGTIFTKWASDSLSFNGVRTNHHGDSDSRPHENPNLPTCCGLQACVKIQQLAHLAQSDKALLV

SEQ ID NO: 267018 - protein, 74 aa, Zea mays
  Clone ID: MRT4577_175120C.1.pep
LKHLSILSGLKKFFFYDKNFLLKNIFFFINLHYLPREHNFYLPFFFKKHTPHKERYINLTSPPTIYLILRHHIS

SEQ ID NO: 267019 - protein, 138 aa, Zea mays
  Clone ID: MRT4577_175121C.1.pep
LLQRPLCCAAKEVAGALMHRRFSPPLSLKSGSGWDGRSSDGWEGPRERRLRRDGEAEREAAAAPLLPSTMNWSHPRRPRQSLRFRPGSEEKVRRGGGLSRTGHARDEDRAGRGHGGGGGEREGAWEVGMSGARGGEWG

SEQ ID NO: 267020 - protein, 205 aa, Zea mays
  unsure (1)..(205): unsure at all Xaa locations
  Clone ID: MRT4577_175122C.1.pep
TRRPGRAHPSPSRQTLSGRILTPATSCCTCPHPRSAPQILGERILLPERHRPHREEPRATSYLQLERINGYYDEGSGALYVPRDAFLDVGYFNDGLTLFSRDLPTNPPSRRLTSQTGRPHEYLDGXATSSILRPPGVHPQGHQLGSEQRTPAHTIESVPLTVITMFSRPDDAAPLHNEAGKDXTDDNDDLKNNVRRLVRISQEML

SEQ ID NO: 267021 - protein, 70 aa, Zea mays
  Clone ID: MRT4577_175123C.1.pep
AGRVGTRHPVPPCDYSRRHDSMVIDRKSPLHCWRGLLGWDREHTPLSSDVPASGIDLATTQLLSQGPDRY

SEQ ID NO: 267022 - protein, 40 aa, Zea mays
  Clone ID: MRT4577_175124C.1.pep
IQLFYKNTRSQRLEKLNKYRFSKNPYAKGMKQNYFSKKRK

SEQ ID NO: 267023 - protein, 101 aa, Zea mays
  Clone ID: MRT4577_175125C.1.pep
KNPKVEDYVVGFNEFGGKDDFSPKDLKKRLARSQFVFLDGKGSAQGLKKVSPPTKRRVRQLGTGDLSDSKKLSWVVVVIIIKNLNGYPAQTCFGFYANRQH

SEQ ID NO: 267024 - protein, 86 aa, Zea mays
  Clone ID: MRT4577_175126C.1.pep
SSSSTRDSPGRAYFIRGRSPSRRSVRCRASRRRRVQPAQRLRWYRSLSWPRSSVVWWLSIGQAGASGMDRPPVMPRVQAPMVGSAG

SEQ ID NO: 267025 - protein, 71 aa, Zea mays
  Clone ID: MRT4577_175127C.1.pep
HHKPSVLPGFTFYAIVHGVKCQWARPSYKSKKLFYPSYSGWSLEQAYISNLNFCHPSDHVQSKIFAPCKIW

SEQ ID NO: 267026 - protein, 108 aa, Zea mays
  Clone ID: MRT4577_175128C.1.pep
LEAGRGRDSLLAPSSRSGRLASICANATTSGRATMPVERMTGQARPGRRDGSSHGYSDYELLGLGMAAQKCQDHQERQGYQCHCLMRGLHRILAPHSIGLQELREHEP

SEQ ID NO: 267027 - protein, 76 aa, Zea mays
  Clone ID: MRT4577_175129C.1.pep
RIILSEGWQQRSGRCGGGHTARSAGHGRSTDCHGRLLVSPSRAGWLPHLYPQCDDAVVHTLVHGGDMKYIGCLPPA

SEQ ID NO: 267028 - protein, 46 aa, Zea mays
  Clone ID: MRT4577_17512C.1.pep
GIGVNDFDEWEEGDIIEAFNPVNKARTLEEAFATVTAALKDAGVHL

SEQ ID NO: 267029 - protein, 77 aa, Zea mays
  unsure (1)..(77): unsure at all Xaa locations
  Clone ID: MRT4577_175130C.1.pep
ECYNNGXTCNLGDRRSPSLDCGFKGTEIDRADYWSEVQDLAKPITNHEQSAEQDNQDGNSIGXLVCARKTVEGVDIL

SEQ ID NO: 267030 - protein, 146 aa, Zea mays
  Clone ID: MRT4577_175131C.1.pep
GFVVQIFAVLWRSAPVFFYPRRLSSAIHVLWRPACAPIRGCRAIWILMPLGGHWVQDQLSKLVTASEKSTTSVESLARKEDNGCSIRDVMALVKECGAVLGTKEHFIASQVFVKRAEREMFMTLDTLEERFNWLTMKHDWVTRMIH

SEQ ID NO: 267031 - protein, 42 aa, Zea mays
  Clone ID: MRT4577_175132C.1.pep
SRVLCVCASRLKCKRDDYHSWVQEIIISYILVQNLRRFSGRC

SEQ ID NO: 267032 - protein, 272 aa, Zea mays
  unsure (1)..(272): unsure at all Xaa locations
  Clone ID: MRT4577_175133C.1.pep
GQGRNTTTRREGGLGTXAKXGQTAGARFGEGGARSGAMGRARCAEVRRAKAGRDGRRGKLREVSQGERGGSGWAGTNREEDAPGSCARGKQRGRKMGTRPWKQGVARRAESRTRKQSARRGDGQGGDRIRASKEQRLDWSREMRARRELRRRRLPVNSMTGRMRRPRAYAGRETCHGDELETDRAWTVNREQRGRSRAGSRRAMELRGWGRGVARAGRREEEEGLGARRARRAQGAACAGSRSAVRAPELCGLPSREGGGGQAGRGSRGLKK

SEQ ID NO: 267033 - protein, 43 aa, Zea mays
  Clone ID: MRT4577_175134C.1.pep
IEKNKNRAYLITLIKTYRRTVVWKKKRPHGFRKFICKLFTKIN

SEQ ID NO: 267034 - protein, 70 aa, Zea mays
  unsure (1)..(70): unsure at all Xaa locations
  Clone ID: MRT4577_175135C.1.pep
NRPVPNGIVYGKPKGQGITQLKDHRNKRSVAEERAXNKLDGLRAPNSYWENEDRTYKYSETMLEDRGQQK

SEQ ID NO: 267035 - protein, 66 aa, Zea mays
  Clone ID: MRT4577_175136C.1.pep
IEQLRGRKKGKRARRKKWGRRGIFHAGGGKKGGGEKKIRVPKKKEIVGGGGGGKKGNFDRASGFYS

SEQ ID NO: 267036 - protein, 77 aa, Zea mays
  Clone ID: MRT4577_175137C.1.pep
AKHIDTVQGILVEHQLEGRSIEYLHVLHKNVEWEHVFHALTKHMPVNNLVRIVLHKLPLCTKGESVLITFRMYLEPN

SEQ ID NO: 267037 - protein, 61 aa, Zea mays
  Clone ID: MRT4577_175138C.1.pep
PLVLRVPPKWPAWASQVDLESWTWPITHPVWNKKKKNLPPQFCKFSFTLKPKNTCPKVGEV

SEQ ID NO: 267038 - protein, 73 aa, Zea mays
  Clone ID: MRT4577_175139C.1.pep
YSRTVSFAYGMPVGYGPILQLQRPSSPYTGPCAVSCKVQREQAHSSWILVSGRSATPSESNSPRGLLSGSAWT

SEQ ID NO: 267039 - protein, 51 aa, Zea mays
  Clone ID: MRT4577_17513C.1.pep
GKLVPFFLGKLSFPKGFKSLVVWDFIPVKALGNLIPVGLKLNPQGLPLSHF

SEQ ID NO: 267040 - protein, 45 aa, Zea mays
  Clone ID: MRT4577_175140C.1.pep
LYIDTRNLYMAHRTYRFHRDRALTRQVSSLVKTCKRLVQLHWTCG

SEQ ID NO: 267041 - protein, 99 aa, Zea mays
  Clone ID: MRT4577_175141C.1.pep
MMAGFAAFEAGAPYRRGIFVAVRFVKDDRWQEPVTLGGAQVRPTFDGRRAAMLAAAVAVVAGIRGFGAGMAGPKNGTAEAKKKSAAICDTMPTVKVWHN

SEQ ID NO: 267042 - protein, 129 aa, Zea mays
  unsure (1)..(129): unsure at all Xaa locations
  Clone ID: MRT4577_175142C.1.pep
PALCPAAXSPSPPPSRLXXASSXRAPLPFRXPASSAAXSCSSSSSPVARXXAXASAVPLAASLWRGAAGXXGPRRGXPLRRLTPLQSAXLLVPFPFRWCRWVAAWPRSXLARXAXALPASAACRPRPLV

SEQ ID NO: 267043 - protein, 342 aa, Zea mays
  Clone ID: MRT4577_175143C.1.pep
MPLGDDAAADFALPDELLAALPRDPYEQLDLARRITALAVAGRVSGLEREAGRLRAEAAGKDRESAELRERVALLDAALQETNARLRAALEDNIKLSKERDSLAQTSKKLARDLHKLESFKRHLMQSLRDDSSSTQETVDITTCDQPVASKASSSADGGSVSNPATNIFTESLDVGSTNRDGAAARPPIQKYSLTTHITPRLTPEATPKIMSTSASPRRMSTTGTPKLMSGSTSPSKTRIEAHMSMTPWYPSSKQSSAANSPPRGRSNPGRTPRIDGKEFFRQARSRLSYEQFGAFLANIKELNAHKQSREETLKKAEEIFGPDNKDLYLSFQGLLNRSMVA

SEQ ID NO: 267044 - protein, 53 aa, Zea mays
  Clone ID: MRT4577_175144C.1.pep
HENHPTILKRVNKTPLLINFFLYIQRIYFTPFVVRTIKGNIFFLTIISLIKFL

SEQ ID NO: 267045 - protein, 85 aa, Zea mays
  Clone ID: MRT4577_175145C.1.pep
FSLSLFSLFFFFWFWVFFFFLKEPKTSMSPHFETLDMFQYFKLGIMRDIYRLKTSYGANRKLPLKKKKFQNLPKTRFFIFQQNFT

SEQ ID NO: 267046 - protein, 175 aa, Zea mays
  Clone ID: MRT4577_175146C.1.pep
LCPRMASDGAPRGRRPKRPASGGLVQPDVLTYKRRRRGTGANAGHSAATSGPDPDPVMNQMSAVVHATNSQQGGRQTLDRHWRSWRDTLEGVLRSTAVNQSAGGIQNCIRDALRYNGWHPTEHGNLVDDRGTDEEDATGALHSEESSGALVKLEDGTAASLEANRRCATMLSLTF

SEQ ID NO: 267047 - protein, 193 aa, Zea mays
  unsure (1)..(193): unsure at all Xaa locations
  Clone ID: MRT4577_175147C.1.pep
LGRARDGEAGGGTGAGAXQEQEQWQGAVEATLPSTPASAAWPHIASFCALHRYLASIDVCELAEGEDGRPGCVRYVASLAPGTTTGEIGIWATEKLLEIDHDARLLAYAVVGSSLGFGRYVATMSIVAADDEDDAGCRLVWAFECDPVQGWGWSRDGMLAYLDAGVKGIAARIEEAHAAAASASAGGDGGVAA

SEQ ID NO: 267048 - protein, 50 aa, Zea mays
  Clone ID: MRT4577_175148C.1.pep
PPCNNHESLIRDFFIIASIKRPGKFARPAGQHVFSTCCFWVLESGYQLLL

SEQ ID NO: 267049 - protein, 92 aa, Zea mays
  Clone ID: MRT4577_175149C.1.pep
RAQRPPSWLSVGAEEPPPPPRLFSRGFLSRVGPNPPPSPLLKNRGSPLGRFLWKQTRCHPSPTAAFFSGPPFPPLKGDSSSYELCLKRNLNC

SEQ ID NO: 267050 - protein, 38 aa, Zea mays
  Clone ID: MRT4577_17514C.1.pep
IKNPGKLGFNLVHGKSKKNFYLCLPFLVSYFSKVGCNV

SEQ ID NO: 267051 - protein, 194 aa, Zea mays
  unsure (1)..(194): unsure at all Xaa locations
  Clone ID: MRT4577_175150C.1.pep
CSPSPGSSSTSTSSAASPTSAPSSTLKSGSSSRRRSPSCSPSCPTSSRKPRITPATPPAWALSTSLTSRXGPASSLHGCSWWSSCARRWTRSACAATPAPSSAPAASSGWEPSSSSTSKHRXGKRCSPSSGSSAPPGCCRGSPSPESGSAPTPMARTPASSARTWRRSWDRRSPRASVHGDAAALGRSAQELQL

SEQ ID NO: 267052 - protein, 67 aa, Zea mays
  Clone ID: MRT4577_175151C.1.pep
SDLFALWRFVERATEALSILPAASTSWRAADCIVDSVKASKANVGWADIAYSLRCTISYRLKKKKKK

SEQ ID NO: 267053 - protein, 91 aa, Zea mays
  unsure (1)..(91): unsure at all Xaa locations
  Clone ID: MRT4577_175152C.1.pep
SACSASPLDGLRSRRSSGYLSSIXLPQLGACSMLVMVPTTAEFLPLRPKPAATLVLRRNRRETKSSAKWYKSWKQQYTMVIMSSQKERLLL

SEQ ID NO: 267054 - protein, 425 aa, Zea mays
  Clone ID: MRT4577_175153C.1.pep
TPGARRLSYGHKDVAFAPYTDYWRQMRKLFVVELLSARRVRAADHAREAEVDKLIARLSSAGGKPVQLEDHMFALMDGVIGTVAFGNIYGAEQFAHRNHFHDVLDEALSAKAGFSAEDYYPNAAGRLVDRLTGAAARRERVFRDLDAFFDTIIDQHLVVVDPSSSPPSSATTTPDLIDVFVDLMEESRHQPQVHGSLRFTRDHIKGLLSNVFTAGVDTSSVTMVWAMAELTRRPAMLRKAQEEVRSVVGGDRERVHPDDMPKLRYLKAVVKETLRLHPAAPLLLPRETMRHVSVCGYDVPAKTRVLVNAWAIGRDPRSWGPRAEEFDPGRFEDGGDVGFNGTHFELIPFGAGRRMCPGIAMGVATMEFTLANLLYCFDWELPEGVGVEDVSMEEAGSLTVHKKTPLLLVPTRYKANCQSRHSFQF

SEQ ID NO: 267055 - protein, 46 aa, Zea mays
  Clone ID: MRT4577_175154C.1.pep
KKKKKKKKKKKKKKKKKKKKKKKKKKKKKKKKKKKKKKFYFPGGPF

SEQ ID NO: 267056 - protein, 41 aa, Zea mays
  Clone ID: MRT4577_175155C.1.pep
GACVQSCKMVAVIALAEALTIIRRRIIRPAIVGAIVCTIWC

SEQ ID NO: 267057 - protein, 178 aa, Zea mays
  Clone ID: MRT4577_175156C.1.pep
LIARLSSARGKPVQLEDHVFALMDGVIGTVAFGNIYGAEQFAHRNHFHDVLDEALSAKAGFSAEDYYPNAAGRLVDRLTGAAARRERVFRDLDAFFDTIIDQHLVDPSSSPPSSATTTPDLIDVFVDLMEESRHQPQVHGSLRFTRDHIKGLLSVRNIHTHTTRRQIIIDRTVYICII

SEQ ID NO: 267058 - protein, 44 aa, Zea mays
  Clone ID: MRT4577_175157C.1.pep
SPWQSFLAIRVDEPAGRRYRLCGRSYWRDHEFMDIDTGGLITLS

SEQ ID NO: 267059 - protein, 86 aa, Zea mays
  Clone ID: MRT4577_175158C.1.pep
YKIKKKPIKKYPNLLYKPGERKIRGWLNLILFHSPIFSTFLLGKPFNYPTPLLLLKIPLSQPSYFSLFSYPPKFPNISPFLSIISH

SEQ ID NO: 267060 - protein, 74 aa, Zea mays
  Clone ID: MRT4577_175159C.1.pep
KVLLAIKSLLKLSSTDVEDFEFYDLDSVLLRLGVQLEDLTPEDQKEFAVEVDALRREVQTLFQQKLKQGKATST

SEQ ID NO: 267061 - protein, 81 aa, Zea mays
  Clone ID: MRT4577_17515C.1.pep
KREACLNEYYNSKRLHQLSAADAALAGVRWSSSDTGGVELIFICRVCTTTFLLFFRNFDQRPPDSLPENCWPQAAATVPAG

SEQ ID NO: 267062 - protein, 158 aa, Zea mays
  unsure (1)..(158): unsure at all Xaa locations
  Clone ID: MRT4577_175160C.1.pep
MKNLRLVTRLPQQLQLQIDGETLVASAIDAESRRAFFASSANFIYTVSLPSSXPRNSNYCNGAKLLLXSDMEEVVLDPGDRIVAMDYLMERESLLLGSSDGCLLLYNVEEKTTEVVGRLEGGVNTIASSPDGALLSVTTGLGQLLVITQDWEVLFETY

SEQ ID NO: 267063 - protein, 93 aa, Zea mays
  Clone ID: MRT4577_175161C.1.pep
EIVWVFMGAKNNHSFTKYRPGSSEPVVQSIHGRTLDTKLGTERVQTKVLQVGDFEKGDFGEPQYLTPWACQKTLGSQGKAGSHPAQIWTMGLR

SEQ ID NO: 267064 - protein, 235 aa, Zea mays
  unsure (1)..(235): unsure at all Xaa locations
  Clone ID: MRT4577_175162C.1.pep
MGPAVPDRTRFVMGKLIRHLHDFIREVELTNDEWFEGVRFVNSIGKTTTSTRNEAHRISDVLGVESLVDEIAHMHINESGETPTSSTILGPFWSPHSPFRPLGDTIVRNPHPDGQTTLMHGKVIDLDTKKGIPNAVIDIWQASANGKYDFQDPDNQEPNNLRGKFTTNENGEYWYYCYKPTAYSLPTDGAAGQLFKTLDRHPFRPAHIXXLMVSADNYKPLITQLXPRDDPYVTN

SEQ ID NO: 267065 - protein, 40 aa, Zea mays
  Clone ID: MRT4577_175163C.1.pep
KKKDLSLDQDNTNVIQQEPNENEITDMVKSLGEKTNCFVH

SEQ ID NO: 267066 - protein, 93 aa, Zea mays
  Clone ID: MRT4577_175164C.1.pep
LEAGRELRARLYEGKHSTPTKKKCCNCRNSKCLKLFRVASHRRLPSPPRSRSSTIPWFGERREDEGAGTSQSILEARQTHPLLLLKVKMHKMI

SEQ ID NO: 267067 - protein, 216 aa, Zea mays
  Clone ID: MRT4577_175165C.1.pep
MFEVVGQKTKEERVGEKEDAIGGQKEDDRVGSLALTNHDREGNNQDQDQKAPIDDHSSRGTHTGKAIIEESRPNCVDDHKTHRPMSPGTLALMCDEEAFEKMCDEQDTMFTTSQNAAPQQTVIVNHNQSALYAEQEKVVLTEFRDCLRKFVRYGRMKEERYSMAIKSETSGHPGQVNGVSQVPYSKVDVPAVKTYPQSSSSHLVAGKPVTGLLDKN

SEQ ID NO: 267068 - protein, 72 aa, Zea mays
  Clone ID: MRT4577_175166C.1.pep
MSIQKIFARTIFDSRGNPTVEVDLTTSKGLFRAAVPSGASTGIYEALELRDGDKANYHGKSVNKAVSNVNDI

SEQ ID NO: 267069 - protein, 772 aa, Zea mays
  Clone ID: MRT4577_175167C.1.pep
MELASIPLNRALTVRLLGCLFFLPLPTSARSDGSASNGALLPVNLAALPTRTPTPWRASAAMAADREKEREAELEGAMYTNCLLLGLDPAVLGSPSSPAGRVGLFRHSNPRLGEQLLYFLLSSLRGPAQSAKDFDKVWPIFDSAQSREFRKIVQGIISELEQHGALPRSNSRVSSLATCCGPRFVELLWQLSVHALREVHKRTFAADVVSNPLPAALTDVSYLHAASLLPVTKARIALERRKFLKNANIAVQRQMTWSNLAHEMTAEFRSLCAEEAYLQQELEKLQDMRNKAKLEGELWDERLSGSSGQNSHLVSKATRLWESILARKGQHEVLASGPIEDLIAHREHRYRISGSQLLAAMDMSSSVPHSELLSSKAGETSIILEKQEEFSQLFQEKEEALTRSDDRNGRTQQTVDVAEILRRWTHALQRIHKQSLHLAKANDGEGPELLRSASSGEASTHSDSLTATLAEHRQHLVSIQGLINQLKEAIPAMQQSIDELSEEVNSVSINSMDQLNSRLPLPVQIAGFGTSEESSSEVSEINSKLSSTHLDKPGGSPALKLPPLFSLTPSSSGKGIQTQKRSALARQRSQDITSEQKTLTIPSTKDQMNGSMHENDDYSAHDIRRSVREAALSKPLKNTERPQDKNSDDGSEHFFIPLSISAAKKEMDSVANRCNQRLGLSPQMKFPKSTSYNADTPINKSPILLSELNGHDSISAMSFLDPAGGLAHQSFITDDALDQVFSPLLMESSLFHDADEDLLAPLSETDAALMEY

SEQ ID NO: 267070 - protein, 53 aa, Zea mays
  Clone ID: MRT4577_175168C.1.pep
VKLFFLLFKIYRFRLKTIKSGQNQLSLADAKSYAFKKQSLPRCLYKPWNPAPS

SEQ ID NO: 267071 - protein, 62 aa, Zea mays
  Clone ID: MRT4577_175169C.1.pep
MEHVARLASQRAVVIFSTSSCCMCHTVTQLFRELGVNTMVVELDKDPRGNEMEKGLARLLGR

SEQ ID NO: 267072 - protein, 524 aa, Zea mays
  unsure (1)..(524): unsure at all Xaa locations
  Clone ID: MRT4577_17516C.1.pep
GRVRDHGKTTLLDYIGGGMLEAAEPEAATXQGVGGYQFLLLSDGSLQACVCRDGQTHEANRTRRAGGAGGGDKFTGNESGGRWSKFQKSNKNVVVQTRHVTINSTINKIHREGANAERVMQELSQIGIMPEMWGGDTPMIEISALTGDNVDELLETVMLVAELQELKANPHRNAKGTVIEACLDKAKGPLATLVVQNGTLNKADIIVCGEAYGKIRALYDDCGKLVDKAGPSNAVQVIGLNNVPLAGDEFEVVDNLDVARERANGRAEALRIERISAKAGEGKVTLSAIAASVSSAKQVGIDTHELNVILKVDFQGSIEAIRXQAIQTLPQENVSLRFLLQGPGDVSVSDVDLAVASEGIIFGFNVRAPGSVKNYAKKKGVEIRMYKVIYDLIDDLRKAMEGLLEPAEEEVPIGSAKVRAVFSSGSGKVAGCMITTGKVVQDCNVRVLRKGKEVYVGSLDSLRRVKETVKEVGAGLECGIGVDDFDEWEEGDIIEAFNTVNKARTLEEASATVTAALKDAGVQL

SEQ ID NO: 267073 - protein, 94 aa, Zea mays
  Clone ID: MRT4577_175170C.1.pep
MDGGKKSRNPHKASADYRSDRKSASGMSGDPKKGGRGGKFTWEGADDYGYGYADDYGYGYADEDLGLISKKGNSNSGRASQAQGGGAAKKDDDE

SEQ ID NO: 267074 - protein, 86 aa, Zea mays
  Clone ID: MRT4577_175171C.1.pep
MDGGKKSRNPHKASADYRSDRKSASGMSGDPKKGGRGGKFTWEGADDYGYGYADEDLGLISKKGNINSGRASQVQGGAAAKKDDDE

SEQ ID NO: 267075 - protein, 51 aa, Zea mays
  Clone ID: MRT4577_175172C.1.pep
SLFRFRFFARYRFFCRSGNQFPVAIWYSPCQFVRVICNPPSIVLFHMSFAS

SEQ ID NO: 267076 - protein, 101 aa, Zea mays
  unsure (1)..(101): unsure at all Xaa locations
  Clone ID: MRT4577_175173C.1.pep
KPWAVTPTLIRAWQAHTPLXRQLGRKIAKKGPATDIALSTTVCGKPESGEMGTAPLVSGGIISRGGVVVGYRRSGDPLTLCAAALSRXRLLSAFLPFXLSR

SEQ ID NO: 267077 - protein, 118 aa, Zea mays
  unsure (1)..(118): unsure at all Xaa locations
  Clone ID: MRT4577_175174C.1.pep
VPVHQFFGWFFGPLAPQPPNGQTPAPAPLNKNPPGGPQKPPGGQWPPYFRRRPFFPLXWKGPKKKSPPPPQEKGVFSVLPPXSPPAPPGGGGIPVXWFWGPPPPMGPFVIRILASPWR

SEQ ID NO: 267078 - protein, 154 aa, Zea mays
  unsure (1)..(154): unsure at all Xaa locations
  Clone ID: MRT4577_175175C.1.pep
RVCALTRPXARAADHPPSAFLLLLLLLGCASLAIGGADMARHVLLGVKENLPAANSGEGGGLCRFSGGEHNRHENALMEVLRLGEAKEQVEGCTLHHLTLEAVEAGRKKLYKAKGWVKPWLDFKELQEFRHXGGATVFTNDRLGAKQGGHDPAW

SEQ ID NO: 267079 - protein, 144 aa, Zea mays
  Clone ID: MRT4577_175176C.1.pep
MEVAAAAAAVAVPRHRVKKQINLFYCAECEELALKVAAASDAIQLQSINWRNFPDGFPNLFINNAHDIRGQHVAFLASFSSPAIIFEQISVIFALPKLFIASFTLVLPFFPTGTFERVEEEGDVATAFTLARILSMIPKSQRRA

SEQ ID NO: 267080 - protein, 47 aa, Zea mays
  Clone ID: MRT4577_175177C.1.pep
LCCIVYRWSFGLPALDVKIKGYGTLLDAYLEVSFLLPHARLRTWTHL

SEQ ID NO: 267081 - protein, 88 aa, Zea mays
  Clone ID: MRT4577_175178C.1.pep
ARDTVTVTRFQSPSLCYKGINQGRPMSSSSCCHRRRAVLPVTASIVPYLLLLVDFSCQADIVVFATHTHCYGGKKHAGAARTDFRAGD

SEQ ID NO: 267082 - protein, 82 aa, Zea mays
  Clone ID: MRT4577_175179C.1.pep
GGYGLIIPRIDCDVATVGDAPTPSDPAVSEADYIAHAHGSNALHETEHIRDRSTNQNQNERECSAWHCENQTKALHVNLSSV

SEQ ID NO: 267083 - protein, 54 aa, Zea mays
  Clone ID: MRT4577_17517C.1.pep
KHITPKTKHLHLKKHGPPPRARVISNGGMRLQLLYYTTIYNSITSPLSQHILPP

SEQ ID NO: 267084 - protein, 46 aa, Zea mays
  Clone ID: MRT4577_175180C.1.pep
WLRTQSKVRLLGLNSEPTNLASDCDITAGLRSSPPIMGMASVCHMS

SEQ ID NO: 267085 - protein, 545 aa, Zea mays
  Clone ID: MRT4577_175181C.1.pep
MGSTAAASVLPVSAGSGENLVLILDYGSQYTHLITRRVRQLGVLSLCVSGTAPLASLEGLRPRAVILSGGPHSVHAPGAPAFPEGFLGFAAAAGAHVLGVCYGMQLLVQSLGGAVVSGERQEYGKMDVEVTAASSALYGQAETGKRQTVWMSHGDEVVRLPEGFEVVARSVQGAVAAIENRENRFYGLQYHPEVTHSAQGMETLRRFLFDVCGIKADWKMQDVLDEEIKTIQSTVGPDEHVICALSGGVDSTVAATLVHKAIGDRLHCVFVDNGLLRYKEGERVMTTFESDLHLPVTCVDASEQFLSKLKGVEDPEKKRKIIGREFIAVFDDFAHKLEQKIGKRPEYLVQGTLYPDVIESCPPPGSGRTHSHTIKSHHNVGGLPKDMKLKLIEPLKLLFKDEVRKLGGILNVPDSFLKRHPFPGPGLAVRVLGDVTQGNALEVLRQVDEIFVQSIKDAGLYDKIWQAFAVFLPVQTVGVQGDQRTHSNAVVLRAITSEDGMTADWYYFEHAFLVDVVNKICNNVRGINRVCQDITSKPPATVEWE

SEQ ID NO: 267086 - protein, 311 aa, Zea mays
  Clone ID: MRT4577_175182C.1.pep
MPKDRSSRVSSHESRRARASPYLSASHGQSSSSRRSQESPAAAAAKQAAEWEDVRCSVCMDHPHNAVLLVCSSHEKGCRPFMCDTSSRHSNCYDQYRKASKDSSKDSGTECSECQQQVQLSCPLCRGPVSDCIKDYDARRYMNTKVRSCTMESCEFRGAYQELRKHARVEHPAARPMEVDPERQRDWRRMEQQRDLGDLMSMLRSGFNANVEDNSGELGATEEGEEEAARTPASITMVFIMPSRGSIMQYLTERSRAIILVSRRRASSGSGDAEATAPDSEEGDDPMLPSAEASAGSQRSSEEEADGDHAQ

SEQ ID NO: 267087 - protein, 140 aa, Zea mays
  Clone ID: MRT4577_175183C.1.pep
DSDLRIMPLEGAKSVVSGRAQHEPLASPDQDSSNSCGIICRWRNSTSEKKGPSSSPERIGWGQRRRRSDRRRRRNRAAAWTRRRRNGPGGGRFYRFQRETAAAAGGLRIRSGSRRVDANPGDERGKGGGNDAGRSPARPA

SEQ ID NO: 267088 - protein, 122 aa, Zea mays
  Clone ID: MRT4577_175184C.1.pep
HFSFFTNGNGAQNSKTEQTTPNPHGLGDLLFKAFRPVFLSFGNLKNLCFFFFGEAGGGFWGGGLPRAYGGKKKKKLTKLGGRFYHGFGAVFIPGGGTTFLGRPDPSRPKGPVFFWAGGPFFL

SEQ ID NO: 267089 - protein, 94 aa, Zea mays
  Clone ID: MRT4577_175185C.1.pep
NPHGTVFFPEFGHILIKIVGGLHQELRMVPPGLLSTMRTCLLAHWVFPHLGCRALAWSVPSNGAPTAGAINKGCASSASSAPPSESGGFYFFSL

SEQ ID NO: 267090 - protein, 285 aa, Zea mays
  unsure (1)..(285): unsure at all Xaa locations
  Clone ID: MRT4577_175186C.1.pep
VRLQVPVRNSRVDPRVRKMAAGVEAAAEVAATEPKMEEESGAPCVPSGNGAPGPKGEERPTQNEKRKEKNIKRGGNRFEPYSNPTKRYRAFITNIPFDVKWQSLKDLVKEKVGEVTYVELLMDAEGKSRGCAVVEFKMEESMKKAAEVLNKHSLSGRPLKVKEDPDGEHARRAMQKAGRLGSTVFVANLDYKVGWKKLKEVFSMAGVVVRADILEDKDGKSRGIGIVTXEQSIEAVQAISMFNGQLLFDRPMHVKMDERAXPXGDFFPXXTPQQXPHGLXGIGMG

SEQ ID NO: 267091 - protein, 178 aa, Zea mays
  unsure (1)..(178): unsure at all Xaa locations
  Clone ID: MRT4577_175187C.1.pep
MSSASLTVSLFLLPTSRTLRRPPSVLPPAPRVRAPRPIPRSTPPAXEXSPTTTGSPLTVPPVAPTSPMSRARPPRLPPPPLTRPPLPVPLPSLMLPPLLPLPTPSLVLNPAPRRPALPPAPALPLAPLQRYPRLATPPLLSLVVSPSSVSLPLSSLCKLVSYFRIIWFDRTEGFNGFY

SEQ ID NO: 267092 - protein, 180 aa, Zea mays
  Clone ID: MRT4577_175188C.1.pep
FRLLSSLLPLNGKGPPNANRLFPRVGKFFYYAGPLCFPVGKLVVGAGPLSFVSSLLGVPRLYFFWVRSLFWGPLCLHFIFPAGYVVWPCLRPTFFPRGLPLPWPPLGWDSPLGRLRPRSVSRLFPFGLARPMWMALIILCCIANKISMVKKKFGFNKKKKKKKKKKKKKKKKACTCPGGR

SEQ ID NO: 267093 - protein, 134 aa, Zea mays
  Clone ID: MRT4577_175189C.1.pep
WCPHSAAVVKAIIRHNMEESILAGRSGMSGIGVSIEWTCEDAKGEMHHERERDRWRSVVIKVHACLQWNVCSCKTIRCQFGGLAAWARHLVSPSDPSYLRTRLVQIAVCHCPSSLGSPSGGRWLQDSVSELRKS

SEQ ID NO: 267094 - protein, 65 aa, Zea mays
  unsure (1)..(65): unsure at all Xaa locations
  Clone ID: MRT4577_17518C.1.pep
ISXXXFCPTXXXTGXIPFIPHAPNXKHVXSNTLGDQWDLXKLXXWXHHXGTSXXQXXNGTVSXXL

SEQ ID NO: 267095 - protein, 91 aa, Zea mays
  unsure (1)..(91): unsure at all Xaa locations
  Clone ID: MRT4577_175190C.1.pep
PQVSLLAPEQTPVVVHVCGLEMPPDAVEAGGGMEKTLPEPVGTQVSMXEIQNESACGLDVGACENRAREMPGXRGAGGSLKVTILQSSDSR

SEQ ID NO: 267096 - protein, 88 aa, Zea mays
  Clone ID: MRT4577_175191C.1.pep
LVGERGCNKVARQQVLVHANRGISEGCVVPGGFIDQAPARAIYKKWGLITWCLALHTFGCPWKAYHLGNRWAKNNPLFLPRKKREKHV

SEQ ID NO: 267097 - protein, 70 aa, Zea mays
  Clone ID: MRT4577_175192C.1.pep
VGIVGSFMGLSHLLNIRDRFFVTDPCFNSLHHNVRSGSIACSVFLVSYIFYSFLVGKEFSHTLEQVLIKD

SEQ ID NO: 267098 - protein, 90 aa, Zea mays
  unsure (1)..(90): unsure at all Xaa locations
  Clone ID: MRT4577_175193C.1.pep
MISFFQTCHVQAMVTIYNYQQFRHISAPGWQLGWTXAKKEVIWSMVGAQTTEQGDCSKFKTNPPHCCKRDPTVIDLLPGTPYKDQVGNCC

SEQ ID NO: 267099 - protein, 205 aa, Zea mays
  Clone ID: MRT4577_175194C.1.pep
TCFHEFAEFTTEDVGTAESGLNSMVLANNSEGVLLPLNEPVHGTKRRSQIQTFLEHHGGPGVQHIAVASSDVLRTLREMRARSAMGGFDFLPPPLPKYYEGVRRIAGDVLSEAQIKECQELGVLVDRDDQGVLLQIFTKPVGDRPTLFLEMIQRIGCMEKDERGEEYQKGGCGGFGKGNFSELFKSIEDYEKSLEAKQSAAVQGS

SEQ ID NO: 267100 - protein, 49 aa, Zea mays
  Clone ID: MRT4577_175195C.1.pep
GVYVPLGSGTVTGTWVAVGPAHDVDDAVVAHHHSLSRTYHAGEGQGGVR

SEQ ID NO: 267101 - protein, 33 aa, Zea mays
  Clone ID: MRT4577_175196C.1.pep
DEEMRDIALQYVDQLHRAGIDTSEFPWRLPESH

SEQ ID NO: 267102 - protein, 100 aa, Zea mays
  Clone ID: MRT4577_175197C.1.pep
YPDSVRCIISGLVGEREQSHISRRTCVSLRESPLWRPPRTGSLTSEPLVLAPGTSPPRSVKLRVARPAAPRAQHSIWAGSTGVVRCQAEAIPRSPLAVWR

SEQ ID NO: 267103 - protein, 57 aa, Zea mays
  Clone ID: MRT4577_175198C.1.pep
PTRPIDRVTACMLCNMPVLMACIIELFSVVMFVVLPTKRRLIYFCGLATVYLFRSVT

SEQ ID NO: 267104 - protein, 150 aa, Zea mays
  unsure (1)..(150): unsure at all Xaa locations
  Clone ID: MRT4577_175199C.1.pep
MNMSGNDDKPHAAADRIKAATLSVTKGLSRAQAEWATTVAARNVNAYGQKEEGPSRWQERKEAKSQMYLMSTEKVAKLGTVKPKASETSSIGAYTQCQKCFQHGHWTYECKXERVYISRPSRTXQLKNPKLKKCVPVSYRFENPDGDQRS

SEQ ID NO: 267105 - protein, 77 aa, Zea mays
  Clone ID: MRT4577_17519C.1.pep
WVARLKKMVIYFSLEPPLYMGQKSRFCSEPPPGVYLLNFCIERERRFSPQHFFFPFFLCNMQQSLSLIKTPIYVTLG

SEQ ID NO: 267106 - protein, 225 aa, Zea mays
  unsure (1)..(225): unsure at all Xaa locations
  Clone ID: MRT4577_1751C.1.pep
PFPGRPXSAHASXDDSIKTSTIDACKEQLSERKVAESSGGSPPDNSNIGGSIKSRSSPPQQHPIPECSDLVNFPFTEAQHLQLRAQIFVYGALIQGTPPGEAYMVAAFGEPVSGGKPTWEAAWRAAFERFQYQKSLCISLETPTSSRIGSTVPEKASKGTSITSVPASKRGGKIVAPAHPAVTLHSPTSNIPFGSSTFNLQRGTHLDFSQAVSPFAYNSHMRHLS

SEQ ID NO: 267107 - protein, 270 aa, Zea mays
  unsure (1)..(270): unsure at all Xaa locations
  Clone ID: MRT4577_175200C.1.pep
MSGNDDKPHAAADRIKAATLSVAKGLSRAQAERAAAAAARNVNAYGQKEEGPSRWQERKEAKRQMYLMSTEKAAKLGTVKLKASETNSVGAYTQCQKCFQHGHWTYECKNERVYISRPSRTQQLKNPKLKKSVPVSYQFENPDIIREREEELKLMKEKQKKEKAERKKGKSKRKHRSPSDSDSNSSGASVFDSESSVTGSEYSSGSSSSYSSSDSEDKKRQHRRKQKKRRHRRDSTSSSSSSSESESASDXSDSDDKGRRRKSKRRAGRR

SEQ ID NO: 267108 - protein, 197 aa, Zea mays
  unsure (1)..(197): unsure at all Xaa locations
  Clone ID: MRT4577_175201C.1.pep
INMSGNDDKPHAAADRIKAATLSVAKGLSRAQAERAATAAARNVNAYGQKEEGPSRWQERKEAKRQMYLMSTEKAAKLGTVKPKASETSSVGAYTQCQKCFQHGHWTYECKNERVYISRPSRTQQLKNPKLKKSVPVSYQFENPDIIKEREEEQKXERKAEEGESRKKRGKSKRKHRSPSDSDSSNSAASVFDSDSE

SEQ ID NO: 267109 - protein, 593 aa, Zea mays
  unsure (1)..(593): unsure at all Xaa locations
  Clone ID: MRT4577_175202C.1.pep
MRRHGWQLPYHPLQVVAIAVFLALGFAFYVFFVPFVGGDRLQYLLMGLYTPLITCVILLYIWCAGTDPGDPGIFLNSKRPPEKQGSSTHEYPEGVSFSNCCRVVHNSENISNNFEVKDSSSYLTFTRVLCLIYFPFSCLCKRWFHSDDQSSEQNTSEEGMFFCSLCKAEVLQHSKHCRVCNKCVDGFDHHCRWLNNCIGKRNYKGFFILLASAVLLLIMKWLVGALVLILFFMKRGEFSGQITSKLGSSFSVVAFVIVVVTCTLLAMVATIPLSQLLCFHILLIKKGISTYDYIVALREQEQQEHSEHQSPQMSIISSITGLSTSSSFGPLHRGSWCTPPRLLVEDQDVFHPDMPQNSTGKKARKDEGSKRKPPGAVKISTWSLARLNAEDVTKAAVEAKKRSKVLQPITRRGNILKPDKRTDKSRVFLPVPEQSPDPMARTSASGTDGNLSDMMMETPASLAPLQHEARSDYQPSAVTSIMNLNLTSSPESSLESPDLHPFRISMSGADELRSFMSLAASESTAQKTIALSRSTSGGYEASGGDDSDQIPSRIVHRSSNWTNVILNSGRQATMSDLNLPXTPVGFITNTRLT

SEQ ID NO: 267110 - protein, 100 aa, Zea mays
  unsure (1)..(100): unsure at all Xaa locations
  Clone ID: MRT4577_175203C.1.pep
SLWSGCPPSSACLFLVPGLPVPGACPFPVGAPPPPSSXCALRPSCAGARCCPAVALLRPXVVRGSXSRGXPALXVAARXVGPSASPPPRSASRCXSSPAG

SEQ ID NO: 267111 - protein, 150 aa, Zea mays
  unsure (1)..(150): unsure at all Xaa locations
  Clone ID: MRT4577_175204C.1.pep
MNMSGNDDKPHAAANRIKAATLSVTKGLSRAQAEWAATAATRNVNAYGQKEEGRSRWQERKKAKSQMYLMSTEKVAKLGTVKQKASETSSVGAYTQCQKCFQHGHWTYECKXERVYISRPSRTXQLKNPKLKKCVPVSYRFENPDGDRRS

SEQ ID NO: 267112 - protein, 112 aa, Zea mays
  Clone ID: MRT4577_175205C.1.pep
SNDNFITEVRFIQKPPNNNLLHGRIHSPTIIHIQSHNQAHTGLLVQMPHQHVLGCRNLVLSAIPCRAKRGGPIPINYRRGKMPYCLAKMKLNVTHRPGLFTACMYLLIQRAG

SEQ ID NO: 267113 - protein, 77 aa, Zea mays
  Clone ID: MRT4577_175206C.1.pep
PRVRDRAEELLVLKINVSIHLEDRAEELLVSLDPSKSNHKKLPTPPPKRRLGINMLTGRNKLVEYRLPPKIEKKVVN

SEQ ID NO: 267114 - protein, 109 aa, Zea mays
  Clone ID: MRT4577_175207C.1.pep
KNGLFVCRIWGNLCHFGGRKRGFYKPFPPRKKFFFFTRMGGPPHMGFFLRGQGFFRPPPFGFLIGSFSVCLPPPPPLLGVVSPLFGKKPLKWVDPRQFPPKGLVYFSKI

SEQ ID NO: 267115 - protein, 65 aa, Zea mays
  Clone ID: MRT4577_175208C.1.pep
FLFQILSIIIYLLLISEYVQYSYGHCISHFFQYPISDDKSSFYTKINHLYTLVTFLVSFSLIATT

SEQ ID NO: 267116 - protein, 150 aa, Zea mays
  unsure (1)..(150): unsure at all Xaa locations
  Clone ID: MRT4577_175209C.1.pep
RPGANPSQLWTIPAPPPRLIRRHSTSSRLHPLLPPSPKPSAQPGHSFSTLARGCFVPAFLSATRVHNRGLLGHGLLLPILARPRGWLTKQPALEADRPVRRRCIHIFLIALSLPQDDASLEAPTPXARLHAGGDGCRHIPRHAHPRLRRA

SEQ ID NO: 267117 - protein, 80 aa, Zea mays
  unsure (1)..(80): unsure at all Xaa locations
  Clone ID: MRT4577_17520C.1.pep
LLRAKLRKLSPPVNGHFFQAGFHASAPTCQNRDXSFASYQNGTVELSLSRLWGWAGVPMNRSTVNLLAVYIGTDLAVLTE

SEQ ID NO: 267118 - protein, 63 aa, Zea mays
  unsure (1)..(63): unsure at all Xaa locations
  Clone ID: MRT4577_175210C.1.pep
MGFLEGFSGVVMPPNPVXVPFVVPGPFGGEGGVDYGVPKIWEMTPPGKRYENKSVLGQSPLKE

SEQ ID NO: 267119 - protein, 65 aa, Zea mays
  Clone ID: MRT4577_175211C.1.pep
LLDESDIASSKSTSVAAFSHLHGCEISGEPQLNRLLQDRTYSICGTTAHTCTDRRYLQYGTLNVI

SEQ ID NO: 267120 - protein, 83 aa, Zea mays
  Clone ID: MRT4577_175213C.1.pep
FRPFSRWDSVGILDPPPSWVFGGGGCQGASRFASMLRRVGCSLVGSPGCPVSRLGCCIYPVFVAWVVRFAPGVDIPGYPSYSL

SEQ ID NO: 267121 - protein, 180 aa, Zea mays
  Clone ID: MRT4577_175214C.1.pep
SARVDMQFPNGQLRYVAGDGFTARAFLPLRGGVLQAHGKFPGEKRLSFSFKNRNGGSVVPMVQWPDKSLSVGVVQALSWRRSGLMLQPATQISICPTIGGRHPGVCVELIHSADDNVGVVCGYSHTASSPASAYASISIGRSKLNGGAARSGLAFRVDAPLLHGFGRPWFSVQMNSGIEF

SEQ ID NO: 267122 - protein, 30 aa, Zea mays
  Clone ID: MRT4577_175215C.1.pep
SLTTMVSEYYILVQCILFLINKSKGIGFSI

SEQ ID NO: 267123 - protein, 83 aa, Zea mays
  Clone ID: MRT4577_175216C.1.pep
LTECHDHVQGESPVPRRSPKWLRHRMFQIEGTWSTSRVRETRRSQELPLGQLNFEWVITRTVHAVSSPCSDQTKTVRTKWTSR

SEQ ID NO: 267124 - protein, 47 aa, Zea mays
  Clone ID: MRT4577_175217C.1.pep
FLSLCMMLSGASLAWRLYHSSLYALLSWYQTRLYALFVYKKKKKRAP

SEQ ID NO: 267125 - protein, 192 aa, Zea mays
  Clone ID: MRT4577_175218C.1.pep
MEEGVEIDSKPRRHPDPVPGHRELSAPPVHNVTPPHEVADGRPELAVTIWSGADMICRINGCQRPCYQGWKGKLLNRVGRLVLVKSMLSSIPVYHMTTTTLSKWTVKKIDRLRRNFLFIGVDDARKGHFPVNCTRGLHISVVGQWSSSTQWNIWKKRCKRVFQQQAKTYHHLALRIREDVLNYELALQEVGE

SEQ ID NO: 267126 - protein, 133 aa, Zea mays
  unsure (1)..(133): unsure at all Xaa locations
  Clone ID: MRT4577_175219C.1.pep
GAAIATLEYIEVSTFLGTGLVYPVPHNVRMVVRLQFRLEGQGNAGDKNVLTTXSCSDRALXEHGAAAPDYLHGSLLRDYRLEPLGLQMPVRYLQLEIXSMDHNLLMIDDVGIIGTRTVICEVKFTPMHTYCEV

SEQ ID NO: 267127 - protein, 66 aa, Zea mays
  Clone ID: MRT4577_17521C.1.pep
EHKYELGGEYTNIGVQWKSLHGPSSPFPFNAPLRLHQVYSNTKFSLKGSSCSTSPPKYVHHSHMDL

SEQ ID NO: 267128 - protein, 52 aa, Zea mays
  Clone ID: MRT4577_175220C.1.pep
LRARAETKSHGQRIKLLSLPPRLPPRKMQKHSLNNHTAPLTPYLLYHSNLHT

SEQ ID NO: 267129 - protein, 107 aa, Zea mays
  unsure (1)..(107): unsure at all Xaa locations
  Clone ID: MRT4577_175221C.1.pep
MHAMGSYIGQGGSAALEXALVLARSLARARAAAAGGRDDGDDEPFLLGAATAIREYVRERRLRVARLSLEAFVMGELLRAKSMATKLACMAILALLGTKALGHTNYD

SEQ ID NO: 267130 - protein, 221 aa, Zea mays
  Clone ID: MRT4577_175222C.1.pep
MARGKVQLRRIENPVHRQVTFCKRRAGLLKKARELSVLCDAHVGIIVFSAHGKLYDLATTGTMEELIERYRTASSGEAADGCGDNNRMDAKQETMVLQQEINLLQKGLRYIYGNRTNEHMNVEELNALERYLEIWMYNIRSAKMQIMIQEIQALKSKEGMLQAANEVLQEKIVEQSSLLDVGMVVADQQNGHFSTVPLVEEMISNPLTILSGYSNCRGYSF

SEQ ID NO: 267131 - protein, 72 aa, Zea mays
  Clone ID: MRT4577_175223C.1.pep
IQVTPWGPVSKVRLILQADNVIIHNFFLSTKNRFSSLTEILHSFTSLNSTLVISTDEFIFDISQRCDRRLTK

SEQ ID NO: 267132 - protein, 270 aa, Zea mays
  unsure (1)..(270): unsure at all Xaa locations
  Clone ID: MRT4577_175224C.1.pep
MDLGIDDRPSMARGKVQLRRIENPVHRQVTFCKRRAGLLKKARELSVLCDAHVGIIVFSAHGKLYDLATSGTMEELIERYRTASSIEAADGCGDNNRMDAKQETMVLQQEINLLHEGLRYIYMNRTNEHMNVEALNALCKDADXWLXHQSTEKARHVKTPVHINSTKTRGFQHPFTSLKVSACTQEGMLKAANEILQEKIVEQSSLLDVGMVVADQQNGRFSTVPLVEEVISSNPLTVLSGYSSCRGSEXGLLLLTVITNSLGAPSVDYY

SEQ ID NO: 267133 - protein, 196 aa, Zea mays
  unsure (1)..(196): unsure at all Xaa locations
  Clone ID: MRT4577_175225C.1.pep
GXLXELIESTKXSAGKTTTDGCGRHNRMDPKHETTVLQQEINLLQKGLRYIYGNRANEHMNVDELNALERYLEIWMYNTRSAKMQIMAQEIQALKSKACQNPVHINSTKTRGFQHPFTSLKVSACTQEGMLKAANEILQEKIVEQSSLLDVGMVVADQQNGRFSTVPLVEEVISSNPLTVLSGYSSCRGSEMGYSF

SEQ ID NO: 267134 - protein, 244 aa, Zea mays
  Clone ID: MRT4577_175226C.1.pep
MSGGVRRVLEAWRLGVVKYGEALQLQERLVADRKAGRVGDLVLSLQHPPTYTLGKRREKAERNLLAPEADLRALGAEIHRTERGGDVTFHGPRQAVLYPLLSLRTLGLGARRYVEGLESAMIQVAALHGVSARPGDPGETGVWVGDRKIGAIGVRISSGFTWHGLAFNIDPDLEYFEHIMPCGIAGKGVTSLRREVGDGAELPADGVIHDQLVGCLATTLGFTDVEFKDDSERGDLIGVTASQY

SEQ ID NO: 267135 - protein, 145 aa, Zea mays
  Clone ID: MRT4577_175227C.1.pep
KNQRCFDQFTGFAFQGRQLRGNWGPPPPKDESPPKAPKGGGAAPPPAFFDSANKVYVGTPGWGVDNSPLENLFSEQGQVLYVKVLSPRENARSRGFGFVPYGPPQKVTNAISNLEGLALDGKQIPVPAAESKPKRQFLDYFFMGV

SEQ ID NO: 267136 - protein, 110 aa, Zea mays
  unsure (1)..(110): unsure at all Xaa locations
  Clone ID: MRT4577_175228C.1.pep
ARFPQTPPEHRHRQAPPGHRHLCREREETAGKGDGPTSGSEPGTTYSGAGARQHDRGEXTANDQSNRTTPANGDVTDTERRTGDAAQNQADTNPNNTEPRGQVFFCPPPP

SEQ ID NO: 267137 - protein, 55 aa, Zea mays
  Clone ID: MRT4577_175229C.1.pep
FTPDADLSQGTSSIERLWDCSYIDHGMRGQSEDMEPSEDLSLTRQYGELADRYIR

SEQ ID NO: 267138 - protein, 155 aa, Zea mays
  unsure (1)..(155): unsure at all Xaa locations
  Clone ID: MRT4577_17522C.1.pep
KKKKKKKKKKKKKKKKKKKRGGPFKRTQFYFPCLATQYFFFGGPKFNFPARFLPPWDRENPGVXQLNPFEKNPLFPSWLNSKKARXHSPFQKFAPPNGKWDPPXTAPLTGGGGGVPPRGPFTFASPLAPLPFVFFPSFFPPFPGFPRKVLNGGPL

SEQ ID NO: 267139 - protein, 62 aa, Zea mays
  Clone ID: MRT4577_175230C.1.pep
GVCHWPFKLCKCLEGRQVRGFMILCKVGKMGYSASAFIWETAGFFHFRCCESWGNGFVFRGH

SEQ ID NO: 267140 - protein, 55 aa, Zea mays
  unsure (1)..(55): unsure at all Xaa locations
  Clone ID: MRT4577_175231C.1.pep
KKIKNKKXTMCERSRTNGLXKSDGRSLCSASCMLGHHIILKYVTALATPNILDSR

SEQ ID NO: 267141 - protein, 366 aa, Zea mays
  Clone ID: MRT4577_175232C.1.pep
FLPPTGSEKLYIDDTEVVVEIRTQFERASQSASEVSKMLEVGKMPYYQKSSGFKVSAMMVCGIPTMEEEFLRFEEDKAMGSGNLSSTLQKLYMWEKKLLEEVKTEERMRVLYDRKREELKMLDEKGAEAHKLEATELYIRKLSTKISIAIQVVNTISEKISKLRDEELWPQTCELIQGLMRMWSVMLECHQIQLHAISQARYIDSMIDTAKFGDDHMDLIKRLELQLLDWIACFVAWVSAQKNYVKTLNRWLTNGVIYVPEETEDGAPPFSPGRLGGPPIFVICNNWAASVDRISEKEVVEAMQAFASNVLNLWERHRSEQRQGLMANKGMDRDLRVMERDEQSMRKALEAQNKKLVLVSSQGSVF

SEQ ID NO: 267142 - protein, 220 aa, Zea mays
  unsure (1)..(220): unsure at all Xaa locations
  Clone ID: MRT4577_175233C.1.pep
CKFGDDHMDLIKRLELQLLDWIACFAAWVSAQKXYVKTLNKWLTNGVIYVPEETEDGAPPFSPGRLGGPPIFVICNNWAASVDRVSEKEVVEAMQAFASNVLNLWERHRSEQRQGLMANKGMDRDLRVMERDEQSMRKALEAQNKKLVLISNQGSVSLSAQALHERGPGAEAGGSLQTGLRNIFEAMENFTSASANTYRELHLRAEEEKARVAQESGSVS

SEQ ID NO: 267143 - protein, 77 aa, Zea mays
  Clone ID: MRT4577_175234C.1.pep
MTGKAKPNKHTANEIAVMIDAATTNRGGGKAGLADRLWQDKGGHAKLACPLCRTPAPDIECMQIHHEALHRKLPFEP

SEQ ID NO: 267144 - protein, 36 aa, Zea mays
  unsure (1)..(36): unsure at all Xaa locations
  Clone ID: MRT4577_175235C.1.pep
GGGGKKKKIXXEQNASQRIPHHSLSTLNFXLMRIDR

SEQ ID NO: 267145 - protein, 78 aa, Zea mays
  Clone ID: MRT4577_175236C.1.pep
TNPWKREMGQGLFQSACRDLDRVGQLEFGPTPERVAGVRNDGERDANFETQTIWLPPTQETGERTWIKKIVELNHISW

SEQ ID NO: 267146 - protein, 128 aa, Zea mays
  Clone ID: MRT4577_175237C.1.pep
MGRGKRGRGSPRCTGDKRKRNPSLPSEDFGDLEYLEEERVGLEGSDESKVSSDEENSSGSSEERSGNDDEGGGSGDDSGDGDGGEGDGSSGGGGDNGGDSDGGDGGGKGSSGDVGSGRGKASDKAPLV

SEQ ID NO: 267147 - protein, 107 aa, Zea mays
  Clone ID: MRT4577_175239C.1.pep
HRRNSSSSVARLVRLTSAFWHVSPSSIGALDRASYAITCSRLCVPCASRRRPSDGQADQNRRRAPCYGTQARAAVITTAGCVVVYAGACGDATSDSQSMHHRPYSSI

SEQ ID NO: 267148 - protein, 68 aa, Zea mays
  unsure (1)..(68): unsure at all Xaa locations
  Clone ID: MRT4577_17523C.1.pep
PHVRXTTTYPFSPWKTPKGPVTNLWVRTNTPQXXTKLTNPPXTILLAGATNIFNRFLTNTKTPTSIMN

SEQ ID NO: 267149 - protein, 202 aa, Zea mays
  unsure (1)..(202): unsure at all Xaa locations
  Clone ID: MRT4577_175241C.1.pep
FGFAGGTFNEQGELSKYVNVKFPSRLCSLGLTYMGTNEMPIMFPFSAILKKLDLQYTFLTTEDHCQLIAKCPNLLVLAVSSPAHVNYEDTEXNLFMVIDSIFFPXVRNVIGDRGLGVVADTCKKLQRLRIERGDDEGGVQEEQGGVSQVGLTAIAVGCRELEYIAAYVSDITNGALESIGTFCKKLYDFRLVLLDREERITD

SEQ ID NO: 267150 - protein, 41 aa, Zea mays
  Clone ID: MRT4577_175242C.1.pep
HACVLVGSTHVLRSDLCLEQKIKTHTRISVKCGALDAQIDI

SEQ ID NO: 267151 - protein, 151 aa, Zea mays
  unsure (1)..(151): unsure at all Xaa locations
  Clone ID: MRT4577_175244C.1.pep
SYAYLAPIIIYQKLVATARKNGFIVLXKRPCKDVXVSTSNMTKMCTANXHFVAIHMFCVMKIGYIVPSSHNXDITILYRTDNLLIDITDDVCVSLLTSDEITIDDLRLPTDVTLAAQXVYVGVKRVKDRVVTVSAXWWYDQICAWKDAGPW

SEQ ID NO: 267152 - protein, 78 aa, Zea mays
  unsure (1)..(78): unsure at all Xaa locations
  Clone ID: MRT4577_175245C.1.pep
IFNXXXVFSIFSPSFYSPSYRENWYAFRDGFGILGLNQGFPEGWGEGWGLTALAFFGHFLWKFFLKKGLFGVVVPFRV

SEQ ID NO: 267153 - protein, 62 aa, Zea mays
  Clone ID: MRT4577_175246C.1.pep
MGYLSELLGGKEMVPIGPLLVDGSDTGGGTTSPDPDRVTRGLDLQPHAFVVLVSFRNEYFMV

SEQ ID NO: 267154 - protein, 110 aa, Zea mays
  unsure (1)..(110): unsure at all Xaa locations
  Clone ID: MRT4577_175248C.1.pep
PTPRTHRTLGTPGSHSPRLHLLLSSGCNVDNLHQPAAAQGLRLQLLRTLPTDRYLLSTNQPAPKDGSPCTERXRXVAGNDGDLGDAVTVMLPFTFRSFRCTHLIHGGPTE

SEQ ID NO: 267155 - protein, 81 aa, Zea mays
  unsure (1)..(81): unsure at all Xaa locations
  Clone ID: MRT4577_175249C.1.pep
ITGPVGNEMLMAYDPNATVIMRATGXGIAPYXRLFLWLMFLYEQEDYKFTGLAWLFLGVPTSDSLVYKEEFENTMDMAPGN

SEQ ID NO: 267156 - protein, 446 aa, Zea mays
  Clone ID: MRT4577_17524C.1.pep
MANTSAFIPLHQAVTIRLNKTNYTLWRTQLLPFLWSTKLLGHLDGTTPAPSQTILTSTAAGAAVVPNPEYERWYDRDQQLLSGLLSSMIEEVLCDVVEATTAREAWDSLQRKFASSSRARTIQIRVDLAMCKKRDLTAADFFSKVRGLANELAAADAALHDEEILAYLFAGLPVEYDPFVTTMTTMMFTPTLDDVFAHLVAFEARQLRHHAELQLNLGASANVAGRQGSHRGRGRSGRGRGPITRGRGAPSRGGGRGSTSRPTCQIYEKEGHTARCCWYRMDETYQDDDPSANLAATSNYKVDTNWFLDTGATDHITSDLDRLAIRERYSGGDQVQVGNGAGFPVLTPINRMGQLRGNTVILLKPGNLATPATDYPAIAPAESAPGSVPAPASQDGASSVLPASGDSGASLAPPTDCATPPSEQPICTLVPATRTAPALAPERELG

SEQ ID NO: 267157 - protein, 59 aa, Zea mays
  Clone ID: MRT4577_175250C.1.pep
SKVKVTTILYSYDQTALKFGLVSDNTGTDSFLFRKWIGIQPLHPRWMYAAQALILVEEQ

SEQ ID NO: 267158 - protein, 137 aa, Zea mays
  Clone ID: MRT4577_175251C.1.pep
RTSSFKRSSLRFRSHHRHRRRRRRRRLPRLHASPRDPPPPVPVRGHDLTTPSPTLRLPPPVSDPPPRYVSTHAPLHPDGQWLIRTDVRVCASARSISMPAMIVCAMRRSWSVDDQRKAVSASHLALYAAQLMFMCYN

SEQ ID NO: 267159 - protein, 75 aa, Zea mays
  Clone ID: MRT4577_175252C.1.pep
MHVLNVTLMTAQRRDGHPSGDNVRLPSPAAAQEQVTPRAADCSHWCLPGVPDAWNELLYALILHRTRTTSLGGSD

SEQ ID NO: 267160 - protein, 89 aa, Zea mays
  Clone ID: MRT4577_175253C.1.pep
QADSKWCWFTIHVSVLDRAIAAVKQCATRLPARKRISPITGVLVALYGWGALLPVVGLMCEAVFSRVLVMGCIPSALEAIGEGATGCPV

SEQ ID NO: 267161 - protein, 96 aa, Zea mays
  unsure (1)..(96): unsure at all Xaa locations
  Clone ID: MRT4577_175254C.1.pep
VIEISMLDSLRTGFFVDSTRMIVVGKAVGFRTVIVGSWELVSGADVALXSMHNMHEALSELWEVALCAGDCDRVDCRTLVHHRRGYHNDCLSDTTL

SEQ ID NO: 267162 - protein, 103 aa, Zea mays
  unsure (1)..(103): unsure at all Xaa locations
  Clone ID: MRT4577_175255C.1.pep
ALLLSSCGADGFRVGSQMVHAVRTHPGAHDQSVACVTHQQXTVGXVGVSLTXXLMVVPGETMRAIMSTLGPLVLLLSEQLGFLAQVVLIRVFRARVRANLPVF

SEQ ID NO: 267163 - protein, 112 aa, Zea mays
  unsure (1)..(112): unsure at all Xaa locations
  Clone ID: MRT4577_175256C.1.pep
LLWXXLXXFFSSXXXFLVCXAWCXLSXXXSLWLXLGCWLAFXXXPXXCVSARWXXPWXXXXXXXAXSVARXXRAAXAXGXXLLXSLSRVRFSLGPLLSRAPSPLVXFAGAWA

SEQ ID NO: 267164 - protein, 61 aa, Zea mays
  Clone ID: MRT4577_175257C.1.pep
MYPIHQLHIHTDPFGMFISKTLFKCSRLAEKKKKKKKKKKKKKKKKKKKKKKKKKKKGRPF

SEQ ID NO: 267165 - protein, 87 aa, Zea mays
  Clone ID: MRT4577_175258C.1.pep
GRASWGAWGSAPPGSGGSPGSPKPPTLFFPVKRFRQKAPPPKSKKKLLKASVKFLGAFINPPFVRLCLGTFLFGGVLDKVPPNRVSF

SEQ ID NO: 267166 - protein, 382 aa, Zea mays
  Clone ID: MRT4577_175259C.1.pep
RELRGKGSYSLAFEKEHHPQPNAQQSGPTSLPIPQSVQAMVAAGRHAPVPPRYLRPDLAADVVVADDATTIPIIDFQRLLLVDPEESARLHAACQDWGFFQLINHGVPDDVMEAMKASIQSFFALPAEAKQQYRQQAGQLEGYGQLFVVSEDQKLDWADVLYLNTQPPEHRNLSFWPAGESFRQTLDTYSAAVKHVADRLLGAMYMNLGLQLSIMDMDPERGAGIQSVRMNYYPPCAEAADKVLGFSPHSDSDLLTLVLQVNQLQGLQIKRPPDGGGAWAWLPVTPLQGAFVVNVGDVLEIFTNGRYRSVEHRALVNAHTERLSIAAFHSPSIHATIGPLPELLGDQEVPKYKTLDHQSFITLFFSAKLQGKSFLERMKKLS

SEQ ID NO: 267167 - protein, 90 aa, Zea mays
  Clone ID: MRT4577_17525C.1.pep
FLIYICYFFQYSQVLELKKKKKKKKRKKKKKKKKKKKKKKKKKKKKKNTKKKKTTSPHTRRNHRKNVTKKKKKGGGRLKRLTLSRAPCAK

SEQ ID NO: 267168 - protein, 119 aa, Zea mays
  unsure (1)..(119): unsure at all Xaa locations
  Clone ID: MRT4577_175260C.1.pep
AYRIQQGIATGMLAXSPLFLHQPPSLLQXLPLVHLVEKNMRAQQLQQLVLANLAAYSQQHQFLALNQLAGLNCAAYXQQQLPLHQLVDVYPQNXVSFNQIAXLYSACYXLQQRQXLLPF

SEQ ID NO: 267169 - protein, 304 aa, Zea mays
  unsure (1)..(304): unsure at all Xaa locations
  Clone ID: MRT4577_175261C.1.pep
MEMTGSLPVPSVQAMVAAGRHAPVPPRYLRPDLAADVVVADDATTIPIIDFQRLLLVDPEESARLHAACQDWGFFQLINHGVPDDVMEAMKASIQSFFALPAEAKQQYRQQAGQLEGYGQLFVVSEDQKLDWPDVLYLNTQPPELRNRTSSAXDRLLADMYMILGLLSSMDMDPERGAGIQSVNQLQGLQIKRPPDGGGAWAWLPVTPLQGAFVVNVGDVLEIFTNGRYRSVEHRALVNAHTERLSIAAFHSPSIHATIGPLPELLGDQEVPKYKTLDHQSFITLFFSAKLQGKSFLERMKKLS

SEQ ID NO: 267170 - protein, 356 aa, Zea mays
  unsure (1)..(356): unsure at all Xaa locations
  Clone ID: MRT4577_175262C.1.pep
MEMTGSLPVPSVQAMVAAGRHAPVPPRYLRPDLAADVVVADDATTIPIIDFQRLLLVDPEESARLHAACQDWGFFQLINHGVPDDVMEAMKASTQSFFALPAEAKQQYRQQAGQLEGYGQLFVVSEDQKLDWADVLYLNTQPPEHRNLSFWPAGESFRQTLDTYSAAVKHVADRLLGAMYMNLGLLSSMXGPRSGVXGIQSVRMNYYPPCAEAADKVLGFSPHSDSDLLTLVLQVNQLQGLQIKRPPDGGGAWAWLPVTPLQGAFVVNVGDVLEIFTNGRYRSVEHRALVNAHTERLSIAAFHSPSIHATIGPLPELLGDQEVPKYKTLDHQSFITLFFSAKLQGKSFLERMKKLS

SEQ ID NO: 267171 - protein, 152 aa, Zea mays
  Clone ID: MRT4577_175263C.1.pep
VVGDVVIYTADTRNVHCVNEVTEGERVTLTLWFTRDRAYDEDPKLLNFLSQTSLSCEPTEQNSYIPVPASDNMYRFSCDQSGFDIRCARVRILGFSFHSSSGECNISVSPAEDDQIELLGKQLRLGSGDDVFEKIFSNSLHALQVCSFFEWP

SEQ ID NO: 267172 - protein, 83 aa, Zea mays
  Clone ID: MRT4577_175264C.1.pep
KVIEKQGRLTIKQGGPGHKTKIHPRPYGYSRRGVPTPETGLPKTRGEGLTPEKPITPTHAVSKQVKTGKKMKAPHVPNGGGLC

SEQ ID NO: 267173 - protein, 96 aa, Zea mays
  Clone ID: MRT4577_175265C.1.pep
WQASVVHRRSGAYLAMPAAVLMISGTWPRKVMIRQIQNSIPHSTLEAVAESRQDDVEDDVDTVGPGGPPLGLLSVCSVLLATVCLARSLLRFYSQR

SEQ ID NO: 267174 - protein, 85 aa, Zea mays
  Clone ID: MRT4577_175266C.1.pep
PPPLSFSPPTLLLPVLSLSTSWGSRVALTAAIPRAHTLRSAVPVLHFPLHTNTTVTPLGSNRRKKQGGEGRGGLAFLLLFFFPSV

SEQ ID NO: 267175 - protein, 36 aa, Zea mays
  Clone ID: MRT4577_175267C.1.pep
GPEFRAAPPFLIGFCYYPMKLLLASIDIGSGVAGSL

SEQ ID NO: 267176 - protein, 99 aa, Zea mays
  Clone ID: MRT4577_175268C.1.pep
FVKIKKVGGCIKTDSVILEPGGKRYTGLGLMQVQCCDGSPLLRIYSQANFGSKHLTQKEWAWKAGRGTRFDIATICLATLPNWIMTLSVNDSGRLEGVG

SEQ ID NO: 267177 - protein, 176 aa, Zea mays
  unsure (1)..(176): unsure at all Xaa locations
  Clone ID: MRT4577_175269C.1.pep
MVILNNVLLLEYFNKKXENYVKRWFHQPARKHRCRXSGQKKAGKIFPRPTXGPLRPSCYNXNLKHNMTXRAARGFTLEXLKAAAITKKLAPTIDISGDHRPTNKSLEGLQAYVQRIKTYKGKLLIFHKPAHNVKVDDSTPDKIATDTQFXGDYMPFTRAEKRSVHAVKVTDEMKSF

SEQ ID NO: 267178 - protein, 46 aa, Zea mays
  Clone ID: MRT4577_17526C.1.pep
VVFFSPQKKKKKKKKKKKKKKKKKRKKKKKKKKKKKKKKAALDRVG

SEQ ID NO: 267179 - protein, 84 aa, Zea mays
  Clone ID: MRT4577_175270C.1.pep
HLDSVCWGRYSLGEHLLVMSITLQVVHQLHLVVGTTSVARSSSLGPERVVTRRMGYPHGSAFHRTSKARSAASTTSTGFDGVTP

SEQ ID NO: 267180 - protein, 43 aa, Zea mays
  Clone ID: MRT4577_175271C.1.pep
FKGRDAQPGILSTQNQRHQHAYQKLIMKNKRSLYDHHDDEQKR

SEQ ID NO: 267181 - protein, 88 aa, Zea mays
  Clone ID: MRT4577_175272C.1.pep
KFQSCWRSRQRIGIFPMTSFESHEQVPKLWEAFARAPQIMQKPELYSLFPLKGLQQTNPGLQNWAFVLETRTMQSKWNLMGHIILQQD

SEQ ID NO: 267182 - protein, 67 aa, Zea mays
  Clone ID: MRT4577_175273C.1.pep
AHNINTTKRRQTFCIFTQHKYNLISTIIYLICYDFSLVLLFITQKHTKHKFNRGGIPIHNQLLKQSH

SEQ ID NO: 267183 - protein, 237 aa, Zea mays
  Clone ID: MRT4577_175274C.1.pep
MGKIKIGINGFGRIGRLVARVALQSDDVELVAVNDPFITTEYMTYMFKYDTVHGHWKHSDIKLKDDKTLLFGEKPVTVFGVRNPEEIPWGEAGADYVVESTGVFTDKDKAAAHLKGGAKKVVISAPSKDAPMFVVGVNEDKYTSDVNIVSNASCTTNCLAPLAKIINDNFGIIEGLMTTVHAITATQKTVDGPSSKDWRGGRAASFNIIPSSTGAAKAVGKVLPELNGKLTGMSFRV

SEQ ID NO: 267184 - protein, 133 aa, Zea mays
  Clone ID: MRT4577_175275C.1.pep
PTRSSVPVAGTKAKSHHQLKQGGTFSFLLGEVLAWRASTGYVHSSGRSPTASCGWHHTTCMSVISRSSALGPLVIGSGSHLLPLSREQQRLGHGACWGCWAGRDAWVFAWPGCRPLGLADGLRLLAAGEAGAG

SEQ ID NO: 267185 - protein, 192 aa, Zea mays
  unsure (1)..(192): unsure at all Xaa locations
  Clone ID: MRT4577_175276C.1.pep
IPLLQSPIPRCSPVSSXSPWRSASASQPATAPERCGPPPAASSASPSPASASARRSSPACRASGSGGSSPSSGTTTSTAPXGCVGDPDGRVPVXSTWPSWWTRAPGTRPSTTSPASCRPTARSASTAAPSSTTSACTRPSTTCSPEPRRPAPSPPPSTSASSATPPRATPSPGSAPSSPPSSAPRDTGLSWT

SEQ ID NO: 267186 - protein, 96 aa, Zea mays
  Clone ID: MRT4577_175277C.1.pep
IVFAGGYSLGEHPLDKSTILQVAHQLHLVVGTTLLARSSSLGPALGDSLLLARCAREAAMGETRRHASLELLRWQRKGKTPGGRAMGGSVSREMAG

SEQ ID NO: 267187 - protein, 105 aa, Zea mays
  Clone ID: MRT4577_175278C.1.pep
HLDSVCWGVYSLGEHLLVMSIILQVVHHGILWLAPHHWLDHHLSVLHLAAVEEGETPWESSKVREEHGRAWSPAAWGAREREIEREREEGSRESGVGRGRARPGR

SEQ ID NO: 267188 - protein, 157 aa, Zea mays
  Clone ID: MRT4577_175279C.1.pep
GRVGPPSRASKWRSGAVRGVYGRRLLDALRATGGGQPRAVKAAADSALALTARGQTRWSRAILLAGAVCSRRRVLVKAGGKVRRRRRPPPPVQARDKAAAAAALKGKEGKVQERLRVLGRLVPGCRKLPTPALLEEAADYVAALQMQVSAMRALADA

SEQ ID NO: 267189 - protein, 114 aa, Zea mays
  unsure (1)..(114): unsure at all Xaa locations
  Clone ID: MRT4577_17527C.1.pep
QANFNIVTPLLKALLVLRQRVDDANPMPTQLNYHATDXPLAQXQNKDQCRPDRTPKNTRSLASQWDAPCTRAFNAAYAYSTRIAYYSMHRDIAPDCFAVVSAITSIYTGFIYTT

SEQ ID NO: 267190 - protein, 128 aa, Zea mays
  unsure (1)..(128): unsure at all Xaa locations
  Clone ID: MRT4577_175280C.1.pep
SARGLEGILMLLGAVDASLSRPVRRNLTTAQGSSSSNTPVLHITAHPDGSCNDILHYASLGKITLRALAEDEHCGYKPGEIHTAIASTVMVLIRIAAQXDPSVEPEATRARMIADQVDRNSVQQTVPT

SEQ ID NO: 267191 - protein, 243 aa, Zea mays
  Clone ID: MRT4577_175281C.1.pep
HGEAWPHYSSWSSPAEAVTHSTIYPGGRDEGQVTPSTKSSSTFNLTLRECLLGRYSLGEHLLVMSTILQVVHQLHLVVVTTSLSRSSSLGPVISDSSRACVHGLGASPNHASRETPRQHLARIFFDANSQARRRSTTPHGAVSNTTATAQVGTAQIERARDAGDRGCCFLDRHRCAENHGAMGVGAVHPWMPALGKKTGWELGRGKNRERGWGCAAVGQRQGEAAGGGGRCAAGGGAAWATMS

SEQ ID NO: 267192 - protein, 43 aa, Zea mays
  Clone ID: MRT4577_175282C.1.pep
AMADVSVGARLRAFILVVGVDGRAYLNETPPSRSGRVGDKQVR

SEQ ID NO: 267193 - protein, 70 aa, Zea mays
  Clone ID: MRT4577_175283C.1.pep
NGRHRNNHMFALVIYTLSTFNINTIKKTTTCYLFTQHDYNITSTHILFIWIRLFISSPIDRAKASPTTQV

SEQ ID NO: 267194 - protein, 130 aa, Zea mays
  Clone ID: MRT4577_175284C.1.pep
MSNRTSHLTVLQVPRRGAVVVAGDAAAAAADPYDGPQPQTATCCTALQRGVALDGLAQPRYAPLRTLAIVDDDDGDVEEDEDGNPKNSGKDKKDDHDAATAIKSDDSSRSGGKKKMVRTCMSTVDELKVS

SEQ ID NO: 267195 - protein, 83 aa, Zea mays
  Clone ID: MRT4577_175285C.1.pep
CLLGGDTRSASIHWLSPPSFSTSTNCILWLAPHHLHDRHLSVHKQTQSMFVRTMEIPICASLRTSTSVERLPFFSQNTGFSQG

SEQ ID NO: 267196 - protein, 46 aa, Zea mays
  unsure (1)..(46): unsure at all Xaa locations
  Clone ID: MRT4577_175286C.1.pep
MVKLSKEAKQRLQQLFKGSQFAIRWGFIPXLVIYLGFKRGADPGMP

SEQ ID NO: 267197 - protein, 122 aa, Zea mays
  Clone ID: MRT4577_175287C.1.pep
RSSMFVAMHKSESPSSSQTSIGFVYGPRDGDRARDMVPTTGCRRWTTQGRMDITSGCSPSEYLPQQTLSVKLKVLLRMIDCWCDLAFVPATGTDGRVGYYFRRRGPGGVAWPGFAMLLGFLR

SEQ ID NO: 267198 - protein, 138 aa, Zea mays
  Clone ID: MRT4577_175288C.1.pep
VHPSLGRPPTAPCGWHHITCTIILSRSHCFFFLFTFCTHARWFEHEQAPWMSFEEMSGSAMERRPAMAGMCRTRRSQRERSGREACTRMTPLCRPVRLLLASMESWERAPRKWRDRGSSDRGNGGIEGAQMGEKEIKP

SEQ ID NO: 267199 - protein, 114 aa, Zea mays
  unsure (1)..(114): unsure at all Xaa locations
  Clone ID: MRT4577_175289C.1.pep
KKKNLNILSYVIQDLHRRPLRPGLAPRVLRXPPFFFFFLNILAWALVPNASKPTKGPFQLANTSSTPRAHQTSGTRPGLSSKLQMLATENATGWLVALRNVILYGKSRQSEKES

SEQ ID NO: 267200 - protein, 99 aa, Zea mays
  Clone ID: MRT4577_17528C.1.pep
MASSPVLAVSPIPLPPPSAYKRTRLSPVFATQLQPPPLPSSPSRSSKRRRAPFTAPSCQELRHTPTFTTHHFPHSIMAGKLTGGFAAAGTRHRAADRPP

SEQ ID NO: 267201 - protein, 60 aa, Zea mays
  Clone ID: MRT4577_175290C.1.pep
LAVPPRRVRHFSYTLFAPCPALRQQGPTSGLTNFSPFQYLLELPAANWRGLSFCSVFKSV

SEQ ID NO: 267202 - protein, 152 aa, Zea mays
  unsure (1)..(152): unsure at all Xaa locations
  Clone ID: MRT4577_175291C.1.pep
SAWTSLPQHTSAACSTACLTMVPDTIGSIVNTIDVHALIMQIXVVLPDANLMIKLRRTQDXKLXDVTTSAIVLAGXMLLVAQGFIDNNYRPTVICREYTRTLEDVIAAVVRIAIYVDVNDRXNVXSLVNMSIVTTLTGQCVDYNADLAIDAT

SEQ ID NO: 267203 - protein, 139 aa, Zea mays
  Clone ID: MRT4577_175292C.1.pep
SGPSAQCRSLHHCCDVPPSRHCGAPSDDCARPAASGEADGARTHCACFYRSKDVTRGRVVSRLLLNHVQGHLILISFRSGWLRAPVPPRCSGVKVGADPLEAVEERLGDISVIYVVFEVGVAIVEAGGGCCWRQMSSFK

SEQ ID NO: 267204 - protein, 101 aa, Zea mays
  Clone ID: MRT4577_175293C.1.pep
VLWNPGIQSRRADTVLCGAVQLPGRGRGRGGGRGERAVRLSNSPSLSGSSCSYMTPAPQQKPSPFSPSQPRTTIPATDSRRAAHLVAVRLPYPIRRRLLLL

SEQ ID NO: 267205 - protein, 113 aa, Zea mays
  Clone ID: MRT4577_175294C.1.pep
PIDKGLAFTHLKGTIQAFIKQMFGEALPIRFRASYFPFTEPSAEVDVQWQGKWLEVMGCGMVDPNVMEAVGYDPEVYTGFAAGFGVERFAMVLHQIDDIRRLYNSDLRFLRQF

SEQ ID NO: 267206 - protein, 56 aa, Zea mays
  Clone ID: MRT4577_175295C.1.pep
ASPPPPVRVRVREDLRRWGTWVSRSTWRTRMSSTAASSDASSGSITITSFTTPYNT

SEQ ID NO: 267207 - protein, 64 aa, Zea mays
  Clone ID: MRT4577_175296C.1.pep
NNESILLTWSLRVTGYSERKWEINPGLSKVVLVRFQNDTSFLETVGHRRRPTWGPWNPSGQGPS

SEQ ID NO: 267208 - protein, 119 aa, Zea mays
  Clone ID: MRT4577_175297C.1.pep
APFSGLSPGKHGWSINQFGDFTKGPKNPGNFYNPPDFFFYNPFGSLGTIKIGKNGEALFLGPKEKFKVVYFIGPFIFFYATEDRSNPGISPPVISKSPGVGKNSKKLCPFYGVPIWETS

SEQ ID NO: 267209 - protein, 56 aa, Zea mays
  Clone ID: MRT4577_175298C.1.pep
FRRHSLSCHSCEYIFDSARHASGSILRGGGTRRPKEITLQQWKRMMTNIKYRNQGG

SEQ ID NO: 267210 - protein, 57 aa, Zea mays
  Clone ID: MRT4577_175299C.1.pep
AQVFSPYHHHKWDHCHFLEDHVQYKVSVFAYSPQCLECISPSNRSVSLMRVRGFYIQ

SEQ ID NO: 267211 - protein, 101 aa, Zea mays
  Clone ID: MRT4577_17529C.1.pep
KKGNRSYLNMGWGWNFGFKNNTSKAPKCLGLFRPQEFFIPPLGQDSGVGPGDHTLSPAPPNFSHSGFFNRARLFGPGPQIGLLGLPRGPLGQGPQNVPSGP

SEQ ID NO: 267212 - protein, 72 aa, Zea mays
  Clone ID: MRT4577_1752C.1.pep
LTGRTGANQHTTQQAAAAVGMGDRATDTRPHHHFHPTHTLFSPRHSQTVPDKCTPQSLLASFRASCDTHTPI

SEQ ID NO: 267213 - protein, 498 aa, Zea mays
  unsure (1)..(498): unsure at all Xaa locations
  Clone ID: MRT4577_175300C.1.pep
MMKPPAPAVPSPEPPRLAGGGRGPRGLRSLPALSYNTHRALVLGLTFLAYALYHASRKPPSIVKRELARSWPPFADPALLGATDVAFLTSYSLGMFVAGHLGDCLDLRRFLAFGMVTSGAAVALFGAGYFLGQHSLAFYVVAQVIAGLLQSTGWPSVVAIVGNWFSGRRRGLIMGIWNAHTSVGNITGSLVAAAMLXYGWGWSFVVPGGLIALGGVLVLFFLAPYPQYVGFGPSPIEEPVTDESTDGEDISAADGAGKDRRDAVGIFKALAIPGVVIFALCLFFAKLVAYTFLYWLPFYLSQTAIGDEHMSAASAGYLSVLFDVGGIVGGVLAGFISDQLNARATTAAVFMYLAIPSLFLFHAYGSTSKATNIGLMMISGLFVNGPYALITTAVSADLGTHKSLKGDSRALATVTAIIDGTGSLGAALGPFITGFISRKGWDLVFTMLALCALVAAVLLSSHVKTEIPQIIQKWRDRSTNTQNGNADPGVQPLLVDES

SEQ ID NO: 267214 - protein, 124 aa, Zea mays
  Clone ID: MRT4577_175301C.1.pep
MSDAYRKAKPGRLVFKGGEAASIHKPKKHKKNKKPASDALADGDIEAAAATAEGAEGGGGAGSGTGDDYTIDAAKKMKYEELFPVESKKFGYDPDNAARAAARNRTVEEALDDRVRKKADRYCK

SEQ ID NO: 267215 - protein, 41 aa, Zea mays
  Clone ID: MRT4577_175302C.1.pep
RLNSNRYIVRIPGELKKNYYHDKNYIQHRNIRGDNFIISRP

SEQ ID NO: 267216 - protein, 603 aa, Zea mays
  Clone ID: MRT4577_175303C.1.pep
MGCAPVVWAAVWLLAAAVAGFADPGGLERAFPIVKPDYGHTKLQLAKEGLEAIQRIRTPIAAVSVIGPYRSGKSFLLNQLLSLSCDNGFGVGHMRDTKTKGIWVWGSPVEVDIGGSKVSVLYLDTEGFESVGKSNVYDDRIFALATVLSSVLIYNLPETIREADISRLSFAVEIAEEFYGRVKGQDVAFEPAKLLWLIQRDFLQGKSVQQMVDEALQRVPNNNGDTNIDELNQIRDSLAVMGDNSTAFSLPQPHLQRTKLCDMEDQELDPLYVKKRDQLKEVVASMIKPKIVQGRTLNGTEFVSFLGQIVDALNKGEIPSAGSLVEIFNKAILERCLKVYSEIMGRAGLPVSVDELREFHDLAKDEARRLFNKQHFGKHHAARSILKLDEEIKKVYRNLGQANEYQSSKLCEARFSECEDKMERLQVLKLPSMAKFDAGFLLCNRSFETDCVGPAKESYRHRMSKMLARSRALFIKEYNNKLFNWLAIFSLAMVVVGRFLVKFFLLEVAAWVMFAFLETYTRLFWSSESLYYNPAWHAIVSSWETVVYSPVLDLDRWAFPICAVLLFLAFYWRCLGGRRGIARSLLPLYNGAYYRSSSRTRTD

SEQ ID NO: 267217 - protein, 71 aa, Zea mays
  Clone ID: MRT4577_175304C.1.pep
LPPEWSERGHDVAAIFQEPGAIGGQEIGPEKASVNLSGWSTCLMGGIYHTVSPTQDNRYLRTCRGKKSWTG

SEQ ID NO: 267218 - protein, 217 aa, Zea mays
  unsure (1)..(217): unsure at all Xaa locations
  Clone ID: MRT4577_175305C.1.pep
FHNEKGRQVPSWLXLLLATQFFTTCANHLLASRNECNLFCTQCETKPAAFCNYCRSSDHSTHRVIQIRRSSYHDVVRVSEIEDILDVSDVQTYVINSARIVFLNERPQLRASSVPICKAPTSSTHSCETCSRVLLDAFRFCSLGCNLRGLNMEAGMQAMVGNNPRSNGMDHVARIDNVGSSTTNDQNSCNDKNYEEPPPKRVARHRRKGIPQRAPFF

SEQ ID NO: 267219 - protein, 226 aa, Zea mays
  unsure (1)..(226): unsure at all Xaa locations
  Clone ID: MRT4577_175306C.1.pep
PACSLLAPWRSSNSPWRPEFQQRASSPWPPCSLIHGAQKIPAGSPFFFLQPAARPPLSPMAFPPASSAFSVVFNLQSLPSPCSSLSMAPLQIFPFLPLLLSLXQRRERSNSPAQHPCASPLPRXSSWCPPAVRQNAQQAARCSSPPVRSPXPLVVCRRSRARCAAPSATPSKPVLVVDAALRALAVRRNAEPCGQPMRLVTTCSGPRDDAHASGVVPTTRYRWWTT

SEQ ID NO: 267220 - protein, 78 aa, Zea mays
  Clone ID: MRT4577_175307C.1.pep
VVHPLHLVAGTTSLAQSSSLGPLRFSPWNRPRLYSSKQVLLVLLKWVTGCAVSPLHLVKLVPAVHPSSTFRYLHGESK

SEQ ID NO: 267221 - protein, 215 aa, Zea mays
  Clone ID: MRT4577_175308C.1.pep
MAGKGAKATAAKSADKDKGKKTGGPVSRSSRAAPHEKSAPKKDVYQLFAEKVRDNKQLESRWAIMQETRVEYFRGKDFNTFVKNHPEVREILGPDKDLEVEDIVNTLLTKNLVIRCDRVMKTVRPGKKKLSSWPAHLEIHNEQVFTENDGFFAWMFLKRRTLWQTILSFVWPLFALAVCLFPVYPYQCKIVVLYSCAGALLFIVSILLRKISPLS

SEQ ID NO: 267222 - protein, 24 aa, Zea mays
  Clone ID: MRT4577_175309C.1.pep
MERASPVMAALGEGFGRIDLARGR

SEQ ID NO: 267223 - protein, 67 aa, Zea mays
  Clone ID: MRT4577_17530C.1.pep
CVSADETVAAGLPAVAISVVVETCECLTVSHVTKGSHGVSGGGDKRSHSSQAVGHPALALCVNKYNE

SEQ ID NO: 267224 - protein, 304 aa, Zea mays
  unsure (1)..(304): unsure at all Xaa locations
  Clone ID: MRT4577_175310C.1.pep
MAGKGAKATAAKSADKDKGKKAGGPVSRSSRAAPQENSTPKKDVYQLFAEKVRDNKQLESRWAIMQETRVEYFRGKDFNAFIKNYPEVREILGPDKDLEVEDIVNTLLTKNLVIRCDRVMKTVRPGKKKLSSWPAHLEIHXLRAAIFGILWVLLGKRVWFFPNINAEETTFRELVRFWPEKDEGERPKWTSRLFYALVALLVILLLRHHAPDEAARARYQKKVSNIIDDVLEWSPKLAISGMIEKHTGANITEESNYTSRAASSHVPPSTKAKASEVGSDTDIEANLDEAQDSEYADDTRSNEA

SEQ ID NO: 267225 - protein, 112 aa, Zea mays
  Clone ID: MRT4577_175311C.1.pep
KNPCAALEPAFQRWPPPPSPSPLSLLPLSSSPCSSSPPPMELATEPSQAPLSPRQALPWRLPLLYGSKDREMTIVQVMWCQPQDAVGGRSEEMMDLSSGCSPSEYTTPANTI

SEQ ID NO: 267226 - protein, 144 aa, Zea mays
  Clone ID: MRT4577_175312C.1.pep
PTRPSIPVAGMEAKSHQQQIILRSTFNLTLRECLLGRYSLGEHPLDKSTILQVVHQLHLVVGTTSLARSSSLGPEGPPVIVSWSLLPHHVTAENTMGKEGSIQQAIASVCRPGQGELRPYPQATKRWRLASAGGWNMSDSRSMV

SEQ ID NO: 267227 - protein, 73 aa, Zea mays
  unsure (1)..(73): unsure at all Xaa locations
  Clone ID: MRT4577_175313C.1.pep
SCLSNISNVIQVRAAIFGILWVSXGKRVWXFPNINAEETTLXELVRFWPEKDEGERPKWTSRLFYALVALFLE

SEQ ID NO: 267228 - protein, 61 aa, Zea mays
  Clone ID: MRT4577_175314C.1.pep
ICICRNPTTMGFLQAQQRVIIKGTGPGQPPRHSLIPRLCFMFHWGPPGPRLGCLPLKAASA

SEQ ID NO: 267229 - protein, 120 aa, Zea mays
  Clone ID: MRT4577_175315C.1.pep
LIAYVLFGFCFVEERNPAFCEKKANHSTLVGCLERCTNQNHRHSCKHRLGLFMDREMVIVHVIWCQPQDAVGGRPEEWWTYPVDARQTSTSPNKHYLSVKLKVFIDLVDGVTWPPSLPPG

SEQ ID NO: 267230 - protein, 299 aa, Zea mays
  unsure (1)..(299): unsure at all Xaa locations
  Clone ID: MRT4577_175316C.1.pep
MGREILPDEMAGKGAKATAAKSADKDKGKKAGGPVSRSSRAAPQENSTPKKDVYQLFAEKVRDNKQLESRWAIMQETRVEYFRGKDFNAFIKNYPEVREILGPDKDLEVEDIVNTLLTKNLVIRCDRVMKTVRPGKKKLSSWPAHLEIHNEQVFTENDGFYAWMFLKRRTLWQTVLSFVWPLFALAVCLFPVYPYQCKIVVLYSCAGALLFIVSILLLRAAIFGILWVLLGKRVWFFPNINAEEXTFRELVRFWPEKDEGERPKWTSRLFYALXALLGILLLXAHAPDEQLXSRYQRRF

SEQ ID NO: 267231 - protein, 95 aa, Zea mays
  Clone ID: MRT4577_175317C.1.pep
VHPSSGRPPTASCGWHHITCTIILSRSSALGPHVSLTNRFFYLTTPRKCMAIGRLLGFGEKKDCTHGGAEVRLLELDGRRRGHGGVVHGEESPMA

SEQ ID NO: 267232 - protein, 372 aa, Zea mays
  Clone ID: MRT4577_175318C.1.pep
MAGKGAKATAAKSADKDKGKKTGGPVSRSSRAAPQEKSAPKKDVYQLFAEKVRDNKQLESRWAIMQETRVEYFRGKDFNTFVKNHPEVREILGPDKDLEVEDIVNTLLTKNLVIRCDRVMKTVRPGKKKLSSWPAHLEIHNEQVFTENDGFFAWMFLKRRTLWQTILSFVWPLFALAVCLFPVYPYQCKIVVLYSCAGALLFIVSILLLRAAIFGILWVLLGKRVWFFPNINAEETTFRELVRFWPEKDEGERPKWTSRLFYALVALLVILLLRHHAPDEAARARYQKKVSNIIDDVLEWSPKLAISGMIEKHTGANITEESNYTTRAASSHMPPSTEGKASEDMDVDGDTEASLDETQDNEYADDTRSSGA

SEQ ID NO: 267233 - protein, 97 aa, Zea mays
  Clone ID: MRT4577_175319C.1.pep
CVLRRSRSPDPRRALVLGTAHVVSLICAVRPSTRLTSPDLRSPNIDDVHPGEEPRVLRGEGKSFNARRMLGAMHKSESPSSLQTSIGFIYGEPMTER

SEQ ID NO: 267234 - protein, 82 aa, Zea mays
  Clone ID: MRT4577_17531C.1.pep
GRTDVSGFVSCFAFNWVATQIFMSKSAASCEDAREDKRQALMILQVVMNREPIKRLSGAQSEAAKQTQCCRREIGTTISLHL

SEQ ID NO: 267235 - protein, 148 aa, Zea mays
  unsure (1)..(148): unsure at all Xaa locations
  Clone ID: MRT4577_175320C.1.pep
MAATSCCLVHQTTARLGASTRLDVVPPRRDQMLVCKARKQEAAADHRDVSRRAALELLVSVTDAAGAKVGPADAXYGEAANVFGEPKASTEHIVHSGDSVKLLIPCKWNHRKERELPGQVLLYEDNXNAHSSVSCIMQPTSNKTIGDY

SEQ ID NO: 267236 - protein, 91 aa, Zea mays
  Clone ID: MRT4577_175321C.1.pep
ALFYFCGGENPVFCVEKASHSTLVGCLEQCTNQNHRHSCKHRLGLFMDREMMIEPVMWCNHKTQLVDDLKDGLNQWMLAKRVPPQQTLSKC

SEQ ID NO: 267237 - protein, 153 aa, Zea mays
  unsure (1)..(153): unsure at all Xaa locations
  Clone ID: MRT4577_175322C.1.pep
DIIPQXXISIISDYIIGVSEIIIIHFNAAEITNGENRVTWRSLATLLLLVLSCGSSNPLDRLSRWQGWRPSHTINQIKEVPLIQHLGSVCWGRCSLGKHPLVKSILPWVVHQLHLVVVTTSLARSSSLGHIASSSSLLSARTHGGLSMNRRHG

SEQ ID NO: 267238 - protein, 64 aa, Zea mays
  Clone ID: MRT4577_175323C.1.pep
PFYPQVVGNINAFLQQQQLPPFYPQDGANNVAFLQQHQLLPFNQLALTNPTPLFPPPPIGGPIF

SEQ ID NO: 267239 - protein, 94 aa, Zea mays
  unsure (1)..(94): unsure at all Xaa locations
  Clone ID: MRT4577_175324C.1.pep
MDLPIFSRVCCMAFTLELLKSIAMTXLAFFLHPCTXLXECHRELYRWPNGISTWHDASDGAGTDGGACEYENAXDQPPFSSMIAAGRYFIYNFG

SEQ ID NO: 267240 - protein, 40 aa, Zea mays
  Clone ID: MRT4577_175325C.1.pep
HVVDRYEICANVLVIMDHNETLPPKAWANDASAHASADAW

SEQ ID NO: 267241 - protein, 138 aa, Zea mays
  Clone ID: MRT4577_175326C.1.pep
LFALNRFVYLPPLLFPFGGLGTAYAQQHFFFSFNGWAGLNRVVYLPQQIPLPLSGRAAASCVSFLAPVQALPLAERVGARPPPLFPPHVVLRFARLGLTNPVASSPQHWGGGALFWIVVGLQSKSIVFWVGGGPHQKW

SEQ ID NO: 267242 - protein, 37 aa, Zea mays
  Clone ID: MRT4577_175327C.1.pep
IRHEARGEPPPLSLYLHSTYVSIRRKDTPIDRSSALC

SEQ ID NO: 267243 - protein, 361 aa, Zea mays
  Clone ID: MRT4577_175328C.1.pep
MAPVDLTPKQPRKAYGGDGGAYYEWSPADLPMLGVASIGAAKLSLAAGGLALPSYSDSAKVAYVLQGTGTCGIVLPEATKEKVVAVKEGDALALPFGVVTWWHNGPAAPTPLTVLFLGDTSKGHRPGQFTNFQLTGATGIFTGFSTEFVSRAWDLPEADAAALVSSQPASGIVRASSSPLPAPSPRDREGVALNCLEAPLDVDIPGGGRVVVLNTANLPLVREVGLGADLVRIDAHSMCSPGFSCDSAYQVTYIVRGSGRVQVVGPDGRRVLETRIEGGSLFIVPRFHVVSKIADASGMEWFSIITTPNPVFSHLAGKTSVWKAISPEVLQASFNTTPEMEKLFRSKRLDSEIFFAPPSSN

SEQ ID NO: 267244 - protein, 159 aa, Zea mays
  unsure (1)..(159): unsure at all Xaa locations
  Clone ID: MRT4577_175329C.1.pep
QQRRGIAGLEAAPNAREDLQGLXYSATLKEIKAVPQHEGYRTVVESFTGHRLQICHDEQDWKRIEDRIRCGQVEELIEVLEDDLKLIATKIEWDPGCAPDAYECEAIEDDTPIXKHVAHHRPVTPSEEFLRTPSMLVKSRSCSPRRCSCLSERRKDGLF

SEQ ID NO: 267245 - protein, 74 aa, Zea mays
  unsure (1)..(74): unsure at all Xaa locations
  Clone ID: MRT4577_17532C.1.pep
AGGPGIKKKKKKKKKKKKKKKKKKKKKKKNKKKYKKTLKXKKEXKEKRLKKETKKRSKKKKKKARKGGVHSGPF

SEQ ID NO: 267246 - protein, 184 aa, Zea mays
  Clone ID: MRT4577_175330C.1.pep
MAPVDLTPRQPRKAYGGDAGAYYEWSPADLPMLGVASIGAAKLSLAAGGLSLPSYSDSSKVAYVLEGTGTCGIVLPEATKEKVLAVKEGDALALPFGVVTWWHNGPAAPTQLTVLFLGDTSKGHRPGQFTNFQLTGASGIFTGFSTEFVSRAWDLPEANAAALVSSQPASGIRRASSPLPVPLG

SEQ ID NO: 267247 - protein, 55 aa, Zea mays
  Clone ID: MRT4577_175331C.1.pep
VSHEDQSWYLKSQVSGQEQVPQNGAHEKCCNEFVKGIGCRLPVNFGLMDHCVLIM

SEQ ID NO: 267248 - protein, 88 aa, Zea mays
  Clone ID: MRT4577_175332C.1.pep
VCENRTSVKQIRVSHSLFACDLFCTLSLGLDYISNANPACSCDYNCKFQFRPIHPPFRATFISTFTARGRGTVHIFRSNPLTNANPGL

SEQ ID NO: 267249 - protein, 130 aa, Zea mays
  Clone ID: MRT4577_175333C.1.pep
RIDAHSMWGPGPACDSPIQVTYIVRESGRVQVVGPDGRRVLETRIEGGSLFIVPRFHVVSKIADASGMEWFSIITTPNPVFSHLAGKTSVWKAISPEVLQASFNTTPEMEKLFRSKRLDSEIFFAPPSSN

SEQ ID NO: 267250 - protein, 397 aa, Zea mays
  unsure (1)..(397): unsure at all Xaa locations
  Clone ID: MRT4577_175334C.1.pep
RVVPRALRRITNTSDPSPIIAPPVAHLALESRPSDEMAAVDLTPRTPKKAYGGDGGAYYEWSPADLPMLAVASIGAAKLSLAAGGLSLPSYSDSAKVAYVLQGVGTCGLVLPEATKEKVVAVKEGDALALPFGAVTWWHNGPAAQADLTVLFLGDTSKGHKRGQFTNFQLTGSAGIFTGLSTEFVSRAWDLPEPDAAALVSSQPASGIVRASSSPLPAPSPRDREGVALNCLEAPLDVDIPGGGRVVVLNTANLPLVKEVGLGADLVRIDAHSMCSPGFSCDSAYQVTYIVRGSGRVQVVGPDGRRVLETRVEGGSLFIVPRFHVVSKIXTRSKIADSSGMEWLSIITAPNPVFSHLAGKTSVWKAISPEVLQACFNTTPXSKRLDSEIFFAPPSSN

SEQ ID NO: 267251 - protein, 41 aa, Zea mays
  Clone ID: MRT4577_175335C.1.pep
KKKKKKKKKKKKKKKKKKKKKKKQKKKKKKKKRFVLGPGPP

SEQ ID NO: 267252 - protein, 100 aa, Zea mays
  Clone ID: MRT4577_175336C.1.pep
VQVVGPDGVRVLETRVEGGFLFIVPRFHVVSKIADASGMEWFSIITTPNPIFSHLAGKTSVWKAISAEVLQASFNTTPEMEKLFRSKRLDSEIFFAPPSN

SEQ ID NO: 267253 - protein, 56 aa, Zea mays
  unsure (1)..(56): unsure at all Xaa locations
  Clone ID: MRT4577_175337C.1.pep
DEDRVSAEERRDEEGGTATGWREEDGHAACRLRILIHDHVGLPVPPSXPRFERMDG

SEQ ID NO: 267254 - protein, 45 aa, Zea mays
  Clone ID: MRT4577_175338C.1.pep
PRVRIRPYPTPAVPACDVPQMDYGPITISSYILNFILQIIFSIFF

SEQ ID NO: 267255 - protein, 79 aa, Zea mays
  unsure (1)..(79): unsure at all Xaa locations
  Clone ID: MRT4577_175339C.1.pep
VHSRARGLSGAGALTRGTRVSAKAIQSEKATXYHVVQTINGDXLIGSLETPGTCSLLVGWYLSNLRGYRTTLSPLAACV

SEQ ID NO: 267256 - protein, 41 aa, Zea mays
  Clone ID: MRT4577_17533C.1.pep
RKKKKKKKKKIKIKKKKKKKKKRKKKKKKKKKKKKKKKIKK

SEQ ID NO: 267257 - protein, 127 aa, Zea mays
  Clone ID: MRT4577_175340C.1.pep
EADLGDRLDFSSKSLDLPTTEISKSTRASKSADLSPVRSNQSKGPLQNLNPNLPEAAPPLQHRAGRPSSTAGRPSSVARRWPPLLYSRPPLLCSTPPAAPPLQPAAPRNYRIDRLCLLLYWHFETHL

SEQ ID NO: 267258 - protein, 87 aa, Zea mays
  unsure (1)..(87): unsure at all Xaa locations
  Clone ID: MRT4577_175341C.1.pep
MNVKGCILIPVPPPGXASALVKVAVFGGAAVFAVMNSLYNVLGGHRAIVYNRIQGIKDMVYPVGTYFMISWFERPIIYYFSCSQFNF

SEQ ID NO: 267259 - protein, 63 aa, Zea mays
  Clone ID: MRT4577_175342C.1.pep
TRNFCRAVFNFNLFLSKGIGYATCCPMVLWIISYSSLIWNPCFYFENKIFWFIKGLISTFYFF

SEQ ID NO: 267260 - protein, 27 aa, Zea mays
  Clone ID: MRT4577_175343C.1.pep
MSRYLQAGRSGSSVISRWLSSSEVSAI

SEQ ID NO: 267261 - protein, 64 aa, Zea mays
  Clone ID: MRT4577_175344C.1.pep
RHKNWLLVILLVVFGWTCDIYLAVQNKYYSDENELNACILMNNLVTGHSPTAYYSLSVWLYIRI

SEQ ID NO: 267262 - protein, 357 aa, Zea mays
  Clone ID: MRT4577_175345C.1.pep
AFLTILLLARISSSIAISSNYISRSAEQQVIATVAPAIVPDIDGQGAQPFLTSPSGSYAAYLRRAVDGAGGLGGDACYVQVQQDGASGSVWESDCTPVGGADACDLAFSPVGLELFAGGQSLWDTGVDADPGTLSLDDGGDMKIVSKEGVTVWTASSEPWTGQQCGAPLPVSTTAPSMEALPPPPSTATATASTKLVTPPAATLAGAGSAVSPYGDQPVVPPPVDTLPDFPGQPPVDTAPEQPLPPPPADASPALPDLSLPPPPAYTPPDSPDQPLLAPPPADMLPDEPLYSSPPPAPATFGPQTPLPPFGVPLAAPPTGDTVPDTATPSGEPGSPGRVPFSGPSPAGMPRQHGHPH

SEQ ID NO: 267263 - protein, 37 aa, Zea mays
  Clone ID: MRT4577_175346C.1.pep
MLTAVRIWSPSSQLMPAPMESLFFYVKTVASLDAFFT

SEQ ID NO: 267264 - protein, 143 aa, Zea mays
  Clone ID: MRT4577_175347C.1.pep
VHPSLVPPSASCGWHHITGSIIISRSFNELLLSKPAKHLDPWSLARRRPRRWWVSRHDPQWPDTEIPRRRRVPDQPSTHHTRQHLARDPSTRPKLLNSPPRLETWRYLHPATLSGLAVNGYFWWRRFPFSCGGRRRRGQKPGQ

SEQ ID NO: 267265 - protein, 64 aa, Zea mays
  unsure (1)..(64): unsure at all Xaa locations
  Clone ID: MRT4577_175348C.1.pep
YPVADIHCAPMMGPTFGAMMISGHNAAHLALNALSXPKGLVRTMSPPLRKELMIAYNDDDVLDA

SEQ ID NO: 267266 - protein, 89 aa, Zea mays
  Clone ID: MRT4577_175349C.1.pep
PYILAAGMKANSQQHPIILRSTFNLTLRQCLLGEGTRSASIHWLSPPSFSTSTNCILWLSPHHLHGRHLSVHKQTQSVFVRTMAIPICA

SEQ ID NO: 267267 - protein, 47 aa, Zea mays
  Clone ID: MRT4577_17534C.1.pep
FHDHNCRYLAAQNSLYKWITAQPCAVSSKVSLITSKIFKMNALRYCI

SEQ ID NO: 267268 - protein, 108 aa, Zea mays
  unsure (1)..(108): unsure at all Xaa locations
  Clone ID: MRT4577_175350C.1.pep
GDWXPRGRPGSQRIPCCRLIPLAFYPLPQSNPHDRHQLTQRASLQKLDGLPPRHRRRHRRRRPRSSYLRARRRLCFLRRGTRAPHHPPPRAAGXAGLCXXXPRASRXA

SEQ ID NO: 267269 - protein, 99 aa, Zea mays
  Clone ID: MRT4577_175351C.1.pep
QCLLGDTRLASIHWLSPSSLQIVHQLHLVVGTTSLARSSSLGPTPYCRRGGGDTMGELAKVRVDLGRARSPAPWEGGLLLHGELERGRYTQREGVERVA

SEQ ID NO: 267270 - protein, 173 aa, Zea mays
  Clone ID: MRT4577_175352C.1.pep
MERLLEFLGACLGARLGDFSGRPWEGARNQGAMGLCASSSKGAEQREEGLSLGGCREMEIAARLQGTRWRDGDQGKLATMEVAGKTGAPVTCCSMNAGAWGRESRGAARGRKAPWLGRRPRETAPCRERAPGRRAPWGRLAAVKRRQGGRMAVAARKIEGWECKNPGRPRGTQ

SEQ ID NO: 267271 - protein, 82 aa, Zea mays
  Clone ID: MRT4577_175353C.1.pep
KVPLAEAFTGPPAPLTTLDGGILTGPISSVIPPGYKKVVRGKGIPVPKDPSRKGTPRIKFAIKFPGRLSGDQKSGVKRLLGQ

SEQ ID NO: 267272 - protein, 62 aa, Zea mays
  Clone ID: MRT4577_175354C.1.pep
CHTSYMVSMFAARIKSPVFENSLWYKLSMLMYVSFSNSAPSFTVHRQAKPHRQSFSHAIVVS

SEQ ID NO: 267273 - protein, 103 aa, Zea mays
  Clone ID: MRT4577_175355C.1.pep
LFCFILWRRGTSCFAWRRQAAQRSSTCGAMHKSNRQRSYKHRLGLFMDREVTTVQVMWCQPQDAVGGRPKEGWTQPVFARQASTSPSKHYLSVKLKVLLRMIG

SEQ ID NO: 267274 - protein, 152 aa, Zea mays
  Clone ID: MRT4577_175356C.1.pep
ENNVDAESNKERRGLTGVNDVDVWGCAKTANTRQASRRAVHWLHKTASRQRAETTGLLCQWRKQKGCTLTGSEQRQCGCAIHRAGGMQATRRESGAAGGLLFLGRVEGARAAGHGEESGEARRRRKAKNNAAAARGLLRRKDRPEVEASCRI

SEQ ID NO: 267275 - protein, 132 aa, Zea mays
  Clone ID: MRT4577_175357C.1.pep
MAQAPFPMAELPQLAVVLPAPLSLVHGSGQGTISELPSMATPSPWQARLPQASVLGALAMDAQVLAPAAALREVEEEPCVPMTCGPKAMGPRDADRASDVVPPKRYSRWTTQGRMDITSGCSPGECHPANTI

SEQ ID NO: 267276 - protein, 36 aa, Zea mays
  Clone ID: MRT4577_175358C.1.pep
RSPTRSFSSSHNSCSLHLGGRIAPWSCPSPALLVGL

SEQ ID NO: 267277 - protein, 88 aa, Zea mays
  Clone ID: MRT4577_175359C.1.pep
TLCQVLPPMGFNMLLFFLGGGVPAIFLLGSFFFWGLPWVFLFFYGYEFFGLGFSLVKGLGGRSLPFFFWVVFLFFFGPVFFFGLFFPP

SEQ ID NO: 267278 - protein, 61 aa, Zea mays
  Clone ID: MRT4577_17535C.1.pep
KKKKEKKKKKKKKKKKKKKKKIKKKKKKKKKKFFGPKNKTTIKGVFSWSPPPLGGVFCFFF

SEQ ID NO: 267279 - protein, 142 aa, Zea mays
  Clone ID: MRT4577_175360C.1.pep
GRVGGRVGAAPLLHPLPSAPFSSTSGRSFLRSKMRAAATPFFALRRRRVSLFPSPKTARPQQPGFPPCRLHATRLMYCASTLSLLVVRQRAAPLFSPLAQQPRRLRALRARCFIKRGEQHAVDTRRLFAVFAQPHRRRRSPR

SEQ ID NO: 267280 - protein, 121 aa, Zea mays
  Clone ID: MRT4577_175361C.1.pep
FIFVEERTPCFAWRRRQAARRSSMCGAMHKAESPSSSQTPFGFVYGPRDADRASDVVPPTRCSRWTTQGRMDITSGCSPSEYPPSKHYLSVKIKDREMLTVQVMWCHPQDAVGGRPKEGWT

SEQ ID NO: 267281 - protein, 562 aa, Zea mays
  unsure (1)..(562): unsure at all Xaa locations
  Clone ID: MRT4577_175362C.1.pep
AVLGQWEWLRLACGPKIPTDIKATAQAISLPLLIGQHSAPAATAAAGVLLRSPQAQLCKDCWSASTVLLPLLEVDSLPLQSPGQGRAALAACLCPXAQALELVXMAMRHQFGASVLLHLLVLAGAGAMVTADQESDRIRELPGQPPNVGFSQYSGYVTVNPARGRALFYWLVEAVPAAGPIAPLVLWLNGGPGCSSVGYGASEEVGPFRIRPDGQTLYLNPNSWNKAANLLFLESPAGVGFSYSNSSLDLYTAGDAKTALDAYAFLVNWLERFPQYKYREFYIAGESYAGHYVPQIARAVLNSARGIQNPTINFKGFMVGNAVTDDYHDYLGTFEFWWTHGLISDKTYHNLKATCLLESSQHPSPDCVKNLNLASAEEGNIDPYSLNTKPCNDTASLKLGLGGRYPWLSRAYDPCTERYASIYYNRPEVQMALHANTTGIHYPWQTCSDIVGSYWADSPRSMLPIYQELIAAGIKIWVFSGDTDAVVPVTATRYSIDALKLPTLVNWYPWYDHGKVGGWSQVYKGLTLITIAGAGHEVPLHRPRQALIMFRHFLQNKPMPAQ

SEQ ID NO: 267282 - protein, 290 aa, Zea mays
  unsure (1)..(290): unsure at all Xaa locations
  Clone ID: MRT4577_175363C.1.pep
RSPSPTGYHQHAPPPPLISSPRCFPARPRIGAAAPRSSPPKSTPPSSGSTQSRRGSTCCRHRLRAVVRIERHPPQAFRAGAVREVRRLRRGHKLGGVELRGERAGGGCLALVVWWEGEENLDSEKYEELIEFMEKVAKTVDSEEHYVLSIAYKIVXGTQCASWCIISSIEXGEEGRVNVDCVTLIEDYHNKIEVELSKICDGILKLLDSHRFXSLTAAESKVFYLKMKGDYYGYLAEFETGSRRKDAAXNTMDIALEELAPTHPIRLWLVLNFSTRLTMRPCLQSRQIGP

SEQ ID NO: 267283 - protein, 82 aa, Zea mays
  Clone ID: MRT4577_175364C.1.pep
DLSLYFLVNAFSHLLYCLPNLILRGSFLKVSTGKNLCFSKFNSFCNIPLFQYGVLSKRAPQLSLFKIFAPLNGNVTPPISRH

SEQ ID NO: 267284 - protein, 89 aa, Zea mays
  Clone ID: MRT4577_175365C.1.pep
YLKPAPDRPNHRQTPGKNSSKQPKNPNRDKMPTPKGPGRTNLVGRSPLTVSQDQDTNRSKGAFHFSHGPLDNLQNLDHLPHGTAGSTGF

SEQ ID NO: 267285 - protein, 132 aa, Zea mays
  Clone ID: MRT4577_175366C.1.pep
CLSLDPVQALVLPHRHPAPTSLSPARPGLKHPDAAVPAADGLGHAARRACASTSPTLTVEPCSLYSSSFPVHAVSYSVLVVAASSSDTFNPAAPSCHRFPRRTTSPPTSSCLRCHREAVSRLPCRTPRRSGV

SEQ ID NO: 267286 - protein, 146 aa, Zea mays
  unsure (1)..(146): unsure at all Xaa locations
  Clone ID: MRT4577_175367C.1.pep
RNGRRGVGAGGSQQXRQSRKRKQFHTVELKVRMDCDGCELKVRNTLARMRGVESVEINRKQQKVTVKGFVEAQRVLRRAQSTGKRVELWPYVPYTNLYVAPPVYDKRAPPGHVRRVDALIAPAAGQEEEHLATLFSDDNPNACSLM

SEQ ID NO: 267287 - protein, 74 aa, Zea mays
  Clone ID: MRT4577_175368C.1.pep
TVQASWYPITFRSCRLPGFMYRFIRFPCDSLYDMSICTYNNAEPDLRSKVTPVHIVLHPHAIASHDPQLHVLRS

SEQ ID NO: 267288 - protein, 83 aa, Zea mays
  Clone ID: MRT4577_175369C.1.pep
PPPPGVVSCRGRSRRVSRRRRSCLAPPFYSERVSVHCSPFLFKKKKKKKKKKKKKKKKKKKKKKKKKKKKKKKTSSHPGITGN

SEQ ID NO: 267289 - protein, 220 aa, Zea mays
  unsure (1)..(220): unsure at all Xaa locations
  Clone ID: MRT4577_17536C.1.pep
MIVSSFLPLRSSVFVLPSSAASRSRPATATLLPFPRITLSRRRRLAAAATESSSSSSEEGEGEAAGGSTNGSLPGLPPVEEEEELCPVDCVTEFKTDEEFQRHLNRSRATGALVVVDFYRPSCGSCKYIEKAFTRLXKGSGDDGAPVVFLKHNVIDEYDEQSEVADRLRIKIVPLFHFYVDGVLVESFPTRDKERIIAVIRKYTSVEPEPEPEPEEEQQE

SEQ ID NO: 267290 - protein, 43 aa, Zea mays
  Clone ID: MRT4577_175370C.1.pep
GFQSGQNCSPICGWDQGVISGKVINPVVPSLGLPPIKFWVIFP

SEQ ID NO: 267291 - protein, 130 aa, Zea mays
  unsure (1)..(130): unsure at all Xaa locations
  Clone ID: MRT4577_175371C.1.pep
SCCEYHSCVNQPPISSMITAVSQSIFHDXQGIGHLIPGGSSPDTSHVRPPVTVVITELCPDATCQVDPVHFXLSWTVFGSMXKPGQSDKLRNTARLQVQXLQLACNWNGLDIPFRVDAXSNANYLAMAIQ

SEQ ID NO: 267292 - protein, 50 aa, Zea mays
  Clone ID: MRT4577_175372C.1.pep
LILGAVSLVRSKTRLAHNDGKCLLQQCWPYPFLFSWLRACQVLSPRPATD

SEQ ID NO: 267293 - protein, 158 aa, Zea mays
  Clone ID: MRT4577_175373C.1.pep
IVFAGGYSLGEHPLVWPIILQVVHQLHLVVGTTSLAQSSSLGPLRISPWNKSTSFTPASWSLCYYLRGSRDVRLTPCCWSKSRASPSSSSLVQPNRKARARWGGPAGFDRDLQRAARAGRSLGLLAAARSKAGSGPRWPSHASARRQPAAMAARRLRP

SEQ ID NO: 267294 - protein, 142 aa, Zea mays
  unsure (1)..(142): unsure at all Xaa locations
  Clone ID: MRT4577_175374C.1.pep
KRKGVXSWGCCVHLXVSWEKEXNVYSEAFEAARIACIMFMTNSAXKDAFHLWVRVHPFHVLRVNKMLSCAGAAWLQTGMMGAFGXPQGTCARVDIGQVLLFVRCMDNFAXHASESLXLAMFKFPGLQKXIESLKWGFTCFSR

SEQ ID NO: 267295 - protein, 53 aa, Zea mays
  Clone ID: MRT4577_175375C.1.pep
TPTRACLHILFISVSSILRLSQVCARHWEMSNGAHRSHASDYAARCTRTWRHG

SEQ ID NO: 267296 - protein, 41 aa, Zea mays
  Clone ID: MRT4577_175376C.1.pep
PRPDEWWVCFSLPTSFYAGCESFLVRAIDTWVHHDLIEYKT

SEQ ID NO: 267297 - protein, 147 aa, Zea mays
  Clone ID: MRT4577_175377C.1.pep
PRARRALVPSARAAGSPIVGCVPSSTTSRASLVSPPRARIHGVLPSRRSYCLFGAARRHVLAPKSELATSLLHGRGPLLALSSRPLIAGTRHLPLQTSPSLATPPRHVLGSHIQCRPFPASPHCNLASTLLFSIHKLPVLYVLVYWR

SEQ ID NO: 267298 - protein, 148 aa, Zea mays
  Clone ID: MRT4577_175378C.1.pep
MASIPGLPCAGVEAAMAGPLLGQQLGRLKFPMLGAPSCAAPLLHPYPSAPSLPWPSSSSARPPLLLFPLCSNTNLLFSSTKQQPRSPPHRVLRSTCAVPTRAVAMVFETAHVVSLICAVRPSTRLTSPDLRSPNIDAVHPGETTMIFV

SEQ ID NO: 267299 - protein, 194 aa, Zea mays
  Clone ID: MRT4577_175379C.1.pep
IVFAGGDTRSASIHYLSPSFLGSAADCILGAAPHHLHDRHFSVHKQTQSVFVRTMAIPICASLRTSTSVERLAFFSTQNTGFLFCSSSTQRNVLRAMEPGEGSLHRGGRLKQRRCLGRRGGHHGCWPVSLLAAVGKKGAMHNSWRRLLQGARPAPKQGGGGAMDREHRQGEEEDNVGRERKRTERIRVSTNGRL

SEQ ID NO: 267300 - protein, 190 aa, Zea mays
  unsure (1)..(190): unsure at all Xaa locations
  Clone ID: MRT4577_17537C.1.pep
MWRRGDXLYQNNGETCASIVGVDYCGAALXNRLSVRYSILTREHYYHXKLDDYCVLLSSGFXDDIRXLHNDLAATELLYKQLHNTTMTCPAMAQLLSNTLYYXSFFPYXSSMSSRGLESKVIGRAVTYDXMXSYDRTGYSVHATXTTLTMPXLCNSISSPRPLLLPEDDAVTTLXDTXEAIDYNDDVFAS

SEQ ID NO: 267301 - protein, 40 aa, Zea mays
  Clone ID: MRT4577_175380C.1.pep
PKLKIEEAPIPDHWRTILSYSSTATDVTPIDNKTGVPLLR

SEQ ID NO: 267302 - protein, 344 aa, Zea mays
  Clone ID: MRT4577_175381C.1.pep
FPSRHFFSPWLLPHAQQAKRREQGQPWRGTLPASPGERLGQGAFFPNATPAPSNARHLLWSELEQRARRHPWRGTSAPSPPAAMALFPVLQRPSSLPFSVHGEQELFPPMASSFPAHGATPLLSFFFHLTVLSWLPAAMAWTPFFFLAQQQAPPWQAPRQASPMAPAAGISSPSPWRPENSSRLPLLLPPASSSSTSLPWHFPLRAALSPLSSTSGRSHLAAAPCPFFFHPADSLYCPRRGRYFSHGRAGPLQRASPFPSAAQLLHGETPLFLQPRHLPLLPRCQRCARATCSANCPSGVLRSEQHVGMPAGCLLFCAAPSSSSFAPVRPRRLLLDFRIDVIFL

SEQ ID NO: 267303 - protein, 38 aa, Zea mays
  Clone ID: MRT4577_175382C.1.pep
NLKGAHCLTAFGTWGFYLRFRDFGVKWAPFIFIYLNSF

SEQ ID NO: 267304 - protein, 213 aa, Zea mays
  Clone ID: MRT4577_175383C.1.pep
GCPLLPALGIPAAASSIFSHRFFSLFLYVRRDLPWLKPELPASPSIGFYRAHGSNHKQIFLPTSHGRPPLSLSVVAVPCALFFLSHGKQQQQCRPALGPCSSSLPHKTAAAASSPSSMAPPAISPLAVRWNAHGKFVLCAAAPTSPRSVGSLFCEASGQHAVDARRVLAVLRGPSATPSKTVLVVDIVPCPFDEIPSHVDSHASSHDPFRTER

SEQ ID NO: 267305 - protein, 103 aa, Zea mays
  Clone ID: MRT4577_175384C.1.pep
TLQGKPKHTTCQGTPTPHMTTVPIDSPFASRPHRLGIQCSTDPGRRRAVATLVPTIARMGDPVSGRMRDKVRARLQSGTRFTGYHFSRHVFSTFKRLTQVSAR

SEQ ID NO: 267306 - protein, 268 aa, Zea mays
  Clone ID: MRT4577_175385C.1.pep
MNAAPVSSMAQPTPLYDLVCIGFGAAQLATAIANSESRAPLKVLFIEKKPSFSWGSTSNLSRTRMESPFMYDLATLRNPRTAFSYVNYLLNRKRLIEFANSDRLNPLREEFADYMKWSAEHFKNDVRYGSEVVGVAPEVERDVVQGWKVAVKDNTGKTWVVRARSVVAPSPSRTSGPTAQSLPTTNFLAGQRIISMDDYPSRRNELRGANEPRLNVSVVGSGENMVEIVDDLLSCPRLGNITVVTESDSLAPLRILDDASLHNPAVLD

SEQ ID NO: 267307 - protein, 354 aa, Zea mays
  Clone ID: MRT4577_175386C.1.pep
KNFQPPFSLLPVFFSLAQQPSHTAAARQRRGSGSMAERPSQCSSRPPLPVLLIPHSSAQGAFPFSAASGSREPFSPTCRSFQAAQRPFFFMAGAPPMAADALLSSMAGSSRELDAPVQPPHLLPPTAGFPSPLGSFLQGRAPSLQQPSTPTTKAPFPSDAPLQLAPLCPWPPAGSPWPAPPSGEQPSSHERHPPCSFPLPAPRKCSSNNLLFSPHKTASPGSPPHRVLRSICAVPTHIVELVFGTAPCRVIALRSSTVYAPHFAGSAQPQHRRRSPSVRRRRSLLIPHRLCSPVINCVYVLFLFCLWRRETPCLGEGKSFNARRMFGAMHKSESPSSLQTPIGFVYGEPMTERG

SEQ ID NO: 267308 - protein, 90 aa, Zea mays
  Clone ID: MRT4577_175387C.1.pep
MQHTQLSSKRDREAGVMATVSAAVVTTILARAPIARPNALGLPALRARNQRVLCNYAKDAGPVSTKGAGPSLLGATGAVTASGGPALGLL

SEQ ID NO: 267309 - protein, 160 aa, Zea mays
  Clone ID: MRT4577_175388C.1.pep
IVFAGGGTRLASIHWLCPSFLGSSTDCILWVAPPHWLDHHLSVHIKSPSWLLHMWREDELVVAHGRPKRSRRAWLAAAIRRALNARGEGACCCGVQLAAQIGGGARCWNFLSALDSELGGQGGRGLGHGRRRLAAGAVWGGKMGEEMGAATLRMDAAGRR

SEQ ID NO: 267310 - protein, 100 aa, Zea mays
  Clone ID: MRT4577_175389C.1.pep
TKCQAYANRYNRQHIRAACGTQIPVARLIQAVISKMRGGGKPSWGGTMPTVFGIQPHRPVEQNYGSHRMAAGTNEQGLGERVITRTHQQTIWEAFLGPRP

SEQ ID NO: 267311 - protein, 161 aa, Zea mays
  unsure (1)..(161): unsure at all Xaa locations
  Clone ID: MRT4577_17538C.1.pep
HASGAAWAGARARTLAYARSLRLDPTEDQLGLFMFVLVPQVVLMGLADAFLVVGMLEWGGERAPGGMKSLGTAVSVTGYGIGNLLRSLVLSTVTRITXECGNAWVXNNILDFYLGYYYAFLTVLGGVCFGGFLVLRAMGGCGGSPVAIGMGIRSGDREGQA

SEQ ID NO: 267312 - protein, 115 aa, Zea mays
  Clone ID: MRT4577_175390C.1.pep
AAPHCCMFRCARARRSAKCLGGVLRSEPHAVVPTGCLLLLRSPVVVVIHSGTPCFVWRRRQVVQRSSMFGAMHKSESPSFLQTPFGFDMDREMMIEPVMWCQPQDAVGGRPEEWT

SEQ ID NO: 267313 - protein, 101 aa, Zea mays
  Clone ID: MRT4577_175391C.1.pep
ITSLNNTGVSNNFLSYLIPLNINHFIYINTTTFQHILSYINNLLLFNIYKIITKFKTHHNFISQFNLLFKTLSLSFTILTSFQLLSLPQKLILFSTYHFLI

SEQ ID NO: 267314 - protein, 126 aa, Zea mays
  unsure (1)..(126): unsure at all Xaa locations
  Clone ID: MRT4577_175392C.1.pep
QQATQKEVSNRINTATQEIESTFLRMLLAVCTCVANATIAXQCSQAXTACVFPRYLASIIASVCENPALQXYRLQQAIAASNIHSSTLAXRQSPALSLVQALLQAIMAQQLQQLVLPVINQVGLAN

SEQ ID NO: 267315 - protein, 49 aa, Zea mays
  Clone ID: MRT4577_175393C.1.pep
LDLIPNHFRATSVDPVTAPIGPPMARVLSSSIAVSEDCGSIYNLTRKRT

SEQ ID NO: 267316 - protein, 137 aa, Zea mays
  Clone ID: MRT4577_175394C.1.pep
RWPGGLQMTPTPYSSKNFQISKLEGCGFSGGSYHQSQRCDPVGPRGGHRPCYIYGVSGVCLLGLIRVCTVGPMHHGCEWLYLCSRQAFPPNKNWRGFVGIGPRSAPSWLLSLLIMPMLQLSRCYCDGFLPWPRCILG

SEQ ID NO: 267317 - protein, 41 aa, Zea mays
  unsure (1)..(41): unsure at all Xaa locations
  Clone ID: MRT4577_175395C.1.pep
FFIALYGFGLILHYIHVPISMLFYLCSCXRSLMLIGTSRLT

SEQ ID NO: 267318 - protein, 90 aa, Zea mays
  unsure (1)..(90): unsure at all Xaa locations
  Clone ID: MRT4577_175396C.1.pep
PHGGACLRRMDPGRLGTSVLSRVPQDVTARASAGIATSVAARSTASASVARLRTTQASASLSLGRGCTFSMMAGQGSAVQQADIARGCXC

SEQ ID NO: 267319 - protein, 75 aa, Zea mays
  Clone ID: MRT4577_175397C.1.pep
FLFFFFLSFFLGKGAVGFSHKIIPGAMFRGNWGGHPPPQPTGEKPLQNPPPPRGFPNPLDLGGAPFPPHGFFPTL

SEQ ID NO: 267320 - protein, 107 aa, Zea mays
  Clone ID: MRT4577_175398C.1.pep
LGKKENGTKPFRAPNKGLSWENGNTPPLTTYVLREKFLSQVTPKKLTPFGATQRAPWLSTPPNLGLNGPGPFYLKAQWVSLGVFIFSKGGKALFQAKGLQTFYGVVA

SEQ ID NO: 267321 - protein, 65 aa, Zea mays
  unsure (1)..(65): unsure at all Xaa locations
  Clone ID: MRT4577_175399C.1.pep
GRWPRPPSPEIEEGAEEEPENNEDAPDDVIGGEGEEKEQEKTNRELNSFXYLTKYQQERKHGNTP

SEQ ID NO: 267322 - protein, 55 aa, Zea mays
  Clone ID: MRT4577_17539C.1.pep
RCPSSSISQMITNFPRLLSHIIYFGVTQTSSVHKRIPYSCSLHVLLTYYTYKRMI

SEQ ID NO: 267323 - protein, 92 aa, Zea mays
  unsure (1)..(92): unsure at all Xaa locations
  Clone ID: MRT4577_1753C.1.pep
TTRPTVDDGGNREEESGSHFSLLSRLQYPFFAIFALGRLMTNVNGLALXLIDTFRSGRMMTSGKAVNYARALDPFQLILTMDWPTYLFNAAS

SEQ ID NO: 267324 - protein, 101 aa, Zea mays
  Clone ID: MRT4577_175400C.1.pep
LTSATTNTVLASEARSDSGDTGGPNYMSLTKSAKARLSGCSGSSHHRSFQRPRSGDMSRVTLSSIDTQSNAGSEISVTSKRLNSMSLNLKGRSLDKENEED

SEQ ID NO: 267325 - protein, 44 aa, Zea mays
  Clone ID: MRT4577_175401C.1.pep
FVFPLLCFEIQDNAIRTEIPVSCFFKKKKKKKKKKKKKKKKKTL

SEQ ID NO: 267326 - protein, 93 aa, Zea mays
  Clone ID: MRT4577_175402C.1.pep
LLGVVSGPIGPDVLSVRIAAITAVSVTLSGGLVLSPPSKGVTGPVDAHEPHQPVLDFRLEWPHRGPLVATVFPSADKGTSIRHGDSNRRRPPH

SEQ ID NO: 267327 - protein, 227 aa, Zea mays
  unsure (1)..(227): unsure at all Xaa locations
  Clone ID: MRT4577_175403C.1.pep
AALYLQLFEFADKYRGKYDSSIAEVKSYYASVSGYHDELLWAALWLHRATGRAEYLDYVVDNADDFGGTGWAITEFSWDVKYAGVQILAARXRASCVYATVFFPFFLSFYPEYIIYIKRTYIQYKCLRVVARVVSFQLLLSGEHSPRHRETLEQYRAKAEHYVCACLGRNAADGNVERSPGGMLYVRQWNNMQYVTSAAFLLSAYSGYLSSSSSSSSVTCAAGGGSS

SEQ ID NO: 267328 - protein, 61 aa, Zea mays
  Clone ID: MRT4577_175404C.1.pep
RRQETCCVEQAPHYKNCLARRYKTTGDRTGIARPIYGPSNIGPQMSRTLLQAGQKKHEDGG

SEQ ID NO: 267329 - protein, 249 aa, Zea mays
  Clone ID: MRT4577_175405C.1.pep
FEHALCEDSVLNHFRSVIAKCKKFAKPDLKACIEEFEEKVSKVHEEKKEQEATARNAEAHKQKIDSLDKILLAKEAGQNDRNSAEEETSEVIDPSVDGNVEDKETEETSEVTDPSVDSNVENKGAEEGTGDIDPSVDSNAENKETEEATEVTDPSLGSNAENETEEGTEVTGPSVDSSAENEETDEATEDIDPSADRAAENKENRTKGSGNICSGKSQTSSTVTESEDDSTEVQSSKTVRSRKGSTRST

SEQ ID NO: 267330 - protein, 135 aa, Zea mays
  unsure (1)..(135): unsure at all Xaa locations
  Clone ID: MRT4577_175406C.1.pep
MGKLMKAFGKGTSAACVEDCDDSDGDPFVPNDFAEDDPFQALEEGQMDDPYLEKALYEFYVSHKVNCLKRKITNAGARNVISSGRRETIGGDERIGGGXEGVFTYVFPASLAILLKFVYQILEESPSLVVLLHVR

SEQ ID NO: 267331 - protein, 79 aa, Zea mays
  Clone ID: MRT4577_175407C.1.pep
SPRYSRCSLPFPSLAFAITTQRSRSFLGSLGVRLLNLNNHLQSRRTSIIGSFGGSTSNEGGFAYNDDPCPPGSSVGPGS

SEQ ID NO: 267332 - protein, 91 aa, Zea mays
  Clone ID: MRT4577_175408C.1.pep
MAQQQQAVALLMMLVLAAETASAASCNAGQLTVCASAMLSGAAPSAACCSNLKAQQGCLCQFAKNPAYARYVNSPNARKTVASCGVALPRC

SEQ ID NO: 267333 - protein, 225 aa, Zea mays
  Clone ID: MRT4577_175409C.1.pep
MSFVFRGSRADIEAGGFPGFAAERRSMRIHAGGRPVNSNSLAFLVTVLVLFMVLSSHQMSPNFLLWMVLGVFLLATSLRMYATCQQLQAQSQAHAADGNGFLGRTELRVHVPPTIALASRGRLQSLRLQLALLDREFDDLDYDALRALDTDNSPHAPSMTEEEINTLPVFRYKFQAQQRSTPSRKSSDGPSEPLVSSPESGKEKKQDADATSKMTDDELTCSVCL

SEQ ID NO: 267334 - protein, 91 aa, Zea mays
  Clone ID: MRT4577_175410C.1.pep
MAKQQQAVALLMMLVLAAETASAASCNAGQLTVCASAMLSGAAPSAACCSNLKAQQGCLCQFAKNPAYARYVNSPNARKTVASCGVALPRC

SEQ ID NO: 267335 - protein, 134 aa, Zea mays
  Clone ID: MRT4577_175411C.1.pep
VVFARGGTRLASIHWLCPFFRSSTDCILWVAPHHLHDHPLSVIRPGPTCHWLRESSSSSNRARTQGDGEMEFGSMAGEVRELSCNGEAGGHGSPRRLHSMRAWRGGALDTTSRRCAAGRRRVDGKEHGWRPWRG

SEQ ID NO: 267336 - protein, 163 aa, Zea mays
  Clone ID: MRT4577_175412C.1.pep
HGEAWPRYSSWSSPAEAVTHSTIYPGGRDEGQVTPSTKSMSTFNLTLRQCLRGGTRLASIHWLSPPSFSMSTNCILWLSPHYLHGRHLSVHKQTQTAFARTTVIPICASLRTSTSIERLAFSTQNTGFLSSTKQKNKTAHIHNNRVKITSMRNRTRIYAVSPG

SEQ ID NO: 267337 - protein, 55 aa, Zea mays
  Clone ID: MRT4577_175413C.1.pep
MVSLRCTTAHHSLLGSPTCLARPRRRPCPVVRAAVAVEAGAQAKVSLIRIGTRGR

SEQ ID NO: 267338 - protein, 94 aa, Zea mays
  Clone ID: MRT4577_175414C.1.pep
TTGRLLWLKWRWAPWTERARPEGKEPRGRRETLGSYRGNQHLGVGVQWRSHGQLNAMGKLERPLAIYGSREPSWEMTAMGGACYCREGEGGRRE

SEQ ID NO: 267339 - protein, 195 aa, Zea mays
  Clone ID: MRT4577_175415C.1.pep
LPSRASELLSFFLPARSSAMASPMAPSPSGIPPLPWKSAALQGASPHALGCFPVGATPSQGRGPLPQHSSSSAQKWWRALFPPPLRSGRATAPRPSFLQRRASPSCGELTSRSELPPPHAGQDWEFATAWKLLDEMVDGRLRVYARAARPAAPHGCHKIQQPRHPLSVVCVARFVAPARRRRNPCPCRCHASHDA

SEQ ID NO: 267340 - protein, 146 aa, Zea mays
  Clone ID: MRT4577_175416C.1.pep
PSRPSISVAGMKAKSHHQPIILRSTFNLTLRQCLLGGGTRLASIHWSCPSFFRLSTNCILWLAPHHLHDHLSVQGNNLDESRLVAWAVHRARCFAKWAKREARRRPLARVDGVADGAAQRAQEQCHATRGEAARHGRRWLVAAAVL

SEQ ID NO: 267341 - protein, 188 aa, Zea mays
  Clone ID: MRT4577_175417C.1.pep
LSPPCAPWSCHSCSLADLRFFAGRPSPPLSSHGARRPLLFLPTPFPLLARPFLSLLDSPMEQRRAPSAYGCAWVQLEEELAVLMTCGSRAKDREMMIEPLMWCQPQDAVGGRPGEWWTYPVDTRQASTSPSKHYLSVKKVLLRMICCWCDLASIPATEIDGRVGYCFRRRGPGGVAWPGFAMLLGFLR

SEQ ID NO: 267342 - protein, 111 aa, Zea mays
  Clone ID: MRT4577_175418C.1.pep
MTGDARAIAAAGCHRGLAWPGHLGLPSAQPTPWLCAPSTRDGSAGPAALGRHRRAPARKGRSPFPVRSKEEDDGPICKFQNSRGDREMLIVHVMWGQPQDAAGGQPKEGWT

SEQ ID NO: 267343 - protein, 233 aa, Zea mays
  unsure (1)..(233): unsure at all Xaa locations
  Clone ID: MRT4577_17541C.1.pep
TGQVLMDRWYYLMDALLDGXIPLQQGXGMTPVEYHXSXPRFIRVFYEGMKNHXLIINXKLLDLLXTGFXGVSTLMDMDNGMGASMLGILFRHWFISGCNFYLLLDISDGSPFHKMRHPNDDLFSXVHVVDAILMNGILLYCSDVYCAKMLNICYNEMAENVKGITCDWKVAGNNYATPEVQXGVIHNIMTMIADHPNLKELFDAQVLYLNEMVAFSGVQAIYIYRYACFIELI

SEQ ID NO: 267344 - protein, 124 aa, Zea mays
  Clone ID: MRT4577_175420C.1.pep
SHLPGSNTTSSHEGEAQRNTIKHNTTNLISIISDYIIGVSEIITINFNAAEITNGENRVTWRSLATLLLLVLSCGSSNPLDRLSWWQGWRPSHTINQFNLRSTFNLTLRQCLLGEVLAWRASTG

SEQ ID NO: 267345 - protein, 101 aa, Zea mays
  Clone ID: MRT4577_175421C.1.pep
LREADDSNRVLTLQGKPKHTTCQGTPTPHMSTVPIDSPFASRPHRLGIQCSTDPDRRRAVAALVPTISRMGDPVSGRVRDKVRARLHSGTRFTGYLFPDSA

SEQ ID NO: 267346 - protein, 179 aa, Zea mays
  Clone ID: MRT4577_175422C.1.pep
HLDSVCWGRYSLGEHPLVKSILPWVVHRLHLMVGTTSLARSSFLGPLRFSPWNRPRLYSSKQVLLVLLKWVTGCAVSPLRLVKFVPAVHLSSTSRYLHGESKIAGQRLAGGKGKRGDVDHGISNIRHARCRLQPGQKQLEQTRPRSCEHNNGVREGPVVGEERRAERGRVRSPAGREGP

SEQ ID NO: 267347 - protein, 820 aa, Zea mays
  Clone ID: MRT4577_175423C.1.pep
MADRVTIIPPRDPWPFSTVTASDLEELVGEGLLRPLTDKQRPEWIPPVGGAAPSPPPGYVVSFVSFHERGFGAPTGRFMRAILFHYGVELHNLSPNSISQAAIFVALCEGTFLPFSRLRTRGGSAGGSTSGTTDVGCHKPSLPRVPEDAVDRAARRVAAEEKKKKKDAEKARARERRRARDALEKRRRQQERDGLPREPSPETPDDDDDDDDDDDDDMAARLGLSLGLGRGQEPSSQPPSEPTPSAPEVGVSGSRPEARGRTERPPDPSAGGAEVVPEVQTKAFVPKRPPLVLVADGSDPQVVAAMPGEPASRAPQAPAKRTSAAVSRAGIQEGSPQARWIMAQSGKRSHGQTDLAPRKALKTAPGRVASAIQPTLSRGTPTSGARESPISEERAPEAGSSAEAAIVVEEAADAHAALSSPVVPVMPAPATAEVAAVLVEGCPAAASAGMADASVPKTPGEVGAVAQSVQPGDSLIAVRRSPEARRPLLRFRTREASDPVFVLDDEQEDQSWGELRECAEATVGSLRSSLEVFCRDVPKIFQDLMDRSAAKSSFIRREVDVWGSLRSLRSSLAGATTRLSQQDAKVADLQLLCADLRAEAAAARAEAQRQRSELAQVVEERNRLQGRAAEAESRAETLAADLAATQVAASEHRARAGKLESALDESAKALAEALAGAAEQREADLAAMSEAVSDFYRALGSDDVPSGSSPQSRLRTLGGHARGRVREALHHGVRRAFAVLASHYVVDLERVSEGYCLPDEDDAALAEVQRLDAVAAGPSAVLATTFEAEVLPPATSPEAEMDPTDGGGGAEGAAPSQGGA

SEQ ID NO: 267348 - protein, 854 aa, Zea mays
  Clone ID: MRT4577_175424C.1.pep
MADRVTIIPPRDPWPFSTVTASDLEELVGEGLLRPLTDKQRPEWIPPVGGAAPSPPPGYVVSFVSFHERGFGVPTGRFMRAILFHYGVELHNLSPNSISQAAIFVAGWQRRWFYLRNDGELLPPFSQRVVTAATDAWRHGTPHERQKNLEPLLQALKELREGGLTAAGVIAAIHRRRVLPLAERQLPLWEMTPEADWEGLRMSPDPLPFNALQWRVSAAMGKPDPHAYSQLRMRPDQGCVTLDVGWHKPSQPRVPEDAVDRAARRVAAEEKKKKKDAEKARARERRRAQDTLEKRRRQQERDGLPREPSPETPDDDDDDDEDEEDDMAARLGLSPGLGCGQEPSSQPPSGPTPSAPEVRASGSQPEARGRTERSPDPSAGGAEAAPEVQAKASVPQGPPLVSVAHGGDPQVIAAVPGESASRAPQARAVPKVPAKRTSAAVSGAGIQEGSPQARWIMARSGKRSHGQTDLAPRKALKTAPDCVASAIQPTLSRGTSPQGARASPISEERAPEAGSSAEAAIVVEEAADAHAALRSPVVPVMPAPATVEVAAVPVEGRPVVASVGMADASAPKTSEEDLTDRSAAKSSFIRREVDVWGLLRSLRSSLVGATARLSQQDAKVADLQLLCADLRAEAAATRAEAQRQRSELVQVVEERDRSQGRAAEAESRAETLAADLAAAQVAASEHRARAGELESALDESAKALAEALAGAAEQREADLAAMSEAVSDFYRVLGSGDVPSGSSPQSRLRALGDHARGRVREALHHGVRRAFAVLASHYVVDLERVSEGYCLPDEDDAALAEVQQLDAVAAGPSAVLATTFEAEILPPATSPEAEMDPTDGGDGAEGAAPSQGGA

SEQ ID NO: 267349 - protein, 889 aa, Zea mays
  Clone ID: MRT4577_175425C.1.pep
MADRVTIIPPRDPWPFSTVTASDLEELVGEGLLRPLTDKQRPEWIPPVGGAAPSPPPGYVVSFVSFHERGFGAPAGRFMRAILFHYGVELHNLSPNSISQATIFVALCEGYLGIAPHWDLWTYFFLAEPFALSTGERRIRAAVRAGGCILLLRQSRASQYIPAILASSNKGWQRRWFYLRNDGELLPPFSQRVVTAATDAWRHGTPHERQKNLEPLLQALKELREGGLTAAGVIAAIHRRRVLPLAERRLSLWEMTPEADWEGSRMSPDPLPFDALQWRVSAAMGKPDPHAYSQLRMRPDQGCVTLDVGCHKPSLPRVPEDAVDRAARRVAAEEKKKKKDAEKARARERRRARDALEKRRRQQERDGLPREPSPETPDDDDDDDDDDDDGMAARLGLSLGLGYGQEPSSQPPIEPTPSAPEVGASGSRPEARGRTERPPDPSAEVVPEVQTKASVSQRPPLVPVADGSDPQVVAAVLGEPVSQAPQAPAKRTSAAVSRAEIQEGSPQARWIMARSGKRSHGQTDLAPRKALKTAPNCAASAIQPTLSRGTPTSGVRASPISEERAPEAGSSAEAAIVVEEAADAHVALSSPIVPVMPASATVEAAAVLVEGCPAAASAGMADASVPKTPEEVGAVAQSVQPGDSLLAVRRSPEARRPLLRFRTREASDPVFVLDDEQEDQSWGELRERAEATVGSLRASLEVFCRDVPKILQDLTDRSATKSSFIRQLESALDESAKALAEALAGAAEQREADLAAMSEAVSDFYRALGSDDVPSGSSPQSRLRGLGGHARGRVREALHHGVRRAFAVLASHYVVDLERVSEGYCLPDEDDAALAEVQRLDAVAAGPSAVLATTFEAEVLLPVASPEVEMDPTDGGGGVEGAAPSQGGT

SEQ ID NO: 267350 - protein, 676 aa, Zea mays
  Clone ID: MRT4577_175426C.1.pep
MGKPDPHAYSQLRMRPDQGCVTLDVGCHKPSLPRVPEDAVDRAARRVAAEEKKKKKDAEKARARERRRARDALEKRRRQQERDGLPREPSPETPDDDDDDDDDDDDDVAARLGLSLGLGCGLEPSVQPPSEPTPSAPEVGASGSRPEARGRTERPPDPSAGGAEVVPGVQTKASVPQRPPLVLGVARSDPQVIAAVPEEPVSQAPQAPAKRTSVAVSRAGIQEGSPQARWIKARSGKRSHGQTDLAPRKALKTAPSCAASATQPTLSRGTPTSGVRASLISEERAPEAGSSARAAIVVEEAADAHTALSSPVGPVMPAPATVEAAAVLVEGCPAAASAGMTDASVPKTSEEVGAVAQPVPPGDSLIAVRRSPEARRPLLRFRTREASDPVFVLDDEQEDQSWGELRECAETTMGSLRASLEDLTDRSAAKSSFIRREVDVWGSLRSLRSSLAGATTRLSQQDAKVADLQLLCADLRAEAAAARAEAQQQRSELVRVVEEWNRLQDRAAEAESRAETLAADLAATQVAASEHRARAGKLESALDESAKALAEALAGAAEQREADLAVMSEAVSDFYRALGSDDVPSGSSPQSRLRALSGHARGRVREALHHGVRRAFAVLASHYVVDLERVSEGYCLPDEDDAALAEVQRLDAVAAGPSAVLATTFEAEVLPPATSP

SEQ ID NO: 267351 - protein, 327 aa, Zea mays
  Clone ID: MRT4577_175427C.1.pep
MRAVVITCAGGPEVRAAREVEDHPALGEGEVLLEVAAAGVNRADTVQRMGRYPPPAGASPYPGLECSGTILALGPNVPSRWAVGDKVCALLSGGGYADKVVAPAGQLLPIPEGVSLTHAAGLPEVACTVWSTVFMTSHLSPGESFLIHGGSSGIGTFAIQIAKHLGIKVFVTAGSEEKLAACKALGADVCINYRTEDFVERIKQETNGKGVDVILDNIGGSYLQRNLNSLGVDGRLFIIGFQGGIAAEVNLQAVLARRLTIQAAGLRNRSLANKAEIVSEVEKNVWPAVAAGKVKPVIYKTFPLCEAAEAHRLMEASTHIGKILLLP

SEQ ID NO: 267352 - protein, 34 aa, Zea mays
  Clone ID: MRT4577_175428C.1.pep
DDWASALSKLESVLPWVRAFYSYFGTETILEAKP

SEQ ID NO: 267353 - protein, 33 aa, Zea mays
  Clone ID: MRT4577_175429C.1.pep
LQEKSWWISIPDAVTDLLRIVLAYRMKECVCRC

SEQ ID NO: 267354 - protein, 65 aa, Zea mays
  Clone ID: MRT4577_17542C.1.pep
EIIRNFASLQDIYTIDRTLNRTTRKRNRAALDTICFWKPKLQMARIFHEQKELCAYLQLPVQYKR

SEQ ID NO: 267355 - protein, 914 aa, Zea mays
  Clone ID: MRT4577_175430C.1.pep
MADRVTIIPPRDPWPFSTVTASDLEELVGEGLLRPLTDKQRPEWIPLVGGAAPSPPPGYVVSFVSFHERGFGVPTGRFMRAILFHYGVELHNLSPNSISQAAIFVTRVVTAATDAWRHGTPHERQKNLEPLLQALKELREGGLTAAGVIAAIHRRRVLPLAERRLPLWEMTPEADWEGSRMSPDPLPFNALQWRVSAAMGKPDPHAYSQLRMRPDQGCVTLDVGWHKPSQPRVPEDAVDRAARRVAAEEKKKKKDAEKARARERRRARDALEKRRRQQERDGLPREPSPETPDDDDDDDDDEEDDMAARLGLSPSLGCGQEPSSQPPSGPTPSAPEVGASGSRPEARGRTERSSDPSTGGAEAAPVVQAKASVPQGPPLVVVAHGGDPQVVAAVPGESASRAPQARVVPKVPAERTSAAVSGAGIQEGSPQARWIMARSGKRSHGQTDLAPRKALKTAPNCVASAIPPTLSRGTSPLGARVSPISKERAPEAGSSAEAAIVVEEAADAHAALSSPVVPVMPAPATAEVAAVPVEGRPVAASVGMADASALKTSEEVGVDAQSVQPGGSLIAVRRSPGARRPLLRFQTRGASDPVFVLDDEQEDQSWGELRECAEATVGSLRSSLEVFCRDVPKILQDLSDRSAAKSSFIRREVDVWGSLRSLRSSLAGATARLSQQDAKVADLQLLCADLRAEAAAARAEAQRQRSELAQVVEERDRSQGRAAEAESRAETLAADLAAAQVAASEHRARAGELESALDESAKALAEALAGAAEQRGADLAAMSEAVSDFYRVLGSGDVPSGSSPQSRLRALGDHARGRVREALHHGVRRAFAVLASHYVVDLERVSEGYCLPDEDDAALAEVQRLDAVAAGPSAVLATTFEAEILPPATLPEAEMDPTDGGDGAEGAAPSQGGA

SEQ ID NO: 267356 - protein, 361 aa, Zea mays
  unsure (1)..(361): unsure at all Xaa locations
  Clone ID: MRT4577_175431C.1.pep
MRMRAVVITCAGGPEVLEAREVEDHPALGEGEVLLEVAAAGVNRADTVQRMGRYPPPAGASPYPGLECSGTILALGPNVPSRWAVGDKVCALLSGGGYADKVVAPAGQLLPIPEGVSLTHAAGLPEVACTVWSTVFMTSHLSPGESFLIHGGSSGIGTFAIQIAKHLGIKVFVTAGSEEKLAACKALGADVCINYRTEDFVERIKQETNGKGTTSMLSFLAASMYRALSSNSATSLTVXEXLPGVDVILDNIGGSYLQRNLNSLGVDGRLFIIGFQGGIAAEVNLQAVLARRLTIQAAGLRNRSLANKAEIVSEVEKNVWPAVAAGKVKPVIYKTFPLCEAAEAHRLMEASTHIGKILLLP

SEQ ID NO: 267357 - protein, 993 aa, Zea mays
  Clone ID: MRT4577_175432C.1.pep
MADRVTIIPPRDPWPFSTVTASDLEELVGEGLLRPLTDKQRPEWIPPVGGAAPSPPPGYVVSFVSFHERGFGAPAGRFMRAILFHYGVELHNLSPNSISQAAIFVALCEGYLGIAPHWDLWTYFFLAEPFALSTGERRIRAAVRAGGCTLLLRQSRALQYIPAILASSNKGWQRRWFYLRNDGESLPPFSQRVVTAATDAWRHGTPHERQKNLEPLLQALKELREGGLTAAGVIAAIHRRRVLPLAERRLPLWEMTPGADWEGSRMSPDPLPSDALQWRVSAAMGKPDPHAYSQLRMRPDQGCVTLDVGCHKPSLPRVPEDAVDRAARRVAAEEKKKKKDAEKARARERRRARDALEKRRRQQERDGLPREPSPETPDDGDDDDDDVDDGMAARLGLSLGLGCGPEPSSQPPSEPTPSAPEVGASGARPEARGRTERPPDPSAGGAEVVPEVRAKASVPQGPPLVPGAHGGDPQVVAAVPGEPVSQAPQAPAKRTSAAVSRAGIQEGSPQARWIMARSGKRSHGQTDLAPRKALKTAPSCAASAIQPTLSRGTPTSGARASPISEERAPEAGSSAEAAIVVEEAADAHAALSSPVGPVMPAPATAEAAAVPVEGCPAAASAGAADASAPKTPEEVGAVAQSVPPGDSLIAVRRSPEARRPLLRFRTREASDPVFVLDDEQEDQSWGELRECAEATVGSLRASLEVFCRDVPRILQDLTDRSAAKSSFIRREVDVWGSLRSLRSSLAGATTRLSQQDAKVADLQLLCADLRAEAAAARAEAQQQRSELARVVEERNRLQGRAAEAESRAETLAADLAATQVAASEHRARAGKLESALDESAKALAEALAGAAEQREADLAAMSEAVSDFYRALGSGDVPSGSSPQSRLRALGGHARGRVREALHHGVRRAFAVLASHYVVDLERVSEGYCLPDEDDAALAEVQRLDAVAAGPSAVLATTFEAEVLPPATSPEAEMDPTDGGGGAEGAAPSQGGA

SEQ ID NO: 267358 - protein, 915 aa, Zea mays
  Clone ID: MRT4577_175433C.1.pep
MRAILFHYGVELHNLSPNSISQAAIFVAVCEGYLGIAPHWDLWTHLFLAEPFALSTGERRIRAAVRAGGCILLLRQSRALQYIPATLASSNKGWQRRWFYLRNDGELLPPFSQRVVTAATDAWRHGTPHERQKNLEPLLQALKELREGGLTAAGVIAAIHRRRVLPLAERRLPLWEMTPEADWEGSRMSPDPLPFNALQWRVSAAMGKPDPHAYSQLRMRPDQGCVTLDVGCHKPSLPRVPEDEVDRAARRVAAEEKKKKKDAEKARARERRRARDALEKRRRQQERDGLPREPSPETPDDDDDDDDDDDDDVAARLGLSLGLGCGPEPSVQPPSEPTPSAPEVGASGSRPEARGRTERPPDPSAGGAEVVPGVQTKASVPQRPPLVLGVAGSDPQVVAAVPEEPVSQAPQAPAKRTSVAVSRAGIQEGSPQARWIMARSGKRSHGQTDLAPRKALKTAPSCAASATQPTLSRGTPTSGVRASLISEERAPEAGSSAGAAIVVEEAADAHTALSSPVGPVMPAPATVEAAAVLVEGCPAAASAGMTDASVPKTSEEVGAVAQPVPPGDSLIAVRRSPEARRPLLRFRTREASDPVFVLDDEQEDQSWGELRECAETTMGSLRASLEVFCRDVPKILQDLTDRSAAKSSFIRREVDVWGSLRSLRSSLAGATMRLSQQDAKVADLQLLCADLRAEAAAARAEAQQQRSELVRVVEEWNRLQDRAAEAESRAGTLAADLAATQVAASEHRARAGKLESALDESAKALAEALAGAAEQREADLAVMSEAVSDFYRALGSDDVPSGSSPQSRLRALSGHARGRVREALHHGVRRAFAVLASHYVVDLERVSEGYCLPDEDDAALAEVQRLDAVAAGPSAVLATTFEAEVLPPATSPEAEMDLTDGGGVVEGVAPSQGGT

SEQ ID NO: 267359 - protein, 1013 aa, Zea mays
  unsure (1)..(1013): unsure at all Xaa locations
  Clone ID: MRT4577_175434C.1.pep
MADRVTIIPPRDPWPFSTVTASDLEELVGEGLLRPLTDKQRPEWIPPVGGAAPSPPPGYVVSFVSFHERGFGVPTGRFMRAILFHYGVELHNLSPNSISQAAIFVAVCEGYLGIAPHWDLWTHLFLAEPFALSTGERRIRAAVRAGGCILLLRQSRALQYIPAILASSNKGWQRRWFYLRNDGELLPPFSQRVVTAATDAWRHGTPHERQKNLEPLLQALKELREGGLTAAGVIAAIHRRRVLPLAERRLPLWEMTPEADWEGSRMSPDPLPFNALQWRVSAAMGKPDPHAYSQLRMRPDQGCVTLDVGWHKPSQPRVPEDAVDRAARRVAAEEKKKKKDAEKARARERRRARDALEKRRRQQERDGLPREPSPETPDDDDDDDDDDEEDDMAARLGLSPSLGCGQEPSSQPPSGPTPSAPEVGASGSRPEARGRTERSPDPSTGGAEAAPVVQAKASVPQGPPLVSVAHGGDPQVVAAVPGESASRAPQARVVPKVPAKRTSAAVSGAGIQEGXPQARWIMARSGXYLGIKRSHGQTDLAPRKALKMAPNCVASAIPPTLSRGTSPPGARASPISEERAPEAGSSAEAAIVVEEAADAHAALSSPVVPVMPAPATAEVAVVPVEGRLVAASVGMADASAPKTSEEVGVDAQSVQPGGSLIAVRRSPEARRPLLRFQTRGALDPVFVLDDEQEDQSWGELRECAEATVGSLRSSLEVFCRDVPKILQDLSDRSAAKSSFIRREVDVWGSLRSLRSSLAGATARLSQQDAKVADLQLLCADLRAEAAAARAEAQRQRSELAQVVEEQDRSQGRAAEAKSRAETLAADLAAAQVAASEHRXARAGXFSWLLAELESALDESAKALAEALAGAAEQRDADLAAMSEAVSDFYRVLGSGDVPSGSSPQSRLRALGDHARGRVREALHHGVRRAFAVLASHYVVDLERVSEGYCLPDEDDAALAEVQRLDAVAAGPSAVLATTFEAEILPPATSPEAEMDPTDGRDGAEGAAPSQGGA

SEQ ID NO: 267360 - protein, 271 aa, Zea mays
  unsure (1)..(271): unsure at all Xaa locations
  Clone ID: MRT4577_175435C.1.pep
FTLTVTPDLNLVKDGVLLHVDLAKGKRRLGCSALAQAFDQIGNDCPDIEDVPCLKKAFEIVQELLSERLISAGHDISDGGLIVTILEMAFAGNCGVNLNIDLKDNDLLQTLFAEELGLVIEVHLDDLDVVKQKFHAAGVSANVIGEVTAAPEIELLVDGEVCLKERTSDLRDLWEETSFQLEELQRLKSCVKLEKEGLKSRTSPSWHLSFTPKFTDKKLLSASSKPKVAIIXREEGSNSDREMPAAFHAAGFEPWDITMSDLLDQKTSLTE

SEQ ID NO: 267361 - protein, 37 aa, Zea mays
  Clone ID: MRT4577_175437C.1.pep
FKDYLARDLYSRSQLAAVFSGVLIYVSVGVLMLGLFT

SEQ ID NO: 267362 - protein, 180 aa, Zea mays
  unsure (1)..(180): unsure at all Xaa locations
  Clone ID: MRT4577_175438C.1.pep
MARGGSAVAVLSFLLGLPLLSVLVAGEDPYRFFTWNVSYGDIYPLGVKQQGILINGQFPGPQIEAVTNDNLVVNVFNKLNEPFLLSWSGLQQRRNSFEDGVAGTTCPIPPGANFTYILQAKDQIGTYFYFPSLAHXGAAGXFXGIRVLSRPRIPVPFPPPXAADYTVLIGDWDKNNHTDL

SEQ ID NO: 267363 - protein, 44 aa, Zea mays
  Clone ID: MRT4577_175439C.1.pep
MPNHGFVSRKSPNFGEISNFRCSLLTKMRISVRFFMDFGSKFKK

SEQ ID NO: 267364 - protein, 42 aa, Zea mays
  Clone ID: MRT4577_17543C.1.pep
KRMVHWAYLSEPDARRQEQVIVASEDLTRQLELLTLSAYKRG

SEQ ID NO: 267365 - protein, 60 aa, Zea mays
  Clone ID: MRT4577_175440C.1.pep
RRNEPCFFRTFFSWDSTRALVHGNSFEKRLSVLVGIRSEGGNKSSGDGGPTQMASALAAL

SEQ ID NO: 267366 - protein, 128 aa, Zea mays
  unsure (1)..(128): unsure at all Xaa locations
  Clone ID: MRT4577_175441C.1.pep
CFSPPVLXXRFLPLXCFXXXXRPGSSLGRVXLFRASXRGLGLXXXXPSLSGXXRAPPPPVGXPXXPAPXRRLFXLLXGRSVARXXSLXAXGLPXRXRRPAVRRSLSLPRRPAWVXXXARCLRXXCVGV

SEQ ID NO: 267367 - protein, 111 aa, Zea mays
  unsure (1)..(111): unsure at all Xaa locations
  Clone ID: MRT4577_175442C.1.pep
RTRGXRIASLASSTTGPTNLATSLCLPSLLPHRITQLHRFSRLGADLLRHRHVDQLGGGIPSESDSHPVRISLPTRGRDDLVLPLPRRRQISRTSLRPTAMWMLTLRRSLM

SEQ ID NO: 267368 - protein, 97 aa, Zea mays
  Clone ID: MRT4577_175443C.1.pep
VYVSLVSNTKIQRDKRTDFTYPPLSYPDQSTYPTLPPPQFIITTSVFTTVSFTIYFFNFTFPIVTSPSSYSSSHTLTTNHHLPGPAYISSTKSAQSS

SEQ ID NO: 267369 - protein, 86 aa, Zea mays
  Clone ID: MRT4577_175444C.1.pep
NSRATHALGAQEFYKVDLRAYALDYNLAGRTSINGVTAIIGCCDYLISVHNATLHPNMSHISTSLGALLSLLAHITLLALPALYHA

SEQ ID NO: 267370 - protein, 117 aa, Zea mays
  Clone ID: MRT4577_175445C.1.pep
ECFSCCHTSVHYMSPVLFVRRFHVVVHVSCVHIRLLKLVLFLVQVVHGINRYTCSLFVCLDPRGSSCSVLRRLRWRLWWPTGRRRVIILLSSQGLRRGGPPHCRRGGYGPSRRGRAT

SEQ ID NO: 267371 - protein, 99 aa, Zea mays
  Clone ID: MRT4577_175446C.1.pep
PCAVPTRFRCTPRALYVCVTCSAPAGDWHRMRAVSFGFRAEWLWWTQGHGHGILGTPPCLRDRGPTNGQFSLFSSKGPWIYSFFREKANVSRRLSPFLW

SEQ ID NO: 267372 - protein, 219 aa, Zea mays
  Clone ID: MRT4577_175447C.1.pep
RSMECVVQGIIENQHVDALEVLLQGLSGVPKERFRVHELCLKSGPNLGVVPSEVRLLCDLAQPTPSWTIRHVGGAMRGAGAEQISVLVRTVVESKASKNVLHYFYTLGYKLDHELLKSGFAFRFHRGAQITVTVTSANKMSRLHATDEATSVTPAIQLVEITAPAAADNYNDVVSAVTAFCEYLAPLLHLSKPGHSTGIVPTAAAAAASLMSSGGGKTL

SEQ ID NO: 267373 - protein, 107 aa, Zea mays
  unsure (1)..(107): unsure at all Xaa locations
  Clone ID: MRT4577_175448C.1.pep
LGRPCEHFLGVVHVDNTTSLSLKKAIEDLLVMNGLTMTQIRGQGYDGASNMKGEVKGLKTLIMQESPSAYYIHCFAHQLQLVLVAVAKGNSDCVXWFFDQVSXLLNI

SEQ ID NO: 267374 - protein, 144 aa, Zea mays
  Clone ID: MRT4577_175449C.1.pep
MDETGDAPLRSCMFLVGDEKERLIIEATNKISFEDAKLDEMAIAENYNLCKIVASKEKMIKELKESKAHSDQELTDATARLEFSQKQCASLRYEVRMLQEELEIRSKEREYDLKSMDAGRKKQQESMKKITALEAEMPELRAMV

SEQ ID NO: 267375 - protein, 87 aa, Zea mays
  Clone ID: MRT4577_17544C.1.pep
NSLYFYMCIGVLMQEFFHEIAESHMHFLSEQKTHRALKYGKGLTEEKSFFLINPRLKARTNGCKGPFPTRVIKFGATGSGFMELGKQ

SEQ ID NO: 267376 - protein, 132 aa, Zea mays
  Clone ID: MRT4577_175450C.1.pep
ARGSNTLFWTDKWLNGCSIRDLAPEVASKVSKRALTSLTVSQALVNRQWIAHIKTPLSLIGIQQFLFLWDTLGEVQLSQEEDRHVWRHEASGLFSSKSCYKVLLFGSTVFEPWKRLWKTWAPPKCKFFLWLA

SEQ ID NO: 267377 - protein, 152 aa, Zea mays
  Clone ID: MRT4577_175451C.1.pep
HLGSVCWGGTRLASINWVSPSVFRSSTNCILWLAPHHWLDHHLSVPALGPHVIDPKGSSSSFRTHAHFFSGNRERLATEDTGRRPGHGHKSLARPGKHWAARPCSFHLLLQRIPSLHLHTHADLAAAWSWRCRARRRERQGRGDDIVGGARP

SEQ ID NO: 267378 - protein, 235 aa, Zea mays
  Clone ID: MRT4577_175452C.1.pep
RPVRGLLLPHGSSPHLLPPCAQPSPSSSAQGQRLHGRAPFPVLQPASSAVLLIPHSSAQGAFPLLRGVWQQGTFLPCAQKLLHGAGEARAAKLPWAPPLQFPWPTPSVAAMAPPSLSARAQEAPQAQGTSAPSCRGELHLCSSLHHLWRCLGPFFFPAFSLLSWLLAVRALNPAPCSKNPARSRLQTRYRGRRVSPSPAPATSFAARRPPCLRAAARCRMVIVRCSTKYRSKQRS

SEQ ID NO: 267379 - protein, 304 aa, Zea mays
  Clone ID: MRT4577_175453C.1.pep
SYENNADAEPNKERRDLTGVNDVDVRGCAKTANTRRHHGVLSIGSTKQRVDSARRRRGCRTFRRAPSKHHGHCAAARKQGGHRVASHGGVAPRRLLQYAMGSWRSGCWSSERRPWREGRSCCCNFWAPARRSCRGVAPMGASPTAPRRRWEQRAWAPWLLGDAGAQSAIVGVGNGEKKLSAENSGRHGARSRGSRDQGERRGRCAQGVGGGACWLEEEEGEEGAMDQSSPTPWTAEGNAGELDCWPTTEKTTPCCSRSPGGGAGRALGCCCAREKEQGALREGEQRCHAMDAGELAALCLCAWG

SEQ ID NO: 267380 - protein, 35 aa, Zea mays
  Clone ID: MRT4577_175454C.1.pep
HVPGTQTKFLAGLQRALPNGDYSFIGISVRYKLFA

SEQ ID NO: 267381 - protein, 222 aa, Zea mays
  Clone ID: MRT4577_175455C.1.pep
GPSRPAGTPRLLLAPCSEQQPPMARPASPIVRPPHSMALRARSALSFARRVLLLPHARARRPAETKAPSPSCPPWLLPLRGKRGLPLSLDARRSGHGRPAPRLSARRPALLQVQAPLHLPGAGNSQVQAPRTPIAASLSIAAELPYFPSHGAELQLPTSLRTCSNRGRRSHFVPMTGPREDDRASDVVPTTRCGRWTTQARMDLTSGCAPSEYLPQQTLPKC

SEQ ID NO: 267382 - protein, 107 aa, Zea mays
  unsure (1)..(107): unsure at all Xaa locations
  Clone ID: MRT4577_175456C.1.pep
AYVLIXKXKNRGKTTVTTXXNTNSHDEGHNLTATQQAPQQRNCEPDQHCNGANLYGTLSEFDMSIIVYYDIFWTLSYMISQVHKGVKXXSGAYKKYPNFICVANGST

SEQ ID NO: 267383 - protein, 198 aa, Zea mays
  Clone ID: MRT4577_175457C.1.pep
MLCFGLASSLRDALAAARPDHISLAERSPVEAPCRCLALLPPHGLLPHGVGIPPSDGCAPQACSTRALPDLQLPCARPRHMVLCCPWPQLSSSLHGRAGAPSSSDACFLSLATTPSCSRCPCLFFLRAELHSWPCPGSPVRGLGPRLSLVGLAVSSTPDICARCRLAVLGSPVDNTTSTLTGCLLFLRSPIRDVVHPR

SEQ ID NO: 267384 - protein, 67 aa, Zea mays
  Clone ID: MRT4577_175458C.1.pep
TGGKVLGSWGFQLKSCSYYPDLSWGHTLGKGGPPEKQGTTGESIRCGGPSPLMAPGMNNGDGFGLST

SEQ ID NO: 267385 - protein, 86 aa, Zea mays
  Clone ID: MRT4577_175459C.1.pep
HLDSVCWGRYLLGEHPLVKSIILQYVHQLHLVVTTTSLARSSSLGPTPYCRRGGGDAMGELAKVREELGRARSPAPLEGGCCCMGC

SEQ ID NO: 267386 - protein, 101 aa, Zea mays
  Clone ID: MRT4577_17545C.1.pep
FAYALVIHFKLCISSINRCLQIRPAVSFSAHVLRPFHSLVPIRRHSIVRSAILRRTLAERLDFNGIRMEFRHTPSPTMLSPSTMNPQSIKQSMSSANDLSL

SEQ ID NO: 267387 - protein, 69 aa, Zea mays
  Clone ID: MRT4577_175460C.1.pep
RPAARRGPQTQKRRIADWTSRRRPPPPRREKTNGQVGHPCGVLDFLPCKTMGGWMGKQPNEGDWSRPAR

SEQ ID NO: 267388 - protein, 121 aa, Zea mays
  unsure (1)..(121): unsure at all Xaa locations
  Clone ID: MRT4577_175461C.1.pep
AALEDLWVRALIDHIILTKINRPPATLVNAHKSGTYRRTLDITTVSIYHHLRTEPGRLFGLEGHLXDPLKSRSQLEXTYLGEDVLVVGDDHXQEFTSTVSCIKILFPNEAPHQNEAGPGIS

SEQ ID NO: 267389 - protein, 50 aa, Zea mays
  Clone ID: MRT4577_175462C.1.pep
WQIFFMELPRGGNLKIQGKGLVDWGGVEEVGGGLKPLYLVGREFNHLQFP

SEQ ID NO: 267390 - protein, 89 aa, Zea mays
  Clone ID: MRT4577_175463C.1.pep
MNGQTPMGLAAAAAAAVRPCRRRLLSSASAAAASKTAARTATPLFPRLPHPHHPPYGRRLPFLVSAASQSQASQTGPDTHALVPVPFDP

SEQ ID NO: 267391 - protein, 126 aa, Zea mays
  Clone ID: MRT4577_175465C.1.pep
VDKAQPQGPGRDRNGDRDYDRERGSRYERGRDYGGGRAPRGGGGGGGGGDCFKCGKPGHFARECPSGDGGRGDRYGGRDDRYGGGGGGGGGRYGSDRGGDRYSGRSRDGGSYGGGDRYSRDRSGPY

SEQ ID NO: 267392 - protein, 204 aa, Zea mays
  Clone ID: MRT4577_175466C.1.pep
MATAAAMADDDDFASPPLAPRAREEGGGRGVYQVGGVPVEFPYKPYGTQLAFMGRVIATLDRARRQGRSHALLESPTGTGKSLSLLCSALAWQRHYPLRSPPASRYERGRDYGGGRAPRGGGGGGGGDRFKCGKPGHFARECPSGDGGRGDRYGGRDDRYGGGGGGGGGRYGSDRGGDRYSGRSRDGGSYGGGDRYSRDRSGPY

SEQ ID NO: 267393 - protein, 121 aa, Zea mays
  unsure (1)..(121): unsure at all Xaa locations
  Clone ID: MRT4577_175467C.1.pep
TIYKSHYVSQVSICAESGEMRVLANHVPSIEKLKTALTEDVXEHLADXELFLSAGFAIVQSNCVLSIKSEXDYPLEDFSAEVIRAHIAEVQKVANGSGSEQDIAEAKIELEVLETLSAHVK

SEQ ID NO: 267394 - protein, 102 aa, Zea mays
  Clone ID: MRT4577_175468C.1.pep
LGDLKWLKVLKITWSFCHSTDGECRAALLSSIGRWSHLQSLTIHCGLGCSMEFLGTLSYPPEHLRKLKVTGGVFAGVLRWLSVPSHHLSFLQITICSITADD

SEQ ID NO: 267395 - protein, 48 aa, Zea mays
  Clone ID: MRT4577_175469C.1.pep
ATRALTCLSTTTTTHHQRAGTHYTHSNLSTQPTQIPTIQEDEDLSKMS

SEQ ID NO: 267396 - protein, 115 aa, Zea mays
  unsure (1)..(115): unsure at all Xaa locations
  Clone ID: MRT4577_17546C.1.pep
KKKKKKKRKKKKKQKKKNKKKKTKSTTKKKEKKKKKKKKHKKRKKKRKKKKKKKKKKTKKKPKKRTKRGRNREQKRKTXRKAKXSXAQEETVGIKHKAKLISSREWGRALRIHTR

SEQ ID NO: 267397 - protein, 119 aa, Zea mays
  Clone ID: MRT4577_175470C.1.pep
QLWLVSTIYATILKHSTLLSISSLLSRARRDPRQQIWPASCVNLKLFTVKGQATMNTLVIGCKVGYAPVASSVDANSGSLKSFTGFHKKKSHGHSSYQLRVVHAVDTHDSRTVQLFIYR

SEQ ID NO: 267398 - protein, 296 aa, Zea mays
  unsure (1)..(296): unsure at all Xaa locations
  Clone ID: MRT4577_175471C.1.pep
MAAVQRLLRAVAPGGSAAAAVRRRMTSLAPEQAPSAAAGFPFAAEQRARRPVAAERNVQWVFLGCPGVGKGTYASRLSRLLGVPHIATGDLVRDELASTGPLATQLAEIVNQGKLVSDEIIINLLSKRLKKGEDQGESGFILDGFPRTVKQAEXNLICXILDGVTDIDMVVNLKLREDVIVEKCLGRRICGQCGKNFNLACIDVKGENGLPPIYMAPLLPPNNCMSKLITRADDTEEVVRNRLQIYNDMSQPVEGFYREQGKLLEFDLPGGIPESWPKLLQVLNLEDQEELRLAAA

SEQ ID NO: 267399 - protein, 114 aa, Zea mays
  unsure (1)..(114): unsure at all Xaa locations
  Clone ID: MRT4577_175472C.1.pep
RAETLIFPPLFSRTHLLRAAGDSYTHAISQKXYSKIQNDYHSFSHLTESFPHSTLQSLNLIILIECTKSNELTCKIFFNTHFLSYIKNNPNPYXQPISIILKTLSAIDEKNLIP

SEQ ID NO: 267400 - protein, 60 aa, Zea mays
  Clone ID: MRT4577_175473C.1.pep
KKKFPPPHVVPGAEKKKKYFWLGVCQCHVFHSTIRHAAGGVFTSFMTECFILPTPPRAFF

SEQ ID NO: 267401 - protein, 59 aa, Zea mays
  Clone ID: MRT4577_175474C.1.pep
LFEQTYYDQVFSERPNDKIIIPSVLFDGLRINGSLTHERIEDLMARRILRIISGHSRPR

SEQ ID NO: 267402 - protein, 366 aa, Zea mays
  unsure (1)..(366): unsure at all Xaa locations
  Clone ID: MRT4577_175475C.1.pep
MGGAGELDAFDAGRCADGYALGLAVGRRFAEVIQSRMRQDLVLREQLLPFASTAQAQALLAALQSANRQRYPRYWDELVGTADGSGVPLLHVILVNFRKEVLPFIPKQEEEKEKEEAGGDCSDVLIVSDSTAIAAHNEDGDVALLGHTYLVRATLPDGASFTAYTCAGELPSCAFGFNTNGVAFTLNSVPPANDEIVAXHCPELRVPGPARSXNLEDAMHRVCSPAVSVGHSYNLTDVRGRRIVNVETASGNRFAVREAGAVPFFHANMYRHLQVKQVPDENSMSRERRAAQCSSAVDVDSKEAALSLLGDTADEKYPIYMTGPRLYTLCTVLVDLDEATMTIYRGNPRDGNAAHVLRIRADPPAG

SEQ ID NO: 267403 - protein, 134 aa, Zea mays
  Clone ID: MRT4577_175477C.1.pep
MDRLVFSSLSRCSPSSQGMSLCRSSLDGSFGPSATKQTPNKPCHKQPQGSVLCGFYACEFMRVNERYTTNPSKEFQQGKPENLAEGALYGIIKDLCTFILKEVIPAEGKYHDASGTLARPEFRILTEVSRLSLR

SEQ ID NO: 267404 - protein, 132 aa, Zea mays
  Clone ID: MRT4577_175478C.1.pep
MQRRRRAPVRHAVGPAKESVVCPRKESVQFTRRKSDDVNATCSVARYETSTESVYDAAAEKEEAVNVDDEVAMTMRTALSQTQQARSCTTHESSRLDALAIPTIYALTIRTVQRAQTAVRVCCVGALAGRTR

SEQ ID NO: 267405 - protein, 89 aa, Zea mays
  unsure (1)..(89): unsure at all Xaa locations
  Clone ID: MRT4577_175479C.1.pep
AARPNPXGSFRYSAISVTQAYLLRGAGPVWIGGRRGAALNGLSHAPTDTPMRVADAYGAEGGCTLLSPERPTXGRPRTRRXSLINSPYL

SEQ ID NO: 267406 - protein, 108 aa, Zea mays
  unsure (1)..(108): unsure at all Xaa locations
  Clone ID: MRT4577_17547C.1.pep
GYNRSTGFVWLRXRQAXTHTLGSIGKHGWYDREVTAFVEPGRMHGLSGVKSKELLIWVTIYEIVLSLSCTKIVIRTPAGXGRAFPVTALQLEPEGDHKADDAVVGGDH

SEQ ID NO: 267407 - protein, 147 aa, Zea mays
  unsure (1)..(147): unsure at all Xaa locations
  Clone ID: MRT4577_175480C.1.pep
PRVRAYLPTRVFVFLPRLSNATRDPHQWRPSSPNDVESPPTVPFLPRQPTPRSARPASRHSDAALPSQAARHLRAPTNPXPEPTSHQARPRPTFTKPEGEIRRQLCASRAPPGXTVMPRQSGKEGRANRRRETRQASPFPQAGYPAT

SEQ ID NO: 267408 - protein, 81 aa, Zea mays
  Clone ID: MRT4577_175481C.1.pep
LTEHRRDRRHRTRLPPELNLCHLSNSLRTPPVHSGQRHHDGQHQTSTSVRPCSIQINAGCELDWLDHGNHADGHYARRQDH

SEQ ID NO: 267409 - protein, 51 aa, Zea mays
  Clone ID: MRT4577_175482C.1.pep
KVFQGIQHQAIRMRCFLQCTRVFIENGCQVLPVVGYDLMKPHGRPPSADEW

SEQ ID NO: 267410 - protein, 222 aa, Zea mays
  Clone ID: MRT4577_175483C.1.pep
MLPLKPIMLVIFSSVQELTDGGTAVIRNQNRSTTAAIAALPKYLHRHAATEANNAGDISSVQELDGEGVKASTDVDTTGTDVQHGSIEATKANAAGDTPGAFFQKQCAKAADVITIDDDDEDNSHRCYKEEQTAVVDLEADYAGDNHPVQLEANSRGHKHVKVKERIWYYIDPQGDEQGPFTMQHLSIWWSNGFFPGDFRVWRTGQTSNDAILLVDVLQMTR

SEQ ID NO: 267411 - protein, 77 aa, Zea mays
  Clone ID: MRT4577_175484C.1.pep
VEGFVKCILAPVWWCLGLAPGVVLRLCQFLVSRQLGVWGVRSRGGRPLCFVITPLWCLGALGGNKWGGMCLEPNSEL

SEQ ID NO: 267412 - protein, 85 aa, Zea mays
  Clone ID: MRT4577_175485C.1.pep
ELWSVLARMGRCTYSFAPVHQRLGLAILITQFYSLLLLLPCLHTLPPIQPFAASLHKQNYGMYYDIFFLFGTRFVRSVLAGRLLC

SEQ ID NO: 267413 - protein, 524 aa, Zea mays
  Clone ID: MRT4577_175486C.1.pep
LNCKQDLDLEKVHDEEHSSDDDFVGNSDDDDDNKPSSTTKFNGTSNTMKFFLREDRPMKNGYVGWGSKELMEFLSSIGKDTLNSLDQHGATEVVKVYIQQKGLLARDKKKLVICDDKLKILFRRSKVRYNRIYSLLGKHIAVNMTSEDETFANSDDNNETFVRKKARIGNYSSSTPKCTPEINKRCFAALVRHNIDLIYLKKSLVVDLLREPDTFGSKVIGCFVRIKIDLNDYSFYMHKKVHQHRKLYQLGLVTGTSKSPEEYKINDVSTDILLCISSIPDIKISSLSDEEYEEEECQDLRLLAKNESFKRPTVGDLEEKARSLRREIVNHWISKELQRLERLIDRASEKGWRKEKFEYLDKKQLLRKPSEQQRLLEEVPQVIPETEDNKDTEFQVTGQDKPIQKSTVALQGTDGERDLSLESLSEEKPEVNKAHTDGGTAVIHNQNRSTTAAIAALPKYLHRHAATEANNAGDISSVQELDGEGVKASTDVDTTGTDVQHGSIEATKANAAGDAPGAFFQKQC

SEQ ID NO: 267414 - protein, 391 aa, Zea mays
  unsure (1)..(391): unsure at all Xaa locations
  Clone ID: MRT4577_175487C.1.pep
MEPLVGEEEEVAALEGEDYCFVCKDGGDLRVCDFRGCQKAYHPACVGKDSGFLNSDEEFICEWHTCFICKGRSRYYCFCCPWQAFCQNCVKQAEFVPVLRKTKGFCTNCLRMAIMIEKNVDVDSDGERVDFNDRATYEFLFKEELQFQYSKVYXEINKRCFAALVRHNIDLIYLKKSLVVDLLREPDTFGSKVIGCLVRIKIDLNDYNSYMHKKVHQHRKLYQLGRXNRHGYVGWGSKELMEFLSSIGKDTLNSLDQHGATEVVKVYIQQKGLLARDKKKLVICDDKLKILFRRSKVRYNRIYSLLGKHIAVNMTSEDETFANSDDNNETFVRKKARIGNYSSSTPKCTPEINKRCFAALVRHNIDLIYLKKSLVVDLLREPDTFGSKVIG

SEQ ID NO: 267415 - protein, 161 aa, Zea mays
  Clone ID: MRT4577_175488C.1.pep
MSSMKRSIASSVIVVLLVLSLEATFADAVRVIPDAPAGGAIVRLPSDGERGVTTSAAAADDKKQLRWCEHPICFPESDICFCPYTRADRTTTESGRGAKDELVHDSLVVPPRAPAPPCEHPFCIFIRGEPVCRCLDGTRPAPSSSVEMRMMMHADMERASS

SEQ ID NO: 267416 - protein, 49 aa, Zea mays
  Clone ID: MRT4577_175489C.1.pep
EVVVVVEALPPVVVGKASAGVGGMGVNIVCASSRVSQLASFLGNSAGQA

SEQ ID NO: 267417 - protein, 103 aa, Zea mays
  unsure (1)..(103): unsure at all Xaa locations
  Clone ID: MRT4577_17548C.1.pep
LCPGGLXPSLPPRSGWRLFPALVCCRXVACCVCLLAPXGLXPPPLPFCXGPCSXVWGLXGGXXRLCVLXXXGRVGPPCRPXPLLXVXSFLARPCCSLFAPEFX

SEQ ID NO: 267418 - protein, 152 aa, Zea mays
  Clone ID: MRT4577_175490C.1.pep
MAAKDGSGSQDQGHRLWPMLSYACGELCVIMLLYVAAFASHAATRLARICGLRPPCILCTRLDRALHGNLPWFSADLVCSVHRSEVSSLAHCKSHGRLARSGDLCKSCLLSCTAVGAREEVVNSRPTTSSSRLCSCCSDPFKNNTGDTQRHS

SEQ ID NO: 267419 - protein, 132 aa, Zea mays
  Clone ID: MRT4577_175491C.1.pep
RRRPPVCSLPSALPPPRWPIKPTARDVVLTSALAASPHFRRGYRTQPKHTASSPSFSTLKLVPSCCSSVDCRLSCSLDVVVVPVLLCSFAVSAPSVDPTPNAVADPRSPKLDVIEFIPGVSFYLLSWCEWLI

SEQ ID NO: 267420 - protein, 125 aa, Zea mays
  unsure (1)..(125): unsure at all Xaa locations
  Clone ID: MRT4577_175492C.1.pep
MTTVSAAAVTTIGARAAIVRCCALGLPAMSTTSEXCVCTLHARHDIERPPQSAPRARARRMLAAIGEVTAVAQTALAFAKKRMTSKATGLSLGLSDNLLRWILLGTFSLICLLYTIYASELYDDE

SEQ ID NO: 267421 - protein, 77 aa, Zea mays
  unsure (1)..(77): unsure at all Xaa locations
  Clone ID: MRT4577_175493C.1.pep
MAAPKFATLALAVLLATTVVAXPPAEARAGMSCSTVYSTLMPCLPLVQMGGAMPPQPCCFGIRSLLQQANNTPDRRT

SEQ ID NO: 267422 - protein, 135 aa, Zea mays
  unsure (1)..(135): unsure at all Xaa locations
  Clone ID: MRT4577_175494C.1.pep
PRVRTYASGDGGLDYLGNPSLVHAHIILHIWARHAVLMGAVEGYRVAGGPLGEVVNPVYPGGKFNALGLTDDPXAVAELXVKEINIGRLAXMCSMSSYFVHAMVTGKGPLKNLVDHIADPVYIIAWDYATFFLLG

SEQ ID NO: 267423 - protein, 64 aa, Zea mays
  Clone ID: MRT4577_175495C.1.pep
ASPFLVFCRSTCDLLFPRAGFIFLVGARTRPSPAGVDNKQGKVSGCVVFGCMGPVDNKQAWCGW

SEQ ID NO: 267424 - protein, 74 aa, Zea mays
  Clone ID: MRT4577_175496C.1.pep
NSFGEVSVLLGSMRTKQQGQRAIQHIRRLEGIEHRVFGYRQVQRVHKLRKQLSLCRCSACIIEDANTEVDDVGP

SEQ ID NO: 267425 - protein, 99 aa, Zea mays
  unsure (1)..(99): unsure at all Xaa locations
  Clone ID: MRT4577_175497C.1.pep
PSCSLXVPPLPLPCALXXXFXXXASPGSPAXXXXALSFPFXXPPPPGXXGLPWLVARAALRPARXARLVCALRPPXVLSLLGLVGAPPLFGWGRPPVGA

SEQ ID NO: 267426 - protein, 203 aa, Zea mays
  unsure (1)..(203): unsure at all Xaa locations
  Clone ID: MRT4577_175498C.1.pep
AFIYNRXXQSSIYIVRYCMVLVAIQLALFICTLDSYLMQREASLCTFGSRTRLVIVTYFIWWHTVSMLIGSPRDWRPLPGMLRTIPMLTLWWLIGEAVEAKAEHQPQHARAPRAVKTLHCLSRMLDVGCFAAPSLCLRSGTALAFTWTLPSLPGTSDWCVHGRRRAAITTCPHAHRLGRYRTVQHTPHCVRHLPCDRSIEIVC

SEQ ID NO: 267427 - protein, 38 aa, Zea mays
  Clone ID: MRT4577_175499C.1.pep
KISQAMFRIANLWFISTVILQNFYIIILKKGSDTTNCS

SEQ ID NO: 267428 - protein, 223 aa, Zea mays
  Clone ID: MRT4577_17549C.1.pep
MEASSRRRVSLVPLLVVIIGCCACRAQIPIPARTDGFVYGGKPPAWGETVVVEAFLDPVCPDSRDAWPALKMVVEHYSSRVSVVVHLFPLPYHSYAFIACRSIHAVNKLNPSFVYPLLEKFFKYQERYYNQPTYEKSRATVVDEITKNLVVPIIGETNLAAFRAGFNDSHSDQATRISFKNGCARGVTGTPYFFVNGIPINDSGSPLEYKDWISILRPLVGKM

SEQ ID NO: 267429 - protein, 102 aa, Zea mays
  Clone ID: MRT4577_1754C.1.pep
VRRSRRPVTNIRNRSRVTLTQDRCAHAQELKRVLLHDPVSCRGGAVYHLTSMENHSGDDAARTRPPDDINKASQADEGMVASATQTRRPYARETICRSNIFS

SEQ ID NO: 267430 - protein, 51 aa, Zea mays
  unsure (1)..(51): unsure at all Xaa locations
  Clone ID: MRT4577_175500C.1.pep
AGLLTQSTYTTARLGSAMVLTNEAXVEXSEGKPLPLCQXAFMSLTAGAIGA

SEQ ID NO: 267431 - protein, 37 aa, Zea mays
  unsure (1)..(37): unsure at all Xaa locations
  Clone ID: MRT4577_175501C.1.pep
GPAAPRYPKXXRAKLXXSVMRXYVSXXSNLLXFYLLP

SEQ ID NO: 267432 - protein, 88 aa, Zea mays
  Clone ID: MRT4577_175502C.1.pep
GDSLKSFFEHAGGPDLESPVFVLDGDSNDPDRYVPQPHFHANNRYPPRGFHLYPPAVHLQYQVGYPFAKGFVCLNAHCVSVALALQLL

SEQ ID NO: 267433 - protein, 47 aa, Zea mays
  Clone ID: MRT4577_175503C.1.pep
NHRGRQTLARPLGIKKGEHAFSYASLLARQPDAGDGSKSPHTDRCYL

SEQ ID NO: 267434 - protein, 157 aa, Zea mays
  Clone ID: MRT4577_175504C.1.pep
MAAGRGLPLLLVLAALLVGLASASSFISDGVFQAGAGSTTGRTLLQAKRDCPVNFEFQNYTVITSRCKGPKYPPKDCCDSFKEFACPFNNYINDESNDCASTMFSYINLYGKYPPGLFAHECREGKLGLSCEGVPQKDVVASGVQRARSSSLALITL

SEQ ID NO: 267435 - protein, 104 aa, Zea mays
  Clone ID: MRT4577_175505C.1.pep
VHGHCLRPGKWRVGCSHARAAGVGTVGFAFSLLVPLVTVTVSLVQRGVLVHPYGRFVSHERRWAGVPQPGVRLGLGRAVSSQDDALHPSPLTCPLQHSLHQVRQ

SEQ ID NO: 267436 - protein, 85 aa, Zea mays
  Clone ID: MRT4577_175506C.1.pep
LDSPSPPSACATRRFRIPPPVPSPPGIPLGVRSVFTRCLLGSYGPGTLRDVRRGRFVGGEDGPLLPIGALRLYLQRGLLFLEGYL

SEQ ID NO: 267437 - protein, 72 aa, Zea mays
  Clone ID: MRT4577_175507C.1.pep
MQCTSAKRQSVQRIVEQNSMKTVIALLTCLALSAASSSAMQMPCPCTGLQGLDGAGARLTTMMGACWLYPYA

SEQ ID NO: 267438 - protein, 117 aa, Zea mays
  Clone ID: MRT4577_175508C.1.pep
MAGYMWRRYPMEIDPQHPICDQLHQSLEPPKNLKSVTDLVIVVFSAVLPACRLSQDHRVTFGTGIRRVPYRGLSIHLFHPVKSKSKMHQSESGSGASNMHALPLASPSIITVSFLPS

SEQ ID NO: 267439 - protein, 57 aa, Zea mays
  Clone ID: MRT4577_175509C.1.pep
FFFFFFSFFFGFFWGVYVLFNTTPLRYFLGKAYWFLFGKGLQTCLEKHPFQIFLKGG

SEQ ID NO: 267440 - protein, 86 aa, Zea mays
  unsure (1)..(86): unsure at all Xaa locations
  Clone ID: MRT4577_17550C.1.pep
LGSRARDDLVELFHARATRRFQRGLKKTPMALIQKLRTATKDAPAGEKPEPVKTHLRNMIIVPEMIGSIVGVYTGXTFNQVEIKPE

SEQ ID NO: 267441 - protein, 57 aa, Zea mays
  Clone ID: MRT4577_175510C.1.pep
FSKQSELEKSSHEDIPRAHIQSMNMSSQNFLDRTTACVCDLPEKLPSFLLYSLTNNI

SEQ ID NO: 267442 - protein, 164 aa, Zea mays
  Clone ID: MRT4577_175511C.1.pep
PPRARARRGIGSRRERERGEGKVAAARVLALLVQRAWGWTAGVIYRRGQSHKVSRWPIWPLAELDRAAEPSDGLPGVLGFRDLLIAGSKPGMTMENYSSGTGMTSVVRKIIYLCSCKYLRETFSFISVPFKEFIPMKILSLLENTIFSDKFKLIILNQYRTNYV

SEQ ID NO: 267443 - protein, 74 aa, Zea mays
  Clone ID: MRT4577_175512C.1.pep
SCPCRRRRPCRRALYTPSGVLPTCPGLKIWLIWLSSHTFMLALRAMFLQERIFRQLFIMVHSPPAYTMITNSQA

SEQ ID NO: 267444 - protein, 161 aa, Zea mays
  unsure (1)..(161): unsure at all Xaa locations
  Clone ID: MRT4577_175513C.1.pep
GXTQXPGGPAGSPRGGRSRARRDTAGQPKRRPSGDGRQRRRPPTAGHRXRGSAPGARGRQPPGARGAXGPGPPGRPXPGAHPARGGXPAGAGPGAGGRPRPRPHRPXRGPARADDREGAAXXERGRPPGQPGAXQRPXPHGGQQAXEAATAPPGPRGGAAP

SEQ ID NO: 267445 - protein, 47 aa, Zea mays
  Clone ID: MRT4577_175514C.1.pep
NIPCRLLILTSKAGSRHSSTPQQLSIDMLILIPTSLSRAQMIINLGR

SEQ ID NO: 267446 - protein, 74 aa, Zea mays
  Clone ID: MRT4577_175515C.1.pep
AARSGTSIEYRELANGRQLSTGSHVTISNATAGASRSSREPPPSDQMAWLAHAFVAWSSYRTSAVVVLLLVIAL

SEQ ID NO: 267447 - protein, 45 aa, Zea mays
  Clone ID: MRT4577_175516C.1.pep
PQGNCPKENKNCPKWAPLGECIKNPKYMVGTPALPGYCWRNSNFF

SEQ ID NO: 267448 - protein, 131 aa, Zea mays
  unsure (1)..(131): unsure at all Xaa locations
  Clone ID: MRT4577_175517C.1.pep
MEVREMAMAAAAAAAASGGGGVKLPPPNPNLPYREDCWSDGETAALVSAWGSRYVELNRGNLRQKQWQEVADAVXPSPSSSSPPQPPMALPLPNYRRGSPLPAAALIQKEAAAAAADSEDSDDAGGGNNDK

SEQ ID NO: 267449 - protein, 81 aa, Zea mays
  Clone ID: MRT4577_175518C.1.pep
HIWISIYNMFRCSLLAHWTPTGECLDMDVPPFNLQFQIHSRHIYQEPCAVCAWLWLYHAMWQPIARYTTAKVSATRCCMTG

SEQ ID NO: 267450 - protein, 173 aa, Zea mays
  Clone ID: MRT4577_175519C.1.pep
PPMALPLPNYRRGSPLPAAALIQKEAAAAAAAASDSEDSDDAAGGNNHKLPRSPSRSVSSLSASNKKRCRDEAGSSADKGFRELARAIEAFAEMYERVESAKQKHVVEMERQRIEFLKQLEVKRMENFVDAHVKLARAKRTKKTTGGAADGAGGMELVATVAALPFVSTSTFL

SEQ ID NO: 267451 - protein, 512 aa, Zea mays
  unsure (1)..(512): unsure at all Xaa locations
  Clone ID: MRT4577_17551C.1.pep
MAPAMGLKRPAAGAGAAAAQTVTLSAPAVRDAVRTAVREAEATAKATAPAARVPATAAVPAEIARDGVLCLEEVDGRRWSYVVDAAGXRGKGQGKGVXVGGAFKAVPLQSPMPPVEEIMSFIRSYVVPEGFPDSVTPSYVPYMTWRALKHFFGGAMGVFTTRTLLNSVGVSQSRAASGAVAINWILKDGAGRVGKMLFARQGKKFDYDLKQLRFSGDLLMELGAGIELATAAFPQLFLPMACIANVVKNVAAVTSTSTRTPIYKAYAKGENIGDVTAKGESVGNIADLLGTGMSILISKSNPSLVTSFAFLSCGYLLSSYHEVRSVVLNTLNRARFTVAVDSFIRTGYVPSLKDGNSQETIFNPPWRHEPVAIGSRFGDAFQEPASFLAIKPLFEDERYIVTYNPTKDKVYALLKDQAKPDDILKAAFHAHVLLHFINASHANLNARKRMNSNRSYQYDPLNMDFVPHIEESCKIVMSSYGVFKKKAREQGWIMSESLLNPGRARLCGAVPQ

SEQ ID NO: 267452 - protein, 126 aa, Zea mays
  unsure (1)..(126): unsure at all Xaa locations
  Clone ID: MRT4577_175520C.1.pep
TPFQAGQDPRPLNSEIPLVPXTNCCSLNQLXVILGXKIGRPFNRPFVVEEEFLRKFQEFPFQLNFKLAMVHAWLMXPAVPLAPKEPSTPRLAMGGXPQGLVVVDATHLYPGLSYITVKDYLDVFLP

SEQ ID NO: 267453 - protein, 85 aa, Zea mays
  Clone ID: MRT4577_175521C.1.pep
EAFAEMYERVESAKQKHVVEMERQRIEFLKQLEVKRMENFVDAHVKLARAKRTKKTTGGAADGAGGMELVATVAALPFVSTSTFL

SEQ ID NO: 267454 - protein, 64 aa, Zea mays
  Clone ID: MRT4577_175522C.1.pep
IRATPKCTTRRTGYVLDLTQTAKQTTFNKGYWLFLNGWCTRPAHPRTYGKPQRNRCGNLKFTGY

SEQ ID NO: 267455 - protein, 343 aa, Zea mays
  Clone ID: MRT4577_175523C.1.pep
MEVREMAMAAAAAAAASGGGGVKLPPPNPNLPYREDCWSDGETAALVSAWGSRYVELNRGNLRQKQWQEVADAVNSRRGASARRRPPRTDIQCKNRVDTLKKKYKAELARNAPSAWSYFPELDRLVGPTLSASASKRPLASLPPQFALPMHPPAVRRPPSPSPSSSSPPQPPMALPLPNYRRGSPLPAAALIQKEAAAAAAAASDSEDSDDAAGGNNHKLPRSPSRSVSSLSASNKKRCRDEAGSSADKGFRELARAIEAFAEMYERVESAKQKHVVEMERQRIEFLKQLEVKRMENFVDAHVKLARAKRTKKTTGGAADGAGGMELVATVAALPFVSTSTFL

SEQ ID NO: 267456 - protein, 62 aa, Zea mays
  Clone ID: MRT4577_175524C.1.pep
EASVTPHWSHTMDITKKPHPPNLLNTRGVIKKGNIAKSGSTSFETNITRRGKHEVHTGYKVI

SEQ ID NO: 267457 - protein, 58 aa, Zea mays
  Clone ID: MRT4577_175525C.1.pep
PQTKLNGTPPLGNGFPPVKPHLKTSNTPHFNLNYRHGHVNYLQQSTPNISQYTLHGTR

SEQ ID NO: 267458 - protein, 61 aa, Zea mays
  Clone ID: MRT4577_175526C.1.pep
GGSPVLGYLAAGVLIGPYGLSIIRNVHGTKAIAEFGVVFLLFNIGLELSVERLSSMKKYVF

SEQ ID NO: 267459 - protein, 97 aa, Zea mays
  Clone ID: MRT4577_175527C.1.pep
RLVYILSGRCGACRGACPGRCGPVRRIIRGPPAGCRQRWNVSIRVVFESSVFLLLAHCVMDTSVAGACWWHWERAQLSMVVMVSVRAGAFYSTVESY

SEQ ID NO: 267460 - protein, 57 aa, Zea mays
  Clone ID: MRT4577_175528C.1.pep
DSKQTSGVEIILCARHANRTVLCTYKTFEYKERDIHTTGSAHCVLNPLTRRHYSTGI

SEQ ID NO: 267461 - protein, 158 aa, Zea mays
  Clone ID: MRT4577_175529C.1.pep
GTTGFALDGLARQHLWKNGLDYRHGTGHGVGSFLNVHEGPIGIGTRVQYAEVALAPGNVLSNEPGYYEDGKYGIRIENMVLVKEVKTKHSFGDKPFLGFEYVTMVPYCRNLIDTTLLTSVEKDWLNTYNEKVIEKTQGYFEGDDVTTAWLKRETVRID

SEQ ID NO: 267462 - protein, 454 aa, Zea mays
  unsure (1)..(454): unsure at all Xaa locations
  Clone ID: MRT4577_17552C.1.pep
MTWRALKHFFGGAMGVFTTRTLLNSVGVSQSRAASGAVAINWILKDGAGRVGKMLFARQGKKFDYDLKQVHILGSMCALLQYFFFFHSNDXEMKISXLRFSGDLLMELGAGIELATAAFPQFFLPMACIANVVKNVAAVTSTSTRTPIYKAYAKGENIGDVTAKGESVGNIADLLGTGMSILISKSNPSLVTSFAFLSCGYLLSSYHEVRSVVLNTLNRARFTVAVDSFIRTGYVPSLKDGNSQETIFNPPWRHEPVAIXCALSNLIYSCMLVQCRTSTHQFCSLTGSRFGDAFQEPASFLAIKPLFEXHLICSILNAFFLWCNQGLFCEVATWFGXDERYIVTYNPTKDKVYALLKDQAKPDDILKAAFHAHVLLHFINASHANLNARKRMNSNRSYQYDPLNMDFVPHIEESCKIVMSSYGVFKKKAREQGWIMSESLLNPGRARMCGAVPQ

SEQ ID NO: 267463 - protein, 112 aa, Zea mays
  unsure (1)..(112): unsure at all Xaa locations
  Clone ID: MRT4577_175530C.1.pep
DACADSWVVPEDCVRYWPTIFLLSNDVVLDPDYXNVLVNIEHLSLDIVQGVLGHFTQRPXEIETGYQGHMFGYATDDTPDLMPFIHVLAIKLGARLTEVSKNGTCPWLKPDG

SEQ ID NO: 267464 - protein, 370 aa, Zea mays
  Clone ID: MRT4577_175531C.1.pep
MSDGKDSLDLSALGAAIPNSAELSAEDKANLVASIKNTLEGLASRHTDVLENLEPKVRKRVEKLREIQGEHDELEAKFFEERAALEAKYQKLYEPLYSKRYEIVNGVVEIEGITKESAAETPEEQKSGDETSAEQKEEKGVPAFWLNAMKNHEILAEEIQERDEEALKYLKDIKWYRISEPKGFKLEFHFGTNMFFKNSVLTKTYHMIDEDEPILEKAIGTEIEWYPGKCLTQKVLKKKPRKGSKNTKPITKTEDCESFFNFFSPPQVPDDDEEIDEDTAEQLQNQMEQDYDIGSTIRDKIIPHAVSWFTGEAAQDEDFEVMDGEDDDDEDDDDEDDEDEDDDDYDTKKTKGTAGGEGQQGERPAECKQQ

SEQ ID NO: 267465 - protein, 149 aa, Zea mays
  unsure (1)..(149): unsure at all Xaa locations
  Clone ID: MRT4577_175532C.1.pep
MSGSRYAEYHFLYRCFVWGLXTSTXHHSFHNYFKTHGYDLIAXIIHHRDTQXSXGFFFTTFSTEDAMQDVIGGVIGKELISRNIAHNQAHPRGGRGGGYGGGSGGGRXGGGYRRGGRRDYGGGYGYGGGYGGYGGCYGGYGGGYRGGDY

SEQ ID NO: 267466 - protein, 85 aa, Zea mays
  Clone ID: MRT4577_175533C.1.pep
EKETLNIDESKGDKPTNSGSNKRKKGKKKRRIKKIIYYDSDASSSLPKDDDDDDTIGRYPSIKGGCRPVIYFIGFYHPISVTDES

SEQ ID NO: 267467 - protein, 107 aa, Zea mays
  unsure (1)..(107): unsure at all Xaa locations
  Clone ID: MRT4577_175534C.1.pep
IGWEEIIGPVPTNFKFNGVEEVIRGADRTPFGLAAGVVHRRLEAAHPLLRGVRGGPVLVDWLEVVDAPIPVGGFQNNGVRPEKGNLGLRQFLPAKAGVXPIKTPAGW

SEQ ID NO: 267468 - protein, 69 aa, Zea mays
  unsure (1)..(69): unsure at all Xaa locations
  Clone ID: MRT4577_175535C.1.pep
YLPSARNRFVKLLSGSHFIDPAGPTIHRHSGNYNKKSRRQHCEWQKSMNRIKKANKEQRKCQLLHTDXG

SEQ ID NO: 267469 - protein, 79 aa, Zea mays
  Clone ID: MRT4577_175536C.1.pep
NCLLQVTIDHPGTADRPKLKTTRQPPPARAGPYWGRLPSFLLRRRHGRGASLVDLGQEGLLAGTDDGLHRHPVLDQVEG

SEQ ID NO: 267470 - protein, 79 aa, Zea mays
  Clone ID: MRT4577_175537C.1.pep
NRQWDWTSYKTCFISSMRLLMTMTNHHAVIHSTDGATGTLLHETAIVHMPCFGLLNDIQHYLHANYFCSDYIIIDTVAH

SEQ ID NO: 267471 - protein, 65 aa, Zea mays
  Clone ID: MRT4577_175538C.1.pep
IFFFFFLFFFVWFLINFWVLKLFLFFLPQKIPKGKRSKPNHYGPRKTFLNKNKIFPTRSRVFKKL

SEQ ID NO: 267472 - protein, 101 aa, Zea mays
  unsure (1)..(101): unsure at all Xaa locations
  Clone ID: MRT4577_175539C.1.pep
MATKRSVGTLCEADLKGKKVFVRAXDLNVPLYDAHKITDDTRIRACVXAIKLLLXKGAQVILGSHLGRXKGVTPKYRLKPLVPRLSELLXVEVVMGNDCIG

SEQ ID NO: 267473 - protein, 55 aa, Zea mays
  Clone ID: MRT4577_17553C.1.pep
HLYPTAPFGSRRLARHIIHAYLLTQFIGGLRDHDRDVNHQNSSLLWNIRLLLIDR

SEQ ID NO: 267474 - protein, 110 aa, Zea mays
  Clone ID: MRT4577_175540C.1.pep
MKCRSDSSGGGDDHRAPAPAATGVGGGSPVGEPSKKQRTEEPVASSSMAGECSSSFLQAPPPLAEQLPQDARVGEQPPPGSEAGGDEQARVPDLGEDLVFEVLMRAEART

SEQ ID NO: 267475 - protein, 257 aa, Zea mays
  unsure (1)..(257): unsure at all Xaa locations
  Clone ID: MRT4577_175541C.1.pep
MATKRSVGTLGEADLKGKKVFVRADLNVPLDDAQKITDDTRIRASIPTIKYLLEKGAKVILASHLGRPKGVTPKFSLKPLVPRLSELLGLEVVMAPDCIGEEVEKLAAALPDGGVLLLENVRFYKEEEKNDPEFAKKLASVADLYVNDAFGTAHRAHASTEGVTKFLMPSVAGFLMQKELDYLVGAVANPKKPFAAIVGGSKVSSKIGVIESLLAKVDILILGGGMIFTFYKAQGLAVGKSLXVEEDKLELATSLIE

SEQ ID NO: 267476 - protein, 64 aa, Zea mays
  Clone ID: MRT4577_175542C.1.pep
MYLQFYINENGDKVYTTKGESPHGLPTQSAHPARFSPDDKYSRQRVLLKKRFGLLPTQQSPLKY

SEQ ID NO: 267477 - protein, 84 aa, Zea mays
  Clone ID: MRT4577_175543C.1.pep
MASIVRPSKLLLALLVAAMAASPRALAYDPSPLQDFCVADTSSNVFVNGQACKDPAQVTAADFAFSGLQDAGDTGNAFGSKVTL

SEQ ID NO: 267478 - protein, 141 aa, Zea mays
  Clone ID: MRT4577_175544C.1.pep
RIRAALHGRRFGTAVPVGQPLLSRRSGEWMNLDFPHPPTRTRHPPPARSPRSSTPPSLCPLRSLLTSRTAPARKACGGCLSIRTTARNLWRQHVDPRRLCVDPGDGGVDLGGEDLGAAAPIRGRVGKQRGDEMRGGGGACW

SEQ ID NO: 267479 - protein, 184 aa, Zea mays
  unsure (1)..(184): unsure at all Xaa locations
  Clone ID: MRT4577_175545C.1.pep
MATKRSVGTLGEADLKGKKVFVRADLNVPLDDAHKITDDTRIRASVPTMKSLLEKGAKVILASHLGRAKGVTPXTGWSRLGPRFXTSLELKYAKXTLAYFSTCYLSVILRXYVCIXVVMANDCIGEEVEKLAAALPEGGVLLLENVRFYKEEEKNEPEFAKKLASVADLYVNDAFXGTENRAHA

SEQ ID NO: 267480 - protein, 402 aa, Zea mays
  Clone ID: MRT4577_175546C.1.pep
MATKRSVGTLGEADLKGKKVFVRADLNVPLDDAQKITDDTRIRASVPTIKFLLEKGAKVILASHLGRPKGVTPKYSLKPLVPRLSELLGVEVVMANDCIGEEVEKLAAALPEGGVLLLENVRFYKEEEKNEPEFAKKLASVADLYVNDAFGTAHRAHASTEGVTKYLKPAVAGFLMQKELDYLVGAVANPKKPFAAIVGGSKVSTKIGVIESLLAKVDILILGGGMIYTFYKAQGYSVGKSLVEEDKLELATSLIEKAKAKGVSLLLPTDIVVADKFAADAESKIVPATAIPDDWMGLDVGPDATKTFDEALDTTKTVIWNGPMGVFEFQKFAAGTEAIAKKLAELTTTKGVTTIIGGGDSVAAVEKAGLADKMSHISTGGGASLELLEGKTLPGVLALDDA

SEQ ID NO: 267481 - protein, 402 aa, Zea mays
  Clone ID: MRT4577_175547C.1.pep
MATKRSVGTLGEADLKGKKVFVRADLNVPLDDAQKITDDTRIRASVPTIKFLLEKGAKVILASHLGRPKGVTPKYSLKPLVPRLSELLGVEVVMANDCIGEEVEKLAAALPEGGVLLLENVRFYKEEEKNEPEFAKKLASVADLYVNDAFGTAHRAHASTEGVTKYLKPAVAGFLMQKELDYLVGAVANPKKPFAAIVGGSKVSSKIGVIESLLAKVDILILGGGMIYTFYKAQGYSVGKSLVEEDKLELATSLIEKAKAKGVSLLLPTDIVVADKFAADAESKIVPATAIPDDWMGLDVGPDATKTFNEALDTTKTVIWNGPMGVFEFEKFAAGTEAIAKKLAELTTTKGVTTIIGGGDSVAAVEKAGLADKMSHISTGGGASLELLEGKTLPGVLALDDA

SEQ ID NO: 267482 - protein, 402 aa, Zea mays
  unsure (1)..(402): unsure at all Xaa locations
  Clone ID: MRT4577_175548C.1.pep
MATKRSVGTLGEADLKGKKVFVRADLNVPLDDAQKITDDTRIRASVPTIKFLLEKGAKVILASHLGRPKGVTPKYSLKPLVPRLSELLGVEVVMANDCIGEEVEKLAAALPEGGVLLLENVRFYKEEEKNEPEFAKKLASVADLYVNDAFGTAHRAHASTEGVTKYLKPAVAGFLMQKELDYLVGAVANPKKPFAAIVGGSKVSTKIGVIESLLXKVDILILGGGMIYTFYKAQGYSVGKSLVEEDKLELATSLIEKAKAKGVSLLLPTDIVVADKFAADAESKIVPATAIPDDWMGLDVGPDATKTFDEALDTTKTVIWNGPMGVFEFQKFAAGTEAIAKKLAELTTTKGVTTIIGGGDSVAAVEKAGLADKMSHISTGGGASLELLEGKTLPGVLALDDA

SEQ ID NO: 267483 - protein, 148 aa, Zea mays
  unsure (1)..(148): unsure at all Xaa locations
  Clone ID: MRT4577_175549C.1.pep
MIQPFHRLTHXVAYSVSVXFERQLGCTWENMEFGPALPEYRNGGLYVDLGVLKLKNGDLQVGKENSGQELPQLDASSDVSVEWRAMTAALLDELHQMLQDKSKPRGVNLSLLQMLEAGTWKSGRELAAELRPATKCSPILVISDGTLY

SEQ ID NO: 267484 - protein, 74 aa, Zea mays
  unsure (1)..(74): unsure at all Xaa locations
  Clone ID: MRT4577_17554C.1.pep
SLLLSYIQAYPNDHIIYLHTLTSTSHQILPLPFLHLLLVTPLPHITXTIIKLFYNYPLKLFNTNPVTGIYTNLK

SEQ ID NO: 267485 - protein, 402 aa, Zea mays; identical to SEQ ID NO: 267481
  Clone ID: MRT4577_175550C.1.pep

SEQ ID NO: 267486 - protein, 62 aa, Zea mays
  Clone ID: MRT4577_175551C.1.pep
RFSVEKRFGKPTGHTRPAIRQVRRAPRGQCLTTWYHSRRLPSLSGRPGQFMHHRAIPSNTDI

SEQ ID NO: 267487 - protein, 82 aa, Zea mays
  unsure (1)..(82): unsure at all Xaa locations
  Clone ID: MRT4577_175552C.1.pep
TKPIAPPHSGKSENRYTRCTDNMLFLVAKGTEFEPSEAAGYRPSLALPVREDLRCDWDAGGRAEEHSSSSXTWVXLXPPHHX

SEQ ID NO: 267488 - protein, 65 aa, Zea mays
  Clone ID: MRT4577_175553C.1.pep
PRVRPRVRVLEVEGGSRRHAVHKDESLSEIRTQLLQIKNQQSSLMEQMSMSPLMLSYRSSSSLIH

SEQ ID NO: 267489 - protein, 96 aa, Zea mays
  Clone ID: MRT4577_175554C.1.pep
TPLSCVIISILNYALLWVLKIWLQAYNLTDIYHMMMIICIFMVTPLLFEHVVVYCVVAKEYVNYQSVEIERDSPARSSSGLGSGSSSSSGTVQWSK

SEQ ID NO: 267490 - protein, 140 aa, Zea mays
  Clone ID: MRT4577_175555C.1.pep
HSGGRDCPGDFLISRWAMMSCCGGGGGSDGIHGCCQRRSCSEVGGSAAPAHGDGAPACVDMVDPRAAYREKVLIEAEKQFQDDFNFLKEKLLVIFGQLVDVQRMDIICQVMGDKFKGCVLWLQGHGALEAGRPSVKIMGE

SEQ ID NO: 267491 - protein, 39 aa, Zea mays
  Clone ID: MRT4577_175556C.1.pep
PRSSHDGWVLTHANETATYYVISTCNSPSNYKVNDISVP

SEQ ID NO: 267492 - protein, 64 aa, Zea mays
  Clone ID: MRT4577_175557C.1.pep
CDPRPLGQSASSVLSSGASRVLLKIRPLDTHSIRLSTILLQGSTSVNSIIHSNKLAPNGSARKL

SEQ ID NO: 267493 - protein, 78 aa, Zea mays
  Clone ID: MRT4577_175558C.1.pep
PCRRSSNQNEHKLRVGVRGRETVNSEGDNSDRIASLLLGKEQGWCRHNFPPLGILQLGVTLRIWRSIIWKTNDVSFHL

SEQ ID NO: 267494 - protein, 63 aa, Zea mays
  Clone ID: MRT4577_175559C.1.pep
IITSLHLGRFGITTSQICMMGDWLVIDILFGQNGGCKTLLVLQGSYQFLNSNSDKGTTDLTSA

SEQ ID NO: 267495 - protein, 156 aa, Zea mays
  unsure (1)..(156): unsure at all Xaa locations
  Clone ID: MRT4577_17555C.1.pep
MNPLPVGSNVVVTAQMQLLQQMSNTMIEMKAQLRQIQQHPPPPPPRDKHREFMSHKPPTFCSSQDPLQADDWLKSXKKRLNIAQCTDREXVLYASGRLTGPTADWWDAYCKAHAAADAISXTKISTIFRNYHILAGLMNIKKEVLSLHRXGMSVSE

SEQ ID NO: 267496 - protein, 46 aa, Zea mays
  Clone ID: MRT4577_175560C.1.pep
TLTPGKPGPAHHLHHNKASLHAGWSHATRFLAGTESRRALGDAKRT

SEQ ID NO: 267497 - protein, 60 aa, Zea mays
  Clone ID: MRT4577_175561C.1.pep
ETYWLYRCSRCWYHAPVAISVASYGCACASSVRPTVNCWAPPASRCCSAKSSWRHHAICR

SEQ ID NO: 267498 - protein, 103 aa, Zea mays
  Clone ID: MRT4577_175562C.1.pep
APATRGTGVDINPPGMGALLPAVVHPVRMPAVLERLVCQRPRGCETTREEGSRGRRQPGAAAACSTGLEERSLLLSTDDSCELQLELGPQRLGAEAAAARCGT

SEQ ID NO: 267499 - protein, 74 aa, Zea mays
  unsure (1)..(74): unsure at all Xaa locations
  Clone ID: MRT4577_175563C.1.pep
MAARIFSILMLLALSACVANATIFPXYSQASIAALLPPYLPSMTAXYCETPAFXPFQIQQAIATSNLPLLQLVF

SEQ ID NO: 267500 - protein, 53 aa, Zea mays
  Clone ID: MRT4577_175564C.1.pep
EPKTSPTRPCFFLWNKPDKPIPYYNINQGGGGGEPLPQNTPQGALVPHTQVIA

SEQ ID NO: 267501 - protein, 153 aa, Zea mays
  unsure (1)..(153): unsure at all Xaa locations
  Clone ID: MRT4577_175565C.1.pep
LTTRRPEGIRNIRGIYILGDLAXQTKTAHIKDSVVLGCMTVLGSNLSRMGGXLLDGGMRRHSGAGATWHFISCTFGDPNKSNRGKXGAEAIMYQCLVDPPAVVSSESXLRDTLDWXTGKRAIRAAMIGTNKQTYVFLLTTIRFHGWLGLCTTV

SEQ ID NO: 267502 - protein, 94 aa, Zea mays
  Clone ID: MRT4577_175566C.1.pep
PTALIAADPYLRVVSFPSNDTDVETGDEHKAAFSVARVPSPRRSGPSRPTNGSHLSPTPTRPPAPRQPSHTLPTTWSAALQGHSRLSIPGSGRE

SEQ ID NO: 267503 - protein, 134 aa, Zea mays
  unsure (1)..(134): unsure at all Xaa locations
  Clone ID: MRT4577_175567C.1.pep
MSAKVHRRMLNFMMEKSADSENALTEAINMSPHDCNMXQDKVLTITVXNDXSSHDIYGAELTNHXMSHKNKLMLNGQIFGRRSYAHMLNDAALNVIAAIHGVDYRICVGIELIKALSAGEEKLDDIAVDLMSPR

SEQ ID NO: 267504 - protein, 77 aa, Zea mays
  Clone ID: MRT4577_175568C.1.pep
IPPPRAQPRGGGARIPPPKGGASPKKGDPNFYLVKPAPPLFIGGINKNLSNPNGGGGVISLPKGDGGGLSFRPEKRG

SEQ ID NO: 267505 - protein, 58 aa, Zea mays
  Clone ID: MRT4577_175569C.1.pep
FFFFFFFFFFFFFFFFFFFFFFWRKIHWTEQALKGHVPRSKPLNINLFFHDHCYMQVY

SEQ ID NO: 267506 - protein, 75 aa, Zea mays
  Clone ID: MRT4577_17556C.1.pep
IKKKKKKKYKKKKKKKKNKLKKKKKKRREKKKKKKKKNGLYLGAATKGGVIWGNFHQTGGGSSLYGGGPILLIGG

SEQ ID NO: 267507 - protein, 131 aa, Zea mays
  Clone ID: MRT4577_175570C.1.pep
PSGQRAAVWRCLYGSSLRTDAVGLDSTGHYPSRKGPSEIGSMPFPPGVGERSNGEIGNNENYGVITADSAIDESNVGNRIIRNMGAQERLGLGSDSSGMMAPVQANSEAVRAGLPRLHRKAAPKSPSSSSP

SEQ ID NO: 267508 - protein, 139 aa, Zea mays
  unsure (1)..(139): unsure at all Xaa locations
  Clone ID: MRT4577_175571C.1.pep
TVLHSRVTSLLSLRTREFMTNRLLFRWQFELEGIHPVRANVSKVQWKVRFDKGYXVKDPNXIFDFKCRTHFAMRKCHXYGLIYHKLLGCQXFKSKYRLIRNALATXKVEKARKQMKERKKMVIKIRDVKKTKADDAKNK

SEQ ID NO: 267509 - protein, 330 aa, Zea mays
  unsure (1)..(330): unsure at all Xaa locations
  Clone ID: MRT4577_175572C.1.pep
GLAAXAVGLVTPGAPAHDAVMEYLLPAAVPLLLLGADLRRVVRTTGDLLKAFLLGSVATVIGTTVAYLLIPMRSLGQDSWKIAAALMGSYIGGAVNYVAISEALGLTPPVLAAGVAADNLISALYFMALFSLASNIPAEPKTATASPQKDGERLSVLNGGAAVALSFIICKAGSAMAARLGLQGGTLPCVTALAVFLATAFPAPLSRLAPAGETLALILMQLFFAVVGANGNVVDAVTRAPSVFAFALVQVSVHMAVVLAAGRVIGIDRKPLLIASNANIGGPTTAAAMATAKGWTSLVVPGILVGIFGISIATFLGIGYGMFVLRRIRG

SEQ ID NO: 267510 - protein, 78 aa, Zea mays
  Clone ID: MRT4577_175573C.1.pep
MAKKLLLVGGGHSNALVLKHWCRHPLADVELTLVSDVRQTPYSGMLPGYLAGFYSYGESHIDLAPLCASAGAIFVQDK

SEQ ID NO: 267511 - protein, 90 aa, Zea mays
  Clone ID: MRT4577_175575C.1.pep
INIPSVSHLIGERTLRDAHVSQSSLPGEQCALDTHEAVYVRNIRNAVVMRERGAVMISCICLSLPDTCPRGSINTVYVDPQQGESVSAKV

SEQ ID NO: 267512 - protein, 149 aa, Zea mays
  unsure (1)..(149): unsure at all Xaa locations
  Clone ID: MRT4577_175576C.1.pep
MNGAQLIEEPGAVRTEGNVSMLTKNNVVHYTTTTDDKRLHSTLLRIRVNAIPVIKEVDIYTDDDDIQDVNPKEPASXLEANTWEDRATPHTNKLQDLLPSIINHLRPDDLDNLRQXLAEQFHKQDPDAYGADADANADAAQDDDDDDPE

SEQ ID NO: 267513 - protein, 74 aa, Zea mays
  Clone ID: MRT4577_175577C.1.pep
GRCVHIITRMLSSFFASMEKSSLTAVSPAADFSLTSGSNVHFDCAMLTRNLRLVLEPRNHIKFHVIHGKADRIK

SEQ ID NO: 267514 - protein, 44 aa, Zea mays
  Clone ID: MRT4577_175578C.1.pep
GRLAVQVGIPGVRSCRYSAEVIRCAYQALRRAHGPTRQKWSLSF

SEQ ID NO: 267515 - protein, 99 aa, Zea mays
  Clone ID: MRT4577_175579C.1.pep
PWSSPPPSKGRQRSPSRHDPFLNKGMDGVNSWRLKQSFRAMDKKLEGAWAKGSTTGILNLVHYKKRYLAIKNFKNQILAGSGFFLSQGKENAKKKYCGL

SEQ ID NO: 267516 - protein, 102 aa, Zea mays
  Clone ID: MRT4577_175580C.1.pep
PRVRSSRYCPALGTRWGRRLTPSSTLSANQCLGRGWPRWATLVVHRCTANLGGSSWGSIWVSWLANFSPEHLGDGPCASNFSPSTCSPPRDYSVPWAGLLGA

SEQ ID NO: 267517 - protein, 63 aa, Zea mays
  Clone ID: MRT4577_175581C.1.pep
AGTDEPRPSVAGPSASAGRASIGMWLTVTRACVEQISHCIRDDLSHFFSARITLTKLCLSPPD

SEQ ID NO: 267518 - protein, 38 aa, Zea mays
  Clone ID: MRT4577_175582C.1.pep
SYCWCCHLSIQRQGLLGLGTARKPSITGLFLQKYYTNF

SEQ ID NO: 267519 - protein, 83 aa, Zea mays
  unsure (1)..(83): unsure at all Xaa locations
  Clone ID: MRT4577_175583C.1.pep
PGFYSQKNSHLAAEREEERCELVRWIGWGSGTLRRGRGRWRRRARKRSGRRRRGTGIPRSRFKVKGWGXYLLTVVSVAGLECF

SEQ ID NO: 267520 - protein, 172 aa, Zea mays
  Clone ID: MRT4577_175584C.1.pep
DACRFRSGIPGSTHASEAARAMSSTAVVPSAPGPGPGPSGGPGGGTEVIQVTNVSPSASSEQMRTLFGFLGKIDELRLFPPDDSPLPVSSRVCFVKFHDPDSAVVAQHLTNTVFVDRALIVVPYAEGVIPDETKALSLLAPANAVAGLLPGGGLLPTPNPLTQIGAVPLAAL

SEQ ID NO: 267521 - protein, 196 aa, Zea mays
  Clone ID: MRT4577_175585C.1.pep
MADHADDLHAEQTEGFKVGEKKTIDEYQKLDQNDESLQKWKASLGLGQGKDISDPNDPRKCIILSLGLEVEGRDDIIIDLRAPGALEELEKKPFTIKEGASFRMKAQFKVQHEILAGLKYLQKVNRMGVSAKLQEMMGSYGPNTEEKPFYEKKFEPETAPSGMLGRGHYTALSKFVDDDNQVHLQFKWSFDIKKDW

SEQ ID NO: 267522 - protein, 193 aa, Zea mays
  unsure (1)..(193): unsure at all Xaa locations
  Clone ID: MRT4577_175586C.1.pep
PSTLYPPAAPRAPPSRAASGSGEDEAQKAVERLDGRLVDGREIMVQFAKYGPNAERINKGRIVEPVPRPGGRSRSHSPRRRYRDDYRDDHDRDYRRRSRSRSRDRYTRDRYRDRDYRHRSPSRSYSPDDYKKRGRDSLSPERKSPRRSRSPDDYKRRGRNSASPASKSPSRSPPRKMSPXSPERSPVRRNNDR

SEQ ID NO: 267523 - protein, 251 aa, Zea mays
  unsure (1)..(251): unsure at all Xaa locations
  Clone ID: MRT4577_175587C.1.pep
MSRFGRSGPPPPIRDTYSLLVLNITFRTTADDLFPLFDKYGEIVDIYIPRDRRTGDSRGFAFVRYKYEDEAQKAVERLDGEFSLXRLVDGREIMVQFAKYGPNAERINKGRIVEPVPRPGGRSRSHSPRRRYRDDYRDDHDRDYRRRSRSRSRDRYTRDRYRDRDYRHRSPSRSYSPDDYKKRGRDSLSPERRSPRRSRSPDDYKRRGRDSASPASKSPSRSPPRKMSPSPERSPVRRNNDRSPRSRSPST

SEQ ID NO: 267524 - protein, 105 aa, Zea mays
  Clone ID: MRT4577_175588C.1.pep
MATDAILETIKPRGSEEQLPVTTAGTGIELRRRISSFSAHVRPSSSVAAFRRARSMPSVKALAAAGALRRWWEWGLEWVTAPFATRALELGGGDDHQARLLSLSG

SEQ ID NO: 267525 - protein, 98 aa, Zea mays
  Clone ID: MRT4577_175589C.1.pep
WHLPDGTLSLSTDTAAKPGMCIVKHEVKEEPLSEEVGCHLKLGLRKKSNGQWEISKRVDADLVPSSGNDHDHSGHDENKNCITHQAILMIQTLQMKVI

SEQ ID NO: 267526 - protein, 108 aa, Zea mays
  unsure (1)..(108): unsure at all Xaa locations
  Clone ID: MRT4577_17558C.1.pep
LLVTTTKSIGYAVTLKMRIMGNTNRPXPIYMHHLVKATQGNENNIAVIAYTTTYHNWIQTVTPMNVTDMLIMDTSMARIVNAICXCLTFDQLALRASLGQNTGLLRCP

SEQ ID NO: 267527 - protein, 100 aa, Zea mays
  Clone ID: MRT4577_175590C.1.pep
VNKRFLVSLVFLSKHSLLPSSPLRAYSVIPNTHRLDWMRLEKIKKKFDLFGIQTHLIPLNPPLTEQGLRGVRSSSLFHSGSCNLLPLRHSSSSPARHHEH

SEQ ID NO: 267528 - protein, 36 aa, Zea mays
  Clone ID: MRT4577_175591C.1.pep
GRPFRLPPASSFSIHTETDWILIEFWIQPELNQTAL

SEQ ID NO: 267529 - protein, 143 aa, Zea mays
  Clone ID: MRT4577_175592C.1.pep
IHHHPWPWRPPRPATSATRPASASSSRCPPRPPTRGSTPGRTRASAADSARRPPRSTSVRSRPRRPTPTMRTPSVPAAPPAAPPCPSSSAASAAPATSARTRVPPPHRTRRGGRSRTSFAPTMACFPTRAAGSTPTTRSGRSG

SEQ ID NO: 267530 - protein, 81 aa, Zea mays
  Clone ID: MRT4577_175593C.1.pep
KSRRCTSHVRAHSDIESEQQKLVEELRSTDGRDFYSSICPSVYVSRYRSKLRRYRRNSIPANSHYVRAPVEVAPHLEMARA

SEQ ID NO: 267531 - protein, 154 aa, Zea mays
  unsure (1)..(154): unsure at all Xaa locations
  Clone ID: MRT4577_175594C.1.pep
RLTGSCGTPLDHGVTFVFYRTENGKGGWIVKNSWCSXSWGETCYLRMARNTEVSSRXCGIPVDPSXPVKEGANPSNPVPSPPSPTPAPGVCDNYYLCPDRTTWCCVYEYRTHCFAWGCCPLDGSTCRDEHYRCSLHDYRICNFRQGTXLMGKDS

SEQ ID NO: 267532 - protein, 146 aa, Zea mays
  Clone ID: MRT4577_175595C.1.pep
SPPLLLSHTCAQPLEPLSRTRTRKSTKPPSPATRDTDAGRAPPGSRPGALHRPRRSSMRPGAPRPAPSAYPRDEPRSAEALPDQATTAPRPAPSAHPEQTASPMPTAPWPSSTKPPAARHFVLTALRIFSASVSSSPIIFFGNRRH

SEQ ID NO: 267533 - protein, 81 aa, Zea mays
  Clone ID: MRT4577_175596C.1.pep
PSLFYYTGLQGPRRIYAHPGLRHLSTYQGYGADRSYTSLDVATTTVIMDHMFPVTPLYREIKHTVCLSVMIMTLPQHFCYE

SEQ ID NO: 267534 - protein, 92 aa, Zea mays
  Clone ID: MRT4577_175597C.1.pep
PPRTTTMPPGCWAGTQKITVRVRGSTTGILKLIAACPPCLYPSEPPNSNSIILWIFPKIVCKTVVKTWVISYKTQLDCLLKVKGGFNLTGFW

SEQ ID NO: 267535 - protein, 81 aa, Zea mays
  Clone ID: MRT4577_175598C.1.pep
ARNSARGLGHQDVVRGGGPQGSNRCSHGMHLRMPTTKAVTAAAPRSRIAHGSSPGNARRRPGTRQTVASVGRWITLYLHLQ

SEQ ID NO: 267536 - protein, 119 aa, Zea mays
  unsure (1)..(119): unsure at all Xaa locations
  Clone ID: MRT4577_175599C.1.pep
MEGPRMDIADNTASQTLAEVEVGNLMRKTSTSKGINPXHEXSFNMVLHGETGIAKGGGYESNSSNGKTNNMTRCEIKVNDVHDVSTLFWLIAHNIWSMMQSILMHRGQNKGMGCYIERI

SEQ ID NO: 267537 - protein, 128 aa, Zea mays
  unsure (1)..(128): unsure at all Xaa locations
  Clone ID: MRT4577_17559C.1.pep
KKPRDHMIPLKSIIIDGNCRVEDRGLKTHHGQMIYLLCIYNKKEKENQITMGGYDIEDALAWKRKIELLIDQQQDTTTAKNHKAFASLDFDIDLGGPFSFSDHDSGPEEEEEXPPTLLRRTTIGNGPP

SEQ ID NO: 267538 - protein, 119 aa, Zea mays
  Clone ID: MRT4577_1755C.1.pep
GGPGPAPLGPPRLGFGPPDEGPVNTVRGGDGKRPPPPFLNRTTRRQWSPGAPPTRWRRWTPPPALFFPPQRPFLSCSPSPFESFLCRNRLCFSQPPGLVFSFTPPPPISFPFFSHKFSP

SEQ ID NO: 267539 - protein, 277 aa, Zea mays
  unsure (1)..(277): unsure at all Xaa locations
  Clone ID: MRT4577_175600C.1.pep
LIAGLITGRPNAQAVTVDGRKVDAAEAFKAAGIEGGFFKLNPKEGLAIVNGTSVGSALAAMVCFDANVLAVLSEVLSAVFCEVMNGKPEYTDHLTHKLKHHPGSIEAAAIMEHILDGSSFMKHAKEVNAMDPLLKPKQDRYALRTSPQWLGPQIEVIRAATKSIEREVNSVNDNXXVIDVHRGKALHGGNFQGTPIGVSMDNARLAVANIGKLMFAQFSEXQGLPYRRNPSLDYGFRGTEIAMASYCSELQYLXNPITNHVQSAEQHNQDVNSLXLV

SEQ ID NO: 267540 - protein, 82 aa, Zea mays
  Clone ID: MRT4577_175601C.1.pep
KSHASLKKAYNVMCLYPWPFMNTESTPTLFIYDIITPSHARHPHTYIYVCKYICIAHVQSHGLTPKATRAANYFMDWHWLNP

SEQ ID NO: 267541 - protein, 92 aa, Zea mays
  unsure (1)..(92): unsure at all Xaa locations
  Clone ID: MRT4577_175602C.1.pep
RAILQFFHSIPLPTRGGGGGAHAPTRHIQMMLRVSPSPAAAVPTQLSGAPATPAPVFFLAAXXXFFWFVWGXXCXAXXXGMEVLGGVLFXPF

SEQ ID NO: 267542 - protein, 584 aa, Zea mays
  unsure (1)..(584): unsure at all Xaa locations
  Clone ID: MRT4577_175603C.1.pep
MSFRHLNAGIFGTGSDGHTLPSEVTRAAMLVRINTLLQGYSGIRFEILEAITKLLNTGVSPCLPLRGTITASGDLVPLSYIAGLITGRPNAQAVTVDGRKVDAAEAFKIAGIEGGFFKLNPKEGLAIVNGTSVGSALAATVMYDANVLAVLSEVLSAVFCEVMNGKPEYTDHLTHKLKHHPGSIEAAAIMEHILDGSSFMKQAKKLNELDPLLKPKQDRYALRTSPQWLGPQIEVIRAATKSIEREVNSVNDNPVIDVHRGKALHGGNFQGTPIGVSMDNARLAIANIGKLMFAQFSELVNEFYNNGLTSNLAGSRNPSLDYGFKGTEIAMASYCSELQYLANPITNHVQSAEQHNQDVNSLGLVSARKTAEAVDILKLMSSTYMVALCQAVDLRHLEENLKSAVKSCVMAVARKVLTTSLGGDLHSARFSEKALLTAIDREAVYGYYDDPCSANSPLMKKIRAVLVDHALASGEXEGRQRVRVLQDQQVRGGAARGAAQGDGGRPRGLXTGAAPIANRIKESRSYPLYRFIRQDLGAVYLTGEKLKSPGEECNKVFLALSEGKLIDPMLDCLKEWDGKPLPIC

SEQ ID NO: 267543 - protein, 136 aa, Zea mays
  unsure (1)..(136): unsure at all Xaa locations
  Clone ID: MRT4577_175604C.1.pep
DPCSANSPXMKKIRXVLVDHALASGEXEKDASASVFSKINRFEEELREALPREMEAARVAFETGAAPIANRIKESRSYPLYRFIRQDLGAVYLTGEKLKSPGEECNKVFLALSEGKLIDPMLDCLKEWDGKPLPIC

SEQ ID NO: 267544 - protein, 617 aa, Zea mays
  unsure (1)..(617): unsure at all Xaa locations
  Clone ID: MRT4577_175605C.1.pep
LLSDYNLSVQYRNLSPSIGAVGLTGPCALAPFLCRHLNAGIFGTGSDGHTLPSEVTRAAMLVRINTLLQGYSGIRFEILEAITKLLNTGVSPCLPLRGTITASGDLVPLSYIAGLITGRPNAQAVTVDGRKVDAAEAFKIAGIEGGFFKLNPKEGLAIVNGTSVGSALAATVMYDANVLAVLSEVLSAVFCEVMNGKPEYTDHLTHKLKHHPGSIEAAAIMEHILDGSSFMKQAKKVNELDPLLKPKQDRYALRTSPQWLGPQIEVIRAATKSIEREVNSVNDNPVIDVHRGKALHGGNFQGTPIGVSMDNARLAIANIGKLMFAQFSELVNEFYNNGLTSNLAGSRNPSLDYGFKGTEIAMASYCSELQYLGNPITNHVQSAEQHNQDVNSLGLVSARKTAEAIDILKLMSSTYIVALCQAVDLRHLEENIKASVKNTVTQVAKKVLTMNPSGELSSARFSEKELISAIDREAVFTYAEDAASGSLPLMQKLRAVLVDHALSSGXRGAGALRVLQDHQVRGGAPRGAAPGGGGRPRGXVAEGTAPVANRIADSRSFPLYRFVREELGCVFLTGERLKSPGEECNKVFVGISQGKLVDPMLECLKEWDGKPLPINIK

SEQ ID NO: 267545 - protein, 61 aa, Zea mays
  Clone ID: MRT4577_175606C.1.pep
RLHLLFIDTDRDPRTFDPDFQSLISQGPFWLPPNTDTTRLTSTFDLRRGGPQFLPYRTFLF

SEQ ID NO: 267546 - protein, 102 aa, Zea mays
  Clone ID: MRT4577_175607C.1.pep
FYSRFLSLVPLSHCQPGRQQLYAYDVFHCDDCPSRAASSSSVTTSAFSSLTVSLCAPSICRRRPHPASLQSSPLLSLGARSLNNQHSLSLPITTAFPFSAVS

SEQ ID NO: 267547 - protein, 703 aa, Zea mays
  unsure (1)..(703): unsure at all Xaa locations
  Clone ID: MRT4577_175608C.1.pep
MASNTAILESDPLNWGKAAAELTGSHLDEVKRMVAQFRDPVVKIEGSSLRVGQVAAVAAAKDASGVAVELDEEARPRVKASSEWILDCIAHGGDIYGVTTGFGGTSHRRTKDGAALQVELLRHLNAGIFGNGSDGHTLPSEVSRAAMLVRINTLLQGYSGIRFEILEAITKLINTGVSPCLPLRGTITASGDLVPLSYIAGLITGRPNAQAVTVDGRKVDAAEAFKAAGIEGGFFKLNPKEGLAIVNGTSVGSALAAMVCFDANVLAVLSEVLSAVFCEVMNGKPEYTDHLTHKLKHHPGSIEAAAIMEHILDGSSFMKHAKEVNAMDPLLKPKQDRYALRTSPQWLGPQIEVIRAATKSIEREVNSVNDNPVIDVHRGKALHGGNFQGTPIGVSMDNARLAVANIGKLMFAQFSELVNEFYNNGLTSNLAGSRNPSLDYGFKGTEIAMASYCSELQYLANPITNHVQSAEQHNQDVNSLGLVSARKTAEAVDILKLMSSTYMVALCQAVDLRHLEENLKSAVKSCVMAVARKVLTTSLGGDLHSARFSEKALLTAIDREAVYGYYDDPCSANSPLMKKIRAVLVDHALASGEXEGRQRVRVLQDQQVRGGAARGAAQGDGGRPRGLXTGAAPIANRIKESRSYPLYRFIRQDLXGAVYLTGEKLKSPGEECNKVFLALSEGKLIDPMLDCLKEWDGKPLPIC

SEQ ID NO: 267548 - protein, 140 aa, Zea mays
  Clone ID: MRT4577_175609C.1.pep
PSFFFFLFFFFFFFFFFFFFFYLSFFSLPRPGGPPKRGKSKTRPGGTTGSEPGTKQGVTGGKGDPRAKSQTPQTATKKTKPRGNKKSPGRPIKELTQINGFEPKNPFPQGKPGIPPPSKKGPTPGGRRFAYWATYPFPSN

SEQ ID NO: 267549 - protein, 55 aa, Zea mays
  Clone ID: MRT4577_17560C.1.pep
LSARIHNTEGVLHPKELPSVRHVPSLHAYNILALLVSHLLLVSLIYYAGTYDALD

SEQ ID NO: 267550 - protein, 129 aa, Zea mays
  Clone ID: MRT4577_175610C.1.pep
MISEDSSYFNKSFEEDSPVLFIDKDKIDEVDSVDSQEKIASLHTTFDIVCDISHPTKNSLITKQELFHNILANNLEIEEIGEIEEQLNILEDLAPDLISKKMINGGEILYSIQPISDQNSVRVRLVEPV

SEQ ID NO: 267551 - protein, 75 aa, Zea mays
  Clone ID: MRT4577_175611C.1.pep
ATRWATYKSPISREACRSKASHERPPQNKPRAMTLSDKKAIRCRVIRKRSQYSHKLVYSSESEYCRVVIHQLLNY

SEQ ID NO: 267552 - protein, 108 aa, Zea mays
  unsure (1)..(108): unsure at all Xaa locations
  Clone ID: MRT4577_175612C.1.pep
SFSCPRPFSRSCCSWGPLYACPFRLHRLRPKHDAFTPGVAPCIRWCLMMCCNSFGGVGRCGIRVSGSALSARSKTLRCSTPGHVASXGSRLRATTCCVRSFWFRIYRG

SEQ ID NO: 267553 - protein, 143 aa, Zea mays
  unsure (1)..(143): unsure at all Xaa locations
  Clone ID: MRT4577_175613C.1.pep
ELRAEVDSFSFPILKYKATARFLSLPDSPSLPSLPLHLASRGSGGAGHSQPSLQWWQVLACRDETHGHSGRGGGDPAAVLFPLLLYGVAFVLGHCHVAAARRSWRQAGEEPVVAGLLERRSWPAARRDQARSQCEHRQRXERR

SEQ ID NO: 267554 - protein, 76 aa, Zea mays
  Clone ID: MRT4577_175614C.1.pep
WACLERQAVPSDGEEGVGGDGADVRSRDLDVDKPIRSRPKIPKMAGVSTALADLGRLPQVGRRVVEETMYVCVRLR

SEQ ID NO: 267555 - protein, 78 aa, Zea mays
  unsure (1)..(78): unsure at all Xaa locations
  Clone ID: MRT4577_175615C.1.pep
AYFIDAQRTATNDAGRISXLEVLSIINEPTAASSAYGFEKKNNETILVLDLXGATSDVSXLEVGDXFFEGLYTSGDTH

SEQ ID NO: 267556 - protein, 64 aa, Zea mays
  Clone ID: MRT4577_175616C.1.pep
FYSDECNLANGIQLFFNVFPGKSIVMLFERAKLSKSPNSLKTKRIIAISAASGSYMALSTIVFL

SEQ ID NO: 267557 - protein, 531 aa, Zea mays
  unsure (1)..(531): unsure at all Xaa locations
  Clone ID: MRT4577_175617C.1.pep
MAVSAARMAVATAVSLAVHWLLRSFLQAQHPALGLLFPTAVFIGIAASGNVAGAANDAPPGPPAVPVFGNWLQVGNDLNHRFLARLSARYGPVFRLRLGVRNLVVVSDPRLATEVLHTQGVEFGSRPRNVVFDIFTANGADMVFTEYGDHWRRMRRVMTLPFFTARVVQQYRGMWEAEMDAAVSDVASAAQRAAGLVVRRRLQLMLYNIMYGMMFDARFXSVDDPMFGEATRFNSERSRLAQSFDYNYGDFIPVLRPFLRGYLARCKDLQARRLAFFNSNYVEKRRKVMDAPGDKGKLRCAIDHVLQAEKSGEITPENVIYIVENINVAAIETTLWSIEWALAEVVNHPAVQRKVRDEIKAVVADHEPITESTIHRLPYLQAVIKETLRLHSPIPLLVPHMNLEEAKLGGYTIPKGSKVVVNAWWLANNPELWDKPEEFRPERFLGEEKSVDATVGGKVDFRFLPFGVGRRSCPGIILALPILALIVGKLVRSFQMVPPPGVEKLDVSEKGGQFSLHIANHSVIAFHPVSA

SEQ ID NO: 267558 - protein, 97 aa, Zea mays
  unsure (1)..(97): unsure at all Xaa locations
  Clone ID: MRT4577_175618C.1.pep
FFRERSDKEARRMYTEWMKAHGRTYNAAGKEERWYQVFRDNLRYMDAHNACVDAGVHCIRLGLNRCAELTNYEYRATYLGARTRPXRERTLGARYHA

SEQ ID NO: 267559 - protein, 127 aa, Zea mays
  Clone ID: MRT4577_175619C.1.pep
HTFTATCCSTRTASCRRLKLNVVPEADLIREVRVSYGLMLPSCVTLKIHHIHIGCIGCSALILDREHLTSCCILYDTHIEDLRHLSSNCAHELRIPWDDLNQRWATLKGLLDLLSLFIGCTSVQDTY

SEQ ID NO: 267560 - protein, 30 aa, Zea mays
  unsure (1)..(30): unsure at all Xaa locations
  Clone ID: MRT4577_17561C.1.pep
PCNLSSLTITLRFQYGXNXIYVLVLILHDY

SEQ ID NO: 267561 - protein, 36 aa, Zea mays
  Clone ID: MRT4577_175620C.1.pep
CVVCLSIRFYVPSNFIPYMHVFDAVFNYHHRRPLLG

SEQ ID NO: 267562 - protein, 93 aa, Zea mays
  Clone ID: MRT4577_175621C.1.pep
GKPKGLWEKTLPFGPLLVKKRVAHLVVAWEKTHSLNWAPQAYTPCLGRLPLKERLTLPFGGKNVEPFENCPRPGGRENQGGPSPRTGGLKNNG

SEQ ID NO: 267563 - protein, 108 aa, Zea mays
  Clone ID: MRT4577_175622C.1.pep
PPFLGLGPTPKILGRGRTGFTRRFKNQTPPGKTPAPKFLFFLSCKTPPFLPKIWEGGPPPPKTSKQICKTREGSKTHKVYFWFCSKKKKKKKKKKKKKKNTPPHKTPP

SEQ ID NO: 267564 - protein, 93 aa, Zea mays
  Clone ID: MRT4577_175623C.1.pep
GSGWGSGCIWGSGLVLGCGSGWGISAAARPCLRAKPMPHPEPKPEPQPKPNPEPQPMPKPQPKSKPEPLPTPKPEPKPEPKPEPKPEPKIKLN

SEQ ID NO: 267565 - protein, 66 aa, Zea mays
  unsure (1)..(66): unsure at all Xaa locations
  Clone ID: MRT4577_175624C.1.pep
LKNPGKVFNKWKRFKAPELEVSAXNGLLEAFLGAGFANAGGRFRELMLQKRCILSSSSSSRAAVVE

SEQ ID NO: 267566 - protein, 118 aa, Zea mays
  unsure (1)..(118): unsure at all Xaa locations
  Clone ID: MRT4577_175625C.1.pep
RWSRNRCCRINSICACTVDXLDTICPTLDEIVGGKPLHRHGGGIFLSPGRNYNHRTRPWWPLMLRTPVVPVYPSRVTMDPGGLTPDDATDLRTIGHQLPPIXKLGKNGGDAYLANQVR

SEQ ID NO: 267567 - protein, 78 aa, Zea mays
  Clone ID: MRT4577_175626C.1.pep
SEMTFSHYGPSTTNPLKRLHQTPEPGPVDVTNPRLPLIYDLCQTPFIFHSIGEVHTLCWPFCQEHPIVMLGLCAKLQS

SEQ ID NO: 267568 - protein, 111 aa, Zea mays
  Clone ID: MRT4577_175627C.1.pep
RVSLGWARIFLSGPCSCFSRPTRVGFFFTPRFFCPSSPFGSFCSGYLSVEKRSEGVGSWLIRNFFCFFLAPKMKSRPLFKPFFFGVLGPRSHTLFFFVVDLHALLAYQFRF

SEQ ID NO: 267569 - protein, 68 aa, Zea mays
  Clone ID: MRT4577_175628C.1.pep
SRPAGTCLFSFSSLWRFIPSVGLGTWQSPKGEVRDAVCHALKSGYRHIDCAWGYQNEDEVGEGIRLSG

SEQ ID NO: 267570 - protein, 46 aa, Zea mays
  Clone ID: MRT4577_175629C.1.pep
KIAKKFIYFPCSVNCVQIWRLVAYLNGQILSMFNSWDFISSLFWLI

SEQ ID NO: 267571 - protein, 86 aa, Zea mays
  Clone ID: MRT4577_17562C.1.pep
IHTRKVGPMVTLLFCRSGPSQSIVQPPELQQNIFCCQVSPQDTQQLVVHKRKRSNMCVLGPVTDKPVWPCSSNLKLVWAAHQTTVG

SEQ ID NO: 267572 - protein, 80 aa, Zea mays
  Clone ID: MRT4577_175630C.1.pep
IKKLRLSFSGGMYPLKLNPTAKPGTNVFYFSLSPSWSNKILEPSWSNKIWEPPRPRKKKAFYNFILPKTPNFQDAWPAPP

SEQ ID NO: 267573 - protein, 89 aa, Zea mays
  unsure (1)..(89): unsure at all Xaa locations
  Clone ID: MRT4577_175631C.1.pep
MTSSTIVGLLLAGAILSXLARCYETCGXSGXPKKPPTSALRPYLSFYTEGHQNCRWTCSXKGYMDCRLCHERREHXVCCCSHCEYSIVC

SEQ ID NO: 267574 - protein, 99 aa, Zea mays
  Clone ID: MRT4577_175632C.1.pep
EAKGCRFPVPVTPGLPWPGRKRKRDECECCHRACDGCVCIFHRRMEKGSGGLGSIACETTIGSWLVASVAVFCITAGFAPGVEAAGVATLEAGEDAPAL

SEQ ID NO: 267575 - protein, 287 aa, Zea mays
  Clone ID: MRT4577_175633C.1.pep
MTTCRTANAAAVVRLLLLCSFCAAAAIACDPPNGAKFGYTGSVGPDHWGALSPSFRQCATGTKQSPIDISTAQAVSNPALQPLHRDYTVANATLVDNVVNVALRFDGDGGAGSVSVGGKLYTLKQVHWHSPSEHTVDGRRFPVELHMVHASDDGNVTVVAMLYRFGSRPDPLLWQIQDKLAALHAEGCRAEEGGGGQVPAGDVSLWSLRLHSHTYYRYVGSFTTPPCTEDVIWSVMAQVREMTVEQAAALMAPLEKAYRHNNRPTQPMNGRVVQVCHRFVMSKKTAP

SEQ ID NO: 267576 - protein, 74 aa, Zea mays
  Clone ID: MRT4577_175634C.1.pep
GYLEAGREGVPAIPVIRCGLWEREREGRVGFFRYDSGCPLFSVLYKHVQRVTISLLAKYPHKLGRINVCTPASS

SEQ ID NO: 267577 - protein, 66 aa, Zea mays
  Clone ID: MRT4577_175635C.1.pep
RVGPTEILQLHFHQRFYLLSQLHRDFFFLFALFYPFTGLTRAMGIYWLQTQQTKNVHPRLGTQHFY

SEQ ID NO: 267578 - protein, 147 aa, Zea mays
  Clone ID: MRT4577_175636C.1.pep
RTYSLDTSSSGTPYSSFIFYFLSLCLPFSLGVGVLSVFSIFKKKNIPGPFFVIFHGALFWGFLWALQQRTLGVNHLFLKSTQGGGPLSCLPQEFRAEKWGGPPPTILKHPLFFWWGGNVPHRSGKKKKISPWGVNPGLKKKKKETPY

SEQ ID NO: 267579 - protein, 79 aa, Zea mays
  Clone ID: MRT4577_175637C.1.pep
ETERAIWLSYRTTGNVRPIEREAWNNLEDVATSKPHGTTQDDLGRIQDTNVPWETRDNDWLHNATLGLPRNTALTSRRN

SEQ ID NO: 267580 - protein, 97 aa, Zea mays
  Clone ID: MRT4577_175638C.1.pep
TPSDYRYYPYQSFQTPQHPSFLFQDKRVSWSLVYLPTIQSCWNYGFSCSSDELPVLGLTKSGGSDRTIAYENKALMLCEGLFVADVTDFEGWKAAIP

SEQ ID NO: 267581 - protein, 201 aa, Zea mays
  unsure (1)..(201): unsure at all Xaa locations
  Clone ID: MRT4577_175639C.1.pep
MKSAFLNGPIKEEVYVKQPPDFEDDWYPNHVYKLSNALYGFKQAPRTWYECLRGFLISNSFNVGKVEPTLFSKTCKYMQDILKKFEMKDPKPIKTSMGTNRHLDFDTEGKSVDQKQILRYLVHTPHFGLWYPKGSTFDLIGYSGSDYDGHKVDKQSTLGTCQFLRRSLVSWSSKRPSFVALSIDKAKYIAXGHCCAQLLWM

SEQ ID NO: 267582 - protein, 83 aa, Zea mays
  Clone ID: MRT4577_17563C.1.pep
VSLGLPPCRAFMELDAGRSRCTPLSAASARPTAWAGAPRTSSASDERMPGSLVTSEQLRRQRPAASSYLEVKQPTTSASVGKR

SEQ ID NO: 267583 - protein, 63 aa, Zea mays
  Clone ID: MRT4577_175640C.1.pep
LLMQDWTAPTFKRRRGCPVLPPSFIYINKCSQCPLSPSFCVAEDAMVLLFTNIITNALFTLFI

SEQ ID NO: 267584 - protein, 176 aa, Zea mays
  unsure (1)..(176): unsure at all Xaa locations
  Clone ID: MRT4577_175641C.1.pep
RSSGGRAPFLLLPAGRRASPPFQSTSPXSPSAPCPYPPHSTSSPGPSLPRSLPXPWCAAGGGAPXPPRTTXPSPLATHTPPSSSPGTPTHPRPLQAHPPWITPPPPGHTPPKSPDSVTRSTTPTASRPXGNSPPSIHPSQLPPLVXPCLTASPPAPCSSTGPSRPSSSSXSPSPGG

SEQ ID NO: 267585 - protein, 221 aa, Zea mays
  unsure (1)..(221): unsure at all Xaa locations
  Clone ID: MRT4577_175642C.1.pep
MVSFTSIITAAVAATGALAAPATDVSLVARQNTPNGEGTHNGCFWSWWSDGGARATYTNGAGGSYSVSWGSGGNLVGGKGWNPGTARTITYSGTYNYNGNSYLAVYGWTRNPLVEYYVVENFGTYDPSSQSQNKGTVTSDGSSYKIAQSTRTNQPSIDGTRTFQQYWSVRQNKRSSGSVNMKTHFDAWASKGMNLGQHYYQIGATXGYFSTGNGQITVNCP

SEQ ID NO: 267586 - protein, 92 aa, Zea mays
  Clone ID: MRT4577_175643C.1.pep
PPKEQFGFFLATKTKLIPSQKTKFTRGGFQQLKMALPCQHLEKLPGADLLFNSPGLFSNLKKPGPCQKNTLKYNGQGAPINGALNIFFLKEG

SEQ ID NO: 267587 - protein, 61 aa, Zea mays
  Clone ID: MRT4577_175644C.1.pep
MVRLDSDTLKLGIESRPHYSKPLHGHDQALHEAHAHLMRPALSGVSEQPPRSAPPDRCLYQ

SEQ ID NO: 267588 - protein, 187 aa, Zea mays
  Clone ID: MRT4577_175645C.1.pep
MGIDLVAGGRNKRTKRTAPKSDDVYLKLLVKLYRFLVRRTKSQFNAVILKRLFMSKTNRPPLSMRRLVRFMEGKADKIAVIVGTITDDQRVYEIPAMKVAALRFTETARARIVNAGGECLTFDQLALRAPLGQNTLLLRGPKNAREAVRHFGKAPGVPHSHTKPYVRSKGRKFEKARGRRNSRGFKV

SEQ ID NO: 267589 - protein, 81 aa, Zea mays
  Clone ID: MRT4577_175646C.1.pep
GPSPPPPPTLVDKRKFSKLRKGPNLRGKRRLLGGKKGVPCLGTKKIGRPPAVSCDSIKTSSIHPFRDLAKQRHASSTTGRP

SEQ ID NO: 267590 - protein, 86 aa, Zea mays
  Clone ID: MRT4577_175647C.1.pep
RPLSDGRPAARMEIPGGGHHVPAQPCEAQRLVTRFPPKQPCQGPERRGAGIRGGRFPPPARIRSGGRLLVSLTGPLSPRSDVLHAS

SEQ ID NO: 267591 - protein, 69 aa, Zea mays
  Clone ID: MRT4577_175648C.1.pep
FLPRGGRPAKGGQFGIVTSLYPKANCDFVKAVCQTKELAPPVGGAFSRKKSFCPQLKKQAFQKREALLF

SEQ ID NO: 267592 - protein, 102 aa, Zea mays
  Clone ID: MRT4577_175649C.1.pep
NIFPIYSLVAAAGEMPPRRRDRRRLLDPLPSYCDARAPPSGLRLSLTLLAPLLTLALDLAPFGFSGLLSYSPRPSQTLQTTCHSVYQRGLLNRDVYERYNPL

SEQ ID NO: 267593 - protein, 122 aa, Zea mays
  unsure (1)..(122): unsure at all Xaa locations
  Clone ID: MRT4577_17564C.1.pep
DAYSVIQTPPPMPPPPPPPAPXPPPPPEPAPPPXPPPAPPPXPPPAPPPAPPPXPPPAPPPAPPPAPPPXPPPAPAPPPXPPPAPPPGRRLTRNSKQEGGPARARVSSAGGGGGDAMARKMC

SEQ ID NO: 267594 - protein, 235 aa, Zea mays
  unsure (1)..(235): unsure at all Xaa locations
  Clone ID: MRT4577_175650C.1.pep
MTAAATMTWHEDLATLVGDTGVHLTGAGGHAPAPANVAAAGAGXVRGGGRGXRAEEGWAQQAKGFAESTAEMLRELGRGLWDVAAQSLAGAEDSEVARRLRKRAAATGKRLSFMNEYLPEERDPVRCWLTVAAVAFVSLLVLGFGSGNETPVELPKKLIIGPPSADRIQLPDGRHLAYQEQGVSANRARFSLIYPHSFLSSRLAGIPGISASLLEEFGVRLVTYDLPGFGESHPH

SEQ ID NO: 267595 - protein, 55 aa, Zea mays
  Clone ID: MRT4577_175651C.1.pep
HGELLVHLVSDEQEGPVPWGAPLTSSCRATCPRCGVSPPSAPPPRPLPEHPDPAP

SEQ ID NO: 267596 - protein, 91 aa, Zea mays
  Clone ID: MRT4577_175652C.1.pep
HRFTVWTMSAGSERPYSFSPPSAVPGPWSRLSGSVCAPTTGVTDSTGRSSCSVPHAKSPKTPFRPAVDDTKPVLHYTVRIRPRQYETRNCS

SEQ ID NO: 267597 - protein, 77 aa, Zea mays
  Clone ID: MRT4577_175653C.1.pep
HFFCFPTKGGEKYLFIVVEPPPNNPGGGVLTIQLTLLFWPDPPLKIVFIYFKAPLFKPQCLGGGGTFFNQGGFFFLP

SEQ ID NO: 267598 - protein, 125 aa, Zea mays
  unsure (1)..(125): unsure at all Xaa locations
  Clone ID: MRT4577_175654C.1.pep
MVLWVFGYGSLIWNLGFDFDDKILGFIKGYNRTFNLACIDHRGTTEHPARTCTLETDXGDDEAICHGTSLQGESLSKKQVELLQHEPEVGYELPYKVPFQSLPCYIVNFPKQSTCQAPICHRGSH

SEQ ID NO: 267599 - protein, 125 aa, Zea mays
  Clone ID: MRT4577_175655C.1.pep
MVLWVFGYGSLIWNLGFDFDDKILGFIKGYNRTFNLACIDHRGTTEHPARTCTLETDGEATTRPYHGTSLQGESLSKKQVELLQHEPEVGYELPYKVPFQSLPCYIVNFPKQSTCQAPICHRGSH

SEQ ID NO: 267600 - protein, 154 aa, Zea mays
  unsure (1)..(154): unsure at all Xaa locations
  Clone ID: MRT4577_175656C.1.pep
TDVKRIFSQNSTVNSKTQAADPFGLNLSSAIPGSQAYNTPTQQPFXSQQATLYPNGGAGTSYDQASQFNNVNSGWNDQAANLPAEQALNYDMARIVISDLLLYLSGILLNYYFISVCTFLYHFCLSTRTLCIHMNLSFSIRRRRKISDASIHTL

SEQ ID NO: 267601 - protein, 43 aa, Zea mays
  Clone ID: MRT4577_175657C.1.pep
TNYLRPGIRRGNFTPREERVIVHLHSLLGNRWAAIASHLPQRT

SEQ ID NO: 267602 - protein, 80 aa, Zea mays
  Clone ID: MRT4577_175658C.1.pep
PPQTKRFKVVVKGFSFILAGELFFFPCPVPENKVHVKVVVFPPLRPPGLRWAWFWLLHPLKLFMVLTCKPTGDKINFFSL

SEQ ID NO: 267603 - protein, 28 aa, Zea mays
  Clone ID: MRT4577_175659C.1.pep
GQSIIERVIDGERIIRRYPSVHPMQFQN

SEQ ID NO: 267604 - protein, 50 aa, Zea mays
  Clone ID: MRT4577_17565C.1.pep
RAQHLIDPCTVSNTLWNNSAIDCTIIEDKVYNFKKKIKKIKKKPNKNKNK

SEQ ID NO: 267605 - protein, 68 aa, Zea mays
  Clone ID: MRT4577_175660C.1.pep
SFDYSQIIDILHERRYLMVSVLNTNDAYGWALIQPVASFDYSQIIDILLDRAYLMVIVMSTRDWRGGR

SEQ ID NO: 267606 - protein, 143 aa, Zea mays
  Clone ID: MRT4577_175661C.1.pep
GGRPLHSPTRGSLKNRQGGTGKKIHKTILLKTLGSFPKNNQGTSMAYPGQHFKQIREPPGPSRNPWGGKKKGGACPPFLGNNYPTGAPKNPRARLEPNRGFSPGKAKTKGGSMAPPIRKKHRVSPKPMPQTGPPLGDNPTPPH

SEQ ID NO: 267607 - protein, 99 aa, Zea mays
  Clone ID: MRT4577_175662C.1.pep
RDPIAVAFNTMVTSSTVEQEDQEIALPRQEAVDNDATQAIEMVAQTEVVSTAEKQPLENPETLPVNWTIENLNKVNEKKHYLKGFGGGGFKWSGPIFPK

SEQ ID NO: 267608 - protein, 184 aa, Zea mays
  unsure (1)..(184): unsure at all Xaa locations
  Clone ID: MRT4577_175663C.1.pep
MCTSKSKLIAAVLLAAAALPLHAPTTMAANSNLFRDYIGAIFNGVQFSDVPINPDVEFDYILAFVIDYSTETDPPSPTNGQFSIFWQDSVLTPSAVAAIKQSNPNVRVAVSLGGATVNNSPVFFNVTSIDSWVQNAVSSLTTIIQQYNLDGIDIDYEQFQEDPSTFAECIGRLVTTLXSNGVIK

SEQ ID NO: 267609 - protein, 85 aa, Zea mays
  Clone ID: MRT4577_175665C.1.pep
FLANHQKRETRRFSSLFSSLASFHFQNLKKKQSLNFLAEKCCFLASFRCFFTEKCCFSFFFAKNNCFKFRKTKLIFVGRDPVCSL

SEQ ID NO: 267610 - protein, 51 aa, Zea mays
  Clone ID: MRT4577_175666C.1.pep
SYENPVVSRINMRIQDLTGLDVSTAEELQVANYGVGGQYEPHFDFARKDEP

SEQ ID NO: 267611 - protein, 37 aa, Zea mays
  Clone ID: MRT4577_175667C.1.pep
RWAAWQSVTLHTNLGDIKCEVFCDQVPRTAENFLALC

SEQ ID NO: 267612 - protein, 315 aa, Zea mays
  Clone ID: MRT4577_175668C.1.pep
MPASSPASAALAATVAAAAALLLLLLLCCPNVARAQTPAFACDASNATLASYGFCNRSAAAAARAADLVSRLTLAEKVGFLVDKQAALPRLGVPLYEWWSEALHGVSYVGPGTRFSPLVPGATSFPQPILTAASFNATLFRAIGEVVSNEARAMHNVGLAGLTFWSPNINIFRDPRWGRGQETPGEDPLLTSKYAVGYVTGLQGAVSGAGALKVAACCKHYTAYDVDNWKGVERYTFDAVVSQQDLDDTFQPPFKSCVVDGNVASVMCSYNQVNGKPTCADKDLLSGVIRGDWKLNGYISSDCDSVDVLCNNQYY

SEQ ID NO: 267613 - protein, 151 aa, Zea mays
  Clone ID: MRT4577_175669C.1.pep
KKKKKQKNKKKKKKKKKKKKKKKKKLVHNAATTHKGGFLLGARPPRRAAFLGVFLALFPPLGGLLGALWGPFYPFLSGISLFFPPFFLGNPWGFPPGAPLKKSPFPSVFSKGGGPHRAPSPPLFRPFGPGERPWSPPLTPPLSRGPSPRIP

SEQ ID NO: 267614 - protein, 119 aa, Zea mays
  Clone ID: MRT4577_17566C.1.pep
CLNKLLHENLVTCKFNWSPLKKKMMMKNAWIKNLFHSLLPSFYPDEIFSFTSLFFSFTSLWKNFFCPRISQKKTHCHFCYRQLLRGKIGDAKQGDVLYIFFMRVCLTVQTLNIKKHALN

SEQ ID NO: 267615 - protein, 736 aa, Zea mays
  Clone ID: MRT4577_175670C.1.pep
MPPRALPTTSTPASRRVVYVILAALATAPFLLLLLYSGASRSALCPTSYRAPRRLPYPSVLWSKVPPLPALSTSPHPDLRGSRWIVFTASPHAPRHRPLRAVPGWQVLAVADEATPADWSHPGAVLLTLTDQGRLGFSSVAFLPARGPARKAAAYLFAVQRGARVIYDADARNAVLGGNLTRHFDVDLDQRHGGAVLLQYSHANPNRTIVNPFVHFGQPSIWPRGLPLEKAGELDAEEFYTEIFSGGQFMQQGMCNGLPDVDSVFYFTRKSLEMEAFDFQFDADAPKVALPQGMMTPVNSVNTLFHSPAFWGLALPVSVSPMASDVIRGYWAQRILWEIGGYLVVYPPTVHRIDNVRGHPFDEEKDLHVNVGKLIKFLMEWRSSKLTLFERILDLSYAMTEEGFWSEKDLHFMTAWLQDLVAIGYRQPRLMSLEIDRPRATIGHGDKKGFGPKKLPSVHLGVEEIGEVSTDIGNLIKWRKHFGDIVLIVHCTELVDRTALEWRLLYGRIFRAVVVLSEQSNSDLAVEFSNLTQAYKYLPKVFDRFGGAQGFLFLQDRMVFNYWNLLNADKAKLWITNQVKESWSDVPLHGNNIEWFVNQGDMIKKAVSNFPSQYQDNYRRSVGENNLIRCSSEIFYVPQRYTRDFSDLVKVIGSLDIHHSFAVPMLFLAIDSPSNFESKALTKLVYRADLPSDTTLSTIYTTEAHAVYPVKVQNEMDFVKLIRAMALGDPFLMELV

SEQ ID NO: 267616 - protein, 83 aa, Zea mays
  Clone ID: MRT4577_175671C.1.pep
FGPCLFYAPGRGFGPPPSFCRGVRNLKRAPSPPPDRGAPCNFLKNPPRGVRGLNAGNPPSIPPKWGVGIPYPISPSPGWSRVN

SEQ ID NO: 267617 - protein, 64 aa, Zea mays
  Clone ID: MRT4577_175672C.1.pep
MLGYWRKHCLPWKMQTLKPEAEAIFLQRKEGQTCLFRGAKVRLKLDNEIVGAFNYLGAEAKETA

SEQ ID NO: 267618 - protein, 50 aa, Zea mays
  Clone ID: MRT4577_175673C.1.pep
MASSGAGDPLDSKRGEAPFAQRIDPTREKLTPEQLHSMRQAELAHWQKVL

SEQ ID NO: 267619 - protein, 51 aa, Zea mays
  Clone ID: MRT4577_175674C.1.pep
RFYVFHYTAQNAFQKSNFVTTPVDTSEANPDPQVYNDANSKLAKKQSTICN

SEQ ID NO: 267620 - protein, 93 aa, Zea mays
  unsure (1)..(93): unsure at all Xaa locations
  Clone ID: MRT4577_175675C.1.pep
NHFLHFVHGVFSRDGDPGAAGQEGQREEDLELIRAQHKARREPAFYRGGFLXLLIAQDTTPTCGGYGGGKKKKGACRKRLPEEALLPQPLLMS

SEQ ID NO: 267621 - protein, 38 aa, Zea mays
  Clone ID: MRT4577_175676C.1.pep
HYKLCLWSVLLVCEMLSCVSVCTYIYFLGPLVLFHLLQ

SEQ ID NO: 267622 - protein, 129 aa, Zea mays
  unsure (1)..(129): unsure at all Xaa locations
  Clone ID: MRT4577_175677C.1.pep
VGPLNKPFIPAFFPGLNKPYYSIAIQSRKNELEEKKLLNLPKKKRADGLIFKRFGPPSKTHEQTVQEMVNLALKVNKAVQEEGELPPXKLAITNVGWQNAKKPLEKHVLNFMSSNKGQTLGTMVDPGVF

SEQ ID NO: 267623 - protein, 130 aa, Zea mays
  unsure (1)..(130): unsure at all Xaa locations
  Clone ID: MRT4577_175678C.1.pep
GPPPRNHLLRPQKKNPGGVKKPPRGARKKKKPPRGEKNKNAPKGSNCSSTNNNSLVRASKHKPPPPQRCHPRPTAPKAPWTGQPRYFDPLGRHEHQPPQLQPPPAXRXQGPPPPPRGKGPPRPPKNREGR

SEQ ID NO: 267624 - protein, 86 aa, Zea mays
  unsure (1)..(86): unsure at all Xaa locations
  Clone ID: MRT4577_175679C.1.pep
XXXLXXTSXPXSRSSSTGRGPSXAGRSXTAXGTXGWRTRRTXXRARXXPRRRGXPRXXXGXXXAAAAXTXARRXCRXLPXXXXPXP

SEQ ID NO: 267625 - protein, 83 aa, Zea mays
  Clone ID: MRT4577_17567C.1.pep
STGKPQDLLSSVREISAHHALQMFHQSIRQSNPPSEGSGSYVVASATDGATEPNRMKSLPKDLVLLLRECSDIKVSKELAWDS

SEQ ID NO: 267626 - protein, 105 aa, Zea mays
  unsure (1)..(105): unsure at all Xaa locations
  Clone ID: MRT4577_175680C.1.pep
DTQNPPXGPPXXGPXPTXPCLXXXXPPLAPPQLNSLAPXXXXXARXNPGLPXPNPLAXHSPXPAAXXXXRPPPXAPPPXXPPPVWPMGPAPXAPFSPPAGRLPPP

SEQ ID NO: 267627 - protein, 112 aa, Zea mays
  Clone ID: MRT4577_175681C.1.pep
APANGASGGECAKENMPCSTSQTGLLCHNLSSARHGGRSDEVTSSRNGGRFLASGHRKRSPSDYIRRSLLVYRSVGKTWITTRSASTRHTPSFGHRIEACNFFRSQPCTLGS

SEQ ID NO: 267628 - protein, 535 aa, Zea mays
  Clone ID: MRT4577_175682C.1.pep
MALRSPDLRWLGSLTRPGRLAPSPLAALASPRRRRRAPSPSPSPSDSSTPSTAPTSDSGPGAEGMEGPEWKKISAKRFGIKESMIPPEAWNVLHRLRSRGYDVYLVGGCVRDLIMKKTPKDFDIITTADLRQVKDTFLGSAVIVGRRFPICHVHENNSIVEVSSFNTCARGSSGSQIYNSKSQNCSKNDFVRWKNCQRRDFTINGLMFNPYSEKIYDYLGGIEDIKKAKVRTVIPAGTSFQEDCARILRAIRIAARLGFSFPKETAYYVRTLACSVARLDKARILMEMNYMLAYGSAEASLRLLWRFGLLEHLLPFQAAYFSSTRFKRKDKGTNMLLVLFSKLDNFLAPNRPCHNSLWISLLAFHEALARKPCDPLIVATFALAFYLGGDMSLAVDIGKSINRQHDTGFRELLEPKVWTDKHLAGEVQSFAALMKQTLTEMTDEYHVANAMAKIPQAPSSDLVFIPLQAYLKVLKFIECVQYGKKERGHEPKRDGMINYHNLSNGTHAEIRNLFTLVVFDTLYPTDTEDENDCSS

SEQ ID NO: 267629 - protein, 134 aa, Zea mays
  Clone ID: MRT4577_175683C.1.pep
HLKRDGNSYTVPHAPYVMNRSQKLVFCDFLRRVKFPDGYASNLAKSITSDGCNLQGLKTHDCHILLQRILPVAIRGIMHRDIYETIAELSKLFQQLCAKTLKLDVFHTMKAKIPFILCKLDKIFPHASSDVMLH

SEQ ID NO: 267630 - protein, 95 aa, Zea mays
  Clone ID: MRT4577_175684C.1.pep
ATLLALWFVHRRQEVDALLRRRRRDRVNMRRQPWPGPIISRSSPLRNPQPLPPDSFLDLRLMSLQHQYHPILDTRKSPEHVASPLLTDVRACVTP

SEQ ID NO: 267631 - protein, 236 aa, Zea mays
  unsure (1)..(236): unsure at all Xaa locations
  Clone ID: MRT4577_175685C.1.pep
MGDGEAAVPSRFRTVCVFCGSNAGRRKVYADAALELGHELVRRGINLVYGGGSIGLMGVIARTVRHGGCHVLGVIPKALMPIEISGESVGEVRVVDDMHQRKAEMARQSQAFIAXQVPDQTRRPLLKHNHHRPTALAIIQSPPLQLAFAYVRLRPVGLXLPGGYGTMEELLEMITWCQLGIHDKPVGLLNVDGYYDPLLALFEKGAAEGFISTDCSQIFVSAPTASELLTKMEVAS

SEQ ID NO: 267632 - protein, 63 aa, Zea mays
  unsure (1)..(63): unsure at all Xaa locations
  Clone ID: MRT4577_175686C.1.pep
EPGGGGLRTKQPVXRNIQRGKPECKKLRTCLPYYLDYLREMFHGYAVDGRSSCIPERLIIQLK

SEQ ID NO: 267633 - protein, 64 aa, Zea mays
  Clone ID: MRT4577_175687C.1.pep
IGSHPGSPIRSFVSRPPTRAIFLFQAHTFTHTRVQIKVDETGVSHVCEMDEIPNTEGPNPKSLV

SEQ ID NO: 267634 - protein, 45 aa, Zea mays
  Clone ID: MRT4577_175688C.1.pep
EKERRKELKSIINIIGEEGRSIIKKKERIQVMHDRSDTGNHIIHH

SEQ ID NO: 267635 - protein, 78 aa, Zea mays
  Clone ID: MRT4577_175689C.1.pep
MVDVELFVKETSDHSISSEEEDILVRSCSNLNVSFGYHCDSHQRFSPENDHGNGISPKNTFGTNTMMGSRNGSFTCLS

SEQ ID NO: 267636 - protein, 38 aa, Zea mays
  Clone ID: MRT4577_17568C.1.pep
FPSLFSSLCSSEMTEETSCFTYLRIGRKTLKTAPSGAT

SEQ ID NO: 267637 - protein, 84 aa, Zea mays
  Clone ID: MRT4577_175690C.1.pep
GKNLVPFINPYYRPNIFLDPMKRIRDPAMHIGARAISGGEHIYPRRRLNRSSKEQTKWLSHNLRYFWPETLLKIFFSPKMQLGG

SEQ ID NO: 267638 - protein, 521 aa, Zea mays
  Clone ID: MRT4577_175691C.1.pep
MVDVELFVKETSDHSISSEEEDILVRSCSNLNVSFGYHCDSHQSFSPENDHGNGISPKNTFGTNTMMGSRNGSFTCLSGAAISANFTLANTNICNGLIGEEILPELDSPNSFRKIISSPSMSRLDSFSTSQGSPVSTESSIFEISKNLWRSSAPTTVSSNFLTNTEVKMAGGAAGEDRVQAVCSEKNGWLICGIYDGFNGRDAADFLAVTLYDNIVYYLYLLENRIRQQNGLYNSSESSLNGLKSELTLAMRNSENEGIKFSETFRSGVLNCLSTAVEQAENDFLCMVEQEMDDRPDLVSVGSCVLVLLLHGTDLCILNMGDSRAVLASMPYVENGALKAAQLTETHSLENPSEYQRLLAAHPNDSSVVRGNKIKGKLKVTRAFGVGYLKQRKFNDALMGILRVRDLSSPPYVYTNPHTLSHKVTDDDLFVVLGSDGLFDFFSNDEVVMLVYQFMHDNPMGDPAKYLIEQLILKAAKEAALTAEELMRIPVGSRRKYHDDVTVVVITLGNAQRTMTASTSM

SEQ ID NO: 267639 - protein, 123 aa, Zea mays
  Clone ID: MRT4577_175692C.1.pep
RPGFSVPHPLRTAAVSSSPGLRPATPPPQLALLSSDYGSGLVIGGQVSVRIVPLLPRSAFCRCGVSRKGGGAFPDASCPGLLPCCALGGWAQEWGESRRCVDWSCSHPSETLDGCICERQEEG

SEQ ID NO: 267640 - protein, 135 aa, Zea mays
  Clone ID: MRT4577_175693C.1.pep
GYLKQRKFNDALMGILRVRDLSSPPYVYTNPHTLSHKVTDDDLFVVLGSDGLFDFFSNDEVVRLVYQFMHDNPMGDPAKYLIEQLILKAAKEAALTAEELMRIPVGSRRKYPDDVTVVVITLGNAQRTMTASTSM

SEQ ID NO: 267641 - protein, 51 aa, Zea mays
  Clone ID: MRT4577_175694C.1.pep
YLDARDSGDDRSDGDQRTVFKCRRATGYRPVKRVQDDTPAPSVGANRQDDA

SEQ ID NO: 267642 - protein, 72 aa, Zea mays
  unsure (1)..(72): unsure at all Xaa locations
  Clone ID: MRT4577_175695C.1.pep
IFPEILLCLLLALFASGLIHRVCVTTXLHLLHGWCVLHQQDLLHPVPGSSSSPHTSQGHRQEQEEKLTLNVQ

SEQ ID NO: 267643 - protein, 58 aa, Zea mays
  unsure (1)..(58): unsure at all Xaa locations
  Clone ID: MRT4577_175696C.1.pep
SCPLFFPVVNRFLWLYLLLXKPQLSEIFSFWHGFLGVGLGVAIVFVPFVKKFSLMFGV

SEQ ID NO: 267644 - protein, 227 aa, Zea mays
  unsure (1)..(227): unsure at all Xaa locations
  Clone ID: MRT4577_175697C.1.pep
AASRHVAAGGGRDGGGXGQRSVPTPFLSKTYQLVDDPAVDDIISWNDDGSAFIVWRPAEFARDLLPKYFKHNNFSSFVRQLNTYGFRKIVPDRWEFANDCFRRGEKRLLCDIHRRKVSPATGAVTVAAAAAAAIPMALPVGSPVYSGEEQVLSSSSXAPVAAAAPAGAVXGSGSGGVVSGDVGEENERLRRENARLARELGQMKKLCNNILLLMSKYAATQQPDAAK

SEQ ID NO: 267645 - protein, 104 aa, Zea mays
  Clone ID: MRT4577_175698C.1.pep
ACDGLSAQPISPKAEGGRQRIRIAEASGSLVTRCACPPDSLVPKSMLRAGLLCPSHERGHSPQCRMGPGDRAMRGLHGLSDVSCPVHGTRRSTAWRCSCVPHSF

SEQ ID NO: 267646 - protein, 180 aa, Zea mays
  unsure (1)..(180): unsure at all Xaa locations
  Clone ID: MRT4577_175699C.1.pep
MTRDDDSDRQRQCEKDEDDMLPAPAFIVGATDADDALLGATAIPPLPPGAGVAVAPAPAETADGDDGHHVERGADARKVTRWDWDAVVVADRSGATALLLLRFGAGDGGRGFLVRLGRRKHVHLRTPLTGGSVAPLAILFCRGSVWGATGTFSLAEVMGPRKVALPDGTMGYXRPASRYP

SEQ ID NO: 267647 - protein, 87 aa, Zea mays
  Clone ID: MRT4577_17569C.1.pep
HSLLTLTLTQVHPSSLPAGTTATRRCCRPSRRRRSCSERRRTASNAKRRRTGGGVCTARVCGGGAARRRRLPALFFLFFQPLCTAKS

SEQ ID NO: 267648 - protein, 77 aa, Zea mays
  Clone ID: MRT4577_1756C.1.pep
SVFLSFFFSIKGLGALFYFFCQGPSPPKKRVLVLGLWRKLFPPPKKKKKKKKKKKKKKKKKKKKKKKKKKKKPPPHH

SEQ ID NO: 267649 - protein, 47 aa, Zea mays
  Clone ID: MRT4577_175700C.1.pep
CFSSIFLLCTNKEVACCFRSLTPLLVLQPCLLGHPHYLLAVVVHCLL

SEQ ID NO: 267650 - protein, 85 aa, Zea mays
  Clone ID: MRT4577_175701C.1.pep
MARQAYQASLSLLALCASAAAGTIFQQCSQPTIAYLFPPYLSPVTCWVCENRILKPYTIQQATGDGILPLSPLTLQHSSIILHNT

SEQ ID NO: 267651 - protein, 151 aa, Zea mays
  Clone ID: MRT4577_175702C.1.pep
MEAEVSAPADLKAPDKTTVHGDDKENIPNGNANLQVKEADNDEDDGTRSDGFELIDVKQNFDSARVEEEMAAPRSTTVDTSPVTEESETQEDKTTAHEEQSVATNTRHLESSMLNQQTEQLEKLTMRIEELESENDKLVKDLTEAENKQSL

SEQ ID NO: 267652 - protein, 70 aa, Zea mays
  Clone ID: MRT4577_175703C.1.pep
ESFTLHLDLSSTETRRSFYFVLAFVYTYLLVFFLNRRLVNCLLTYDIQIMYIYSCLLKEYEWSCSVLTLK

SEQ ID NO: 267653 - protein, 66 aa, Zea mays
  Clone ID: MRT4577_175704C.1.pep
IYPTLEVKRSDGRNNKNISPQRLYRGKGPTQFKIAPVGLETWANCGAKRPRQGFPAVMKSKRIPVP

SEQ ID NO: 267654 - protein, 96 aa, Zea mays
  Clone ID: MRT4577_175705C.1.pep
LIFLFIILGPRCIYTGFRKCWKICIYQCNAKNKTKIVLLDLLRNSPYSRSKLQADTIKNIVTNIASQIDGEDRGGKAKKMLVEMVKVNMEQSMRHV

SEQ ID NO: 267655 - protein, 97 aa, Zea mays
  Clone ID: MRT4577_175706C.1.pep
MSSWTYCENALFERALATYDRDTPRRWELVAAAVGGGKTAEDARRHYAHLVLDVGDIESGGYDNPNPRGPAPTNSGGASISGNGNNRGGGRANRPQT

SEQ ID NO: 267656 - protein, 88 aa, Zea mays
  Clone ID: MRT4577_175707C.1.pep
FKSYSVTGFRKCWKICIYQCNAKNKTKIVLLDLLRNSPYSRSKLQADTIKNIVTNIASQIDGEDRGGKAKKMLVEMVKVNMEQSMRHV

SEQ ID NO: 267657 - protein, 56 aa, Zea mays
  Clone ID: MRT4577_175708C.1.pep
ERRVQPRRRAFSRRFVYTSLYSKATRSGAGPFKINVRLLYVTSAASTRPVSIKQSV

SEQ ID NO: 267658 - protein, 53 aa, Zea mays
  Clone ID: MRT4577_175709C.1.pep
IILRFFFYLGTQKAMEKILPLIIISTMLYNGRWHKIIFNIHKIKNKFNFRVNI

SEQ ID NO: 267659 - protein, 158 aa, Zea mays
  unsure (1)..(158): unsure at all Xaa locations
  Clone ID: MRT4577_17570C.1.pep
ARARDPAALSAAXDHHSRKAFKAYTRLWRLQQERRRDLVAAGLRRWEIGEVASRIGQLYYARYLRAAEPRSLVGAYVFYEAIYSRGYFGAAAAAVGTDGGGGGVSRHQALLIRYKELRFIARFLVVAMLMRRAEAVDHLAARLRALVEETKAAYPKTN

SEQ ID NO: 267660 - protein, 234 aa, Zea mays
  unsure (1)..(234): unsure at all Xaa locations
  Clone ID: MRT4577_175710C.1.pep
LPGSASASAPSAAVPPCRRPLPPXHHTLVAPPRRSLRICSSTFPPPPAPAIEGRDVSLSVTTRRGRVLPVLKGCSLLVPPGQLWMLLGPNGCGKSTLLKVVMPTVGSDVAFGLGKLKLPLDEVRLRVSKSLDAVGMLSYSQRPIQTLSGGQKQRVAIAGALAEASKVLLLDELTTFLDEHDQIGVINAVRDSVAADGEVAALWVTHRLEELKYADGAIYMEDGQIIVQGDVSTI

SEQ ID NO: 267661 - protein, 76 aa, Zea mays
  unsure (1)..(76): unsure at all Xaa locations
  Clone ID: MRT4577_175711C.1.pep
ILLLFSTNSXXFKELFLLKEGMIYLILKPFLLLAQYHQDFDQTVVYPKHIYLVITQTPLLTSIPIYALKSSNNSHY

SEQ ID NO: 267662 - protein, 302 aa, Zea mays
  unsure (1)..(302): unsure at all Xaa locations
  Clone ID: MRT4577_175712C.1.pep
MGYPGRAPAQKLLLLFLARRNDARPRRRLRLPSAAVPPCRRPLPPXHRTLVAPPRRSLRICSSTFPPPPAPAIEGRDVSLSVTTRRGRVLPVLKGCSLLVPPGQLWMLLGPNGCGKSTLLKVLAGFQNPTAGTVYINRPCSYVFQNPDHQVVMPTVGSDVAFGLGKLKLPLDEVRLRVSKSLDAVGMLSYSQRPIQTLSGGQKQRVAIAGALAEASKVLLLDELTTFLDEHDQIGVINAVRDSVAADGEVAALWVTHRLEELKYADGAIYMEDGQIIIQGDVSTISKFIKKKQARYFGHFEL

SEQ ID NO: 267663 - protein, 43 aa, Zea mays
  Clone ID: MRT4577_175713C.1.pep
KKANYTKKNNPTKTLNPKHSLFNNQTYIHLPATPYPSFRPTKI

SEQ ID NO: 267664 - protein, 181 aa, Zea mays
  Clone ID: MRT4577_175714C.1.pep
PPYALATLFTILIAILSERYARRAAFILFTSTLAIIGYIILLANTNPRARPGVSYVGTFFAAVGIYPSVALVLCWPAINVSGQTKRATANALQISIGNLGAVLGTQLYRANSGPRYILGHSFALGYLVLNLVVVSALWVVLNRENAEKDKVLESEPHVPGFHDSAEDLALGDRHPRWRFQV

SEQ ID NO: 267665 - protein, 42 aa, Zea mays
  Clone ID: MRT4577_175715C.1.pep
SFWYVITICYVLIICFKRLCSSILVGFDYCFFNCLSDYIYLI

SEQ ID NO: 267666 - protein, 80 aa, Zea mays
  Clone ID: MRT4577_175716C.1.pep
ARARRPEWACPSLWSACSILAPGTSTLTARWRCTRFVFVRVCGALLWPGAREDAQRQPRRKKGIGANPVPSRVFSLASVL

SEQ ID NO: 267667 - protein, 51 aa, Zea mays
  Clone ID: MRT4577_175717C.1.pep
DTQTVHVTLQQSVNVHRAVVSYSLNCSRSTGCVVLLGTRPYVLPSLYEYVI

SEQ ID NO: 267668 - protein, 46 aa, Zea mays
  Clone ID: MRT4577_175718C.1.pep
EHLALGISTSCSERGGWSTVPAADALSCVRTSGVNVYHLCSVWKQR

SEQ ID NO: 267669 - protein, 44 aa, Zea mays
  Clone ID: MRT4577_175719C.1.pep
RPRRRSRGSRRTSRPRCPPLPLTSTPQQDEKQSAEAATARSVGV

SEQ ID NO: 267670 - protein, 141 aa, Zea mays
  unsure (1)..(141): unsure at all Xaa locations
  Clone ID: MRT4577_17571C.1.pep
GDRGPAHFFVATLDPGVRDNLREMPGVPVIYGLNNYLCIEQPSXCSSTRLLNWMRRSSNVDISEHQKLLEPLYQKERHLPLKMLVANNNMXMPTSSLVKNALHVTDKTTFTRNNALGPNPLFCENKKPKLPTAISKPAKFC

SEQ ID NO: 267671 - protein, 59 aa, Zea mays
  Clone ID: MRT4577_175720C.1.pep
RRRPPGGQLSSSFVNRPSLMGVGTLLPSYEPALSEDYQLLFLFRNRPSVQRALFMSCTC

SEQ ID NO: 267672 - protein, 80 aa, Zea mays
  unsure (1)..(80): unsure at all Xaa locations
  Clone ID: MRT4577_175721C.1.pep
MSVWQQKKKKKKKNKKKKKKKKKKKKKKKKKXXXXKKKKKKKKKKKKKKKKXXXKGGPTLRIQILLPGPSKKKFFLWGPQ

SEQ ID NO: 267673 - protein, 75 aa, Zea mays
  unsure (1)..(75): unsure at all Xaa locations
  Clone ID: MRT4577_175722C.1.pep
MEIFFKGTITKRTXACDQTVELXDKSTVDNRIYHKXCFRXXHXRGCSXLGTYHSVEGVLYCMXDFDQVGKRTVSL

SEQ ID NO: 267674 - protein, 82 aa, Zea mays
  Clone ID: MRT4577_175723C.1.pep
MAFYSKWNGEPLHSSRYLLTDVLKGKLGFKGFFISDWEGIDRICEPQKPRGSDYRYCIGQSGNAGMDMIMIPHRFEKFLDDI

SEQ ID NO: 267675 - protein, 70 aa, Zea mays
  Clone ID: MRT4577_175724C.1.pep
RTMWIRLLQSKETKTRTEFIFQRSTQARGGPLSQRIDRPKSEWIGAPRSSNGTQSLGGCVRRRGTGARAQ

SEQ ID NO: 267676 - protein, 99 aa, Zea mays
  Clone ID: MRT4577_175725C.1.pep
PHRNHQILFPPQEEPPEEDQILVLTKRRFFLVSLKTKPTYLGPVFKKLKGPKERSIESYIKIRADFFFHKKIIKGGGFSIYPRAYFGAQLGAGDSNLFL

SEQ ID NO: 267677 - protein, 113 aa, Zea mays
  Clone ID: MRT4577_175726C.1.pep
LEQSNPHRSLISRMVLQSAQLVDLVTAKSGLCSAFLWRFTPVSSPLYCDSIRRINPFLSSVQNPVCAVAISLPIVWDFAILLFCLLPVEFYICYMRLHLWLIGPAFNAKSSKN

SEQ ID NO: 267678 - protein, 105 aa, Zea mays
  unsure (1)..(105): unsure at all Xaa locations
  Clone ID: MRT4577_175727C.1.pep
MKRVMALYACRALSAASSCDLHMPCLCAWYRCSYCPDAXLTTIMGSESLNPYPYYLQQAQCSXMAAVSYYVLRRQTSVLHQPLRQHCWQQHMRMKDLQHLVHKNL

SEQ ID NO: 267679 - protein, 118 aa, Zea mays
  Clone ID: MRT4577_175728C.1.pep
HRFFRAPQVEGVYSPRFGAPNAYCRWGSGGLQTLWGTGSFCSPPFGVLGPPFYVPPCTEAFFLPPWWFLGLILASLSFPMIFPPGRCKAYNPPNKKTHPKEKIIHKRKKKKTKKKKIK

SEQ ID NO: 267680 - protein, 203 aa, Zea mays
  Clone ID: MRT4577_175729C.1.pep
GKLGTTHAADALRIGSRIRDEFLLVQYNYSLFEAMEILFPPIINEIKLYETPLQDLYTYIREAWGHFAQGPAGIISRFKDEAVFSVDSLGLRPVWKVETESSYIFSSEPGVVSPTKYVAEPKPLAPGEKVGLKWNEQDELVLYEYDKYQIQVYNRFKKRIDTTNYHLNLSIPETKKIQGLCDSVQVETKQYVAFGWDREHINS

SEQ ID NO: 267681 - protein, 101 aa, Zea mays
  Clone ID: MRT4577_17572C.1.pep
ARDQLFAVHKGWKNKKNKAGSRRRRAAPPPHTRAVQTPPPVRRRFALLAVRRRSEQERRRREGRQHRRVAVVPEVVVAGRPGGTARRPRLGPGRRRCWFRL

SEQ ID NO: 267682 - protein, 85 aa, Zea mays
  Clone ID: MRT4577_175730C.1.pep
RAFFPEDVLDQGSSCRTYLHPLHVRHCYSLLGRGEKVLCQEVPQGSVGEDSLVIHRYRQVVSYAYSYILALEVLTCDAMYRIPVP

SEQ ID NO: 267683 - protein, 99 aa, Zea mays
  Clone ID: MRT4577_175731C.1.pep
MEGLIPFVIDVIRRSHGRGGSGYRSVSSDGGSSRGGGSRRHLIDYSELPDAAAASAASVGAADWPPSGTVHRRARSEYADSTVVGRRSEEHAGPAYRRK

SEQ ID NO: 267684 - protein, 106 aa, Zea mays
  Clone ID: MRT4577_175732C.1.pep
MEGLIPFVIDVIRRSHGRGGYRSVSSDGGSSRGGGSSRRHLIDYSELPDAAAASAASVGAADWPPSGTVHRRARSEYADSTVVGRRNEEYARPAPVVAAGPAYRRK

SEQ ID NO: 267685 - protein, 56 aa, Zea mays
  Clone ID: MRT4577_175733C.1.pep
ARGTSIASCFMDCMHALARSLLRKVPQLQSSRRLSRHKGTWLYVNSVLPFDSCTRV

SEQ ID NO: 267686 - protein, 68 aa, Zea mays
  unsure (1)..(68): unsure at all Xaa locations
  Clone ID: MRT4577_175734C.1.pep
RDPSGLAIVAXQVLGESLMLKTGGALGMVDHQKVIMHSLLSFRRTGPYFSLTCFGRHAPPVFFGMGPK

SEQ ID NO: 267687 - protein, 69 aa, Zea mays
  Clone ID: MRT4577_175735C.1.pep
SRFDPLTHLPRLRLDKFNKITTFWIRAVHYLGDRMPGQAYKNLVQARTELNPGMGNWQEKSTLRTLGGS

SEQ ID NO: 267688 - protein, 311 aa, Zea mays
  unsure (1)..(311): unsure at all Xaa locations
  Clone ID: MRT4577_175736C.1.pep
DAPLGAFWATQHAQGAQAADNRNPLFDEEPSKVSLSSKQNQSRVDXHQXPGDRHGHSGQTSRISKTPNNSLSNDGFRGVSDTEIHNSVKTKVQQPQPKPKCDKDPFNIFVADFDTHNLNIAVGKASELELEVSSLIXQLKKPTLAAAEMTAKYEKISAICRSQRQEIQELKRTLAEPTPPSNMVSSRTQDSGSQRKEKIQGTLWELGHGMLASNTSSASSDVKTWQAFPDTQTQARPKVDHGTNGSQNITKNTTSGASPDAWGFGTDSFRTSSAPVKAATQINRAAQGSSSQRFNSGVAKKVEQPSGWAGF

SEQ ID NO: 267689 - protein, 119 aa, Zea mays
  Clone ID: MRT4577_175737C.1.pep
WCTCRSRSAHEGRLTCPAHMLKDNPLNMITSAPEWVFSINPHTLHLACKHPAREPSKAVGLHVRHAVEESKRHRRGLSPLLHERRDEYEVEFQALGGVQPQVALRVPPLCHIAQGHELS

SEQ ID NO: 267690 - protein, 214 aa, Zea mays
  unsure (1)..(214): unsure at all Xaa locations
  Clone ID: MRT4577_175738C.1.pep
AANNANLLEFLKKTTLEKAEMTAKHEKLSAICRSQRQEIQELKLTLAEPTPPSNKVSSRTQDSGSQVIYLHMSNXSIFTLLKFISILHXYLYSMQRKEKIQGTVWELEQGMLAIASNSSSASSDAKTWQAFPDTKTQARPKVDHATNGSQNITKNTTSGASPDAWGFGTDNFRTPATTLRATTQINRAAAQRSSSQRFNAGVAKVEQPSGWAGF

SEQ ID NO: 267691 - protein, 97 aa, Zea mays
  Clone ID: MRT4577_175739C.1.pep
IIKHPCLWKEMKTRVCRKNRCRSPREQAGGTGHLFIGPGLNPNKITYLPFTSCDNSFQFYYGVNGLFNYKENPLTAKLSDVFCFTPIVLDQPRYFLS

SEQ ID NO: 267692 - protein, 76 aa, Zea mays
  Clone ID: MRT4577_17573C.1.pep
NKIFPVHHPHLVFVFFPLQPTGFWGTNFFPGREVNPRGRGPLWGGDPFPRVKMNRGDLALFGDQKGATLINFVSTV

SEQ ID NO: 267693 - protein, 122 aa, Zea mays
  Clone ID: MRT4577_175740C.1.pep
EAITQKVDAYRFGMVLLEIVSGRRNSPKVYTTNSCHVSYFPLQAITTMLHDGDVNSLVDPQLHGEFNLEEALRLCKVAFWCIQDNELDRPTMGEVVQALEGLHDVGMPHMPRQLATIARNEL

SEQ ID NO: 267694 - protein, 108 aa, Zea mays
  Clone ID: MRT4577_175741C.1.pep
WLGTFGLIYVLVYVLAYVLVRLLRSLRKKNPRVRKTRTLRGAGRLSARELLRRRLAELPPRHRQCHNEIVSSRFRRARRSPRQGLAEVRNLTGKRCTNPRCLSRCVRY

SEQ ID NO: 267695 - protein, 100 aa, Zea mays
  unsure (1)..(100): unsure at all Xaa locations
  Clone ID: MRT4577_175742C.1.pep
PPWELQCPSLGGVVLPPPFFPPPPSPRGGKGMSLPGGGWFQPPFFPPPPQPPXWEAHVPPCLCGCLPPRKPFFPKGLGEPPNPQRGNGPFSGFLFPRVPI

SEQ ID NO: 267696 - protein, 89 aa, Zea mays
  Clone ID: MRT4577_175743C.1.pep
AYSLSWCIYPIWRGVFALTRICSGPPMFTDRYGRQVPCAVSGCGQGVSRSGCLGPAVGGAPYLAPVEVGGGVLRTTTVCDRLVGSELRS

SEQ ID NO: 267697 - protein, 98 aa, Zea mays
  unsure (1)..(98): unsure at all Xaa locations
  Clone ID: MRT4577_175744C.1.pep
VKPGSIKPHQKVEAQVYILSKEEGGRHKPFVSHFMPVMFSLTWDMACRIILPPEKELAMPGEDLKFNLILRQXMILEKGQRFTLRDGNRTIGTGLVTN

SEQ ID NO: 267698 - protein, 47 aa, Zea mays
  Clone ID: MRT4577_175745C.1.pep
CEYTVYMNKMMEPRLHELGKATLRLFEYGSHMNKRLQLRAIHSAPYT

SEQ ID NO: 267699 - protein, 453 aa, Zea mays
  Clone ID: MRT4577_175746C.1.pep
MAVGSGLALYHVLGVATCVALLYFTFGEVDLRHISLPSLPVSRPSPFRAAAVAAPFVERRGAQLFLAGRPFYVNGWNSYWLMDQAVEPRSRDRVSRMFRTGAEMGLTVCRSWAFNDGAYNALQVSPGHFDERVFKALDRVVVEAGRHGVRLILSLANNLEAYGGKTQYVRWAWEEGVGMSASNDSFFYDPAIRDYFKVYLKTLLTRKNHLTGAEYRDDPTILAWELMNEPRCTTDPSGDTLQRWMEEMSAYVKSIDKKHLLTVGTEGFYGPTSPQEKLDVNPGTWKDNNYGSDFIRNAKIPDIDFASIHLYPDTWLLQQHATVDEKLKFVKRWVASHIEDGDKELGKPVLATEFGLSHRAKGFHHSHRDVFYKAVYDTVYRSAARGGAGAGAFVWQLAVEDMEEFHDDFSVVPSEHPSLHRLIKSQSCRLAKLRHGVGEEAKRTLSVCAAGSS

SEQ ID NO: 267700 - protein, 42 aa, Zea mays
  Clone ID: MRT4577_175747C.1.pep
KRTLSHVEVPSTSQGVCEFSSNRAIDSVQGCRQARDLYRTRA

SEQ ID NO: 267701 - protein, 83 aa, Zea mays
  Clone ID: MRT4577_175748C.1.pep
KNDPRKFLSSHLRKWRNTSDDIRRTVRSCRGDPLCAWKVPRHRSISTSVNSPIGIILAPAHHVRLFRLVGERGLVCFSHGSVA

SEQ ID NO: 267702 - protein, 343 aa, Zea mays
  Clone ID: MRT4577_175749C.1.pep
MRLGTAMPDLPCDGDGVCMVCRVASPPEVDLLTCSTCTTPWHSPCLSKPVLSGDPETDKQIRRATKRAHLSVAERLLKEFGCSICRAVIKEPLTTPCAHNFCKTCLLGAYDSQSSMRERSRGGRTLRAQKIVKTCPSCPTDICDFLENPQINREMMELIESLQRKAVEEGKMAAGDAEESGDGDSEENGGALVKGEDDSNLNEEGQDGVDADGSVKIVVEMEGAKDDKKSKMGAAEVVDVLVEDAAAKQPKKRTADEDAAAKQTKHKADAETGGKRVKSSAAVEEVDVCVTPMKRTRKSGDMHDDGNGSPAVSSGRRVTRSSVNATGADDSPARRTRSRGRAC

SEQ ID NO: 267703 - protein, 114 aa, Zea mays
  Clone ID: MRT4577_17574C.1.pep
MKLFAFVRRARRPPPTAPDDDTATAAAAATTEKRRRRLSSSSSSGSAWKPTLGAISEDAAMTSAPVAQAKAAAAPARAKARSPRRATRAAGYDDFRHYGHPTVLPAFTPTAFLF

SEQ ID NO: 267704 - protein, 57 aa, Zea mays
  Clone ID: MRT4577_175750C.1.pep
GTAGAPLRLPARPPVRCCRTAKTPWLKPASFLSNEPSVGDSAREPNEGGLPWSRSSF

SEQ ID NO: 267705 - protein, 40 aa, Zea mays
  Clone ID: MRT4577_175751C.1.pep
WMARAVCQYINWCYALGKRVNTDKCDRTKIYLVLLIDRRR

SEQ ID NO: 267706 - protein, 426 aa, Zea mays
  Clone ID: MRT4577_175752C.1.pep
HLYDVIIVDICFVSSNCWTFVSLYCLKRSHKEKRSSYAPESGVRYDGVYRIEKCWRKIGIQGKFKVCRYLFVRCDNEPAPWTSDDHGDRPRPLPKIKELQGATDITERKGRPSWDYDDKDGWKWVVPPPVSRKPVLSGDPETDKQIRRATKRVHLSVAERLLKEFACSICRAVIKEPLTTPCAHNFCKTCLLGAYDSQSSIRERSRGGRTLRAQKIVKTCPSCPTDICDFLENPQINREMMELIETLQRKAVEEAKMTSDDAEECGDGDSEENDGDLVKGEDVSGLNEGEQDSADADANVEGSVKIVVEIKEEGKDDKRSKMGATEVVDVLVDEDAVKQTKKRKVDAEAGTNGGKRMKSSSTVEEVAVCVTPVKRSRKSGDMDDERNGSPAVSSGRRVTRSSVDDTGSADSPARRTRSRARADAGC

SEQ ID NO: 267707 - protein, 116 aa, Zea mays
  unsure (1)..(116): unsure at all Xaa locations
  Clone ID: MRT4577_175753C.1.pep
VSSAPQVEVTPRSCPVIPPPSPVETLVPPSQSSPPEEAVSSTPQAPVSSSPRAPVRSVPPLKSSPPRVVESAPPPTIXSSLPLAPLSSPAHVXEKTSRMXARVNSAAPSSTSSVPV

SEQ ID NO: 267708 - protein, 110 aa, Zea mays
  Clone ID: MRT4577_175754C.1.pep
LLEVTISVINREPIFLILLDVIVVFTELQRVGLVHVRPEGNVTVLLLLFHPLDVVKVLLGFNSARTKTYPLSYLHPFVRNGTTHFIRILTRVYVLVTNPTSKARYGDLNA

SEQ ID NO: 267709 - protein, 51 aa, Zea mays
  unsure (1)..(51): unsure at all Xaa locations
  Clone ID: MRT4577_175755C.1.pep
TEMEFTEAXSNMNDLVAEYQQYQDATAEDEEYEEEEEEEEETVIHEVLTDI

SEQ ID NO: 267710 - protein, 92 aa, Zea mays
  Clone ID: MRT4577_175756C.1.pep
MLQVRSYLEAESVSLLTVIQRHTRSIMRGWTPKAERVWIRAMVRQDSFLMLWTLFRQLPWRVETHPLRHQLLPGLLGTGVNNGVGPVGAGLV

SEQ ID NO: 267711 - protein, 131 aa, Zea mays
  unsure (1)..(131): unsure at all Xaa locations
  Clone ID: MRT4577_175757C.1.pep
DPKLSQGVWFDFQXPTHPSHYNIVLTINPNIHSKVPPPLDNTFEGVLNLGGEEDDCSQLLYNTHDTFHPLISDPNDYLARLLFXCILLCHYIPHLKYRLELTHLLRISNNVASFSGRDDHCRLTVPPILIF

SEQ ID NO: 267712 - protein, 54 aa, Zea mays
  Clone ID: MRT4577_175758C.1.pep
YSYIEYILVIHLNYTLYKSSFLHYNIKKGTPLTNSETNFFYSSTYLNYSNNFNP

SEQ ID NO: 267713 - protein, 40 aa, Zea mays
  Clone ID: MRT4577_175759C.1.pep
PNAPMRDYTNNLNAINLTSHGPSTKNKGTNHASKNFNHHT

SEQ ID NO: 267714 - protein, 142 aa, Zea mays
  Clone ID: MRT4577_17575C.1.pep
RNNVSKGSWECVYFGTCPAYWCFLFSGVTRVVPSPKVVCLRSLPPSCCFMAQWPLCALLCPMSGHHFFLYLLWTVFSKWMPLLVVPLHKKMHDLFALAKGGFGEVCQYETRASGASLLSLISFSYLPKKKKKKKKKKKKKKK

SEQ ID NO: 267715 - protein, 81 aa, Zea mays
  unsure (1)..(81): unsure at all Xaa locations
  Clone ID: MRT4577_175760C.1.pep
FXXXAGGKESCXRCTVXXRXXQXSTLAHRXWWRFLYSSREKEYRXDXHIVRDEDXNXXRTXXNXIXYIXTCSRPERTIKDX

SEQ ID NO: 267716 - protein, 43 aa, Zea mays
  Clone ID: MRT4577_175761C.1.pep
DTIKELGTGSKNTTIFIPHGPGHVKDISEQIRDGMMQASSSNV

SEQ ID NO: 267717 - protein, 54 aa, Zea mays
  Clone ID: MRT4577_175762C.1.pep
VPGTAALYPHSYGGYAFTESLGTPPQPIPVLLDTGSHLTWVPCTLSYECRNCFF

SEQ ID NO: 267718 - protein, 55 aa, Zea mays
  Clone ID: MRT4577_175763C.1.pep
LPSGWGSQRSPPPPLLLRLIRGSPYRHKAKDNVRRESRLHSRDSGLLLNLGRSPH

SEQ ID NO: 267719 - protein, 78 aa, Zea mays
  Clone ID: MRT4577_175764C.1.pep
CCFLCLLRGTQRESLFKKSTEFARLQLPRNMPYDTLLGQHKVGFAMHYYDGHILDVNFWHELCQFERHGLQTITRDNR

SEQ ID NO: 267720 - protein, 61 aa, Zea mays
  Clone ID: MRT4577_175765C.1.pep
KHGISYSIRDGIKQLGRSRYPAHHIGRFQPSHDNIGSAFKPYAFLGGLGGFLGELGFLVPP

SEQ ID NO: 267721 - protein, 50 aa, Zea mays
  Clone ID: MRT4577_175766C.1.pep
LVHPHAYQGVLYHFITSPRYILIECWGLVCFSVVFASGVDMHLANDSLSG

SEQ ID NO: 267722 - protein, 75 aa, Zea mays
  Clone ID: MRT4577_175767C.1.pep
GYIQAPIFWGPQGFSPLLKHVIGDGKTYPLKLSVGKKFNDWVGFLTTTGDTCTDRLKVYVWGGALKEPGPFFSFQ

SEQ ID NO: 267723 - protein, 348 aa, Zea mays
  unsure (1)..(348): unsure at all Xaa locations
  Clone ID: MRT4577_175768C.1.pep
MPPPLRCVLLAFVVVLSGFPRLAHPFTALESDQIARFQEYLRIRTAHPSPDYAGASAFLLHYAASLGLHTTTLHFTPCKTKPLLVLTWRGSDPSLPSVLLNSHIRAGPGRGDRKRXMDSVPAEPEHWAHPPFAAHRDPTAGRIYARGAQDDKCLPVQYLEAIRGLQAAGFAPARTIHISLVPDEEIGGADGFDKFARSEEFRALNIGFMLDEGQASPTDVFRVFYADRLVWRLVVKAAGAPGHGSRMFDGAAVDNLMDCVETIAGFRDAQFRMVKSGEKGPGEVVSVNPVYMKAGIPSPTGFVMNMQPSEAEVGFDLRLPPTEDIEQIKREXEEEWAPSHKNLTYELV

SEQ ID NO: 267724 - protein, 439 aa, Zea mays
  Clone ID: MRT4577_175769C.1.pep
MPPPLRCLLLAFVVVLSGFPRLAHPFTALESDQIARFQEYLRIRTAHPSPDYAGASAFLLHYAASLGLHTTTLHFTPCKTKPLLLLTWRGSDPSLPSVLLNSHMDSVPAEPEHWAHPPFAAHRDPTTGRIYARGAQDDKCLPVQYLEAIRGLQAAGFAPARTIHISLVPDEEIGGADGFDKFARSEEFRALNIGFMLDEGQASPTDVFRVFYADRLVWRLVVKAAGAPGHGSRMFDGAAVDNLMDCVETIAGFRDAQFRMVKSGEKGPGEVVSVNPVYMKAGIPSPTGFVMNMQPSEAEVGFDLRLPPTEDIEQIKRRVEEEWAPSHKNLTYELVQKGPATDVAGRPVSTATNASNPWWLTFEKAIASAGGELSKPEILSSTTDSRFARQLGIPALGFSPMTRTPILLHDHNEFLEDRVFLRGIQVYEHVIRALSSFQG

SEQ ID NO: 267725 - protein, 95 aa, Zea mays
  Clone ID: MRT4577_17576C.1.pep
YVSIAPSEALPSLHIDGMILTCWQLQGPRHMACVQCRDPRRERCPSGHPNGEVTSVSNAVVSSSSLVKSQDTVTCILISTALYSFFIAIHDLVLR

SEQ ID NO: 267726 - protein, 85 aa, Zea mays
  Clone ID: MRT4577_175770C.1.pep
LLYVWETILLPVLMRNSCKLHLTTHDKDLNLYAHATNWLNNHCLYHKIHNQDHYFMKNESQSSAPKPRMINGTFTDPEVHTARIK

SEQ ID NO: 267727 - protein, 77 aa, Zea mays
  Clone ID: MRT4577_175771C.1.pep
GCILLLQGSEQISSSVVVDQKRMNLKKKTRFVEQKIEAKNLELHQMLDVVHHRIEGLGEFQELIQRVARFPPPEQLE

SEQ ID NO: 267728 - protein, 88 aa, Zea mays
  Clone ID: MRT4577_175772C.1.pep
ILSHGKISHSMRLCVMLSGSRTLEDEDERQLFRWCKEGGLRLEVTACVAQGNGTHKQDGKQPQPSGDQIFRIGYGQYYFCFVFCWYGD

SEQ ID NO: 267729 - protein, 422 aa, Zea mays
  Clone ID: MRT4577_175773C.1.pep
MIRPGSKDSQNYDNNNQRVHPQPIDENMNQNGDSMDTVIGRIFNNISSLKSAYIQLQEAHTPYDPDKIQEADKLVIEELTRLSELKHAYREKHPKPIAASPQDSRLLSEIQEQQNLLKTYEVMVKKFQSQIQTRDTEITHLQQQIDEAKLRKSKLEKKLKQRGLLNRESEESDEEENYFSIELTPSLFTSAVDNAYQSIHDFSKPLINMMKAAGWDLDGAASAIEPGVVYTRRAHKKFAFESYICQRMFSGFQEESFSIKDSNISVSNEAFFHQFLAVRAMDPLDVLSQNPDSVFGKFCRSKYLSLVHQKMEGSFFGNVDQRNYVMSGGHPRTPFYQAFLKLAKSIWLLHRLAHSFDPKAKVFQVKKGSEFSDIHMESVVKDIILEDVAERPKVGLMVTPGFLIGTSIIQSRVYLSGAKCAD

SEQ ID NO: 267730 - protein, 193 aa, Zea mays
  Clone ID: MRT4577_175774C.1.pep
MASFGLTNVPAFFMYLMNNMFMDSLDKFMVVFIDDILIYSQSEEEHVDHLSKCEFWIHEVLFLGHIINREGLAMDPKKVHERNYPTHDMELVVEVHALKTWRHYLYGQKYDVYTDHKNLKYIFTQSELNMRQRRWIELIKYYELEIHFHPGKANVVADALSRKIQVNMMVGHSMSYELAKEFDRLSLKFLKST

SEQ ID NO: 267731 - protein, 74 aa, Zea mays
  Clone ID: MRT4577_175775C.1.pep
KEKFLPKEKVPFGFGGKPRVQRGFLAKNGRIGKKVVFPPSQGGDEPRKTSEGFYIRSGIPVGLKNPKIADGWVN

SEQ ID NO: 267732 - protein, 70 aa, Zea mays
  Clone ID: MRT4577_175776C.1.pep
EYPFYFIFILSIYKSSKERNILKKKKKKKKKKKKKKKKKKKKKKKKKKKKKKKKKKKKKKKKKKKKGGPF

SEQ ID NO: 267733 - protein, 64 aa, Zea mays
  Clone ID: MRT4577_175777C.1.pep
NKLWTLDSIEQTMAELIQLLNKLYPKHLRTPLTLISFPNECANITFLCSYVELLRSQLSIKIQH

SEQ ID NO: 267734 - protein, 240 aa, Zea mays
  unsure (1)..(240): unsure at all Xaa locations
  Clone ID: MRT4577_175778C.1.pep
RLQVLVRNSRVDPRVRPRVRTARTPRFLLLFCRSFRSLRGPQSRAYAALVPGVSQVDNGSDFLGKKPHRKHPGILHLPHVQLPQALADAAQLMLFERPMRSIEKQVQALTNYLWSRHLPVEPEELQRRAAYLEKKFLEKQDSAPTEEKLREAVLHALRKTTYHWQELSYSEELSLIYMAARLDGGFAAVFRAFHEIQARIPEFRPQTLMDXGSGTGSVAWAAHSTWGQSXREYVCVDSSA

SEQ ID NO: 267735 - protein, 61 aa, Zea mays
  Clone ID: MRT4577_175779C.1.pep
TCIVDFIIYLFTIKEKRPKAGFRIKYMFSSLMPCSFPGPAELADQHPQGNLVPVQYDNISK

SEQ ID NO: 267736 - protein, 47 aa, Zea mays
  Clone ID: MRT4577_17577C.1.pep
MALPSSKRSLSLNAAAVNGNGGGSALSRRDPGERSGRRADSPTGRRA

SEQ ID NO: 267737 - protein, 72 aa, Zea mays
  Clone ID: MRT4577_175780C.1.pep
SLALKLTHYWACKHRGAYRLTLALKPTSPNSLKGMKIELNAALLTRVKFIDKALGSHFVPTVSRIRIPHLVA

SEQ ID NO: 267738 - protein, 42 aa, Zea mays
  Clone ID: MRT4577_175781C.1.pep
HSDSTQVVRCSYLSQHQWHPAQLSNKRACSKGMGRAFRTRGR

SEQ ID NO: 267739 - protein, 159 aa, Zea mays
  unsure (1)..(159): unsure at all Xaa locations
  Clone ID: MRT4577_175782C.1.pep
PFAGLDVEWRPGRLPGRSPVPVLHICDYHRCVVLHIVKGDYIAHALLSVLXTRLYTFWGDGISXDVAYLLAAYGLWAASCMDLLVLAGDTLKVAELFHALLKTLWWQHMTVDMLKTHHMRPAPGHTPTLLKIPSLRTGAPTLSPSFMSAGDSTNATTTC

SEQ ID NO: 267740 - protein, 168 aa, Zea mays
  Clone ID: MRT4577_175783C.1.pep
WDPRGRPGRASLPRTAAVPLRFRAAGRSPVQCIGDGVYAANSTYQANLRRVAALLLAELLMPAPRRQRHPRWLPLRRLHRRGLPRNGESVPVPQGGLLYRSQLQCRTCRDSHLRDWRHLPTEHTDTSHGFGIGTSSNWICLAFLLAISRMAQPEKRQLDAFHPSFIWR

SEQ ID NO: 267741 - protein, 211 aa, Zea mays
  Clone ID: MRT4577_175784C.1.pep
MKNPWLLFLAPLLLAVPSSLPRTAAVPLRFRAAGRSPVQCIGDGVYAANSTYQANLRRVAALLLAEVSASPGQFYYTTHAVGYWPNRLLASSLCRRRDVNGTHVGYPCADCIAGAFLEMERACPYRREAFYIDRNCSVELAEIRIFGTGGIFQRNILIQAMASGLVLQAIGFAWLFFLLFQEWRSRKRGNLMHSTPLLSGDENVGSMSTKA

SEQ ID NO: 267742 - protein, 76 aa, Zea mays
  unsure (1)..(76): unsure at all Xaa locations
  Clone ID: MRT4577_175785C.1.pep
THRQPERESVLPTEDNVTLTAPGPMPKKSKYNTNHYEVLGVTNTPCXDXLKKVYTKADIKNHPDKDGYPIKLKELS

SEQ ID NO: 267743 - protein, 120 aa, Zea mays
  Clone ID: MRT4577_175786C.1.pep
HWVPRGRPGSHSRLPILDECNLRLFVVSIHLILFINIVPICSNITSLKPWYVYVSPCLFMLELCILHVVSTTNVRHVHHDAPRLYPRCSCIAVASFIQMDLQITIYINVPRASLISLYPP

SEQ ID NO: 267744 - protein, 70 aa, Zea mays
  Clone ID: MRT4577_175787C.1.pep
KLRFKLGAKRKKKPKENTLTPPPKTKITSQLNLQNRVLNLSCLLAQNNFPLQLGRSVNLKLPVFDWEMNP

SEQ ID NO: 267745 - protein, 60 aa, Zea mays
  unsure (1)..(60): unsure at all Xaa locations
  Clone ID: MRT4577_175788C.1.pep
PTRPTSTRSAPLTCFTTYDFLHQPRHHASYSINSFLLSTLQXXFSSYQQHSHLLPTFLLI

SEQ ID NO: 267746 - protein, 129 aa, Zea mays
  Clone ID: MRT4577_175789C.1.pep
GLYHARSSCGRSSMDSASVCESWPCLLNSLCRSWTPLLMHGLQVSRMAALLGACIVVLALGPVMQCPPGARVRSSPVIRVGRTRCAPRGQSPPGCKCRPFCRNSVHACALRCRGGFGRGSRSRRLPCSS

SEQ ID NO: 267747 - protein, 39 aa, Zea mays
  Clone ID: MRT4577_17578C.1.pep
WLAFVGGTIVFGGNPLPKDKEKPPFRLRGTTLAASGFEG

SEQ ID NO: 267748 - protein, 108 aa, Zea mays
  unsure (1)..(108): unsure at all Xaa locations
  Clone ID: MRT4577_175790C.1.pep
RPAALDELINTRHVRFRXLGALMGNWGLGNPTPSLTAIIHNHYKMRANNLSYNLDGMGVITDVIDIDLARXMLQASIADLAVVVSTEVVFFTRYHQKRGSMLIPNAFI

SEQ ID NO: 267749 - protein, 53 aa, Zea mays
  Clone ID: MRT4577_175791C.1.pep
SRIMESHSTVDLYPIIALVLRKNAMMICEYVALYKDHLGFQKSMKVWIYHVIP

SEQ ID NO: 267750 - protein, 137 aa, Zea mays
  unsure (1)..(137): unsure at all Xaa locations
  Clone ID: MRT4577_175792C.1.pep
MVKFLSSGQDMILLYGRIALTMATIIWVFXEGTRHRSYSHCLVSGLASYPKNMIRTDSTKNMAKKSRVXCFITFSYFTLLMSSRYAIDNNFIDVTTVRVDAISTRDXKILACNATTASLDERFKTGKNRWFFTMLRF

SEQ ID NO: 267751 - protein, 404 aa, Zea mays
  Clone ID: MRT4577_175793C.1.pep
IRHDACGQNGRPAEALTLCRNMAAEGIAPTIATLVSAISAAAVASALPRGRELHGYGWRRGFGSQDKLKTSLLDMYAKSGWVMVAHVLFEQLLHRELISWNAMICGSEARNSARDAFELFSRMRSEAQVMPDHITFVGVLSACNHGGMVQEAKEVFDLMVTVYSIKPTVQHYTCLVDVLGHSGRFKEASDVIKGMLVKPDSGIWGALLNGCKIHKNVELAELALQKLIELEPEDAGNYVLLSNIYAESGKWEEAARVRKLMTNRGLKKIIACSWIELKGKSHGFLVGDASHPRSDDIYEELERLEGLISQTGYVPDTTPVFHNVEDDEKRNMVWGHSERLAIAFGLISTPPRTKLLVTKNLRVCEDCHVVIKLISQIEQREIIIRDVNRYHHFVNGECSCKDHW

SEQ ID NO: 267752 - protein, 57 aa, Zea mays
  Clone ID: MRT4577_175794C.1.pep
HSVLDHEIEVGALPIHADLSVELVARSPLLVLHETALTFSHVAWCMSPTSLPLHYNA

SEQ ID NO: 267753 - protein, 98 aa, Zea mays
  Clone ID: MRT4577_175795C.1.pep
THASAGTYTDTHHLIFKNNTLPSGRLYIQTRPSHLIPLLNSPQTSINLPSSFTPITIKTLSLPTLISMYYIHHIFYRLFIKNPNTNYPFKQIHNLNVP

SEQ ID NO: 267754 - protein, 201 aa, Zea mays
  Clone ID: MRT4577_175796C.1.pep
MSNYKSKLFKTIAAKPSAIEESVAQALFEVENSVADLKDLLKDLYVAGVREIETTTKGKKKNVLIVYVPYASLRLLYRVHPKLVPELEKRLKTTVLVVAKRTIQSKWIKSHRSQQRPRNRTLTSVYDAVLEDLCQPAAIIGRRYRHKLDGSVIQKIYLDQHEEPAVREKVDSIVSVYKKLTTRDIQIEFKPEWHFYTLKKK

SEQ ID NO: 267755 - protein, 168 aa, Zea mays
  Clone ID: MRT4577_175797C.1.pep
IKVAAGGLLFIDHPYPGALLFINVARNDKVGYGARLAGARGACGCHSLMLCNITEPNRVGRGRGEGYTVTSDELWSANPGRLPHAILMFPQVDMDRPHVVHFVISEFGYVRKKMWLVTIDMSTRRVESFSQYTNGREDAIGTEGAYLTKVRSGCPMPFLPSEFSKYLC

SEQ ID NO: 267756 - protein, 76 aa, Zea mays
  unsure (1)..(76): unsure at all Xaa locations
  Clone ID: MRT4577_175798C.1.pep
MAQTTDLAVEAQEXRLGLPGGSGGGEPAPSGKAEQLFHRPRAEGLRREQRPEDGAGASGRRGRGRGGGGPRSRWCP

SEQ ID NO: 267757 - protein, 52 aa, Zea mays
  Clone ID: MRT4577_175799C.1.pep
KCEDGLIDVFLSSTVITILKGHLNNHSGVILFGANHSWPQDQNIHFIADFNH

SEQ ID NO: 267758 - protein, 73 aa, Zea mays
  Clone ID: MRT4577_17579C.1.pep
HSHTNSWIFTFSLLLTARLPKPTRLTVPHASTFSRLPSTSTYSFVFSVSSPIIPLNFHNSHHSRTSPPLPLYS

SEQ ID NO: 267759 - protein, 192 aa, Zea mays
  Clone ID: MRT4577_1757C.1.pep
QQVEKNPISERHQFLFLHLIHQPSVVQQVCVRNDGARRTQGRDTGRESVGRRSCLQSASNPSRAVSWIHRHRSRFEFCRVSRCIRDRMAVVDLRPSAPCARRRRRRTHRDCGGARRHATQKVTHNARIGGEGSVLPVRRRWGGSPSAASSPPAPPALRRLACGRVQSGRDETRIGVGPWREAKLQTGAILIP

SEQ ID NO: 267760 - protein, 109 aa, Zea mays
  unsure (1)..(109): unsure at all Xaa locations
  Clone ID: MRT4577_175800C.1.pep
PSRLVFYKGPSPPQRGANQNKPGPEPRGPQPGQKGGTEEKSDPXQKNKQPPHTETKKKKPGEQKEKPNPQKXGGAPTTSGPAKKPALPAEKKNRPTPKKRGHPAGKGVR

SEQ ID NO: 267761 - protein, 73 aa, Zea mays
  Clone ID: MRT4577_175801C.1.pep
YGGSLLSCTFSCASSLASHCSHRSFASFRRFPFFCVLCSFFFFFFIFFFFFFFFFFFIFFFFFFFSIITINAS

SEQ ID NO: 267762 - protein, 41 aa, Zea mays
  Clone ID: MRT4577_175802C.1.pep
QILLSLRSNAYTLKNLNVPLLPCKIFTITMSISYLFRYISL

SEQ ID NO: 267763 - protein, 166 aa, Zea mays
  unsure (1)..(166): unsure at all Xaa locations
  Clone ID: MRT4577_175803C.1.pep
MNGRLGDFGLARLYDHGGADGPKTTHVVGTIGYIAPELGRTGRQXDHDGALLLVDWVLSHWQNGSLTETVDIRLQGDYDSDEASMVLKLGLLCSHPFVDARPTSMRQVTQYLEGHVALPDFMPPCHILPSSMMIPGQSEGFHMYNNTSSQIFKASNGSMSSLSGGR

SEQ ID NO: 267764 - protein, 680 aa, Zea mays
  Clone ID: MRT4577_175804C.1.pep
MARPLFLVYQLVSLCLRLTNLCSGDDQQFVYSGFTGTNLSTDGVAAITSDGMLELTNGTLQRKGHAFYPEPVRLREPANGTARSFSTSFVFGILSDHVELSAHGMAFVVAGSRDFSGALPSGYLGLLNVQSNGNSSNRLFAVELDTMQNDEFQDINDNHVGVDVNSLHSVQSYYAGYYGGGGFRNLTLISGEAMQVWVDYDAEVAQINVTMAPLSMAKPARPLVSARYNLSKVLTDDGPAFVGFSAATGGTLKSRHYVLGWSFSIDRPAPAIDLSNLPKLPRVSAKDRTRTLEIVLPVATAAFLLAAGMAILLLVRRHRRYAELHEDWELEFGPHRFSYKDLFHATDGFKNSNLLGIGGFGRVYKGVLPASRTEIAVKRVSHESKQGMKEFISEIVSLGRLQHRNLVQLLGYCRRKGELLLVYDYMPNGSLDKCLHDREGRQHALDWALRVQIIKGVASGLSYLHLDWEKVVIHRDIKASNVLLDGDMNGRLGDFGLARLYDHGGADGPKTTHVVGTIGYIAPELGRTGKASPLTDIFAFGIFVLEVACGRRPINKQLTQDGGALLLVDWVLSHWQNGSLTETVDIRFQGDYDSDEASMVLKLGLLCSHPFVDARPTSMRQVTQYLEGHVALPDFMPPCHILPSSMMIPEQSEGFLMYNNTSSQKFKASNGSMSSLSGGR

SEQ ID NO: 267765 - protein, 154 aa, Zea mays
  unsure (1)..(154): unsure at all Xaa locations
  Clone ID: MRT4577_175805C.1.pep
MVKLIETFAVFCKSQRTAYREKVLIEAEKQFLHDFTFFKEKLSVDFGQIVDVECIDSTCQVLCDKVRGCCSICKSRCTEAIIDSLKILAEAMTIKHQKFLNSNNLLAKDMDIKSDEKATKIDTNVQPVDVKSNEKXAGVDIXEASHGKAHVXXS

SEQ ID NO: 267766 - protein, 134 aa, Zea mays
  unsure (1)..(134): unsure at all Xaa locations
  Clone ID: MRT4577_175806C.1.pep
LSPPCARLKVHELRXKSRXDLGVQLXELRSDLSFLRVAKVTGGAPNKLSKIKEERTSIWRALTAFLPKQXTSCMEAYNKKNLLPLDLRPKKTLAIHQRLTKHHFCLETVREKNRDKYLPVRKYAVKAYVRTGTC

SEQ ID NO: 267767 - protein, 59 aa, Zea mays
  unsure (1)..(59): unsure at all Xaa locations
  Clone ID: MRT4577_175807C.1.pep
RLARMDGPTGLQSNPAQLSGGRAYSSAXCCGVRWSGRLASQLLRSLSRGSTRAHPIXAP

SEQ ID NO: 267768 - protein, 152 aa, Zea mays
  Clone ID: MRT4577_175808C.1.pep
RAAYREKVLIEAEEQFLHDFTFFKAKLLVDFGQIVDVECIDSTCQVLCDKVRGCCSICKSRCTEAIIDSLKILVEAMTIEHQKFLNSNNLLAKDMDIKSNEKATKNDTNVQPVDVKSNEKGVGVGIVEASHGKGHVVITKPLITVPIQLEAP

SEQ ID NO: 267769 - protein, 230 aa, Zea mays
  Clone ID: MRT4577_175809C.1.pep
MCPSTESVDIIAGSHRILDTPLEDALTVPQGSLSGASAADRTSQYGEHNDDPSKLATHQENLVVSDINVPPNSSCSKAIDDIVEFGDMCDVQIEEERVTKFQPKAQTKLLKEIAKSRKTNQKVETSTVDVVTQNGKGNNIQTRLHGDQVQDPKSHESVQIPDSEELLATDNSKGCNLAKLNNVLEESVQEETIAKFRSDLQPKPRKASSHVAVIKINGAACAPIVGVCDS

SEQ ID NO: 267770 - protein, 56 aa, Zea mays
  Clone ID: MRT4577_17580C.1.pep
FNNVLEGICSITFFLDRLVPHYNLTKHLNIRSLGPGTDEISSDIMCHKRIIRTRGR

SEQ ID NO: 267771 - protein, 142 aa, Zea mays
  Clone ID: MRT4577_175810C.1.pep
MDSLDVVSVKTEVIKGLDGRSISGRKLDVARPSARSIRRHRSAAEAAKYGDKSVYFDLDDIGNTTGQRDLYGSDAPSAYNPLQSKLFETFADPFTKRGLLLKFLLLGDDSLLDYVRAAASPDLLPIKKGPQEPPQPGPGGRI

SEQ ID NO: 267772 - protein, 62 aa, Zea mays
  Clone ID: MRT4577_175811C.1.pep
SQASCIAWGVGVALPTPLVHSAIHIILVRHQPFQCGTIRSFLVMKLHDSPFIPNNHNVLHLV

SEQ ID NO: 267773 - protein, 172 aa, Zea mays
  unsure (1)..(172): unsure at all Xaa locations
  Clone ID: MRT4577_175812C.1.pep
MASLAAVSVKPVAIKGLAGSSISGRKLAVARPSARSIRRPRAAAVVAKYGDKSVYFDLDDIGNTTGQWDLYGSDAPSPYNPLQXMMFPTHSIPCGNXLARVIXLSAACVLHVXSKFFETFAAPFTKRGLLLKFLLLGGGSLLAYVSASASPDLLPIKKGPQEPPQPGPRGKI

SEQ ID NO: 267774 - protein, 176 aa, Zea mays
  Clone ID: MRT4577_175813C.1.pep
YKKALEVSNNKSARAMRSLARSAYNRNDFHTSKILWESALSLNSLIPDGWFAYGTAAWKDKDLDKAVDAFSRAVQIDPENGEAWNNIACLHMIRGKSQAAVQAFREAVKFKRNSWEIWENYSKVALDTGNIRLTLEALKTVLNLSSNKQFSVGILDKVMTMLEEQSPDFVDTHEAS

SEQ ID NO: 267775 - protein, 142 aa, Zea mays
  Clone ID: MRT4577_175814C.1.pep
QWLPPPWRSPPGDGRYPHQGGLLRRGPHHHAQDRGQAQGGGARQALVRPRAGGVPCALLRLGHTTGQRDLYGSDAPSPYNPLQSRFFETFAAPFTKRGLLLKFLLLGGGSLLAYVSAWASPYLLPIKKGPHEPPEPVPRGKI

SEQ ID NO: 267776 - protein, 143 aa, Zea mays
  unsure (1)..(143): unsure at all Xaa locations
  Clone ID: MRT4577_175815C.1.pep
MASLAAVSVKPVAIKGLAGSSISGRKLAVARPSARSIRRPRAAAVVAKYGDKSVYFDLDDIGNTTGQWDLYGSDAPSPYNPLQSKFFETFAAPFTKRGLLLKFLLLGGGSLLAYVSASASPXDLLPIKKGPQEPPQPGPRGKI

SEQ ID NO: 267777 - protein, 568 aa, Zea mays
  unsure (1)..(568): unsure at all Xaa locations
  Clone ID: MRT4577_175816C.1.pep
LSGVVPAASVFASGTAEFLSIAQQADVANKALQDNIRKLXETHKTTVSALVKTDTHLNEALSEISSLESGLQDAEKRFVYMQELRDYISVMCDFLNDKAFLIEELEENIQQLHEKRALAISERRAADLADESGVIEAAVSAAVSILSKGSSSTCLSAASNAAQAAAAAARGSSNLQPELDEFGRDINMQKRMDLKRREEDRRQRKTQSETKRLASAAKNKDIKKIEGELSTDESDSESTAYVSSRDEFLKAADHVFIDAKEEYSSLRIVKDKFEGWKAQYPSAYRDAHVALSAPSVFSPYVRLELLKWDPLHETTDFFDMDWHKVLFDYGVQDDESPSGSNDSDVVPVLVEKVALPILHHRIERCWDVLSTQGTRKAVEASRMVIGYLPTSSKDLHRLLAAVSSRLTQAVADLSVPAWGSMVTRTVPGASQYAAYRFGVAVRLLKNVCLWKDILADHVVEKLALDELLRGKILPHMKSIILDVHDAITRAERVAAALSEVWPKQNQKLRPFADLVAELGNKLERRHASGISEDETRGLARRLKNILAVLNEYDKARAISKAFHLREAL

SEQ ID NO: 267778 - protein, 44 aa, Zea mays
  Clone ID: MRT4577_175817C.1.pep
AGTRAGAGPELYCRNDEPNYSEAGLNYWRDELNLLAHIGYIYGG

SEQ ID NO: 267779 - protein, 128 aa, Zea mays
  Clone ID: MRT4577_175818C.1.pep
FKDLVNDVAMQIAACPNVEYVSVADIPQEMVAKEKEIEMGRDDLGKKPANIKEKIVQGRIDKRLKELSLLDQPYIKDQNLTIEELVKQAIAELGENIQVRRFIRFNLGEGIEKAETNFAEEVAAAAKG

SEQ ID NO: 267780 - protein, 42 aa, Zea mays
  Clone ID: MRT4577_175819C.1.pep
MFGYDINKKGLPTGQIKVPEALGLVVGIVYLVIAIIFQQFHY

SEQ ID NO: 267781 - protein, 98 aa, Zea mays
  Clone ID: MRT4577_17581C.1.pep
PSPSGRALRPLLLARSISPPTMRKQKYHIKIALTGDVHSRQSTSRGHLIYKLGRIDKRVLQTSENEAAAMHKRSFKYAWVLDKLKAQRETRITIDIAL

SEQ ID NO: 267782 - protein, 102 aa, Zea mays
  Clone ID: MRT4577_175820C.1.pep
AKSSLYGRRLKYTLPIVPHYSTASGPSAYCKDVGCLSRSLVEVRIRLGEGTSRCRVYHRHPCREKCNNALSCSPFLRVQPTIVVIPPSTGDMVGRRKISRTT

SEQ ID NO: 267783 - protein, 204 aa, Zea mays
  Clone ID: MRT4577_175821C.1.pep
LGPRAGREFSLIFCNYRRNIHGMLNAIAWGVLIPTGAIIARYLRVFESADPAWFYLHIACQCSGYVLGVAGWGLGLKLGSESAGVTYQPHRSIGIAIFCLATLQVFALLLRPDKKNRYRLYWNIYHHSVGYSVIVLGAVNIFKGLDILKPASGYKTAYIVVLATLGGVALCLEAITWPIAIRKRRRNAADKASNGNGNGWQQGA

SEQ ID NO: 267784 - protein, 63 aa, Zea mays
  Clone ID: MRT4577_175822C.1.pep
GRISFTPAVGVGLRGGCSNSSSQKEEETSGEAASGGGNATVITNFCIFRRCRCSDSFGGDYNG

SEQ ID NO: 267785 - protein, 384 aa, Zea mays
  unsure (1)..(384): unsure at all Xaa locations
  Clone ID: MRT4577_175823C.1.pep
MARLLLLGAAVLLLASAATAQDCLSATFSGGRTFGRCNNLPSLSASLHWTYHPENGTADVAFRAPSDASGWVAWGINPDRGGSMGGSSVFVASPSQDGSGAVSILMTHLESTSPSLTNNTLKFKVPVGPAAEYSNGAYTIFATVELPGNSTQQFTVWQAGGXSNGAISPHPTAPANLASTQRLDFLSGSSTAASNSKLHRRNIHGMLNAIAWGVLIPTGAIIARYLRVFESADPAWFYLHIACQCSGYVLGVAGWGLGLKLGSESAGVTYQPHRSIGIAIFCLATLQVLALLLRPDKKNKYRLYWNIYHHSVGYAVIVLSAVNIFKGLHILEPASGYKTAYIVILATLAGIALCLEAITWPIAIRKRRRNADKASGGNGWQQGA

SEQ ID NO: 267786 - protein, 92 aa, Zea mays
  Clone ID: MRT4577_175824C.1.pep
QHGFFPFVTGGPRVPQGGLGAPSPQLFIVREPPSRGGETSNSTGAVKAPQKNFPRGKTGAQFFKLPPPPPKKILGQKFLFSFLEGRGSFCFF

SEQ ID NO: 267787 - protein, 90 aa, Zea mays
  Clone ID: MRT4577_175825C.1.pep
METVAASYGGGGEKRELQQQNKQAAAGGCGHQHFQMPLHYPRYRREDYEGMPEWQLDRLLSEYGLPVAAGSVQQKRAFAMGAFLWGAGDN

SEQ ID NO: 267788 - protein, 51 aa, Zea mays
  Clone ID: MRT4577_175826C.1.pep
VGIPFPYVSCFMIRDFFKHMYSKLGQQHHSQQSLVNMHVVVIIISVNSGIA

SEQ ID NO: 267789 - protein, 167 aa, Zea mays
  Clone ID: MRT4577_175827C.1.pep
TPFILVSSLLKPPNLYPFFFPLVFFFELLADYHFPQETPISLISPNFYTPPYKENLFPFKFPSRISRRFFSFSLGRKRGPPPPFFSKARPFRAHPGGKHFQVGNFSWPPPLFKNPTPFLKLAPPKPKFPFEINPLLTSFFKKKKKKKKKKKKKKQKKKKKKKKKNKP

SEQ ID NO: 267790 - protein, 91 aa, Zea mays
  Clone ID: MRT4577_175828C.1.pep
VGPWKVPPGGGFDFAPASRGVGASLGKRALNQGCPGPWGFFNKVGYPPFFPWACSGNSRGLVAPCWGLFFGIFMGLPIPLWGFCGPPREQW

SEQ ID NO: 267791 - protein, 119 aa, Zea mays
  unsure (1)..(119): unsure at all Xaa locations
  Clone ID: MRT4577_175829C.1.pep
KALSSRKEALDRRKIIFSRAKQXSQQYDNPXKELVAIMREARMKGAFYMMPKAKLLXYVESIRGINAXMHPKTKMILAILRXLKHILNGAFLTVNMAPINMLLRLEPXVAYGYPNLNSV

SEQ ID NO: 267792 - protein, 114 aa, Zea mays
  unsure (1)..(114): unsure at all Xaa locations
  Clone ID: MRT4577_17582C.1.pep
PLAARADSDVASPASTARCQLSVTGLVAVHXPAGSGTVAGRLHRSYQSPHLCAEGLAYRRTKYRPRXASNLLLCHPPHASRCSSPTSAVSIGLRCLSTNTIMWTRAMFNIKSQC

SEQ ID NO: 267793 - protein, 82 aa, Zea mays
  Clone ID: MRT4577_175830C.1.pep
RFYVHLLVTDVRVLWVVASPSSESSLGPSTASTCLPHLAAAESEGTNYNGWALPCASSATAVQIRVLEGRPGRVGVARIRIR

SEQ ID NO: 267794 - protein, 127 aa, Zea mays
  unsure (1)..(127): unsure at all Xaa locations
  Clone ID: MRT4577_175831C.1.pep
ELVHCHVKEDVLTAAPRLFQCQELGKNINLKELEFRLENWFCRTKLFLKVLIQRSEMSELSMWMDFHAAKTHLFTVALLGDKQVLVRGHMSWPILDSDHDKGDSRLTRVXDVCIVDLNIIACVADVS

SEQ ID NO: 267795 - protein, 189 aa, Zea mays
  unsure (1)..(189): unsure at all Xaa locations
  Clone ID: MRT4577_175832C.1.pep
MTNGYLFREXIGAQFTGVRFSDVPVNTGVSSHFILAFAIDYLASQQSKPTPTNGVFKPFWDTGNLTPAAMAAAKAAHPNLSIMVSLGGDTVQNTGVNATYAPTSVDSWVANAVSSLSAMINQYGLDGVDVDYEHFGTDVDTFVEGIGRLLTQLKARFPNIRTSIAPYELPVNQKYYQALWRKYSGVIDY

SEQ ID NO: 267796 - protein, 61 aa, Zea mays
  unsure (1)..(61): unsure at all Xaa locations
  Clone ID: MRT4577_175833C.1.pep
ERIYGLGPGPKVKVLQQLQQMLQPQGLKLPFIEGXLAALKNVIKKPALXNWNLXLVKWGFN

SEQ ID NO: 267797 - protein, 98 aa, Zea mays
  Clone ID: MRT4577_175834C.1.pep
KGVPAFHPRYRPPLFPLFFSLKPISRPGGATLLKGESRIFPRSGPFLFQAWGGPPLKAPLFYVVLGGEKGGPYRATGFIGGGLGAILFFHLFRGGGRG

SEQ ID NO: 267798 - protein, 90 aa, Zea mays
  Clone ID: MRT4577_175835C.1.pep
AQPLQQFPAACVSRPRSRVVALVTSCGAPSAVAPRSASPRGALTPGYGTRVWCRVPQFLWWRRGSPGGRFGFPGGGETTPAVEGSYQLHE

SEQ ID NO: 267799 - protein, 52 aa, Zea mays
  Clone ID: MRT4577_175836C.1.pep
LILSGLHPSIPLHATPTPHRPCKHAAHFSSDSPRTAPVRTLCELYVLRMNRR

SEQ ID NO: 267800 - protein, 91 aa, Zea mays
  unsure (1)..(91): unsure at all Xaa locations
  Clone ID: MRT4577_175837C.1.pep
SPIKGSYPFTCWVWNFLSQFCTFGPPSICNNGTCFPVLVFLWASGVGLFRFFLKHIKIFRGCIFNYYSNPRPLLGVVFFSXGKKKKKKPSP

SEQ ID NO: 267801 - protein, 75 aa, Zea mays
  Clone ID: MRT4577_175838C.1.pep
SRWAFLRTVSVSSASALSPMSGARCTRADAPSMADRAFYPTSRISSILLNVTDIPRALSTVLAPCLYNCMRALTT

SEQ ID NO: 267802 - protein, 113 aa, Zea mays
  unsure (1)..(113): unsure at all Xaa locations
  Clone ID: MRT4577_175839C.1.pep
MGARGRCSSPASRTQHQPHVPFSRAEGLLTHAHDIPVVXHAEXALIVFPTNGPLYDYSSHSTMARILHRYQRHSSEDTAVLXPSIEHQANSAAAYVRLKSKLDAVQKTHTHLL

SEQ ID NO: 267803 - protein, 77 aa, Zea mays
  unsure (1)..(77): unsure at all Xaa locations
  Clone ID: MRT4577_17583C.1.pep
MGIDLVAGGRNKKTKRXXPKSDDVYLKLLVKLYRFLVRRTKSNFNAVIPRGIFIAKPXAHQVLNRRRVKIXEGQEKN

SEQ ID NO: 267804 - protein, 58 aa, Zea mays
  Clone ID: MRT4577_175840C.1.pep
KIMPHGPQCTATVSNVKGPLFPPPPPGAVPKEVNNDPAPGVWTLERMLRIKIHMLCSM

SEQ ID NO: 267805 - protein, 103 aa, Zea mays
  Clone ID: MRT4577_175841C.1.pep
KYWWWPLFKKFGPPFSQDMVFAPGIPIAHSPFYSVLGPRPFPHESFPSKSSFSPPPPPVINFYAYPPLFKSSQFCLHLYGSDLHISLFPLHILNEPPRGGVSP

SEQ ID NO: 267806 - protein, 91 aa, Zea mays
  Clone ID: MRT4577_175842C.1.pep
STSVLSSITFTPTVLHCSMATVIGLCLRLKLMQNFPPHFKVDIKVAPGSLANEESVNKQLNDKERVAAALENPNLRQLVDECLCFNDPYSR

SEQ ID NO: 267807 - protein, 64 aa, Zea mays
  Clone ID: MRT4577_175843C.1.pep
AESRVAQRPHRKVPAASGERLSTPSLLYLSGADIHTPRRRRRRITHSLAPGLCFCRPTVNDSLY

SEQ ID NO: 267808 - protein, 98 aa, Zea mays
  Clone ID: MRT4577_175844C.1.pep
VTCFFLPDALIPWIAVLWPWSGMSSLRAANLSRGVGRFFSQGGRAGFPTGPSPLGAWLFFLVGSPFLPPGFCALRSRLLIFVILLLWLVSLCIYAFPS

SEQ ID NO: 267809 - protein, 162 aa, Zea mays
  Clone ID: MRT4577_175845C.1.pep
MTVGMINANPVVHERPERASHPHAADVLDPLDVFGRVLQSSPHTVRDIKDPEHPYSLEQLSVPSEESVSVDETLGRIQITFTPTVQHCSMATVIGLCLRLKLMQNFPPHFKVDIKVAPGSLANEESVNKQLNDKERVAAALENPNLRQLVDECLCFNDPYSR

SEQ ID NO: 267810 - protein, 114 aa, Zea mays
  unsure (1)..(114): unsure at all Xaa locations
  Clone ID: MRT4577_175846C.1.pep
MCYCLIQNXPYPKXSSYCRDDPDPKIRILAMLEMNSKXGVHDVPXVCSLLLSXQANRIEXKSLLMAALTITGTVTKNCXKDASPIRTRVNPLHALRINKMLSSTGADRLKTAMK

SEQ ID NO: 267811 - protein, 163 aa, Zea mays
  Clone ID: MRT4577_175847C.1.pep
MTVGMINANPVVHERPERASHPHAADVLDPLDVFGGLSWCGASDTVRDIKDPEHPYSLEQLSVLSEESVSVDETLGRIQITFTPTVQHCSMATVIGLCLRLKLMQNFPPHFKVDIKVAPGSLANEESVNKQLNDKERVAAALENPNLRQLVDECLCFNDPYSR

SEQ ID NO: 267812 - protein, 66 aa, Zea mays
  Clone ID: MRT4577_175848C.1.pep
SQEGADPLSITSTLNTIIGHDRQYTSNWWVIRRDPPPPDVKHTFITKGPKRFKASDSLQTKVLRDM

SEQ ID NO: 267813 - protein, 335 aa, Zea mays
  Clone ID: MRT4577_175849C.1.pep
MKSMGSRDKLAAASSPRRVLLVVFAFCFAFATFLTFLYTTSHFTTAPGSGSGSIAASTTTTTTTTSGSAGGGGGQGQAGPESVSKRLPVPVFEALVHFASISNATHRMSDTDIRAMSSVLRARAPCNLLVFGLGAESPLWLALNHGGRTVFLEENEFYVKYLEPRHPGMEAYDVSYTTKVRDFRDLLAAARAARAKECRPVQNLLFSECRLAINDLPNDLYDVAWDVVLIDGPSGWNPNSPGRMPSIFTTAVLARSGATAAKGPTDVLVHDFQFEVEQVLSREFLCDENRVAGSGTPSLGHFVIRGGGAGAGDAFCSAQEDGSSGEKTRRRRSRK

SEQ ID NO: 267814 - protein, 108 aa, Zea mays
  unsure (1)..(108): unsure at all Xaa locations
  Clone ID: MRT4577_17584C.1.pep
SKNGLPPPSAHHHAAPPPPPPLPPPPARPPDPXPRPPTPPPPRPRPRILSPPXPISPPPRPPPLAAAPXPPPAATTTPEDRGPSRRTPEIQTPSPMWTPPPPSPAKRR

SEQ ID NO: 267815 - protein, 139 aa, Zea mays
  unsure (1)..(139): unsure at all Xaa locations
  Clone ID: MRT4577_175850C.1.pep
MVVHRFHQXYQVVGRALPTLTDDXIRXYRMMLRATNEAVAKTNFWYFLRKLNKVNNNSDLRLDMNEIFERNLCTINNXAXIWLYYRIKTDYHYMYRDDRDTTLNDAEHQMHNEMGSSYSLRSPCMQIIETMTIHFKLCK

SEQ ID NO: 267816 - protein, 79 aa, Zea mays
  Clone ID: MRT4577_175851C.1.pep
GYKIFWLGRCLIICIMCIHKKKRKKENHCCITIFEMVRILSSYFLYTCNMLPLKATKDNLRDRNSLPDRLALYNPLSFI

SEQ ID NO: 267817 - protein, 96 aa, Zea mays
  unsure (1)..(96): unsure at all Xaa locations
  Clone ID: MRT4577_175852C.1.pep
VPPMKVNAMRFSQTARAIIVNAGGECFTFEQLAXLSAPLLRNRXLFSGPNNARQLVRHFGKALGVSHNHNXPYVRSKARKFQKCSWQSVSAVGCKV

SEQ ID NO: 267818 - protein, 86 aa, Zea mays
  Clone ID: MRT4577_175853C.1.pep
ASNDLASASRGLRLGKNLIMRPGWVGTFGTTLCSMSNHLEELLHISFSTLYFVSLVVVLAITTMGRCSVLCLNNNLSVQFQPKKEN

SEQ ID NO: 267819 - protein, 107 aa, Zea mays
  Clone ID: MRT4577_175854C.1.pep
ILPKFGKNSTTHYPNSFLNKFLLYPKNIENSFLNKVLQINYFSLQKNKKGLDGTQGPIFVGTGYVLKKHALFGYEAPTGTKPSNKKCNWWPKTCCLGWGSKRKCSKA

SEQ ID NO: 267820 - protein, 397 aa, Zea mays
  unsure (1)..(397): unsure at all Xaa locations
  Clone ID: MRT4577_175855C.1.pep
MAMRPRAALALSLAAGVPLVLLLLLLAPGARADDGSGGCGAAGGGEAAPGDRARARALKIAAFFSILVCGALGCCLPVLGRRVPALRPDRDVFFLIKAFAAGVILATGFIHILPDAFEKLTSDCLSGGPWQDFPFAGLGAMVGAIGTLVVDTVATGYFTRVHFKDSAAAXWAPPPSGDEEKQHXQAASAPHVDDGADGDGHGHGGHVHMHTHATHGHSHGASALVAAVGGAEGDKEHALRHRVIAQVLELGIVVHSVIIGISLGASQDPSTIKPLVVALSFHQMFEGMGLGGCIVQAKFKLRSIVTMVLFFCLTTPVGIVVGVGISSVYDEDSPTALVVEGVLNSVAAGILVYMALVDLLAEDFMNPRVQSRGKLQLGINASMLVGAGLMSMLAKWA

SEQ ID NO: 267821 - protein, 40 aa, Zea mays
  Clone ID: MRT4577_175856C.1.pep
KCVIDAAAVADLVVSVKSVALPQLGIAVASVSGSIDLRID

SEQ ID NO: 267822 - protein, 69 aa, Zea mays
  Clone ID: MRT4577_175857C.1.pep
RAPSPRSKNCRKKKCGHNNEVIKLCFHLPSKCSVSTPILLMFLDLLFYLNAYIVCRLDNQKNITPRLDH

SEQ ID NO: 267823 - protein, 51 aa, Zea mays
  Clone ID: MRT4577_175858C.1.pep
GGRLNAHYAQVAILVHLNKQTLFTLLQMNISLFTDCSYYSPTMYSGRSGSG

SEQ ID NO: 267824 - protein, 242 aa, Zea mays
  unsure (1)..(242): unsure at all Xaa locations
  Clone ID: MRT4577_175859C.1.pep
TPAGSGPEFPGRPRVRKEEVTHYCKTCQRLVCQLCRVRRTHSGHKITPVLSAYQALKDKLTKSLAYILGNQDTVQTQICELEETIRHTEVSGQQAKEEVSQLVRGLGAVLEEKRASLLQAIEECQQERLSRLSAQIHEHQSLLDGSGLVGYAQEVLKETDQPCFVQAAKQLHNRIARATEALQTFRPAASSSFRHCQLDVGREMKLLTELSFLRGCGHRGLCSGAPQCPRRPSXTPNAPLPM

SEQ ID NO: 267825 - protein, 53 aa, Zea mays
  Clone ID: MRT4577_17585C.1.pep
THLFDSAVNCLSIFECHEAKAPVAVCVPLQHDLQVETLMIVINVGKINSYQPK

SEQ ID NO: 267826 - protein, 61 aa, Zea mays
  Clone ID: MRT4577_175860C.1.pep
DQKTPLVLAPPPLNFGTVDKPGKTALSTSLQEKFPGFVSYREKKMLFFKKREVKISALCFH

SEQ ID NO: 267827 - protein, 74 aa, Zea mays
  Clone ID: MRT4577_175861C.1.pep
PSTLSKALVECYRAINECLRHSTKHWQWINAVYIAFCTWLTTIYSTLVYYCTGSRREPMELSMELSLWDHQASL

SEQ ID NO: 267828 - protein, 48 aa, Zea mays
  Clone ID: MRT4577_175862C.1.pep
DLYVCLMIQNISDYTKNSYELLFFHIFILYLKWIDICSVFDSNILQIL

SEQ ID NO: 267829 - protein, 74 aa, Zea mays
  Clone ID: MRT4577_175863C.1.pep
FPKLFPPLLFWEKFANSNPFFPPSQVSKGKLKSLGLDFFPLEPGVKEPLQSFKKKGFPIFLLNQPLKNKGFCTT

SEQ ID NO: 267830 - protein, 39 aa, Zea mays
  unsure (1)..(39): unsure at all Xaa locations
  Clone ID: MRT4577_175864C.1.pep
SVLVYYCLVVELLTFNALWVELXFYRNNLSVVPLFXLIS

SEQ ID NO: 267831 - protein, 61 aa, Zea mays
  Clone ID: MRT4577_175865C.1.pep
EGKCGGFNNPLEFFFTSPTERGFKVTLIYSTNPATPNFFLWNESPQIGKFHIPIYSLQKAP

SEQ ID NO: 267832 - protein, 107 aa, Zea mays
  unsure (1)..(107): unsure at all Xaa locations
  Clone ID: MRT4577_175866C.1.pep
MGRGISSGGGQSSLGYLFGSDEAPKSFEKPAPVQKPTPPSSAERLKDIAAGIQSSKSNNYKRSEGQNCGNFLTXCGMLQDRPSTKVQAAPGGDSSLGYLFSGSKDGK

SEQ ID NO: 267833 - protein, 127 aa, Zea mays
  unsure (1)..(127): unsure at all Xaa locations
  Clone ID: MRT4577_175867C.1.pep
RPRGLVPXTRAAAXXRALARVLAVAARCVSESVERRPAMDEVVAELRECAGWRHRGGVVGRVCERVAAWGQRVMRRGSNRVVATKVECTEHSDSDVAPDRQGSSSSSCATAALPPHRNDGMMTGAPK

SEQ ID NO: 267834 - protein, 120 aa, Zea mays
  Clone ID: MRT4577_175868C.1.pep
MSRLRALWQASVNATKRAVVWNSEDLFPPSERYIFNFNSKDEVKKWHLYSDSEYGGLSSASLEITDSVSGGDTSSTGVFSGNLSLDMSEGSPWRIRRSGFCGMRSKKFDGYIDLDSYDTI

SEQ ID NO: 267835 - protein, 134 aa, Zea mays
  unsure (1)..(134): unsure at all Xaa locations
  Clone ID: MRT4577_175869C.1.pep
PAALDTGRPCGPPKVPTGPNITTYYNGKXLTARATMDGQPNGAGAPDNXGACGIKNVNLPPYRGMTASGNDRIGSARKGCGTCYQVRRKERPNSAGYTGTEYHTDMNYEPTAPEHSEPSGRAPRSLAKPGXNDK

SEQ ID NO: 267836 - protein, 267 aa, Zea mays
  Clone ID: MRT4577_17586C.1.pep
SQCFSSEIMVERHTNRHRGFGFVTFEDRRAVDSAIKEMHGQEIDGRTISVNKAEPKMNTDDTRYAGGGGRGEYRGGRGDGPPPGNCFECGRPGHWVRDCPSAAGGRSGRFPSKFSGGSGVGRGDRFSGSDRFGDRYMDDRYDGGRYGYRDQADARDRYAGGRDRYANDRYPSGGDHFGGDRYGGGPDCYVPSGYGRERERSYERDGVRGGGGGGGGYDRSGPRGGGGYDRDGPRGGGGSARYDGGNYRERPGPYDRPSRGGRFDDRY

SEQ ID NO: 267837 - protein, 97 aa, Zea mays
  Clone ID: MRT4577_175870C.1.pep
TMPNILTHSISRKHKYNKRLEMETFGHKVCLRLMFLLRLNRRSSWLSGKKIPYLCIEGIPHIASGPECYLYSSFFPDSRMDHPKLGVIVENILQILG

SEQ ID NO: 267838 - protein, 88 aa, Zea mays
  Clone ID: MRT4577_175871C.1.pep
KLKILPSKEPILGLKTRAVFWLVWPKKQNLVSIYMYNVKLKLFEHSIYICPIFDNMPPKKGATKRTNILLFKKKNLVWGVGLFGGPRC

SEQ ID NO: 267839 - protein, 178 aa, Zea mays
  unsure (1)..(178): unsure at all Xaa locations
  Clone ID: MRT4577_175872C.1.pep
PSPACFLSDRQPSQPSLPFVNSQRDRPAPTEGKKPAGKKHAQEEPARPPEKDRSGRKPTAGKQLPPGKNIRQEGGGDKQERTKDSQNERTDKLYIHKERTQAHPHIHMYFMDRHIQNXLINDIHQKQAGQAGKLARHNQKDTINYLEIHTYVRLALPTQLAKHARWEGTNDGSKHTYL

SEQ ID NO: 267840 - protein, 69 aa, Zea mays
  Clone ID: MRT4577_175873C.1.pep
CTPLATNLLGAPNFFEPLPFYTSIYSPSDPPILYNNKGAPLQRTAPINLNSMISSMARFIPKLGICSAL

SEQ ID NO: 267841 - protein, 69 aa, Zea mays
  Clone ID: MRT4577_175874C.1.pep
DAAVSTYRPGCKTTVGGEYCSAGRHVVCYFPIDQRVRVQFLFMMQSLISPRYFVMYKCCLWCPVLFYMS

SEQ ID NO: 267842 - protein, 150 aa, Zea mays
  unsure (1)..(150): unsure at all Xaa locations
  Clone ID: MRT4577_175875C.1.pep
MAHKETNGSNRHHISTRPTTTPSPLRFSKLSQANRRIQDTGXGADSISSHLQDKLMENQKHEGIAADNFLTGSKDNLKKRIGHPRFEPTRHDDTKPIILITHQIYHLADPASPIFYKHNPVKTNKTNVMGTXLNMLGLAKRKRAPDNVTT

SEQ ID NO: 267843 - protein, 535 aa, Zea mays
  Clone ID: MRT4577_175876C.1.pep
MQCPMDTAASGTSPVMQFHSNADESIAHSSPLATLIQRSQRHCYGDGSPGEFPLAVSPSIVLHVLSSCDLGPKDLANLEATCVFFGKPASFAPDFALSLPELAAFDMCQKRTMFKQMKQEDQECLKQRCGGSWKHVLGYILVREKNGSRVIAGPGHSIIITSNGDVYSFGANCSGQLGLGDSEDRFKPCVIRSLQGIRITQAAVGSRCTMLVSDTGSVYSFGKEDFRVAELVDGAHFQITTPRIEESLKGVFVVQAAIGGYFSAVLSREGRVYTFSWGKAERLGHSSDPSDVEPRLLPGLEDVPVAYISAGNCYLLMLAYQPNGMSVYSVGCGLGGKLGHGCKTNNGMPKLVEQFQSMSFKPVSIAAGTWHAVALGADGRVCTWGWGHTGCLGHGDEECRAVPTVVEGLRDVKAVHVSTGEYTTFVVAENGDVYSFGSGESLAFQLDDEAEEEPDSSTPSIVSSLKDLNKKVVQISHTNASYWMNSEMGHPHTFAVMDSGDVCAFGGGVRGQLGVKLHEGVEKVRVPMNVPIGLN

SEQ ID NO: 267844 - protein, 89 aa, Zea mays
  Clone ID: MRT4577_175877C.1.pep
QVDRQWRMPRRWRDKTQVAICNADLYIGRRRWLAAAAAACIRAGGARSDIRQTSQRTTPSCLDHLRLRPRRERGSGWKWPREVSALPGR

SEQ ID NO: 267845 - protein, 219 aa, Zea mays
  unsure (1)..(219): unsure at all Xaa locations
  Clone ID: MRT4577_175878C.1.pep
MQCPMDTAASGTSPVMQFHSNADESIAHSSPLATLIQRSQRHCYGDGSPGEFPLAVSPSIVLHVLSSCDLGPKDLANLEATCVFFGKPASFAPDFALSLPELAAFDMCQKRTMFKQMKQEDQECLKQRCGGSWKHVLGYILVREKNGSRVIAGPGHSIIITSNGDVYSFGANCSGQLGLXDSEDRFKPCXIRSLXGIRITQAAXGSRCTMLVSDTGSVY

SEQ ID NO: 267846 - protein, 156 aa, Zea mays
  unsure (1)..(156): unsure at all Xaa locations
  Clone ID: MRT4577_175879C.1.pep
MKRSYEYRVLCFCSHPSVECNMQCPMDTAASGTSPVMQFHSNADESIAHSSPLATLIQRSQRHXCYGDGSPGEFPLAVSPSIVLHVLSSCDLGPKDLANLEATCVFFGKPASFAPDFALSLPELAAFDMCQKRTMFXQMKQEDQECLKTXCGSSWK

SEQ ID NO: 267847 - protein, 251 aa, Zea mays
  Clone ID: MRT4577_17587C.1.pep
MATGGAPKPEEETVVFPDWVMLERIFRKRCHDDLDAAGEAVNKNKTAAPVKIDSGHSCFVSFTLAAPPGSSYFNLHWPERQGSEELLAFVRAVDKNLVLFDISIPDRIRYFDAPPDLFVYTASAPPPPVQQLPRRSTKQFLAHQFTTGILQLKAEHCYIVADLNVHLKKEGASAELCVFNSGATDWRIITEVLADKLPDLWFTDDVFAFDGRFLCWVDYFSGVVLCDFSKMWTPRCSTSCLFLEESNTLMT

SEQ ID NO: 267848 - protein, 231 aa, Zea mays
  unsure (1)..(231): unsure at all Xaa locations
  Clone ID: MRT4577_175880C.1.pep
MQCPMDTAASGTSPVMQFHSNADESIAHSSPLATLIQRSQRHCYGDGSPGEFPLAVSPSIVLHVLSSCDLGPKDLANLEATCVFFGKPASFAPDFALSLPELAAFDMCQKRTMFKQMKQEDQECLKQRCGGSWKHVLGYILVREKNGSRVIAGPGHSIIITSNGDXYSFGANCSGQLGLGDSEDRFKPCVIRSXQXIRITQAAVGSRXTMXVSDTXNVYSFGKEXFKVAEL

SEQ ID NO: 267849 - protein, 95 aa, Zea mays
  Clone ID: MRT4577_175881C.1.pep
WRSARLYTRHTVIGEWSKCSVISSTRPMAIYNACRRELGACPSIHCNGAFSTSEKRLSSSIMFWRPILRPASAEELTLDTSTSPETTTAEVQRAT

SEQ ID NO: 267850 - protein, 71 aa, Zea mays
  Clone ID: MRT4577_175882C.1.pep
KAQRKFTGQGVVKMNLKRLKGGCFSKRKTMTGPDFISPTKAFALLRISYPVIMKRVWIKRKHYGMWDPCVG

SEQ ID NO: 267851 - protein, 75 aa, Zea mays
  Clone ID: MRT4577_175883C.1.pep
LAPHPILSRHARRRPANRQPEPPERRRRPGPPKRHYRGPTRARRPPALLAACPAASRAPAPWPTPCSSISSLCKN

SEQ ID NO: 267852 - protein, 110 aa, Zea mays
  unsure (1)..(110): unsure at all Xaa locations
  Clone ID: MRT4577_175884C.1.pep
MRNCHLGNERQGIGRPTTSPTAMPNPTTGAYRXQLFHPDAVVRGNEDYGDDFGRDDYTIDKEIVDLCLDRIRILADNCTVLQGFLVFNYVDAGTNSGNXSLLLERLSDDY

SEQ ID NO: 267853 - protein, 50 aa, Zea mays
  Clone ID: MRT4577_175885C.1.pep
YRYLSGVFKLNDGVHVTFGVIIMLCENLLLLTFGEQFQTGPCRIDVVLPW

SEQ ID NO: 267854 - protein, 180 aa, Zea mays
  unsure (1)..(180): unsure at all Xaa locations
  Clone ID: MRT4577_175886C.1.pep
SSGNNAEYAGKLQHYFQAYHIVVPSSRPLKDIMRNREAIGRIGKWAAELNEFSIDYVHRSSIQSQALADFIADWTPGAQEEVTKDAEAWTIFCDGSWGTFGAGAAAVLVAPSKVRTCYAARLDFSCTNNIAEYEALLLXIRKLKAMRIRRAILKTDSRVISGHVDKSSKARDPKLEXYLD

SEQ ID NO: 267855 - protein, 569 aa, Zea mays
  unsure (1)..(569): unsure at all Xaa locations
  Clone ID: MRT4577_175887C.1.pep
MVISCVIKGFLVHNVLVDIGSAADIMLAKAFKQMQEPEDKIHDATHPLCGFGGRQIVALGKITMSVTFGYVHNTRTEQVVFDIVDMEYSYNAIIGRGTLNAFEAILHPAYLCMKIPSDLGPIAIHGSQEAARSVEGSWTDSKAIHNINGAEAYIADQRVLLGSQLSDEQEKTLIRFLFNNKDVFAWTTNDLCGVNRDVIEHSLNVDPSFRPRKQRLQKMSDDKAEGARNEVTRLLSAGVIREVTNLEWLANTVMVKKAKGKWRMQDGLKLNPEKCVFGVKKDKFLGCLVSMKGIEANPNKIEAILRMEPPNTKKGAQRLAGRLASLNRFISRSAERNLPFFEILKSAEVFQWGPAQQKAFEELKQYLIDLTTLTPPSPGAPLLXEKQDGQVRKQAPVYXVSKVLSLSKKNYTELEKVLYDVLMASRKLRHYFQTYHIFVPSSQPLKDIMRNREATGRIGKWAAELNEFSIDYVHRSSIQFQALADFIADWTPGAQEEVTKDAEAWTVFCDGSWGTFGAGATAVLVAPSKVRTCYAARLDFSCTNNIDEYEALLLGLQKLKAMGIRKGDP

SEQ ID NO: 267856 - protein, 92 aa, Zea mays
  Clone ID: MRT4577_175888C.1.pep
NCRSIGSCFMHIQCLGGPKRATKPMKQGAGFSPPPRLRGGFNRIKGTPLKARAIFLFPKRQGGKKTKLWRPPPGWGDNPLPPGGLGRKKNPS

SEQ ID NO: 267857 - protein, 32 aa, Zea mays
  Clone ID: MRT4577_175889C.1.pep
VNHSKQQRTDVHSCLPIESYRRISGAALYYKN

SEQ ID NO: 267858 - protein, 69 aa, Zea mays
  Clone ID: MRT4577_17588C.1.pep
LMGTMGLKLHSHMNELGGGSHSIPSFTYADSINYMPRLSNPPHEYCQGPFLQNNQALIIPPNFFYLIWQ

SEQ ID NO: 267859 - protein, 102 aa, Zea mays
  Clone ID: MRT4577_175890C.1.pep
IDHKQLSPLPLAPAFRGSAVMKAILMCVYIYYDRRCTESYSIENQSFRSISWRHFSIPICANKNCYLPAKTISYVFLPLQCRHVTKEMFSIFSETDKHSNRK

SEQ ID NO: 267860 - protein, 64 aa, Zea mays
  Clone ID: MRT4577_175891C.1.pep
ICSAAALLQCGVCSVHPPFKKILLRSTCCLLSPLYQSVSKVLMRHAHSLWCLGPYICISGKIWW

SEQ ID NO: 267861 - protein, 71 aa, Zea mays
  Clone ID: MRT4577_175892C.1.pep
PCSIATIVAISAIIRTYMIVFPTEFEPVCLTGFDPIKGPLLVYQARPHEALAALVQQKDCIRLQQADTVAQ

SEQ ID NO: 267862 - protein, 130 aa, Zea mays
  unsure (1)..(130): unsure at all Xaa locations
  Clone ID: MRT4577_175893C.1.pep
SPYCPQLQFLPFIHLFTLNPAAYLQHLLLPFSQLAIAYSQQQQLLPFNQLTALNPFAYLQQQILLPFSQLATASRASFLTQQQLLPFYQQFAARGAPLLQLQQLLPFVQXLFLSNPAASYQQHIIGGALF

SEQ ID NO: 267863 - protein, 72 aa, Zea mays
  Clone ID: MRT4577_175894C.1.pep
SYNINNNSLLVAPAGIKIQVIKTVDGVVAVVLVKTRQLVLAATCSEVTWLHTDIQKKKKKKKKKVPCVVTTA

SEQ ID NO: 267864 - protein, 42 aa, Zea mays
  Clone ID: MRT4577_175895C.1.pep
YNIAGRAGSSLFVLNISRTKDRCLLCDYSRSDLLVSGCCLQK

SEQ ID NO: 267865 - protein, 435 aa, Zea mays
  Clone ID: MRT4577_175896C.1.pep
MKIASEQGPITVHGSQEAGRKVEGNWIDSKAIHNIDGAEVCEQYKYKREKAASADQPKPMLLCEDIAEQKVLLGSQLSEEQEKTLIRFLLNNKDVFAWSANDLCGVNRDVIEHSLNVDPSFRPRKQRLRKMSDDKAEGARNEVKRLLSAGVIREVKYLEWLANTVMVKKANGRNVLTYVDDIIVKSTKQENHIADLQETFANFRQAGLKLNLEKYVFGVKKGKFLGCLVSTKGIEASPSKIEAMLQMEPPSIKKGAQWLAGRLASLNRFISRSAKRNLPFFEILKSAEVFQWGPVQQKAFEELKQYLIDLTTLTPPAPGAPLFLYVAASHSAVSAALVQKKLDGQVKKQAPVYFVSKVLSLSKKNYTELEKVLYAMLMASRKLRHYFQAYHIIVPSSQPLKDIMRNREATGRIGKWDVELNEFAIDYVHRSSIQS

SEQ ID NO: 267866 - protein, 28 aa, Zea mays
  Clone ID: MRT4577_175897C.1.pep
LDQMCRRHAQLCSQELFKKMSIISQYFS

SEQ ID NO: 267867 - protein, 120 aa, Zea mays
  unsure (1)..(120): unsure at all Xaa locations
  Clone ID: MRT4577_175898C.1.pep
NMGMKFNEFIVFLGPVYLFNETTVLEAKIKMGLGNLXPXFQPLGEGVVFLDKNKNGFVSKDXIIPPINEAPPGERFFGPIAMKKFXEMGWGKNGMVPFKEVLFALPPWGGIYENEDENAH

SEQ ID NO: 267868 - protein, 47 aa, Zea mays
  Clone ID: MRT4577_175899C.1.pep
LGMVANNVRVYEISVLNIADTCQAWYETSLLELFTPMYILHMSFVVF

SEQ ID NO: 267869 - protein, 67 aa, Zea mays
  Clone ID: MRT4577_17589C.1.pep
GHKSLSHLLVFMRACYIPLDPYCVEEVGSIVKVVMSSTVRVADVNLPLCSLLQAAETRMWCQCCHFG

SEQ ID NO: 267870 - protein, 146 aa, Zea mays
  Clone ID: MRT4577_1758C.1.pep
WKIYHCSLGHFQGYVDRDDVLIESLTVREMLYFSALLQLPGFLSSKKAIVEDAIAAMSLGDHADKLIGGNCFMTRLPGVQAVRGSYDISSSPNAKWVNLLVLLLMALGYRILLYLLLRLDVRKNARRLGNWRSWWSSVHSAATGAK

SEQ ID NO: 267871 - protein, 85 aa, Zea mays
  Clone ID: MRT4577_175900C.1.pep
NFKNLKENLFSISSSHLKKKKKVRCQKIALIKSFKYIMNGTLYFKTEKRVGIKHVKKAKAGLLPKAKAMGYLRGRVTIHKGGTFF

SEQ ID NO: 267872 - protein, 132 aa, Zea mays
  unsure (1)..(132): unsure at all Xaa locations
  Clone ID: MRT4577_175901C.1.pep
MADSMISSAALAVVPQGLPPLGRRASSFGGVCSKKKIXTDKPYGIGGDLDXVHVDAQRRERARCKVVHQVVDKYESVTSYAXVPSHTTSDXWLPPDDVYVGGTTGLLIWAVTLAVILAGGALLGYNTSVLSG

SEQ ID NO: 267873 - protein, 63 aa, Zea mays
  Clone ID: MRT4577_175902C.1.pep
QNMDNACEKLRKRFRKVSKKWSRYEEYLVKNVAKLLNWHSKRKDAIGHNNMDASRTRGRRRGS

SEQ ID NO: 267874 - protein, 54 aa, Zea mays
  Clone ID: MRT4577_175903C.1.pep
GVSTPSSKALNASPVFTLGPIPTSAHASSLLFSFSCLGHLSSHLDVSLFNYSRS

SEQ ID NO: 267875 - protein, 67 aa, Zea mays
  unsure (1)..(67): unsure at all Xaa locations
  Clone ID: MRT4577_175904C.1.pep
HACIYLSSYHLESVDTSSDVSSPMLVECQSMTHYLTLDHVSYHIXSSLMTFICTLSRLEKXAVTLIY

SEQ ID NO: 267876 - protein, 47 aa, Zea mays
  Clone ID: MRT4577_175905C.1.pep
LKKKKDNTFGASKFTSPYLPLHNYYIALPKFNLITILYNFLTVKTLV

SEQ ID NO: 267877 - protein, 376 aa, Zea mays
  unsure (1)..(376): unsure at all Xaa locations
  Clone ID: MRT4577_175906C.1.pep
NISPFPFRITQSAHVDMSLLAPFCLHTVIVPXASLPKRILKWTGTCIXFEDGRXFCGVSRYEDAVRILKTLLSTVACDRRRGYWALRLSIDLEHMGRSNESLSTAEGGAIDPWVHAGSKFAKQRRVLRLCKTPRRWKVPGYADYVKRNKREVSNLGLVFKRQNVSSYXIEGQXSEMCXMTLWSCSLYVXECGGXRNMPFRTVTWXTIFGLLMWDVMFSDIHDVFQSKFQTALDLGNDFYKSRENIAESQLKRIRDGMAEEMLISSWELHQGTSCQGVNWARYSLTDLRAVVACVGGHRLASLLRHLAVDYRSWSSGMPDLLLWRFLDERGGGEAKLVEVKGPRDQLSEQQRAWILVLMDFGFDVEVCKVSPVTKRR

SEQ ID NO: 267878 - protein, 69 aa, Zea mays
  Clone ID: MRT4577_175907C.1.pep
HLRSGKDLNHPPAPGAHPVPALHRPLVHARSLCGLTGRWTDGRMDRQPCLPSFLGPLLSPGIQGWGLSS

SEQ ID NO: 267879 - protein, 174 aa, Zea mays
  Clone ID: MRT4577_175908C.1.pep
QKGICFTLKRDFKFLEVAYPYVAKRLLTDPNPALRERLIQVLFKDGAFQWKRLENLIVLAKENVTKMSSNPALKKNSSQAVRNRQLESKLDLTETIKDGARMFLIDAGIRRQLILAFTEDSKLHVEELVDVYRLVEDQIDMPSVALGSLHVPPPVARDGDHLYWAFTVSARLYV

SEQ ID NO: 267880 - protein, 206 aa, Zea mays
  unsure (1)..(206): unsure at all Xaa locations
  Clone ID: MRT4577_175909C.1.pep
MAGRHAAAVSAFLFLLLVGHCHGGKTGICYGRNADDLPGPDKVAQLIQQQSIKYVRIYDTNADVIKAFANTSVELMVGVPNADLLAFSQYQSNVDTWLKNSILPYYPATAITHITVGAEITESPINVSALVVPAMRNVHAALKKVGMHKKITISSTHSLGVLSRSFPPSAGXAFNSSYAHFLKPMLEFLVENQXPFMVDLYPYYAY

SEQ ID NO: 267881 - protein, 128 aa, Zea mays
  unsure (1)..(128): unsure at all Xaa locations
  Clone ID: MRT4577_17590C.1.pep
MTDPTDSGAFASAGVLPGRGLKRKVDCIDNATQIGPWKRLYNQYDLGEEIGHGKVGSVRFCRPKXLTRCEEEFGCNALPKNRGDTAHREVEIMHHLLGHPDVVTLKAVFKDTDSFYLVMELCHGGRLL

SEQ ID NO: 267882 - protein, 407 aa, Zea mays
  Clone ID: MRT4577_175910C.1.pep
PLRIQFESPQRSIHGFRYHLHLVAPRRPPRRQSCEDWRAEAAAGERPFRVFSLDTGRLNPETYQLFDKVEKHYGIRIEYMFPDASEVQELVRTKGLFSFYEDGHQECCRVRKVRPLRRALKGLRAWITGQRKDQSPGTRASIPIVQVDPSFEGLDGGAGSLVKWNPVANVDGKDIWTFLRTMDVPVNTLHAQGYVSIGCEPCTRPVLPGQHEREGRWWWEDAKAKECGLHKGNIDKDAQAAAPRSANGNGSAGAPDIFESPAVVSLTRTGIENLLRLENRAEPWLVVLYAPWCPFCQAMEASYVELAEKLAGSGVKVAKFRADGEQKPFAQAELQLQSFPTVLLFPGRTARPIKYPSEKRDVDSLLAFVNSLRFVEKEVEGTGFGRDTGREEGSGEKKSGVAFVTAK

SEQ ID NO: 267883 - protein, 182 aa, Zea mays
  unsure (1)..(182): unsure at all Xaa locations
  Clone ID: MRT4577_175911C.1.pep
MAFRLRSASRRRCPPQRTVTSSITFHFKSGRTSHVQSEVATGAPEKTKYRKYSYLSDHLNDLLDLPTDDLVQLFPARASITIQKRLKKKPMWLIDKLYXDKKDAPAGEKAQTDYTHLLLMXIAAETTGSLDAGYDCKTFNQGEIHSEMIRHYLAEFSISXKPCKHGRSGIEAXHSSRVIPLK

SEQ ID NO: 267884 - protein, 251 aa, Zea mays
  unsure (1)..(251): unsure at all Xaa locations
  Clone ID: MRT4577_175912C.1.pep
LTTPIFVWFSAAPAAPVADEAAALAAVDYEALARELEGASPLEIMDRALAMFGSEIAIAFSGAEDVALIEYAKLTGRPFRVFSLDTGRLNPETYQLFDKVEKHYGIRIEYMFPDASEVQELVRTKGLFSFYEDGHQECCRVRKVRPLRRALKGLRAWITGQRKDQSPGTRASIPLVQVDPSFEGLDGGAGSLVKWNPVANVDGKDIWTFLRTMDVPVNTLHAQGYVSIGCEPCTXRPVLPGQHEREGXRWW

SEQ ID NO: 267885 - protein, 386 aa, Zea mays
  Clone ID: MRT4577_175913C.1.pep
KLTTANSIRKPQTQRASHGIRYHLHLVAPCRPPRRQSGAEDVALIEYAKLTGRPFRVFSLDTGRLNPETYQLFDRVEKHYGIRIEYMFPDASEVQELVRTKGLFSFYEDGHQECCRVRKVRPLRRALRGLRAWITGQRKDQSPGTRASIPLVQVDPSFEGLDGGAGSLVKWNPVANVDGKDIWTFLRTMDVPVNALHAQGYVSIGCEPCTRPVLPGQHEREGRWWWEDAKAKECGLHKGNIDKDGQAAAAAAAAPRTANGNGSAGAPDIFESPAVVSLTRAGVENLLRLESRAEPWLVVLYAPWCPFCQAMEASYVELAERLAGSGGVKVARFRADGEQKPFAQAELQLQSFPTVLLFPSRTARPIKYPSEKRDVDSLLAFVNSLR

SEQ ID NO: 267886 - protein, 339 aa, Zea mays
  Clone ID: MRT4577_175914C.1.pep
RSFPTVLLFPGRTARVFSLDVGGLNPETYQLFDKVEKHYGIRIEYMFPDASEVQELVRTKGLFSFYEDGHQECCRVRKVRPLRRALKGLRAWITGQRKDQSPGTRASIPIVQVDPSFEGLDGGAGSLVKWNPVANVDGKDIWTFLRTMDVPVNTLHAQGYVSIGCEPCTRPVLPGQHEREGRWWWEDAKAKECGLHKGNIDKDAQAAAPRSANGNGSAGAPDIFESPAVVSLTRTGIENLLRLENRAEPWLVVLYAPWCPFCQAMEASYVELAEKLAGSGVKVAKFRADGEQKPFAQAELQLQSFPTVLLFPGRTARPIKYPSEKRDVDSLLAFVNSLR

SEQ ID NO: 267887 - protein, 252 aa, Zea mays
  Clone ID: MRT4577_175915C.1.pep
LEAGRVTFSRKDQSPGTMASIPLVQVDPSFEGLDGGAGSLVKWNPVANVDGKDIWTFLRTMDVPVNALHAQGYVSIGCGPCTRPVLPGQHEREGRWWWEDAKAKECGLHKGNIDKDGQAAAPRTANGNGSAGAPDIFESPAVVSLTRAGVENLLRLENRAEPWLVVLYAPWCPFCQAMEASYVELAEKLAGSGVKVAKFRADGEQKPFAQAELQLQSFPTVLLFPGRTARPIKYPSEKRDVDSLLAFVNSLR

SEQ ID NO: 267888 - protein, 97 aa, Zea mays
  Clone ID: MRT4577_175916C.1.pep
TLLFFQPPSAFFFPHAFFSPWLFPPRAQQGVVLPSMASSKPAPSPFFPCSFLQAERQPCSLFLSSSRLRAGASSQPWRPEKISQACALRLPTASSSS

SEQ ID NO: 267889 - protein, 82 aa, Zea mays
  Clone ID: MRT4577_175917C.1.pep
EAGREKKKKKKKKKKKKKKKKKKKKKKKKKKKKKKKKKKKKKKKKKKKGALGAQFLVPFRGGKWPPGQKKGKSGPLGKGVSR

SEQ ID NO: 267890 - protein, 74 aa, Zea mays
  Clone ID: MRT4577_175918C.1.pep
MNREKLMKMAGSVRTGGKGTVRRKKKAVHKTTTTDDKRLQSTLKRIGVNAIPAIEEVNIFKDDVIIQFLNPKVQ

SEQ ID NO: 267891 - protein, 39 aa, Zea mays
  Clone ID: MRT4577_175919C.1.pep
GGYGPNTLTLSRRPSGLVEPLKIRRGGRSREVMHPAVRV

SEQ ID NO: 267892 - protein, 54 aa, Zea mays
  Clone ID: MRT4577_17591C.1.pep
DNYSLITLTPCYMSTVASLSYMPRSFDYSHDNCRMRDVDLPSVRQAAHSLVLVL

SEQ ID NO: 267893 - protein, 128 aa, Zea mays
  Clone ID: MRT4577_175920C.1.pep
ENWRRAWVLALWFAAMAALFVWKFVQYRRMAAFQVMGYCLPTAKGVAETLKLNMALVLLPVCRNTLTWLRSSWARFFVPFDDNITFHKMIATAIVVGITLHAGNHLACDFPRVIAASPEEYALVAGAF

SEQ ID NO: 267894 - protein, 75 aa, Zea mays
  unsure (1)..(75): unsure at all Xaa locations
  Clone ID: MRT4577_175921C.1.pep
QLAWPAKIPDAAGLGDMPSIVLDSWPFTLSMXCQSFXHLQGEWYLPVXCLHKNXACXPLRRSTRLESAFSLLDAW

SEQ ID NO: 267895 - protein, 80 aa, Zea mays
  Clone ID: MRT4577_175922C.1.pep
LYMSTLVRVSVEQFVDRLAWSVPGVSVVVFRVHQPYLVLCHVGVRDILSVALDHEPQGVWRYSRLQRSQCEQDVRCDELK

SEQ ID NO: 267896 - protein, 71 aa, Zea mays
  Clone ID: MRT4577_175923C.1.pep
KHRAKILICALWSKVNQNQAKRRCHVSMFVPLLVTMFCTCTLCMNQILGRANESWGVQLKVKKAHTSDLGR

SEQ ID NO: 267897 - protein, 165 aa, Zea mays
  unsure (1)..(165): unsure at all Xaa locations
  Clone ID: MRT4577_175924C.1.pep
PSARPLVTSVQIRGITLLNRKRRHLNIFECFDELIDKETVKAHGDSSTGPXKDVXXXRKGSMRKITXGGGEERLSIGPGSKKSRMHGGKSGPGHGISAGSLGRYKDEKDAEDGQETGSTIAGTTNGRRMKSHEDSKPALKASKFLHEGITMDKVSYPMIIDQKDC

SEQ ID NO: 267898 - protein, 51 aa, Zea mays
  Clone ID: MRT4577_175925C.1.pep
GRMASTYKNIFIGSMVGSYCKVPYNALFILRMEVLKSRLGLGTGDAPPRLI

SEQ ID NO: 267899 - protein, 96 aa, Zea mays
  unsure (1)..(96): unsure at all Xaa locations
  Clone ID: MRT4577_175926C.1.pep
MAKLVKPGRDIILLQGXFGGMKAXVIVRVFEDGTHDRPYSHCLIAGLTEYPKKVVRMDSAKKTAKKSRVKCFIKLVNFTHLMPTRYTLDVTSRRAT

SEQ ID NO: 267900 - protein, 54 aa, Zea mays
  Clone ID: MRT4577_175927C.1.pep
FSTEGSFKVNQRSLCRGTYRSRLQIDSYGGTLSTSPQLTIVGREDSIFLATHES

SEQ ID NO: 267901 - protein, 42 aa, Zea mays
  Clone ID: MRT4577_175928C.1.pep
FRDREANVVIVREYVVILKMGGTTTTRVKWTEHLMTAGLNKK

SEQ ID NO: 267902 - protein, 72 aa, Zea mays
  unsure (1)..(72): unsure at all Xaa locations
  Clone ID: MRT4577_175929C.1.pep
IPYRPTPTCALPYLTIIQAIHIFNINSQGXHLQGKYVCTGHSYLCIFXWALNIHRHSYSFYIWHYPMLSYFA

SEQ ID NO: 267903 - protein, 38 aa, Zea mays
  Clone ID: MRT4577_17592C.1.pep
TDGCILQILQDDFDNISTKRTLTTGSIKRCLLDILYDL

SEQ ID NO: 267904 - protein, 71 aa, Zea mays
  Clone ID: MRT4577_175930C.1.pep
ARRLFLKHFMFKKVGGEQLDYSFHGIMDEHELLFAFIYVLFLVDSNSMDELVCNLLFSSWMNNYANATKHV

SEQ ID NO: 267905 - protein, 105 aa, Zea mays
  Clone ID: MRT4577_175931C.1.pep
MASTGREQVRLGWATMARELRRKATAQEAGRPSAWELEGARYRELQRRAQGRGAAAMAELEPGTAPSREGSCGAQTGRAPVEEDPSWGAAGKLHGDHGTTARGIR

SEQ ID NO: 267906 - protein, 57 aa, Zea mays
  Clone ID: MRT4577_175932C.1.pep
PGLLCESAALYSATVPPELHRPFGWAWIHVDVWSALWDSGTHNLPSNVGRCVRSRST

SEQ ID NO: 267907 - protein, 80 aa, Zea mays
  Clone ID: MRT4577_175933C.1.pep
KKKKKKKRERRKRKNKKKKKKKKKKKKKKKKKKNFFFFPPPPPPLLLAFVPPPPFPTENIIRFLSPPVPASSTVSPVWFP

SEQ ID NO: 267908 - protein, 260 aa, Zea mays
  Clone ID: MRT4577_175934C.1.pep
DLIRWEDVMGPLLTEYLGSPQQQAAASKSNSEIDDTSKTEDMIGCASYDGENIDSSKQRHDNAEGQQPMDTSVDHPTCASEVDGMDVVDCNHDENNVASGEQNCGEASLINGKPIETSSDNSLEQGKTCKDGSSSPNNNVLAANACQFKNVVAIVDPPRVGLHPTVIKALRTHPRIRRLVYISCNPDSLVANGIELCTPTPEKQEKNKGNRGWRSMSSAGLARQRTKSMPNSEPFIPKRAMAVDLFPHTPHCEMVMLFER

SEQ ID NO: 267909 - protein, 51 aa, Zea mays
  Clone ID: MRT4577_175935C.1.pep
THFRCTIPVAGLFLTTFIRWLNDYDSLRLSLHIYAPERIDPLWESVPMLGH

SEQ ID NO: 267910 - protein, 436 aa, Zea mays
  unsure (1)..(436): unsure at all Xaa locations
  Clone ID: MRT4577_175936C.1.pep
MARIPQVLAPLLLLLLPAGLRELMIDRRPLPEGAAGGEVLLHPLVLVPGLTCSELDARLTDAYRPSAPRCGAMKGKGWFGLWXPLLRPARAPLRAXCFMEQMALVYDPVANDYRNLPGVETRVRNFGSSQGFQKNPEHTTWCFEVLRNELGRAGYRDGDTLFGAPYDLRYAPPVPGQPSEVFSRYFRRLASLIEDASRKNRGRKVILFGHSFGGMVALEFVRSTPMAWRDRYIKHLFLVAPVPAEGFVKPLQYFVSGSNLMYVPTVSSLELAFRPMWRTFESSLVNFPSPAVFGRRPLVVTARRNYSAYDLEDLLVAVGYGAGVEPFRRRAVPKMSYFQAPMVPTTCMNGVGNDTPEQLVYWDGDFDATPEIVYGDGDNSINLVSMLAFDEKMRRQPEQNKVYKSIKIRGAQHGTIVTDDTALKRVMHEILEANRS

SEQ ID NO: 267911 - protein, 90 aa, Zea mays
  Clone ID: MRT4577_175937C.1.pep
CGENAGLAPAGRYVHRQNMSCAIHRPAGGSEGIRPGRCLGLAHPELLPDQCANNAETKMCVSPHVMCCFGLSLFRIPLNSVEVSFPVRNV

SEQ ID NO: 267912 - protein, 87 aa, Zea mays
  unsure (1)..(87): unsure at all Xaa locations
  Clone ID: MRT4577_175938C.1.pep
LSSLANLLHRPCDMDTLAFPAALKHLISLIINXTSTSNKGIFLRKLISNXSDALHMIRLKSLTDKSTLHTQSGLFMQLLPDKATNTL

SEQ ID NO: 267913 - protein, 145 aa, Zea mays
  unsure (1)..(145): unsure at all Xaa locations
  Clone ID: MRT4577_175939C.1.pep
IEVPEVVLMALISLLPTIPHSLPADAPPLPPPSPKAAATIMGFVACLHRLLTSRSMASHMMAFPVAVGRIMGLLRNGSEGVAAEAAGLVAMLIGGGPCDSSILMDTRGESHATYMHAKSVLFSXPMYVPILGNRLKPISVSPFVS

SEQ ID NO: 267914 - protein, 56 aa, Zea mays
  unsure (1)..(56): unsure at all Xaa locations
  Clone ID: MRT4577_17593C.1.pep
MGRMHSRGKGISXSALPYKRTPPTWLKTGAYDVEEMITKAAKKGQMPKQIGDLLRD

SEQ ID NO: 267915 - protein, 51 aa, Zea mays
  Clone ID: MRT4577_175940C.1.pep
SICACISASNHPNLWSLYTTVSIRIGKSMKVTAHVMAGHTSNKTGFWVSLS

SEQ ID NO: 267916 - protein, 158 aa, Zea mays
  unsure (1)..(158): unsure at all Xaa locations
  Clone ID: MRT4577_175941C.1.pep
MGISFKLSKVGVRVQPTARSAAPELPAAAETEKPGAGEKDGSRPEAKREDAIVERANDANGINISPACSRAILPDHEVSFTFSLYDRGYLIAKSAVLDPCQPSVQDGKTLHPYDRASEKLFSAIEAGRLPGDILDEIPSKYYXNGSXICEIRDYRKHA

SEQ ID NO: 267917 - protein, 43 aa, Zea mays
  Clone ID: MRT4577_175942C.1.pep
KKKKKKKKKKKKKKKKKKKKKKKKKKKKKNFPPSHGGALGSLC

SEQ ID NO: 267918 - protein, 57 aa, Zea mays
  Clone ID: MRT4577_175943C.1.pep
HNNLYIKCVLYCYKKIFHNPFVILAIHKFCYFNLAVLILHCNHQYHADFDIFVWSHH

SEQ ID NO: 267919 - protein, 61 aa, Zea mays
  Clone ID: MRT4577_175944C.1.pep
STLFFPFTENQTWPMIQEHAFLSTTPPTTKIFELTKNLNGHNKAGPKIGRGCCYYTTNGIS

SEQ ID NO: 267920 - protein, 199 aa, Zea mays
  unsure (1)..(199): unsure at all Xaa locations
  Clone ID: MRT4577_175945C.1.pep
PVSNVFHWSSNILPSFDQRATRYTILPTSWKSCVRVGNIAQPQSSTVKMGSMNIPKRVVLRFSVQYEREEATINEQFFALHGPEPPNEDFFSHLMAPNESSKMHIVLDFYCKSHPTIDNSMIPYEVFKVKKHGNFKFEKLDATACQLARKSCESIGVKWGTNRPQSEELDGVRALQQDTLRLXSYLEYQEIKGSLAAGH

SEQ ID NO: 267921 - protein, 737 aa, Zea mays
  Clone ID: MRT4577_175946C.1.pep
MGEGSGNQRIDLGAPLRSARLADAPTQYKAGLNSGPLRHPGTVPFAWEQRPGQPKSVRTRRAAPPTPPRETSRARPGETGGSPYYDAVAELDLQALRGVADQGSRTAAASRKVVVGENELAVAVESTKDVKKHEALPAAAVLQKQDGIVEEEEERFSDALDTLSRTESFAMNCSVSGLSGALDPGHGAEPGSRGFMMDRFLPAAQAVAVGSPQYTFRKAGAAGGTGNSGSGHARAAAVKAGVGNGEDRMRRAPVQLPYQHLPPNYLSCAYPRHEEHEEEDEGDDDDDDYDVHSTRGFSAKGCGLLPSLCAKTSLLLLNPMPAMKRGKQSWEDVYKHKLEQKYLGQGEDDRRSKLTSESNQLTFWSDSPTGDGSSPYYHSIAGGMSPYRSYAVMSPSSKPNGSSGTGDKDDKASRSNGSGSFGKDHDRTSLVGSDDSSFKRSSSMSSGPDGTVHEDSMDHHRDTDSDTCHLGVLVHTKAALDANIYDTQPGGRKTVGNNLIVKDQVNDPLTEKIAELREPTFPLDDGKDLQRNASHELPQHLEDNDVAKKEIIPLQSLLPLPVPKSPSESWLSRTLPSVTNRSPLPSFLGIQVHSKKQAPWVITQPKENDHKPSRPRQIRFADYLSIHGVALKAIKVIYLTGTYEFLGCASAFYRCGHLIQLLVTTYHVGNWSSHAMFAGLWSLDMSVLVLDRIIELYLVPYVVSVVSDTIGCKVCSRVPGWLFSSNFDTCFCPQFCH

SEQ ID NO: 267922 - protein, 355 aa, Zea mays
  Clone ID: MRT4577_175947C.1.pep
MPAMKRGKVRGRVRGWQLPCKGQGQGQMAQSPLARSSQNKHLGCDSNGQSWEDVYKHKLEQKYLGQGEDDRRSKLTSESNQLTFWSDSPTGDGSSPYYHSIAGGMSPYRSYAVMSPSSKPNGSSGTGDKDDKASRSNGSGSFGKDHDRTSLVGSDDSSFKRSSSMSSGPDGTVHEDSMDHHRDTDSDTCHLGVLVHTKAALDANIYDTQPGGRKTVGNNLIVKDQVNDPLTEKIAELREPTFPLDDGKDLQRNASHELPQHLEDNDVAKKEIIPLQSLLPLPVPKSPSESWLSRTLPSVTNRSPLPSFLGIQVHSKKQAPWVITQPKENDHKPSRPRQIRFADVVEKPTSLDSEI

SEQ ID NO: 267923 - protein, 146 aa, Zea mays
  Clone ID: MRT4577_175948C.1.pep
MSDVEDNTPEVADVVEVSGDAPKGQMSILDALKGVLKLSLMHDGLARGLREASKALDRRQAHMCVLNENCEEEAYKKLVVALCNEHNIPLIQIPDGKQLGEWAGLCVLDREGNARKVVNCSCVVVKDWGEESQERSILLNYFQTEQ

SEQ ID NO: 267924 - protein, 116 aa, Zea mays
  unsure (1)..(116): unsure at all Xaa locations
  Clone ID: MRT4577_175949C.1.pep
GPRGLVVLGFPCNQFGHQENAKNEEMLNSLKYVRPGGGFEPNFMLFEKCEVNGAGAHPLXYAFLREALPXPSDDATALMTDPKLITWSPVCRNDVAWNFEKFLVGPDGVPLRRDSR

SEQ ID NO: 267925 - protein, 56 aa, Zea mays
  Clone ID: MRT4577_17594C.1.pep
GIVLLSFPLASSIKATASTTQMLPTTATAAAPPPPTGGPASSPSEPHAALLLALIY

SEQ ID NO: 267926 - protein, 64 aa, Zea mays
  Clone ID: MRT4577_175950C.1.pep
VVIRTRYLLNSIISRRYRSSTKADYHNMIQRTYSDIVFHLISTNCNQLVAVILIFLARLLGSSI

SEQ ID NO: 267927 - protein, 634 aa, Zea mays
  unsure (1)..(634): unsure at all Xaa locations
  Clone ID: MRT4577_175951C.1.pep
MLEPTAMEVVVAGSVSNAVVPAPVVHNPRARKLRSAVWQDFTKERRADGNCVAVCNHCKKQLTATSRSGTTHLRNHLAICTTTATRRAGKRRKLVVRRILHNKSSIDGRSGEGHASGEDHDNEGTHFDQELSRRDLVHMIVQHGYRFSIVDDVGFQKFVKNXQPQFRMVSYETVRADSMEIYEGEKLKLHDVLFKIPCXVSISVDMWRSNTQMEYMCLTCHYIDHANDEWKVRKKILNFVHMEAPFTLDQMVNIIVEKLHSWGIDRKLAAVVLDNCSSGENSARGLHRVFQARRLLLNGDLFQVRSCAHILNLTVQESWERASDITDRVRKMINYVKFERFQKFQDIAKVLRMDQKLLVIDSPDNWPSTYLMFDSACYYQDVFVRLTEQEGHYDVFLSANDWADVKALTEILDVVYHXMEKFPVENPTANLYFNEMCEIHVLLKTWCKSPSTVVAKVAGQMLSKFEGYWDLTRPVMAFASILDPRYKMKSLEYFFRLIYSDEQFTAKTMIDVIQNTFHNLYNDYKHQSSDSWKNPSVLCYSRNSNSCMGSVYSNGDDSKTFSRITLSDARRGLDQYIQETSSGQSLKSDLEMYLEEAVFRQKEGNQDNFDILGWWXKSFAAKYPVLSQMARDIL

SEQ ID NO: 267928 - protein, 109 aa, Zea mays
  Clone ID: MRT4577_175952C.1.pep
YFPVLCKGGGLFFGAPFFGWGGRRFTPFFLGKPLAFPSLFFFQPIPFYPRGVPPKRPVPIALFNSWASLLERGPPPVFPLYARRLWGFPPPFPLPFQAPWGRFFPLFSL

SEQ ID NO: 267929 - protein, 208 aa, Zea mays
  Clone ID: MRT4577_175953C.1.pep
ADDSAVVIPAERLASALPSATVAPSLVAVREEADAAGMLDLRLLLRGAHGRCVLMELDSSVLCGCSDFFAAMAPREDAAGAGGKRLEVDGVENLDAFCAAVELMYNPDPIGCLAAAGVSRAIDVLEVCSSIMFSKGIKSCLTYIEAVPWNENEEEKLKNLFARFTFDEAMSQDILARLRPHNWKSSDDLTIQLIQSVTGSTSTVARKD

SEQ ID NO: 267930 - protein, 246 aa, Zea mays
  Clone ID: MRT4577_175954C.1.pep
MDKYKLNDNSKTFINELFNFWGQRGVTNLKIPQIGGRELDLMHLYKAVCKRGGFHRVCSNKLWKEIVLEFGLPRTCTSASFTLRNHYQKYLLAYEQKFFFGRNEEVEYPEVQGARPRKVVRPVEEEPKFIALEIAPRNQSIENVLNGMYQNIPDNSEILYLRKYKTVPVVSEMSRILLAFESHMQEETTFALNSLLLYSCNAHFHLEYHPTLLDTLFVYVENIIKDVPYYKKSISRQTKKKTRRCS

SEQ ID NO: 267931 - protein, 92 aa, Zea mays
  unsure (1)..(92): unsure at all Xaa locations
  Clone ID: MRT4577_175955C.1.pep
MSLQRTYLPTSFEWLKTTDKNWVNFKATWTGYFXLASLILAWGGGTSLRVGHGIMTTGSGISWIIGINTYYLFFLAIGTSREAWLTSKKWWG

SEQ ID NO: 267932 - protein, 84 aa, Zea mays
  Clone ID: MRT4577_175956C.1.pep
GKNTAFFTIKRGWGGFTIHSISFYTRHVAHFTGNRVRQDKEHLFAPRGRMALSKHLNKMGITIYTFWRARTPRVSPSHLGDTID

SEQ ID NO: 267933 - protein, 89 aa, Zea mays
  Clone ID: MRT4577_175957C.1.pep
PVGTPSLRFIPGLRLLLPPAPCGVRPCSAGRCSAHVFTFKRLPLALTATVVTDPCRAAAADLLLLASTATGKGRHRFPAARFIEKATTR

SEQ ID NO: 267934 - protein, 95 aa, Zea mays
  Clone ID: MRT4577_175958C.1.pep
MAAWWRMKVVPCARRAWAVLSARLRARKPGSGGILKLNEDVQTCGYKDVQVMFDMLTSELEAAAQAQKPPTSPPRKGGALPPAWPGRSSSAITAA

SEQ ID NO: 267935 - protein, 56 aa, Zea mays
  Clone ID: MRT4577_175959C.1.pep
GKERVLVYLFIYSTTAIHLNVYRLLCSWMAIYNIIRQQGTLFGSAVNFLLQLCCIH

SEQ ID NO: 267936 - protein, 36 aa, Zea mays
  Clone ID: MRT4577_17595C.1.pep
LPVNFWVAAPLSPYNVMIYLLCVELLLYSKDVTFDP

SEQ ID NO: 267937 - protein, 88 aa, Zea mays
  Clone ID: MRT4577_175960C.1.pep
LAGRPSPPWMLCTPSSARAELCTGSEDERIFFLVCSGCRGRFLSSLCLAWLDVQSYQIKIYVMCFVIGWNHVSHQCWEIEIKMYLSLD

SEQ ID NO: 267938 - protein, 177 aa, Zea mays
  Clone ID: MRT4577_175961C.1.pep
MIDHPRQSNYLSRSIVGSHALSCAHVSYLEASSIPAHPRLRRQRLLLWTPDPAAIAATVQVLLIFVFLGRSTWSNTSRTQCLHQSVRFFYVLWHSGQSASRPRNTRLRCLIILGSGGHTVEMMNIVTMLQKDRFTPRYYVAALTDNMSLQKAEIYEQSLIQVTSSHHKIPNDNRETT

SEQ ID NO: 267939 - protein, 48 aa, Zea mays
  Clone ID: MRT4577_175962C.1.pep
ETPPRSNQSPRCVAPLEPPILLLWEGCETARVSSHMFIAQQVMGNNVA

SEQ ID NO: 267940 - protein, 112 aa, Zea mays
  Clone ID: MRT4577_175963C.1.pep
GARKQEVLVFSKITGRRQIQSKRVRGRGRRRLREGDEEAVALRGRRGGGGFVRADREALPDLLRWGAKSPSSPAVRAGKRAHQIAKKSSRGRFGPGFSWPGIGPRPASRYPM

SEQ ID NO: 267941 - protein, 56 aa, Zea mays
  unsure (1)..(56): unsure at all Xaa locations
  Clone ID: MRT4577_175964C.1.pep
SSXSLTLLRQLVSSISDPGPWRPFVRGWRAQFPCVIVTGLSEVEVVLISYRHPWRY

SEQ ID NO: 267942 - protein, 51 aa, Zea mays
  Clone ID: MRT4577_175965C.1.pep
LNFHCEWTKSIFKLVLNQCPKYRAQLLKKHLQQILCGILINVIKYLIKLPL

SEQ ID NO: 267943 - protein, 47 aa, Zea mays
  unsure (1)..(47): unsure at all Xaa locations
  Clone ID: MRT4577_175966C.1.pep
KXKXXXKKKKXKKKKKXKKKKXKXKKKKEXKKKKKKKKXKKKKNLLS

SEQ ID NO: 267944 - protein, 95 aa, Zea mays
  Clone ID: MRT4577_175967C.1.pep
LFEQLSHRERGDRGVKDLRLDRQYGLYGLSADGVQPQSCLEHHEPGRGTTWTKIVGGRSLCSPWGTYVTDGGTPNTLLFLLLGRGTSCINWTSIW

SEQ ID NO: 267945 - protein, 135 aa, Zea mays
  Clone ID: MRT4577_175968C.1.pep
KRAAGPRIYPLTRPKVSCSLFFHPPRSCDSFYPPWTLPGTRRGAGPFLRCSSSPPVKRCRLLMTRAGGRTTTTTLSDFTKTARRPDTIHGTGDSPCNCLWSDKPNCQCLLTDCEYDRTSASHDAQNASPPHERST

SEQ ID NO: 267946 - protein, 112 aa, Zea mays
  unsure (1)..(112): unsure at all Xaa locations
  Clone ID: MRT4577_175969C.1.pep
LAINFEGADIWGRVLLNRCSLRGLGQSRIWIHALLEEXAKNGRMHPMNFMDGEKTRGHDRALVNTAQXELFNEYFLRYLXFPNFEHRVSGXLEEEVIHSYTKCLKGLADCEI

SEQ ID NO: 267947 - protein, 53 aa, Zea mays
  Clone ID: MRT4577_17596C.1.pep
TRQQRPRKRWKHPVVRLTMLCQGCAESTSNGVLRPKKLQDRMLINVEEQNARD

SEQ ID NO: 267948 - protein, 141 aa, Zea mays
  Clone ID: MRT4577_175970C.1.pep
FEDIGGEFTIPLAANAETVRDFDNGLTRVSFGFKSVDEYYSKSGSSKAIKHVRIPLLCIQAANDPIAPERGIPRDDIKANPNCVLIVTPRGGHLGWVAGEEAPNGAPWTDQVVMEFLQHVENRETINGERSFEDVHDQIQV

SEQ ID NO: 267949 - protein, 98 aa, Zea mays
  unsure (1)..(98): unsure at all Xaa locations
  Clone ID: MRT4577_175971C.1.pep
IVGGVLMNWVCVMTMNRVKISVLKMVDEVRTHFNTIPGKMDGTAKPYYSTCQTICTDAFMNDMITPGANGMLTTLICVTLLXITALNVIIAGTPSFLG

SEQ ID NO: 267950 - protein, 90 aa, Zea mays
  unsure (1)..(90): unsure at all Xaa locations
  Clone ID: MRT4577_175972C.1.pep
VPIHSYSQMMIYPYSYAYKLGENNAVLNALAIATVKEIASLHGTKYTYGPGATTIYPTAGGSDDXAYDKGIRYSFHYKLRNTRPYGFLHP

SEQ ID NO: 267951 - protein, 277 aa, Zea mays
  unsure (1)..(277): unsure at all Xaa locations
  Clone ID: MRT4577_175973C.1.pep
IGTSSRRDFTLPLNSHAVHYLTTVTLSSLIPLTWAQSSSPSNSASGTVLTSTVASRSRASAGVTSTYSQSNVPTGTPIAGNYDGAYRPQVHFSPPNGFMNDPNGMFVDDNGTYHLYYQYNPTANVAGNQHWGHATSDDLYTWVNQQIAIFPGGPTEGVFSGSAVVDVNNTSGFFANQTNGVVAIYTINVPDNQTQHIAYSRDGGYTFTKYSGNPVLKPGGINPTQFRDPKVIWYEGTQKWVMVVAYPVDFKVGIXSSPNLIXLDAESNFSHYGVTGL

SEQ ID NO: 267952 - protein, 205 aa, Zea mays
  unsure (1)..(205): unsure at all Xaa locations
  Clone ID: MRT4577_175974C.1.pep
SPSTPGSPSHGGSGSSPTAPGRVGGYGGSPSHGGGAYGGSPSTPGSGGAYGGGSPSPAHGGGAYGSSPTPAYGDAPSHGGIGTSSPTPXSDPHSFGSLPGSCDYWRSHPMEIWSAIGGRFPGTSSSMGTMGHFFGAAGRVGGTDVSIQDALANTRSDGAGALLREGAAALLNSMTRSGFPYTTEQVRDAFAAAAAAAAGGSDGAA

SEQ ID NO: 267953 - protein, 108 aa, Zea mays
  Clone ID: MRT4577_175975C.1.pep
QPSQWARFFESILVHLVLRLRRLRGRRQSITLERLMCGHRYSSTEHSKPKDHPSRGAAALVMAVVPVPLGGALHVQHTSGDARNDRPTLGAGRPCCHVKEGPFGGTAG

SEQ ID NO: 267954 - protein, 117 aa, Zea mays
  Clone ID: MRT4577_175976C.1.pep
KPGQKYVVFHSWATFFGAAPGNQAPWALKDPPQAFSQFQATHPPHYPQIKKERTRPKKTLGEKKTPPPKLSLLILLPPHIPFFELFWEILTTLLPCPFGGASGLSGFLAWGTGTFTR

SEQ ID NO: 267955 - protein, 60 aa, Zea mays
  Clone ID: MRT4577_175977C.1.pep
IASGCPMGSFLHTRDLDKLHCSSARHSVYDPTDRSLLLTNKTCAQGTFIECPAHHQHVYL

SEQ ID NO: 267956 - protein, 603 aa, Zea mays
  unsure (1)..(603): unsure at all Xaa locations
  Clone ID: MRT4577_175978C.1.pep
MLSVVRVHLPSEIPIVGCEITPYVLLRRPDGAVSTNDVPETAPADGQFMRYRWYRIQSDRKVPICSVHPMEQATIQCLGCLKSKIPVAKSYHCSAKCFSDAWQHHKVLHERASSAQNENGAEEEELCGSGGSGVLSTAGSGSLSNFGQSPSINNEPVPLYPSGTDXXSGETWYEVGRLRTYTPTAADIGHALKFECVAVDSXXXSPIGPPTSVMTSHVXXXXXXXXRRLIQVNGDVLGHLDLDSQTSSLGTFTVLSYNILADTYATSDAYSYCPTWALTWTYRRQNLLREIIGYHADIICLQEVQVNHFEXXXXPELDRHGYQAXXXXXXXXXYSGNPMAIDGCAXXXRRDKFSHVXXYEVEFNKAAQSLTDAIIPSAQKRLALNRLIKDNIALIAVLEAKFANHGAENPGKRQLLCVANTHINVHQDLKDVKLWEVHTLLKGLEKIAVSADIPMLVCGDFNSXXGSSPHALLAMGKVDQHHPDLAIXXXGILRPPSKLNHQLPLVSAYSAFARMVGVGYDLEHQRRRTDPATNEPLFTNCTRDFTGTVDYXFYTADSLTVDSLLELLDEESLRKDTALPSPGWSSDHIALLAEFRCKPRIRS

SEQ ID NO: 267957 - protein, 60 aa, Zea mays
  Clone ID: MRT4577_175979C.1.pep
YAIRASRSATLTSTTLKIGQRHHAVLYVLHLGHSIQPYFTRDLAQQESTWDDYRLIYIGT

SEQ ID NO: 267958 - protein, 53 aa, Zea mays
  Clone ID: MRT4577_17597C.1.pep
LLGWLDHFLIMFCDLVTSLKLFFLVGYCTHVLTCATGYTRKWFSLSYVIALTF

SEQ ID NO: 267959 - protein, 605 aa, Zea mays
  Clone ID: MRT4577_175980C.1.pep
MLSVVRVHLPSEIPIVGCEITPYVLLRRPDGAVSTNDVPETAPADGQFMRYRWYRIQSDRKVPICSVHPMEQATIQCLGCLKSKIPVAKSYHCSAKCFSDAWQHHKVLHERASSALNENGAEEEELFGRFGSGGSGVLSTAGSGSLSNFGQSPGVNNGPVPFYPSGTDKNSGETWFEVGRSRTYTPTADDIGHALKFECVAVDSEKKSPIGPSTSIMTSRVIPAPTPTPRRLIQVNGDVLGHLDLDSQISSLGTFTVLSYNILADAYATTDAYSYCPTWALTWNYRRQNLLREIIGYHADIICLQEVQVNHFEDFFSPELDKHGYQALYKKRTTEVYSGNPMAIDGCATFFRRDKFSHVKKYEVEFNKAAQSLTDAIIPAAQKRVALSRLIKDNIALIAVLEAKFGNHGAENPGKRQLLCVANTHINVHQDLKDVKLWEVHTLLKGLEKIAVSADIPMLVCGDFNSTPGSSPHALLAMGKVDQHHPDLAIDPLGILRPPSKLNHQLPLVSAYSAFARMVGVGYDLEHQRRTDPATNEPLFTNCTRDFTGTIDYIFYTADSLTVDSLLELLDEESLRKDTALPSPEWSSDHIALLAEFRCKPRIRR

SEQ ID NO: 267960 - protein, 96 aa, Zea mays
  Clone ID: MRT4577_175981C.1.pep
MAKIKIGINALGRIGRLVVTVALQSDHLQLVVINHPLIITHYMTYMFKYDTVHGQCKHHEVKVKDSKTLFFGEKEVAGFGCRNLDEIPWGSVGAEY

SEQ ID NO: 267961 - protein, 64 aa, Zea mays
  unsure (1)..(64): unsure at all Xaa locations
  Clone ID: MRT4577_175982C.1.pep
PPXSPFFFFFFFFFFTLGWSTVPNVQKYHGYLQNHXYSKXDFLQFEPKHLLSKTPEKYYSISSI

SEQ ID NO: 267962 - protein, 398 aa, Zea mays
  unsure (1)..(398): unsure at all Xaa locations
  Clone ID: MRT4577_175983C.1.pep
MEAEVGPPNPPRPEPAGSEPDDARLSPPPPAPAPPPPPPPPPAAEAAAAPTASAAFSLQAPAPAPAEANGSSDFAGWGKRRRKAEDGDGCKACSCKKSRCLKLYCVCFASGLHCTESCGCXTCHNKPQLQGTLRMATVLPLKPVQTFEAGQDIVEQVIRSPMDLIRRKCTCKKSGCLKKYCDCYQGGAGCSINCKCDDCRNPFGRKVGVILDGKSSLTAPILHERNGTEVDSSDEEDDFYMNRQLSPIPPSPVSRESSFQQETLVGVEVQTMNGHLYPKPLTQVRPEPSSWQLSRRPIEEPRGEIWRFSRRPSEDGTSDAMEAHAVAPRESKKAAEVRGDRFGIPRCIEVMSAMVELSPVEKSLAPDVFLDASNREIFLSLSVDIRPIWLRRKMKSLV

SEQ ID NO: 267963 - protein, 134 aa, Zea mays
  Clone ID: MRT4577_175984C.1.pep
RIGFPARPTRTRRIRTMSCACENASVTDPTKGTAQVTHSQMIHGATANYTDAADLKWRSCRTTDDLHMQNCFRYRAVSWSLRWSESSCSTGTISYSDRSSSSSYTSTTRLLHCLGSWTTKTATSNSCTRCDSLT

SEQ ID NO: 267964 - protein, 97 aa, Zea mays
  Clone ID: MRT4577_175985C.1.pep
WWFCTNQPGMVGKYGTRYGASLRTPIQKLAVSQLFKFFCEFCAKFAMYKIAVGILLCKDCRMVKAGGASQMNSASSVAVTSTYTAPQYQSQAFVLQA

SEQ ID NO: 267965 - protein, 67 aa, Zea mays
  Clone ID: MRT4577_175986C.1.pep
WSSPMAATLRIISTPLQSQKFPVLAATQISSVKSPPSYLQPQPQKGRVFLLQPNYPADVRGHATIIA

SEQ ID NO: 267966 - protein, 46 aa, Zea mays
  Clone ID: MRT4577_175987C.1.pep
TRICISLLQYVRGYTLQVDEFVIHAQCIFLIYLWKNQFLKSNVIWL

SEQ ID NO: 267967 - protein, 42 aa, Zea mays
  Clone ID: MRT4577_175988C.1.pep
SSLGSCPHPVRNYFPLDKMILDTINRIMLIRTMVPILKRVYQ

SEQ ID NO: 267968 - protein, 169 aa, Zea mays
  Clone ID: MRT4577_175989C.1.pep
CARRGAQRRHCCGSNGRLVLPRRLLAIHRDHFSLASFDPAPSGLRIAHRACPPPKTAPEPLRSGAAYWPARRPRLSAACVDLVAAVEVGRAAAAMGISARWLKSLVGLRKVEQQPRKESADVGRMKSDVADQFHFQNQRSQDDSSIAAQEEIPEVPYGNDPPEDDSNAP

SEQ ID NO: 267969 - protein, 67 aa, Zea mays
  unsure (1)..(67): unsure at all Xaa locations
  Clone ID: MRT4577_17598C.1.pep
NRELYKNNIQGTVPSELGNLKNLISFDLYKNXNISGTIPPALGXLKSLVFLRLNGNHLTGPIPRELA

SEQ ID NO: 267970 - protein, 60 aa, Zea mays
  Clone ID: MRT4577_175990C.1.pep
SRSCFFAVVEISECVAPRVCFPSLSNVFWGSQFSSPFHSLNTKRLSCPACLKNTYFCISS

SEQ ID NO: 267971 - protein, 74 aa, Zea mays
  unsure (1)..(74): unsure at all Xaa locations
  Clone ID: MRT4577_175991C.1.pep
IEDAVDGAISWLDSYQLAEVEEFYDKMKELEGICNPIIANMYQGEGXGHGALILIYDXAPDGSSSSGSNIEEED

SEQ ID NO: 267972 - protein, 119 aa, Zea mays
  Clone ID: MRT4577_175992C.1.pep
GAQRRHCCGSNGRLVLPRRLLAIHRDHFSLASFDPAPSGLRIAHRACPPPKTAPESLPSGAAYWPARRPRLSAACVDLVMRFFTGFFHSLSPLRPLRLCCSSVPMLRETGKKSFSGCCC

SEQ ID NO: 267973 - protein, 83 aa, Zea mays
  Clone ID: MRT4577_175993C.1.pep
LPIERRIMEAMSRPEMVDKEVGMQSFLCSRVNDSDRSAVMVAAAAAPSGGSEQRRYVRATHQADARAPGAAGSRRSVCAFETV

SEQ ID NO: 267974 - protein, 76 aa, Zea mays
  Clone ID: MRT4577_175994C.1.pep
RELAMALTGWTNHSYISRKHKLTDVHMLRVILAILEMRRKSNRLLLSRSIGDYHSRAWMHACTLNVNYDHDSIHNS

SEQ ID NO: 267975 - protein, 139 aa, Zea mays
  unsure (1)..(139): unsure at all Xaa locations
  Clone ID: MRT4577_175995C.1.pep
GSPEEQARSRHLSAANRRRPARPRGSAAPIGEFLKKAKAKVAGVQAQEXRALARVRETTEFFHGDSAREEGHPLRIFMVVRDFLTALDHVCRDVVKVNERAAAGGWSRRVGNTHAPPVFGAVRSRSTSSSSSSEESSAP

SEQ ID NO: 267976 - protein, 113 aa, Zea mays
  Clone ID: MRT4577_175996C.1.pep
MTTVNKPKSEMTEEELRQQEELEFNTGPLSVLQQSVKNNNQILISCRNNHKLLARVKAFDRHCNMVLENVKEMWTETPRTGKGSKAKPVNKDRFVSKMFLRGDTVVLVLRNAV

SEQ ID NO: 267977 - protein, 70 aa, Zea mays
  Clone ID: MRT4577_175997C.1.pep
PRVRPGAHNFPRAIVIHSPMIPSPKFINNRGHHKQTELDTNILSVNPNCTLNTRNYTEVNPYLTNIIYAS

SEQ ID NO: 267978 - protein, 67 aa, Zea mays
  Clone ID: MRT4577_175998C.1.pep
MFGDCQVLSSMAAVAGASSSADTLFIPNPGALAGFMFSSFGVVAMPFHHFFTTVVSLVPKEEGGIMG

SEQ ID NO: 267979 - protein, 336 aa, Zea mays
  Clone ID: MRT4577_175999C.1.pep
MAATSEEAIKQFSALMEQLEEPLKSTFQNVHQGNLRGTLMRFLKAREWSVPKAYKMLMDCLNWRVQNEIDIVLAKPILPSDIYRVIRDTLLVGLTGYSKQGQPVYAFGVGLSTFDKASVNYYVQSHIQMNEYRDRVVLPAASKKFGRQINTCLKVMDMTGLKLSALSQIKMLTMITTVDDLNYPEKTETYYIVNAPYVFSACWKVVKPLLQERTKKKIQVLYGSGRDELLKVMDYESLPHFCKREGSGSSSDSLDGVDCYSYDHPFHQQLYNYMKQQQSLNQDSVGPRKQGSVHVDVPSPGLEEAKIAETIKAELQNLRGSGGLAHSFSSIQIEGP

SEQ ID NO: 267980 - protein, 155 aa, Zea mays
  Clone ID: MRT4577_17599C.1.pep
MEARIAGVPEDEESGLLPRPSAAGRRPSSRGPRFPPPPAAWATVDGPLGLPLEDAEGHARRFFMWGFACLPFLWAINCCYFWPVLRSSVASSPAAFAPIRPYVVRSAIGFTIFSVVLVTWATTFVVGGERLFGPVWNDLVMYNVADKLGISGFMG

SEQ ID NO: 267981 - protein, 89 aa, Zea mays
  Clone ID: MRT4577_1759C.1.pep
PCNIVHGGVVVAEHENYDQLQDHLSELTALGGAQLLVALPGALTRVEAQVALLRSRRRRYRALGGQALSARPSALNSVYATIPLCSRHK

SEQ ID NO: 267982 - protein, 70 aa, Zea mays
  unsure (1)..(70): unsure at all Xaa locations
  Clone ID: MRT4577_175C.1.pep
SSLFIHYLPNXLRRFFFHKGGHLYLLLYHNITYFSIISHNLSTLILNNYFYLSFQIYIIFTNKLSILLIQ

SEQ ID NO: 267983 - protein, 170 aa, Zea mays
  Clone ID: MRT4577_176000C.1.pep
MAPTVMMASSATAVAPFQGLKSTASLPVARRSSRSLGNVSNGGRIRCMQVWPAYGNKKFETLSYLPPLSTDDLLKQVDYLLRNGWIPCLEFSKVGFVYRENSTSPCYYDGRYWTMWKLPMFGCNDATQVYKELQEAIKSYPDAFHRVIGFDNIKQTQCVSFIAYKPPGSD

SEQ ID NO: 267984 - protein, 128 aa, Zea mays
  Clone ID: MRT4577_176001C.1.pep
MAPTVMMASSATAVAPFQGLKSTASLPVARRSSRSLGNVSNGGRIRCMQVWPARGNKKFETLSYLPPLSTDDLVKQVDYLLRNGWIPCLEFSKRGPGSRSNCTAACYPTEWYWRSLSRGMCTSCDRRT

SEQ ID NO: 267985 - protein, 57 aa, Zea mays
  unsure (1)..(57): unsure at all Xaa locations
  Clone ID: MRT4577_176002C.1.pep
SXTKFGDPFFCKQPNRLFIGCAVLLILKVEKRAGAHYLFCITPTARVSVRTNALTLN

SEQ ID NO: 267986 - protein, 88 aa, Zea mays
  Clone ID: MRT4577_176003C.1.pep
CNTFFMLSDGQSWAMLQNLRDNGQSVAFDCPEMDKVVDEVKNVEEWLNQCHCTLLLDGNNSSLLSILVKIRGLLDDVCTLYAEDCMKL

SEQ ID NO: 267987 - protein, 170 aa, Zea mays
  Clone ID: MRT4577_176004C.1.pep
MAPTVMMASSATAVAPFQGLKSTASLPIARRSSRSLGNVSNGGRIRCMQVWPAYGNKKFETLSYLPPLSTDDLLKQVDYLLRNGWIPCLEFSKVGFVYRENSTFPCYYDGRYWTMWKLPMFGCNDATQVYKELQEAIKSYPDAFHRVIGFDNIKQTQCVSFIAYKPPGSD

SEQ ID NO: 267988 - protein, 199 aa, Zea mays
  unsure (1)..(199): unsure at all Xaa locations
  Clone ID: MRT4577_176005C.1.pep
MDAARGGGGVGRAKSDHLAPSLSLSRTASAETVLGTAADAAKPAGFGRKRRSASVGGGNNNSHIRKSRSAQLKLDVEDLVSSGAALSRASSASLGFSFTFTGFTPPLQHMCSADPPSFSDDENLDIEAGTRRKKLVTEPTLPIYLKFAEVKYRVAGKGSPREILGGISGSASPGEVLALMGPSGSGKTTLXEHPGGMAA

SEQ ID NO: 267989 - protein, 147 aa, Zea mays
  unsure (1)..(147): unsure at all Xaa locations
  Clone ID: MRT4577_176006C.1.pep
FLNQTQLQGMSPNATCWDSVIPAFIQKGQLKTPVNLFSKMLFTKTRPTLGTWSFFISPLSQNGMPQEVPSIFSKIQEVESAPSPPIFSSATLAVKPPAFVDSGKATHACVVKKGLLLSRSVIQXKKNMSGSFAAKAPMDGLLSLFPE

SEQ ID NO: 267990 - protein, 170 aa, Zea mays
  Clone ID: MRT4577_176007C.1.pep
MAPTVMMASSATAVAPFQGLKSAASLPVARRSTRSLGNVSNGGRIRCMPSWPAYGNKKFETLSYLPPLSTDDLLKQVDYLLRNGWIPCLEFSKVGFVYRENSTSPCYYDGRYWTMWKLPMFGCNDATQVYKELQEAIKSYPDAFHRVIGFDNIKQTQCVSFIAYKPPGSD

SEQ ID NO: 267991 - protein, 136 aa, Zea mays
  unsure (1)..(136): unsure at all Xaa locations
  Clone ID: MRT4577_176008C.1.pep
AGNLARGXGKETCMQVWPAYGNXQFETLSYLPPLSTDDLLKQVDYLLRNGWIPCLEFSKVGFVYRENSTSPCYYDGRYWTMWKLPMFGCNDATQVYKELQEAIKSYPDAFHRVIGFDNIKQTQCVSFIAYKPPGSD

SEQ ID NO: 267992 - protein, 107 aa, Zea mays
  Clone ID: MRT4577_176009C.1.pep
IPKFSHKGLKKNPVYRAQTKKIRGQKKPGFKKGLILKNSRGNSVLKIKFVLKKPKKAPAPGRKGKETFIKSPCGKGCPQKFGIHKNLLLPVFPWGEPKYGGQLWVPP

SEQ ID NO: 267993 - protein, 53 aa, Zea mays
  unsure (1)..(53): unsure at all Xaa locations
  Clone ID: MRT4577_17600C.1.pep
AGPADXPLLRPFXRRTXRHAXRXXMAAPDCCCCASKDXRGWSQSXEKAAECAK

SEQ ID NO: 267994 - protein, 238 aa, Zea mays
  Clone ID: MRT4577_176010C.1.pep
MSSPQSAAPPVKLITAFGSPFAHRVEVALALKGVPYELVVEDLANKSELLLTHNPVHQSVPVLLHGDRAVCESLVIVEYVDETFHHGAAPGILPADPYDRATARFWADFIDNKCLKPMWLSMWTDGEAQARFVRETKESLGVLDAQLQGKRFFAGDALGFVDLAACTLAHWLGVLEEVAGVHLIAADGEYPALRRWAKEYVSDEVVSRSLPDRDELVAFFTASKERYKSWVRAEVERH

SEQ ID NO: 267995 - protein, 102 aa, Zea mays
  unsure (1)..(102): unsure at all Xaa locations
  Clone ID: MRT4577_176011C.1.pep
ARNSARAXXAXVXHXLXIXXTXLRTSSRXXGIXKGXXEPTXMDXFDLMHYXHXXAXXQAXLLXDQLXVGVVXDXXXVANXXPXXXXMEXXXXXLXXSXVLRX

SEQ ID NO: 267996 - protein, 74 aa, Zea mays
  Clone ID: MRT4577_176012C.1.pep
RPGSLLVTPEERSLIDAIAFARSHLEAMIGELMSPMVEQVSRRLDIPLPRFSRRLERMHYIVEYVEEEGCADDI

SEQ ID NO: 267997 - protein, 90 aa, Zea mays
  Clone ID: MRT4577_176013C.1.pep
LRGRGLGGGVCEFWRQKSSRRTYPFHAQYWGAGLAHRQHPREHTSPQRCVHTPGSGERRNGIPMHTMPPQTGKGTHPLAPGPERPAWFNP

SEQ ID NO: 267998 - protein, 140 aa, Zea mays
  Clone ID: MRT4577_176014C.1.pep
KGLSPPHCSLIFISQNGKIPMGGATPNESLSFVFFVKKKKKRGLLKEKVGRSMSLGLGENPKKGFLGLSKPKVLSKKTGFKGIGKNRPKNFPFKTPNWGNPKPGGKKRDPGKVFFFFFSQRKAKKFFFFFSKETFFFFWN

SEQ ID NO: 267999 - protein, 127 aa, Zea mays
  unsure (1)..(127): unsure at all Xaa locations
  Clone ID: MRT4577_176015C.1.pep
MISSSGLAAAPQALPPLARRASSFAVACSKNKIKTDKPYTIERGLTVNANTYGTKAKGKSANHLTHQHPTNGYRYSPIYNXDDWSPTRDVLASSGSMCGSDLDFVTHVWDPAVTGPSSDTTTDALYR

SEQ ID NO: 268000 - protein, 156 aa, Zea mays
  unsure (1)..(156): unsure at all Xaa locations
  Clone ID: MRT4577_176016C.1.pep
FXXXGWXDDVIDXGVISLVLGCXDLRVVDLGGCVXIIDEXVVVXVNGCXXWXSLXFXFCQXXXXXXXXXFXNXXVKXKXXXWDVVKDXFXXXXXXQXXXLXXXXVXVXXDXXXXLXXXXERXXXXXSGXXXXXSVXXXCXXXPHXAGRAXMANHAX

SEQ ID NO: 268001 - protein, 66 aa, Zea mays
  Clone ID: MRT4577_176017C.1.pep
TWHWMCTSSDLPRVSLTERRFHLTTANKRVDHMDRRSCKVVSVTGSNATLQDADSEPASRSKGQSE

SEQ ID NO: 268002 - protein, 147 aa, Zea mays
  unsure (1)..(147): unsure at all Xaa locations
  Clone ID: MRT4577_176018C.1.pep
MLAPPGSPKILGPTRREPLKSWGAFPFEPPIWGGGPRLFPQWQKRFPGPQKTKRGPLNPPPPFPPPGKGGLFPFFPPRVGGLPIWPPPXRPFKXKGGKGLKAPPPLGLGGPPGLPQVFXSPAKGAFPFPPERGLVPKFFFKKRGFPR

SEQ ID NO: 268003 - protein, 163 aa, Zea mays
  unsure (1)..(163): unsure at all Xaa locations
  Clone ID: MRT4577_176019C.1.pep
MKRSASLFQVLLVFTAVIEIQWSTVSSIYCKDMPPNVYRPHSVTITEFGAVGDGVTLNTKAFQNAIFYLNSFADKGGAQLFVPAGRWLTGSFHLISHLTLSLDKDAIIIGSPDSSHWPVIDPLPSYGRGRDLPGXRHQSLIFGLNLTDVIITGANGSIDGQGA

SEQ ID NO: 268004 - protein, 109 aa, Zea mays
  Clone ID: MRT4577_17601C.1.pep
TINMIALGSHHEVYHPGALKVAFAEFISTLIFVFDGQGSGMGFFKMTGGGPTTPVGLIAAYGAAMFALFVAVSEGVNISGGYVNPVVDFGAFGGGDVTLFRRCLNWRVQ

SEQ ID NO: 268005 - protein, 477 aa, Zea mays
  Clone ID: MRT4577_176020C.1.pep
MKRSASLFQVLLVFTAVIEIQWSTVSSIYCKDMPPNVYRPHSVTITEFGAVGDGVTLNTKAFQNAIFYLNSFADKGGAQLFVPAGRWLTGSFHLISHLTLSLDKDAIIIGSPDSSHWPVIDPLPSYGRGRDLPGKRHQSLIFGLNLTDVIITGANGSIDGQGAIWWGWFHNHTLNYTRPHLVELMYSTNVVISNLTFKNSPFWNIHPVYCSQVLVRHVTILAPLNSPNTDGVTPDSSTNVCINHCYVRNGGDVIVIKSGWDEYGISFAQPSSNISISDITGETRGGSGIAFGSEMSGGISEVRAVGLRIVNSLHGIRIKTAPGRGGYVENVYIADVSMDNVSMAIRITGNYGEHPDDKYDSTALPVISNITIKDVVGVNIGVAGILEGIQGDNFSNICLSNVSLSVQSAHPWNCSLIEGYSNSVIPESCEQLRSNCRQTSICYDGSSSSVMSVQQPRHTSPTSRLLDLFTGVGFILV

SEQ ID NO: 268006 - protein, 666 aa, Zea mays
  Clone ID: MRT4577_176021C.1.pep
MNTPHSSSTSSVPPHRASPPQIPQSLTLAPTASSASPSSSSASGMRDAAEDDSDSPPSQMSEDDPGGGGGDRWEPDLRGGNGGGGGGGRWAPPDQVLENVLETVLEFLTAARDRNAASLVCRSWYRAEAQTRRELFIGNCYAVSPRRAVQRFGGLRAVVLKGKPRFADFSLVPYGWGAYVSPWVAALGPAYPRLERICLKRMTVSDDDLALVATSFPCFRDLSLVCCDGFSTLGLAVVAERCRHLRVLDLIEDYVEDDEDELVDWISKFPEGNTYLESLVFDCVSVPFNFEALEALVARSPALRQLRVNHHVSVEQLRRLMARAPQLTHFGTGAFRSEGAPGGGLAVTELATSFAASRSLICLSGFREVDPEYLPAIYPVCAKLTSLNFSFASLTAAELKPVIRNCTNLRTFWVLDTVGDEGLRAVADACSDLRELRVFPLDASEDSEGSVSDVGLEAISKGCRKLESILYFCQRMTNAAVIDMSKNCPELVVFRLCIMGRHRPDRVTGEPMDEGFGAIVMNCKKLTRLSVSGLLTDKAFAYIGKHGKLIKTLSVAFAGNSDMSLQYVFEGCTKLQKLEVRDSPFSDRGLLSGLDYFYNMRFLWMNSCRLTMRGCRDVARQMQNLVVEVIKDHSEDEGEGETVDKLYLYRSLAGPRNDAPPFVTLL

SEQ ID NO: 268007 - protein, 139 aa, Zea mays
  Clone ID: MRT4577_176022C.1.pep
PRVRPRVRTDKAFAYIGEHGKLIKTLSVAFAGNSDMALQYVFEGCTKLQKLEVRDSPFSDRGLLSGLDYLYNMRFLWMNSCRLTMRGCRGVAQQMQNLVVEVIKDHSEDEGEAETVDKLYLYRSLAGPRDDAPPFVTLL

SEQ ID NO: 268008 - protein, 121 aa, Zea mays
  Clone ID: MRT4577_176023C.1.pep
DPPDSRNSARGEMEGRIPFVYRAIVEYKSGKDDHVLATWVIESPSASYMRLPTGDSDRFQISDDRIFESDTYGKFSTSSSSSSSSSMGAPSASTKIILSAGVQSSCVSAPFDLSPHGAVDT

SEQ ID NO: 268009 - protein, 250 aa, Zea mays
  unsure (1)..(250): unsure at all Xaa locations
  Clone ID: MRT4577_176024C.1.pep
MSSPHSSSTSSVPHRASAPQIPQSLTLAPPTACSASPSSSFSSSSASGMRDAGEDDDSDSPPSQMSEDDPGAGAGDRWEPDLRGGGGRRAPPDQVLGNVLETVLQFLTAARDRNAASLVCRSWYHAEAQTRRELFIGNCYAVSPRRAVERFGGLRAIVLKGKPRFADFSLVPYGWGAYVSPWVAALGPAYPCLERICLKRMTVFDDDLALVATSFPCFRDLSLGCCDGFSTLGLRVGAXRCRHLRVPGSD

SEQ ID NO: 268010 - protein, 60 aa, Zea mays
  unsure (1)..(60): unsure at all Xaa locations
  Clone ID: MRT4577_176025C.1.pep
VARPLWFADQRVARLQIASIGVLVRARAACXPRKVRKKRSKKEGKKQKKKKKKSTRPRIR

SEQ ID NO: 268011 - protein, 137 aa, Zea mays
  Clone ID: MRT4577_176026C.1.pep
VPPAGTGPEFPGRPTRPTGLSGFTYVAPSVLESVKEKFSFEPKIRSPRRFIGSPRTPVSPVKFSPGDFWGRGASASTANPQTPVEYPMETSGIEQMDVTVSGEASAPLPIRQPNSGPYKKQAFPMISKRPEHLRMNL

SEQ ID NO: 268012 - protein, 33 aa, Zea mays
  Clone ID: MRT4577_176027C.1.pep
VPGPPPRPPPPPPPPPPPPPPPPPPPPHKAGKP

SEQ ID NO: 268013 - protein, 123 aa, Zea mays
  Clone ID: MRT4577_176028C.1.pep
PPPFLSLSPLPPCAIAKESSRRTCSQTTAPPVAELECREFRLTPLEPLITSLDEKGPWTSIIARRRPLLPPNPVVGSLHRSTTEEPVTEDPGEQQVEVAEQELIEGEEQVVQEEPQGEEYDLI

SEQ ID NO: 268014 - protein, 54 aa, Zea mays
  Clone ID: MRT4577_176029C.1.pep
LVAMTIMGWLVNRICWTYIIDVFFFHSLRLYIYLSRIFFIFFTSVRPRVSPRVR

SEQ ID NO: 268015 - protein, 56 aa, Zea mays
  Clone ID: MRT4577_17602C.1.pep
PSAPFLHGIRNFLVHSNSINLQSIPLFQPYSRVVLCTLKSNVFGSRKEANFVCIYV

SEQ ID NO: 268016 - protein, 77 aa, Zea mays
  Clone ID: MRT4577_176030C.1.pep
GNPPGEEPFAHLPFGAIIGGVVNHPLGPPVPAFFYPEWKRLMEQFWGPDPGQGPGFPKIAGGVCSLSGAANPGEAPQ

SEQ ID NO: 268017 - protein, 134 aa, Zea mays
  Clone ID: MRT4577_176031C.1.pep
GACSGGCGNRNTDTHKQSATHHKETASQKPQATKPTPKRNSKPAKRGRRRCSNDKPRPNDRPEALFMLAPAPGYAPTRWMPPTATVSDMARAGSLPRAGNRHNEGSSMDLGANNHRIPGKPFLQNQTSGTNELS

SEQ ID NO: 268018 - protein, 112 aa, Zea mays
  unsure (1)..(112): unsure at all Xaa locations
  Clone ID: MRT4577_176032C.1.pep
PLDPTRGLLSGAHRTVRCTPXXASATARERLSVASLRRLSGCPTRQSGAHRAGTVHCSVRHQALTDSPLEVFFVDFFGLLLFLSPGLLCIILCLLLRCCFPQFLSPSKYCIL

SEQ ID NO: 268019 - protein, 108 aa, Zea mays
  Clone ID: MRT4577_176033C.1.pep
MLKFKGLALLKSHRNCTEAKIPWTPNKIAPHQKRKCKLSVQICKSCECLFIECINNRIRPGPPVERHQVVELHNKTVPGSKQLYLLVSSTISNGSRRQEPAPAPGGLI

SEQ ID NO: 268020 - protein, 37 aa, Zea mays
  Clone ID: MRT4577_176034C.1.pep
ILWYRAIALSVGILKKINTYEGKCEITMCWSAREFKT

SEQ ID NO: 268021 - protein, 167 aa, Zea mays
  unsure (1)..(167): unsure at all Xaa locations
  Clone ID: MRT4577_176035C.1.pep
PEDRQEICVDSAAACASDVHGGSGERKGDGGGRKGLGGARTPRGEDRLVLLSTEPSLLVVSATELESAGDMXVVLWLEARLVCFRGDGLRGHLQRYRYRXSSLDDIPLLSIVRSDVITCVYLMADTSGLSHEPYLVTTTICSLDSLLILLIQVSVDSPLQDIVPELS

SEQ ID NO: 268022 - protein, 73 aa, Zea mays
  unsure (1)..(73): unsure at all Xaa locations
  Clone ID: MRT4577_176036C.1.pep
LGDKFAPATIGALFVCYELLSFSGGAIWNLSSFDQWGVELGKSLAPKIQPELXVLGASHXHDASPSGLINAFF

SEQ ID NO: 268023 - protein, 90 aa, Zea mays
  Clone ID: MRT4577_176037C.1.pep
INTNSPVFIGQRTQPWAGNCTFRKMTSLTEHGAIKETGRQTRGRYTKYTTVMRFRKTWHITLERAKDGPMMLKDLNIIALRQRRENCMPD

SEQ ID NO: 268024 - protein, 231 aa, Zea mays
  Clone ID: MRT4577_176038C.1.pep
CGFLLRLLWNLGANLASAAFGEWFSQVQTDKASMLDDAIEYLKHLQLQVQMLSMRNGLYLPPGNLSGAPETLAPLEMCAALNQSGAKASNSGVVVPPGNKIPVARLLLDPPNHDQRHENPLVLQSVPSSSTAVETRFLQQPAQPNLQSFQLAVPPEMIFDEADMMLKHRLASGRETTSLPVGHEAKPGRQEACMVNSDISNRGSLGKEVFMPYLHSLQSGDTEGGLRAGSN

SEQ ID NO: 268025 - protein, 154 aa, Zea mays
  unsure (1)..(154): unsure at all Xaa locations
  Clone ID: MRT4577_176039C.1.pep
MEGKEQDVSLGANKFPERQPIGTAAQSQDDGKDYQEPAPAPLVDPTEFTSWSFYRAGIAEFVATFLFLYITVLTVMGVAGAKSKCSTVGIQGIAWAFGGMIFALVYCTAGIXGGHINPAVTFGLFLARKLSLPKAIFYIVMQCLGAICGACVVK

SEQ ID NO: 268026 - protein, 58 aa, Zea mays
  unsure (1)..(58): unsure at all Xaa locations
  Clone ID: MRT4577_17603C.1.pep
MXRTQSAVAVAVVAAVLLLAAVATTSEXAITCGXVSSDIAPCLSYAXGTGSGPSVSCC

SEQ ID NO: 268027 - protein, 119 aa, Zea mays
  Clone ID: MRT4577_176040C.1.pep
ETPPRSSQTPRCVAPLEPPVLLLALEIPGTRMILQILVTSLHTVHRRKPSHGERRIRDSGESPAWNWADSNRPTCRDTTPQTAMVAAALHQRLRVRGNEGRDGGGDFFSLPAHRAFNQA

SEQ ID NO: 268028 - protein, 58 aa, Zea mays
  Clone ID: MRT4577_176041C.1.pep
IYARQNIYFIQILLHHHLTQPILILLNQPLQYDTDLYPTQLLPLTPSILNRTYTSSYT

SEQ ID NO: 268029 - protein, 94 aa, Zea mays
  Clone ID: MRT4577_176042C.1.pep
TRQVLKANPSICLPFCPNFCCPTFQTRLKQLYWGFIQNGFPPPSPPEKARLPNARHISQTKGDGRGFYNFCQNPWGKKGGPRAFCAVKRLGGSY

SEQ ID NO: 268030 - protein, 166 aa, Zea mays
  unsure (1)..(166): unsure at all Xaa locations
  Clone ID: MRT4577_176043C.1.pep
LRRPGFLSHSPGSLTLRRRPARPNHRRQLPPKRXARAPAPAKNKAVVTXPLFEKRSIQLGXIGAALPNNKDLHRFLKWPKVVRIHCQRRILKQCLKVPLVYNQFTRTLYQNFATNLFKMLLKYRPEDNCANNERILKRAQAEHEGNIVESNKPFXVKDGLNHVTLP

SEQ ID NO: 268031 - protein, 80 aa, Zea mays
  Clone ID: MRT4577_176044C.1.pep
VDFYLCPPTYQNKGDPPTPAGLPTKMSKYVPPSPGKIPPPLSATGSGAPVRSSFQSSNVPPPTKNGGSVGSKKNHPKNPP

SEQ ID NO: 268032 - protein, 42 aa, Zea mays
  Clone ID: MRT4577_176045C.1.pep
MVDTVVVVRVRRLVQGLRMVKVGMATVAVVLVALTTVQPANV

SEQ ID NO: 268033 - protein, 140 aa, Zea mays
  Clone ID: MRT4577_176046C.1.pep
AIFDKMKKDKNSENSQGERKDNSMHSVGEGTGQSKSQNLHVSQSRRSMKAPNFSMKRGPSMAMRAPSVAIRAPSISLRGPSMSLRASSMSVKEDQSSSNKSDEETESVLVKLSARQITLLLSSIWAQSTSPENTPVSNGF

SEQ ID NO: 268034 - protein, 61 aa, Zea mays
  Clone ID: MRT4577_176047C.1.pep
WRHFSSSMRGLRTCRGGQNHFTTFFESLLSPHAHFLYPCRLVPYNLIPQFFIIFFIIFNSI

SEQ ID NO: 268035 - protein, 321 aa, Zea mays
  unsure (1)..(321): unsure at all Xaa locations
  Clone ID: MRT4577_176048C.1.pep
XKTLRVSNDKMTWLTAALLQLAPDKQYVLPSSSPSTSLIQGLFTCPEGDIARNSVMDHSDIYAGARSLARASDLGNQYHRDANPVSGSSNNMANNYHVGRRPGEHTPDSHVLPTGATRVNEGSRYGKTDSEMIWQAVLENVQSDSLRRLLAREGRLISVSLGTAPTVQLIFNSRVNKSKAEKYRGQILQAFESVLSSTIILEIRYESKDDLAAGHAPVISAYPEDGSSNLVLRRSFTKHSSVSSGGENLIRRLQKDSVVQLGSSNQTRWMQSDPHILTEGEIIEVGSQMDWRAEQDSGIVMANRRQEAVSGEGLSSQNQEI

SEQ ID NO: 268036 - protein, 110 aa, Zea mays
  Clone ID: MRT4577_176049C.1.pep
VHARVRSEFGSRVSNGTLRHGESSGGAGTYEGRPETLYLAGPYLVSESTGMSSATGGLRVPLASPDGHVLGGAVPGPVTAPAPGQVVIGSSLADPKMDLDPGSRPEQTCC

SEQ ID NO: 268037 - protein, 103 aa, Zea mays
  Clone ID: MRT4577_17604C.1.pep
TSPLPLPLDHHHQSHGDCGGHADGGSWAGEDGRVRHSHDGTAPNFHEHIHIRRRLHQACAGTWTKATSMSEPLQSALARPRRLRENCPKASTGPTSTRQVYQC

SEQ ID NO: 268038 - protein, 54 aa, Zea mays
  Clone ID: MRT4577_176050C.1.pep
SGRLSSVGTLTEGISCLAGDTALQRVASLAYPSFRPSSEPPTLPCRVAHGQQLK

SEQ ID NO: 268039 - protein, 99 aa, Zea mays
  unsure (1)..(99): unsure at all Xaa locations
  Clone ID: MRT4577_176051C.1.pep
AAFDFSWFRWLAWLFLAGSAPVXGFLSLLGFAAILVVCVQAWRALFLGCFLSFWCRLRFGVPSSIFVAAVGLLFVISFWCCCWLLCVVLEWQNGCCSFL

SEQ ID NO: 268040 - protein, 142 aa, Zea mays
  Clone ID: MRT4577_176052C.1.pep
EVKPPMGFNTGWCPRRQAQQSASTIRRRFGLGALQWHRAVRRHRFSLFLGWPRWCSFAPPKSNQADNPLVPTKGTSRPCIFKMVWRRKEAEAGILGQEKGCYFSLVPLLSSRAEKWIIYLAERPRSMPRKECCFNWSRIPRL

SEQ ID NO: 268041 - protein, 72 aa, Zea mays
  Clone ID: MRT4577_176053C.1.pep
MVQRLTYRKRHSYATKSNQTRVVKTPGGKLVYQYTKKRASGPKCPVTGKKIQGVSCRQALHLYEILDCFALP

SEQ ID NO: 268042 - protein, 97 aa, Zea mays
  Clone ID: MRT4577_176054C.1.pep
GFLGGHVRGASLPESVLPVGGGSGTCFHWSGGKAPKGAAFFTSLSLCLPLLFTYLLPCLFSPCRSMAPAAPASLAFVSVAVAVAVLAVAELSADTYY

SEQ ID NO: 268043 - protein, 123 aa, Zea mays
  Clone ID: MRT4577_176055C.1.pep
PPPRPEVPEYFPPFPGKEEAPPLRLFMVVRDFLSLLAHVCKEVGPQARTPVVGSPRSFRMSATAAMATLQVSGPPARAPHDHQKSWSLLVIGVRGGPHRTDPPEPPIDEYFCFLAPLCTFFLV

SEQ ID NO: 268044 - protein, 77 aa, Zea mays
  Clone ID: MRT4577_176056C.1.pep
VVSPPRAWGRRCRWPPVAWPCLRLEPAAGEGKGWLHGGGGGDSRPRRQRGLLPRLGQQAQSDAAATYAVLWRRLGSP

SEQ ID NO: 268045 - protein, 88 aa, Zea mays
  unsure (1)..(88): unsure at all Xaa locations
  Clone ID: MRT4577_176057C.1.pep
SEMSNMAHPARFIKIIANRDRGRXCKALKMTSGGWSNFEDQALVVLVHDIRKNWELVSDAINNIVQFKCVHRQPKECKERHKVLLDRS

SEQ ID NO: 268046 - protein, 79 aa, Zea mays
  Clone ID: MRT4577_176058C.1.pep
MAGKYIVAGLVGSCVISYACDYIVSQKKIFGGTIPGTVSDKEWLKATEQRFQAWPRVAGPPVIMNPISRQNFIVKDLNP

SEQ ID NO: 268047 - protein, 177 aa, Zea mays
  Clone ID: MRT4577_176059C.1.pep
MEALFGCNNHGGHKAADLASLIIAQAALEVPRLLGLLAMILHNEIFTSGGDQNLITRILGKNKNATNPENKDDGESDDDNDDEGDDDDAENEEEDDGGDEGSDDNENEEDDDGDDDDPAANGEGGSDDDDDDGGEDEEDDDDDDDDGDDGNEEEEEESEEDDDDDDEVPQPPTKKRK

SEQ ID NO: 268048 - protein, 61 aa, Zea mays
  Clone ID: MRT4577_17605C.1.pep
FGVLISFVIFFGVWFLVFFFQGRSFVSGSGFPAFDFVWSCGNIGILLVLFLPPVPKIVVYN

SEQ ID NO: 268049 - protein, 46 aa, Zea mays
  Clone ID: MRT4577_176060C.1.pep
TNHLLSDFDSKYLYILRRVLFTSGRIAHLIHNIIFTKLDITPHELP

SEQ ID NO: 268050 - protein, 98 aa, Zea mays
  unsure (1)..(98): unsure at all Xaa locations
  Clone ID: MRT4577_176061C.1.pep
PGWTRPPEPGASGHIKQKPRSHGRIGHGASGKATTTXHLIYKLGXIDKRVIERXEKEGAERGXRSXKDAWVLDKLKGEXERGXTIDIGSGKXXTTKHY

SEQ ID NO: 268051 - protein, 127 aa, Zea mays
  unsure (1)..(127): unsure at all Xaa locations
  Clone ID: MRT4577_176062C.1.pep
MYVSFSPRILGKSEDETNPENKDDGESDDDNDDEGDDDDAENEEEDDGGDEGSDDNENEEDDDGDDDDPAANGEGGSDDDEDDGGEDEEDDDDDDDDGDDGNEEXEETSEEDDXDDNVPQPPTIKRK

SEQ ID NO: 268052 - protein, 176 aa, Zea mays
  Clone ID: MRT4577_176063C.1.pep
MEALFGCNKHGGDKAADLASFIIAQAALEVPRLLGLLAMILHNEIFTSGGDQNLITRILGKSENETNPENKDDGESDDDNDDEGDDDDAENEEEDDGGDEGSDDNENEEDDDGDDDDPAANGEGGSDDDEDDGGEDEEDDDDDDDDGDDGNEEEEEESEEDDDDDEVPQPPTKKRK

SEQ ID NO: 268053 - protein, 231 aa, Zea mays
  Clone ID: MRT4577_176064C.1.pep
MASVLPDTASDGKALTDAWDYKGRPASRATTGGWACAAMILGAELFERMTTLGIAVNLVPYMTGTMHLGNASAANTVTNFIGASFMLCLLGGFVADTYLGRYLTIAIFTAVQATGVMILTISTAAPGLRPPACADAKGASPDCVPANGTQLGVLYLGLYLTALGTGGLKSSVSGFGSDQFDEAHGGESSPAASKGRCARGRTWRSEAGGADAALYLVYSLLQHPRAADHFS

SEQ ID NO: 268054 - protein, 56 aa, Zea mays
  Clone ID: MRT4577_176065C.1.pep
YAFQTTKYRIKAILWEGWLYFTSGQRDRGPDNPAPKKVVGSMWRTRLHLRRKRKFF

SEQ ID NO: 268055 - protein, 78 aa, Zea mays
  Clone ID: MRT4577_176066C.1.pep
ALPPLKQFFWVVLGFVPKCSNCHVKNGGLNGEQAQILRTDSETCEKWDKSVHFKPVVWLFFKKKKKKKKKKKKKQKNK

SEQ ID NO: 268056 - protein, 85 aa, Zea mays
  Clone ID: MRT4577_176067C.1.pep
FSLAKSLVKLSISYLELWTWYLCLCNWLKRNLGMDYRNSSTSKKMGRKCFCLVKGNYYIWQSTDNNTKLETLLKLYMWLWSNSDH

SEQ ID NO: 268057 - protein, 56 aa, Zea mays
  Clone ID: MRT4577_176068C.1.pep
VASFIGNVLPCVLNLIDSMPEKRNLGSASCQDRYVLKFRRSRSAGEVPVQPLMLTP

SEQ ID NO: 268058 - protein, 714 aa, Zea mays
  Clone ID: MRT4577_176069C.1.pep
GFPPSYRFVLVPAAAAQTLANPSSAMADDHYSSKRKYDDPSPPPRRTGFSSGPPPASPPAGGAPSYNSVAPPPDEIQLAKQRAQEIAARIFNAAEAKRPRVDNGDDDVGGFGGGSSLGGSGGGGGGRIGGAGLGFSSSAGGGHGASIPPLSSQSSAPQYSYGGHQGTSKKIEIPNGRVGVIIGKAGETIRYIQLQSGAKIQVTRDHEAEPGALTRQVELSGKPEQISKAEQLIKEVLAEADAGSSGAGSGGRKYNATQPGAETFQMKIANNKVGLIIGKGGETIKSMQANSGARIQVIPLHLPAGDTSTERTVHIDGTQEQIEAAKQLISEVTSENRARNPMSGGYSQQGYRPPRPQSNWGPPSVPPQQPGYGYMQPGAYPGAPPQYGAPQQPYGSYPPTSGGYQTGWDQSQNQQSHTTPPGTGYDYYSQQQQPQQQSAPGTAASTDATSYNYGQPSTYASQGYDSTYTQQSGGQQAYGHDGYTGYQTQGQQQGYSQQTGYDQQGYGTSAYGSAANSTQDGSNYGGPGGASQASPGQQTSNPAAGSQPGYTSQPPTSAAATYPPQGSAPSGYGAPPSQSGYGTQPPQQGGYGQGAYGQPSPQGQKPPALSPYGQAPPPGSAQAGYGQYGYSQPAYGAPPAYPGAPIASHQGYGQQQSYGDAYGSASYGQPPAYTTEATPPAASQDHSAAPAAALGTTASPAPENSGGAQTSAET

SEQ ID NO: 268059 - protein, 50 aa, Zea mays
  Clone ID: MRT4577_17606C.1.pep
GKTKERPEKRRAISARTRRQGAGQRAGHAARNGPPPRGGCAATGGVPFAV

SEQ ID NO: 268060 - protein, 419 aa, Zea mays
  Clone ID: MRT4577_176070C.1.pep
AFVCLLFVLLFFFYYVHYVSLSYTYTDVQTIFLQNRARNPMSGGYSQQGYRPPRPQSNWGPPSVPPQQPGYGYMQPGAYPGAPPQYGAPQQPYGSYPPTSGGYQTGWDQSQNQQSHTTPPGTGYDYYSQQQQPQQQSAPGTAASTDATSYNYGQPSTYASQGYDSTYTQQSGGQQAYGHDGYTGYQTQGQQQGYSQQTGYDQQGYGTSAYGSAASSTQDGSNYGGPGGASQASPGQQTSNPAAGSQPGYTSQPPTSAAATYPPQGSAPSGYGAPPSQSGYGTQPPQQAGYGQGAYGQPSPQGQKPPALSPYGQAPPPGSAQAGYGQYGYSQPAYGAPPAYPGAPIASHQGYGQQQSYGQQQSYGDAYGSASYGQPPAYSTEATPPAASQDHSAAPAAALGTTASTAPENSGGAQTSAET

SEQ ID NO: 268061 - protein, 349 aa, Zea mays
  Clone ID: MRT4577_176071C.1.pep
GRDLVYKGFPLSYPFVHAPCSRRPNPSNPSSAMADDHYSSKRKYDDPSPPPRRTGFSSGPPPASPLAGGAPSYNSVPPPPDEIQLAKQRAQEIAARIFNAAEAKRPRVDNGDDDSGGFGVGLGSTGGGGRIGGGGLGFSSSAGGGHGASIPQLSSQSSAPQYSSYGGYQGTSKKIEIPNGRVGVIIGKAGETIRYIQLQSGAKIQVTRDHEAEPGALTRQVELSGKPEQISKAEQLIKEVLAEADAGSSGAGTGGRKYNATQPGAETFQMKIANNKVGLIIGKGGETIKSARANSGARIQVIPLHLPAGDTSTERTVHIDGTQEQIEAAKQLISEVTSEVRLLSRCVYS

SEQ ID NO: 268062 - protein, 81 aa, Zea mays
  Clone ID: MRT4577_176072C.1.pep
RVVLKRAKDTDKFRVVVNMKSWEGSKWSRPLFYFIKRGLPQALPHRHVKSFIRSPKTFEDISSPPPPQLVDPHFSMAGSAH

SEQ ID NO: 268063 - protein, 84 aa, Zea mays
  unsure (1)..(84): unsure at all Xaa locations
  Clone ID: MRT4577_176073C.1.pep
SARYYHAKPEFGAHHIGKAMAHSRQSIFYLTXILGRPPPNMEPXXXXNINXXXRKXFFXXXXXGIHILTKFPPSIIHQRLSLRA

SEQ ID NO: 268064 - protein, 45 aa, Zea mays
  Clone ID: MRT4577_176074C.1.pep
TISTLYISKLSPRASPEHLPTSTYVFGRSKRAQSTIISVLACPLL

SEQ ID NO: 268065 - protein, 40 aa, Zea mays
  Clone ID: MRT4577_176075C.1.pep
PYILPHYDVVKIKALYLGVTCPNVKQLPFTDGFSHVWADA

SEQ ID NO: 268066 - protein, 43 aa, Zea mays
  Clone ID: MRT4577_176076C.1.pep
NSGAVFHLQRMMPVTAPVIRLHQHCAITHPGDSSRKFFEQGSG

SEQ ID NO: 268067 - protein, 69 aa, Zea mays
  Clone ID: MRT4577_176077C.1.pep
TILPHVPLDSFFCCHHICLAGIKEERPFLVEIYADDINPTTTIKGKHYIGSGTSVKRFHHMQVHVYDKS

SEQ ID NO: 268068 - protein, 75 aa, Zea mays
  Clone ID: MRT4577_176078C.1.pep
HVLNFLCSLLQLTHAKWQFLYNDPIEFVIAHVFAKFHQVLLQQNKQSWNIELRHWSLKKRSRNPKNGWITMLKYG

SEQ ID NO: 268069 - protein, 81 aa, Zea mays
  Clone ID: MRT4577_176079C.1.pep
PLLMYGKNSIISLPGVASSSNARRTVPMLPTRHGGKQRNQASKDKFSRVISMSSAVCSLVSLSSDENYFLGSSMDGSVSYT

SEQ ID NO: 268070 - protein, 61 aa, Zea mays
  Clone ID: MRT4577_17607C.1.pep
RGGGKKLLKKNCVKGGSKKCVKKLANKNKWPLEKFQNFTRVCKIWRGRILNGPSPVEAIGS

SEQ ID NO: 268071 - protein, 99 aa, Zea mays
  Clone ID: MRT4577_176080C.1.pep
GSGPLGWFMCLFMCLYLLIYLSRFSRISLSSQRVIVGYGRSFIASFYYTVSLVYRHSSNYPTSVFSFCELQSYLVRILVTGLRSHKLSSRDVIVLCGSK

SEQ ID NO: 268072 - protein, 80 aa, Zea mays
  Clone ID: MRT4577_176081C.1.pep
CINREKHWDPSTVALKHGQGDIEKKERTNSFEKHNLHSTQFFSPAPSRNLPSRHGMIIPFPWFRQIKRPCYPCPSPLSFR

SEQ ID NO: 268073 - protein, 107 aa, Zea mays
  Clone ID: MRT4577_176082C.1.pep
EAPPLHPSGGGPSAHPRKSLPLRGPAPAPVRPFALALCRMGPTLLLPPAFFPSSSFALAWGGSPQAGGWLCWVLSFAGRPHPCGPPPPRWGAGGLGDPGPPGLGSPP

SEQ ID NO: 268074 - protein, 64 aa, Zea mays
  Clone ID: MRT4577_176083C.1.pep
PKFPARAHACGPLILKITSCVVITYTHIHLGYKGAFQPFTVITLHALFHTQPPISLTLLKTISP

SEQ ID NO: 268075 - protein, 265 aa, Zea mays
  unsure (1)..(265): unsure at all Xaa locations
  Clone ID: MRT4577_176084C.1.pep
GIAEHIGTRDLVQEFLALXVFPXLKEWTMPKLKGEKKKGELVRLPYHYKFKKYFKVPCQEWLDTIEIMSNEILGNYSKKEDQLMTAAFGTRPKRRLNRVLDAIGFEYADYGRLGGDAGGPKRKRIASATDEEVVKVAKKKKKDSEDLSXIXNPEPKVATTKKRKNASPEPETPVREEDTPASPSAIEVEEIMKVMTEPLPFRLSPLALELTKFFQKDKAASAVESPAKPKKRRIIQVTDVIHQTPPPATVSKIVFTETAEAESLE

SEQ ID NO: 268076 - protein, 97 aa, Zea mays
  unsure (1)..(97): unsure at all Xaa locations
  Clone ID: MRT4577_176085C.1.pep
CEATINISXXSIHKLLATLXKHNACRKKLKYYLCLQPTNTNFSINKTVMIVRVSVGNFKCKSFHLDTGNYSXXIDAFTRKTSFLYFFYNVSNNYLFM

SEQ ID NO: 268077 - protein, 162 aa, Zea mays
  unsure (1)..(162): unsure at all Xaa locations
  Clone ID: MRT4577_176086C.1.pep
GIADEMGLEASFPVKRRALRKKQFDESNDQEEILEAERVFKVKYFWXVVDMAITSLKTRFEELMVFKDIFGFLLRSTILKSLNDTELEESCTKLADTFSHNGLSDVEVHDLISELKILKFTLPDSILSAMEIFEHVRDLDCYPNVAIAYRILFTMPVTVASA

SEQ ID NO: 268078 - protein, 112 aa, Zea mays
  Clone ID: MRT4577_176087C.1.pep
YMECYHRPSYFYRILQHIDLQGGTFILVPYPSAHQIQRSTSSELDVGGHAVNAVVERLDDGVGDEADPLRGCAGRDCFVRRSRRRAYACGRRYCGSSGSGAGGIRSGLAARV

SEQ ID NO: 268079 - protein, 92 aa, Zea mays
  unsure (1)..(92): unsure at all Xaa locations
  Clone ID: MRT4577_176088C.1.pep
RTSNNLTTKATKILAPSCCFCPFXSATHAYIXITQCLLVPSAIIAQLLPPGTSMGFEHXAVQAYMLQLALAASVVQHPIAQYVQQSLDHLNL

SEQ ID NO: 268080 - protein, 145 aa, Zea mays
  unsure (1)..(145): unsure at all Xaa locations
  Clone ID: MRT4577_176089C.1.pep
MRIFVKTMTEKTISLXVESNDPIDNGEVRIQDNERIPTDHERMIFVAKHVKDGRTLVNYNILHEPTLXIVLMVHGXGINCRPTLLALAAQNYHHKMICTICYAXRVCPRAANWLKNKSGHSHLLMAKKNIKICCVAARHLPEQCC

SEQ ID NO: 268081 - protein, 49 aa, Zea mays
  unsure (1)..(49): unsure at all Xaa locations
  Clone ID: MRT4577_17608C.1.pep
KRKDKYXNVHTXICKPINFIIPRSNKLEKEMVKPKCSKPLLLLVTLTHQ

SEQ ID NO: 268082 - protein, 62 aa, Zea mays
  Clone ID: MRT4577_176090C.1.pep
KKLLTLPPLVMGDTAPPIPRLLTKLGSLVPRQRLHYLITTVHNFLRNKHRRQLNCNGRNLPG

SEQ ID NO: 268083 - protein, 78 aa, Zea mays
  Clone ID: MRT4577_176091C.1.pep
MSALGTNQTQELSFMSDLDVQLPSAFDPVADANADDSSAGARSKDYVHVRIQQRNGSKSLTTGPGLQREYSYYMILKD

SEQ ID NO: 268084 - protein, 62 aa, Zea mays
  Clone ID: MRT4577_176092C.1.pep
SSPQLSTRLSLATLVDLLIGWVCRPGERWSSRWSTPSIWHSSPCRAPLPGRASSTPVVSRKR

SEQ ID NO: 268085 - protein, 50 aa, Zea mays
  Clone ID: MRT4577_176093C.1.pep
SIAVLQPNTCPQPRVLYFKQDRNIQLNPLNACNPPALNTGSDYLSQDRER

SEQ ID NO: 268086 - protein, 62 aa, Zea mays
  unsure (1)..(62): unsure at all Xaa locations
  Clone ID: MRT4577_176094C.1.pep
TSDTTDLRVFYPIILLETELDMXYFXQARTEMMLNALGVELSLQKVNLRPMIRDAHGRKMSK

SEQ ID NO: 268087 - protein, 113 aa, Zea mays
  unsure (1)..(113): unsure at all Xaa locations
  Clone ID: MRT4577_176095C.1.pep
GSSXWRFLARVLGPAWCPALAPPGPLRFRLVVXGGSXGXWVWAXSXVLPRRWXAGRXXXXGVXXXXVXXAGRPPCXXRXWRAGLCLFFFLSLPAPFFPLKPPRVRRVGRVGPG

SEQ ID NO: 268088 - protein, 44 aa, Zea mays
  Clone ID: MRT4577_176096C.1.pep
RHPYPELRCSDNVLSLSQQKIIQSPTKERKHGDRQMCKLLTGYP

SEQ ID NO: 268089 - protein, 71 aa, Zea mays
  Clone ID: MRT4577_176097C.1.pep
HPDTRRQGPRPGAVLEQQWLTDACRRPPSFYPPTPPPADCFCQKKKTARIAFSVSTVICRYLGCGATFSPA

SEQ ID NO: 268090 - protein, 53 aa, Zea mays
  Clone ID: MRT4577_176098C.1.pep
KRFMEEKSPWYPKKYFFFGDHPKLLVLTGFHKLLGGTKRPFSHMIGWSTHFFL

SEQ ID NO: 268091 - protein, 88 aa, Zea mays
  Clone ID: MRT4577_176099C.1.pep
ARAPFLLVFAGHVAPIEHRWNQHGLGGDNVLGSCRDLHPGPVSLLHWSGSGKPWARLGAGRPCPLDALWAPFDLYDPGGGAEESPYKF

SEQ ID NO: 268092 - protein, 73 aa, Zea mays
  Clone ID: MRT4577_17609C.1.pep
PTRPPTRPKKKKKKKKKKREKKKKRRKKVQMIYSDSDLFKRTCICYKRLGGAILWVLIFLRFTWEALVFLWVF

SEQ ID NO: 268093 - protein, 35 aa, Zea mays
  Clone ID: MRT4577_1760C.1.pep
MKVSVKTLKGSSFQIEVEPTDKVLIGCAPDLSLCF

SEQ ID NO: 268094 - protein, 325 aa, Zea mays
  Clone ID: MRT4577_176100C.1.pep
MERAASVISSLLGGGGGGSGAQAATVKSVLVYPIKSCRGISVPQAPITATGFRWDRQWMLVNSKGRACTQRVEPKLALVEVQMPPEAFAEDWHPTPDDHMVIRAPGMEPLKVPLSVECATISDVSVWEWTGAAYDEGAEAAEWFSTFLGCPTRLVRFNEDSETRLTDPDYARGYKTMFSDGFPYLIVSQGSLDALNEILKEPIPINRFRPNILVEGCHPYAEDMWKSVKINKLTFQGVKLCGRCKVPTINQDTGIPSPTEPTETLQTYRSGEVLLRSHKNKRQVYFGQNAVCKESLSANVEGRIVKVGDPVYVTQSFSSSVEVPA

SEQ ID NO: 268095 - protein, 272 aa, Zea mays
  Clone ID: MRT4577_176101C.1.pep
MERAASVISSLLGGGGGSGAQAATVKSVLVYPIKSCRGISVPQAPITATGFRWDRQWMLVNSKGRACTQRVEPKLALVEVQMPPEAFAEDWHPTPDDHMVIRAPGMEPLKVPLSVECATISDVSVWEWTGAAYDEGAEAAEWFSTFLGCPTRLVRFNEDSETRLTDPDYARGYKTMFSDGFPYLIVSQGSLDALNEILKEPIPINRFRPNILVEGCHPYAEDMWKSVKINKLTFQGVKLCGRCKVYFGQNAVCKESLSANGEGRIVKVGDPV

SEQ ID NO: 268096 - protein, 101 aa, Zea mays
  unsure (1)..(101): unsure at all Xaa locations
  Clone ID: MRT4577_176102C.1.pep
KTXGPNQXNRASQKQQHKAPXRKERGGKKGEDTSXAATAPERPQXXXKRTPPTRTAAXXAKKNSPTKDXXQKKTRRPATNRXGTAXEKRPSKRTTNSRDQK

SEQ ID NO: 268097 - protein, 78 aa, Zea mays
  unsure (1)..(78): unsure at all Xaa locations
  Clone ID: MRT4577_176103C.1.pep
MGRMHRPGKGILAXGLPDKRTPPTWLKTAASNLKRISPKEPKKAQMPGHMGVLLRDHHGFPLVKSATESKILRILRAH

SEQ ID NO: 268098 - protein, 58 aa, Zea mays
  Clone ID: MRT4577_176104C.1.pep
HPTPSWIMAMSFLTRSNPLGADAPNQVFCIKLVAVLSPLPPRYLSVVLIYAAQDQLFP

SEQ ID NO: 268099 - protein, 55 aa, Zea mays
  unsure (1)..(55): unsure at all Xaa locations
  Clone ID: MRT4577_176105C.1.pep
FIVFKINENLQQVVVDKLGGPGKSYDTFRAXFPPTMCRYAMFDFNFVTDGNCQKS

SEQ ID NO: 268100 - protein, 71 aa, Zea mays
  unsure (1)..(71): unsure at all Xaa locations
  Clone ID: MRT4577_176106C.1.pep
GGRPKFYFFFLFFFFFFFFLLYINLKIFFFFFFFFFFFXTKEIHYFEDLTHFKIRAYGVGGKDIYSRNPTH

SEQ ID NO: 268101 - protein, 157 aa, Zea mays
  unsure (1)..(157): unsure at all Xaa locations
  Clone ID: MRT4577_176107C.1.pep
TPPSVRFTFGMSHPNVSPDGRVSIFILPPPGEDPSGYDLPTARCPPAPPVESIVLSLISILFTPNPESPPNIXPPKDWKKNPDESKKKVSQCAPRSQEILLRRTMGELNESPTGVPQFPPNYLMSPFFCFPPHIFSPDVPRKVVLGLFTHTRPGCFP

SEQ ID NO: 268102 - protein, 126 aa, Zea mays
  Clone ID: MRT4577_176108C.1.pep
RGCCSRNSKATCMSLGSSAQEATQVHHAQHLEPVQATPQQQPRLLRRRRAARGAFGSSATRRRRRQRRELPWTFFVLVAAAGVRPLQLQRPQLHQLRNANIFFRHLPGGSLSQNLPLETHGELGSV

SEQ ID NO: 268103 - protein, 31 aa, Zea mays
  Clone ID: MRT4577_176109C.1.pep
NYIYLETFTKIFMHKGYALETLIYVCICLND

SEQ ID NO: 268104 - protein, 71 aa, Zea mays
  Clone ID: MRT4577_17610C.1.pep
SSKLNGGVGPKKIILRPRDGRGPCFTGFHTTLVHLGNRFCIFFWEFLNFFNQGPWFYHVPQVNPGFFPPKS

SEQ ID NO: 268105 - protein, 109 aa, Zea mays
  Clone ID: MRT4577_176110C.1.pep
VTHRLLEKLGCRVLSVASGVQCTSSFAAEPSFQLVVLDLALQRTDGLEVARAIRKFSSNSWLPLIVALAARIDDKVRDGCQRSGISGLIQKPATLAALGDELYRVLQNS

SEQ ID NO: 268106 - protein, 150 aa, Zea mays
  unsure (1)..(150): unsure at all Xaa locations
  Clone ID: MRT4577_176111C.1.pep
RGSWLXEAYSRHPYTLRATALDPMNAAKTKTSIDLTTHNGTPVLWKADLMGEGHXTTPSSASSGVLHIDTPIDYTGKDRGNEVINSTAEGTTIIMRSCXKDDTVRXFVYTNYGGTDNLXEHQTPGYNEDSCTDVDFCRHAKMTRWMYYEY

SEQ ID NO: 268107 - protein, 740 aa, Zea mays
  Clone ID: MRT4577_176112C.1.pep
MAVRASLACFPSDPALHAACGMPWGVAITPFSATDERGFPPATGAEGHLLPRCQSCFAYFNLLCPLDRWSWNCAICGAENDLSADAAARYARDGGHDPPEMRSAFVDLLLPGEEGEAAAAAAPTPVYVAAIDLSSSEEFLELVKSALQAALEALLPGSLFGLLTFSSKIGLYDVQGPIPIVKNVFIPPDSDGALQVDLEDIMPLCSFLAPIDSCKDRITEALETIKPMSSWEVAANAHDGQDHVLHHIRGFGVALDVLINYLSSEYGNAFELARIFAFLSGPPNYGAGQLDINEDQNSGKARGADHILLQEQTSFYRNLATSAVQAGVCVDLFAITNEYTDLTSLKVLSVESGGSLFLYSSTDESTLPQDIYKMLSRPYAFGCVMRLRTSSQFKIVDSYGHFFPDPQYMHVQHINCCDSFATYSYDFEFEKDSQFSRKSSPPIIQIAFKYTVLVHNGDISDLPNSGCRFKYLLERRLRVRTIQYNTTANIWDLYDFVDPDVVLTILVHQVILASLSDALETRLWLQDWLVVVIAQYNKAYKNVTSGGGTEIYNIDVNFSHCSQLQPLSRFVFAILLSPLLQVSSEGIHPDYVTYLQCLLSALEPASLRQAIWPTLISYSSPDVEAEVHQSLSRTVFTSERPIYILDAYKDLLVYYSPTASSEIPFPPPRNCLLRSTVDRLKQERNITPKLVFIHGAHDDTTEFEKYLVEDQTLDGSPLSSSTGFSSFLDEVRSKVAEHGI

SEQ ID NO: 268108 - protein, 109 aa, Zea mays
  Clone ID: MRT4577_176113C.1.pep
RRITGSAHRHTKLLLPTAYYHHVKLLLRGGEVHVPGRLQPPRTHPPPALLQGEVLGPLHGLTLRLQPPPPPPCSPRLPLLPHARDQDREVHQHLHRQGPLAHVELPHQF

SEQ ID NO: 268109 - protein, 66 aa, Zea mays
  Clone ID: MRT4577_176114C.1.pep
GGDRRRRPRDQGKKSDGGSKPTVLSASKPAVFFMITDEAVTDDYDRYCTTGHSFVAVVGQCCISTD

SEQ ID NO: 268110 - protein, 269 aa, Zea mays
  Clone ID: MRT4577_176115C.1.pep
MFQSRLVHLFLLILFVPSLRAAPNTTAVVSRIAFGSCANQSAPQPVWEAIVGFDPQVFIWLGDNVYGDNKRPFRVFGRERTVGPWRNVPRFYPATEEELRGKYELAKANPGYAKLRERARVIGTWDDHDYGVNDAGKEYSGKVFSQRLLLDFLDEDEDSPRRKQAGVYASYMFGPEGKRVKVIMLDTRYHRDPLLSDGTILGDPQWQWLERELRGPQSEMTIIGSSIQVVSNLSATTRPLFCVESWARFPRERERLFKLIDTSKRNGVL

SEQ ID NO: 268111 - protein, 79 aa, Zea mays
  Clone ID: MRT4577_176116C.1.pep
PGDFTFTLLDVLGVKIPAGSASTGSAFQWPRTLLCAPASGYQEQEQQCHSQEPGIAGGGGGPWGSAGGSGGCERSGRAG

SEQ ID NO: 268112 - protein, 51 aa, Zea mays
  Clone ID: MRT4577_176117C.1.pep
HHKAAGLYKASYSKGQIPIYQLRLGTFWKCHKLRPFCFLPNFLKGEMQEIQ

SEQ ID NO: 268113 - protein, 39 aa, Zea mays
  Clone ID: MRT4577_176118C.1.pep
GGRSRKLMTVGIDVMVLASCLQVTSVSSTFRSHACGVLR

SEQ ID NO: 268114 - protein, 103 aa, Zea mays
  Clone ID: MRT4577_176119C.1.pep
FLFFFFFFFFLFFCFFFFFFFFFFFFFFFKKKIHIANKFFIWGNTGHFWGWGAPPSPFFFHWGGEKPLACSIQNRNFLFSNLEARKSPLGVWVSPFEIFGALN

SEQ ID NO: 268115 - protein, 53 aa, Zea mays
  Clone ID: MRT4577_17611C.1.pep
RGSFFFRPGALGEGCPTGKEKCPCKAGPSLLLGPLFCDRTPPCLSRRFKKKAT

SEQ ID NO: 268116 - protein, 43 aa, Zea mays
  unsure (1)..(43): unsure at all Xaa locations
  Clone ID: MRT4577_176120C.1.pep
LPWGYKVFFSSRIVTWMTTVMIHTRVTTVISLSKLISISXCGI

SEQ ID NO: 268117 - protein, 34 aa, Zea mays
  Clone ID: MRT4577_176121C.1.pep
MFCIWTQLCDIGQCGAVGSVFGRNCATLANVVPL

SEQ ID NO: 268118 - protein, 57 aa, Zea mays
  unsure (1)..(57): unsure at all Xaa locations
  Clone ID: MRT4577_176122C.1.pep
WVRPLLWQGRFGSEPLLLLTPSWLTRGFPASHIQVWSQSGFLPVXSVVKLTVQVNSI

SEQ ID NO: 268119 - protein, 103 aa, Zea mays
  unsure (1)..(103): unsure at all Xaa locations
  Clone ID: MRT4577_176123C.1.pep
WHGVDGLVXXPDRAALQRQGHVGGAHPHRHLPSVVLLGTPVVLPLDLFPLPVGGLFGLPILFLIGRRIRRWPIRASPPRSSELRFHFTVILILDSWIPAASGS

SEQ ID NO: 268120 - protein, 93 aa, Zea mays
  unsure (1)..(93): unsure at all Xaa locations
  Clone ID: MRT4577_176124C.1.pep
VGTRDFTACNHLSSYDYYTASIVNPDGFAGFPCASYNVFTAYKYFPCLSGGCPXMGHYADRYPGKTNDVGQQFYLDTGDASNFARWRYKVSVT

SEQ ID NO: 268121 - protein, 88 aa, Zea mays
  Clone ID: MRT4577_176125C.1.pep
TSPCYSNSIGDQITATEKSHRRRPLCAKTRAAAVQVRAQSGMDNVGARQPIRGTTALPQPELFTGGHRISHFRRGVLCIVTHASAQVS

SEQ ID NO: 268122 - protein, 103 aa, Zea mays
  Clone ID: MRT4577_176126C.1.pep
PWISRLDAGGRRYREPRERREGREDRVLKVHGVTHWCLRRRSALTTSELGACCGYPVMVGRVGAKLAVRTRVIRRASGTWNLKCQVKSRYRRMRRLEDAVMSS

SEQ ID NO: 268123 - protein, 117 aa, Zea mays
  unsure (1)..(117): unsure at all Xaa locations
  Clone ID: MRT4577_176127C.1.pep
LWFPGLAKCTSSPRGDRLFAARSWPALXVGIIKGGLETMVKHSNGVPNGPARVRDIVGLYRSCVSNGQPGGLNPILPRGLVSPPLRKGRRSQSPEAKPRCVTRAAQLVSLKTAIIKS

SEQ ID NO: 268124 - protein, 612 aa, Zea mays
  unsure (1)..(612): unsure at all Xaa locations
  Clone ID: MRT4577_176128C.1.pep
VAYVSRQLRKQELNYPTHDLELAVVVHALKIWRHYILGTKCQVYTDHKSLKYIFTQKDLNLRQRRWLELIKDYDLEIHYHPGKANLVSDALSRKEHVHSAFVVQLPDELAKDFERLNPGIVTHTEGVTIELEPTLEQEIRKGRVGDAKIQEIKDLITEGRGPEFTEDEQGTIWFKNRICVPDIDSLRETILKEAHDSDYSIHPGSAKMYQDLKQKYWWYGLKRDVAAHVAMCDVCQRVKAEHQRPAGLLHPLKIPEWKWEEIGMDFITGLPRTQKGYDAIWVIVDGLTKVAHFIPVKTTYKGYQLAEFYMARIVSLYGVPKKIILDRGSQSTSRFWKSFHENMVTKLNFSSAYHHQTDGQTERTNQVLEDMLRACALQHGGSWDKSLPYAEFSYNNSYQASLKMSPFEALYGRKCRTPLYWDQTRGRQFFGPKLIQEAEEQVCIIGENLRXAQTRQKSYADNRRRPLEFEEGDYVYLKVSPLRGMRRFKVKGKLSPRFIGPFLILKQVGEVAYQLELPDSLSDVHNVFHVSQLKKCLRVPEEQLPMEELSVQGDLTYTEYPIKILDTLTRITINKVIKMCKVQWSHHGEDEATWEREEELRIDFPYLFSSSS

SEQ ID NO: 268125 - protein, 71 aa, Zea mays
  Clone ID: MRT4577_176129C.1.pep
GTDDHWLKKPLSLRQGQLQEENIDRQPLQHRGRGYGLVTFSTEDAMRSAIEAMNGKELDGRNIFFFYAHPR

SEQ ID NO: 268126 - protein, 147 aa, Zea mays
  Clone ID: MRT4577_17612C.1.pep
SEPLADAGRVGGRVGSLSRPERPEVVAPSHDRRRIAGRNHTSQSHVVPAAPAAAAIVARRQTSPLPYTGARPCLTGTGSGPGPTGSGTTCYPTAGRTSRAGEHSPGGETAAPGMSPPPRLNATHATARQMTRRLPRTQPWPSPQTTR

SEQ ID NO: 268127 - protein, 75 aa, Zea mays
  Clone ID: MRT4577_176130C.1.pep
IILLHQGPFIGGLYEARALYPLEHQKKFQVPTTSKIKNKPPKALIKHIRKPKNTLNHLRGEPGLPPGVVEQPRGP

SEQ ID NO: 268128 - protein, 228 aa, Zea mays
  Clone ID: MRT4577_176131C.1.pep
MQSPESSSSAAPVLLNIGGTKYATTAETLTQREPDSMLAAMFSGRHTLPQHPTTGAVFVDRDGKHFRHILNWLRDGAIPALSESEHHQLLREAEYYQLLGLADYINEKLALKKTDNSCEAELTRKDVIKCIQAQKIRFRGLNLSGLDLSKLDLSEVDFSYACIERTNFSCASLHKAKFRLVEAAHSTFEQANLHECELTGANLQEAVLDRANVQSANLQDACLTGCSF

SEQ ID NO: 268129 - protein, 212 aa, Zea mays
  unsure (1)..(212): unsure at all Xaa locations
  Clone ID: MRT4577_176132C.1.pep
MGKYMRKGKVSGEVAVMEVPGGALLGVRTRSRTLALQRAQRPLDKGDAEDAAAEYLELRSRRLEKPHKEHPSPPXPRPRXAGRKAAAAAAVQHVLMQDEVEVEVSFGDNVLDLDTMERSTRETTPCSLIRNPEMISTPGSTTKSKTSSNSTTSRRRTEETPSCRFIPSSLEMEEFFSAAEQQEQHSFREKYNFCPVNDCPLPGRYEWARLDC

SEQ ID NO: 268130 - protein, 45 aa, Zea mays
  Clone ID: MRT4577_176133C.1.pep
ANLSGVDFNNIYCFCTNLLPQISLPLKLFLLHTSLPIEIQHSGNG

SEQ ID NO: 268131 - protein, 46 aa, Zea mays
  Clone ID: MRT4577_176134C.1.pep
FICTLVVLFRILLAIKLCFRLLLQAQVTHHGTTPSYSVDYSSFVHL

SEQ ID NO: 268132 - protein, 315 aa, Zea mays
  Clone ID: MRT4577_176135C.1.pep
MAIVAVLVAPTASYVGPRRRWRAAAASSSAASGVDLKALQAAIDKKSSDDVRQALDQLRESGWAKRWGSQPYVSRRTTSLRELTTLGIKNAENLAIPSVRNDAAFLFTVVGTTGFLAVLAGQLPGDWGFFVPYLIGSISLIVLAVGSVAPGLLQAAIGAFSTVFPDYQERIARHEAAHFLVAYLIGLPILGYSLDIGKEHVNLIDEQLQKLIYSGQLDGKELDRLAVVSMAGLAAEGLEYDKVVGQSADLFTLQRFINRTKPQLSKDQQQNLTRWAVLFAASLLKNNKAAHEALMSAMSQKASVLGCIEAIENAS

SEQ ID NO: 268133 - protein, 72 aa, Zea mays
  Clone ID: MRT4577_176136C.1.pep
LGNHRVCGSLLSIVRVVISCELAFVSFYFLLCGFVIKLEYVVVSGPFVFLTDFGMLCLDVDCCSELISSRHG

SEQ ID NO: 268134 - protein, 81 aa, Zea mays
  unsure (1)..(81): unsure at all Xaa locations
  Clone ID: MRT4577_176137C.1.pep
QGMSYTSAAVALELLLALLGGGQRQKDQLDAIDAGTGTENYTDSDDAEYWGLCQKARANXYGQPNGAGPEDNRGACGFKHT

SEQ ID NO: 268135 - protein, 147 aa, Zea mays
  Clone ID: MRT4577_176138C.1.pep
KTLWLGPRGLGKFQTPNFGKNGRGETFLFAPPGGGGCQKNQFPRVFQPWLFLVKNCGPCPPGLWFSPVKKIVLGGELFFPGPPFPLKKPSGSPQFFFFFFKKKKPRLNLVLFLKKIIFLPPVFFFFFFFFGPKNKRPPLLFKRAFSS

SEQ ID NO: 268136 - protein, 72 aa, Zea mays
  Clone ID: MRT4577_176139C.1.pep
WVFFLKKFFLFFFFFFFFFFKLIFFSFFIQNKTPNPIFKNNYTKTTNIWGRGEKQNNLAYPFKRVKTKQNPP

SEQ ID NO: 268137 - protein, 69 aa, Zea mays
  Clone ID: MRT4577_17613C.1.pep
HVLGGVGLCDGVKLVQVRHGDQAGCASLGDRVRRGGAIMRGHDPLRRLLRLLGGREERGRSAHVRSTAA

SEQ ID NO: 268138 - protein, 99 aa, Zea mays
  Clone ID: MRT4577_176140C.1.pep
PSTNSQLTTLIVAHFCYHLRLSSLFHSPRSIVCLAGLLSSSNQHMAPTTRKARNNENAPRPLLGAPYGGLQLRQPHATLYSFASCWRYCCSSTVPRRCS

SEQ ID NO: 268139 - protein, 153 aa, Zea mays
  unsure (1)..(153): unsure at all Xaa locations
  Clone ID: MRT4577_176141C.1.pep
EKYILDLLDRASLTDSXTVEAPMELNIHLCATDGEPLEDPNHYCHIVGSLVYVGVTRPDIFYSVHNLSQFVSASTQLHYSHLLWVLRYLRGTISRRLFFPRSNSLQFQAYYDTTWASDSSYRPSLSAIXVFFGXVLWKTNKQAGXVSRSSVEX

SEQ ID NO: 268140 - protein, 71 aa, Zea mays
  Clone ID: MRT4577_176142C.1.pep
PAVASRPSANPFDSSAPSPLRRLSTDCADLLGGAIHQHAHYVDGRRNTRACYLAERRTALLPFHPLESSAL

SEQ ID NO: 268141 - protein, 56 aa, Zea mays
  Clone ID: MRT4577_176143C.1.pep
QFILNSVRVYTLSRVVSLCFASTMSSLGRLSLHLSIRCNQQTPPNKSAFHSVWPLL

SEQ ID NO: 268142 - protein, 70 aa, Zea mays
  Clone ID: MRT4577_176144C.1.pep
WFDPLGWGSGSPEKIKELRTKEIKNGRLAMLAVMGAWFQAEYTGTGPIDNLFAHLADPGHATIFQAFTPK

SEQ ID NO: 268143 - protein, 100 aa, Zea mays
  unsure (1)..(100): unsure at all Xaa locations
  Clone ID: MRT4577_176145C.1.pep
MRHPSHSTVLGVTGAIGESDPLNWGAEAADLAGXSHLDEAKPMVAQARQPVVKIEGFTLLVGQVAAVESVRDASEVAVELHKKARPRXKASSEWILDCIA

SEQ ID NO: 268144 - protein, 83 aa, Zea mays
  unsure (1)..(83): unsure at all Xaa locations
  Clone ID: MRT4577_176146C.1.pep
KLTGXDVGVPAGLWFDPLGWGAGSPEKIKELRTKEIKNGRLAMLAVMGAWFQAEYTGTGPIDNLFAHLADPGHATIFQAFTPK

SEQ ID NO: 268145 - protein, 51 aa, Zea mays
  Clone ID: MRT4577_176147C.1.pep
KGQVSMRARKPGTKGTKLWASKIPNQFWFLTMLLCPLGVIKTWFSLPVFCF

SEQ ID NO: 268146 - protein, 79 aa, Zea mays
  Clone ID: MRT4577_176148C.1.pep
YPGVMDKASPRYWFPGGKGASGFRLVSRRRVPVSPPPLVRIRAVGFLVAKKKKKTRAPKKRKRKKKKKNKKKKKKKNEH

SEQ ID NO: 268147 - protein, 306 aa, Zea mays
  unsure (1)..(306): unsure at all Xaa locations
  Clone ID: MRT4577_176149C.1.pep
RTRWRRGTGTRRSGGCRRRRRPRRRWTTAPAARARRRRSCGRTTTSSTGSTRRRRAARRRGRRPSRGTAARCSTSSAASRSPPTSSRSAXRRAPVAPVPSPRPYQPSAAAYHRRTTREXPSPSRRRRRASPPAPGRTPSRRRTPRTAAVAGSREAPRARSRXKQRTMRKQRSRSLDRXSAWTPACSSSSSSRSPSAARRRSRPSPTPPRTARRRRGRRRRRRRCRRRSGGPRASSARPGTAAGPAAATATAAPPASGMPMAPPIRERRTGAGAGSGPGATLSSGRTRARRTKPTRTRASDDDTASP

SEQ ID NO: 268148 - protein, 58 aa, Zea mays
  Clone ID: MRT4577_17614C.1.pep
MADFSWLTVLGFLSLTFNSGMAALSPLRRRRLRRFRRGIFSSPRRPCSPRPPYSDQPA

SEQ ID NO: 268149 - protein, 84 aa, Zea mays
  Clone ID: MRT4577_176150C.1.pep
PTRPISPVFAALRFLHLKLSIRLVSNHSTTARPMTSSVNMMMPHEMFRRTSAAPAPHQTVSVPAPEKLRLSELNWNGDLGEGGF

SEQ ID NO: 268150 - protein, 70 aa, Zea mays
  Clone ID: MRT4577_176151C.1.pep
TRYRRQPPPKRLITNHGLQSSQHVAVARSGRTLASDVAQGPVAQGIAPPLISRLGAIARLLSTKPTAAEV

SEQ ID NO: 268151 - protein, 118 aa, Zea mays
  unsure (1)..(118): unsure at all Xaa locations
  Clone ID: MRT4577_176152C.1.pep
AELKLQAIMSCHQCGGNVCYILNMRIRXWMQDVVKSNINILYTNRSGVTNIEYLTLGVDNQTVFHGRTAIYVDADYMKSWMXNMADLLDAGVXPDIEVXLEPAVEMRYLSYLQSQGWV

SEQ ID NO: 268152 - protein, 46 aa, Zea mays
  Clone ID: MRT4577_176153C.1.pep
MALSKKKKKKKKKKKKKKKKKKKKKKKKKKKQKLNTSQSKRNSVIL

SEQ ID NO: 268153 - protein, 50 aa, Zea mays
  Clone ID: MRT4577_176154C.1.pep
TSLDGLHNLLAAKISLRHRGNRGSVSVLGGSHNTKPSVYPVVGGTGDFMR

SEQ ID NO: 268154 - protein, 100 aa, Zea mays
  Clone ID: MRT4577_176155C.1.pep
INNFPLKPKKGEEGGGFLEETDHGRQRKWEQQTDTNQTKRPPTQEETTGKQKKSERAGPGQKPTGGGAAQNQGHRRPSQRDRRQKRVQETAKGARKQPRA

SEQ ID NO: 268155 - protein, 100 aa, Zea mays
  unsure (1)..(100): unsure at all Xaa locations
  Clone ID: MRT4577_176156C.1.pep
MPVSKIAVGAAGELLQPDTDKGAEAEFMSMLMFIFSGSXSCMALSKLTDGGACTPAGHIAASVAXHALSLLLAVFGGANICCGHVNPDVTLGAFVGGNIR

SEQ ID NO: 268156 - protein, 51 aa, Zea mays
  Clone ID: MRT4577_176157C.1.pep
HCHCKNIDTCRSGFCFCFSFWPLEAAADCQAHNFSARFYNNQFSQNRSKST

SEQ ID NO: 268157 - protein, 87 aa, Zea mays
  unsure (1)..(87): unsure at all Xaa locations
  Clone ID: MRT4577_176158C.1.pep
XRMAFFFGCTKTFEEDDSPQCNTRLFQPRFEGEATHGLDCASHRCLALVSHHPRPSVAGAAIPSPSTAPREVSMVRSAITHTNSGKT

SEQ ID NO: 268158 - protein, 61 aa, Zea mays
  Clone ID: MRT4577_176159C.1.pep
CHFNILIRIGSPESLLLLSHHYSLDTLLAQILEVCATTKHDDPQGANHGTLTNQHLTSKSH

SEQ ID NO: 268159 - protein, 45 aa, Zea mays
  Clone ID: MRT4577_17615C.1.pep
GEDRLQRCAAISYYYRPVLIQLTNILVNCKQCLTQADYLELKDDH

SEQ ID NO: 268160 - protein, 72 aa, Zea mays
  Clone ID: MRT4577_176160C.1.pep
IGLMDLYLFSLPCPARPTLIKQELKLPLKTSVHGPLWAWPHGGTPGRDQLLMRIIDDRVYPRPHVRGNLSME

SEQ ID NO: 268161 - protein, 115 aa, Zea mays
  Clone ID: MRT4577_176161C.1.pep
GRDRNRPAKGQVHGFRVSLWQEHLGEAAAAGMGDDLFRPSSLACVRRMNQVAKQHWDMFASDAFQGDLPGHLMAYPVSVLDDDDGRVVATTETFPDTNAKVLGNKSDILPPILTT

SEQ ID NO: 268162 - protein, 100 aa, Zea mays
  Clone ID: MRT4577_176162C.1.pep
DRLNALAINMVLIHSITSDQRVNHASTAHNSIAAAGSSSPSSRSISYRNCNYYHITRFYRNHTCILTHTRRCTSTLQALRYAGCLLLLRQLLPFNQLDLT

SEQ ID NO: 268163 - protein, 67 aa, Zea mays
  Clone ID: MRT4577_176163C.1.pep
LLGVSVSSILSLGVGFGGCRLLGSNGRRCCLYYEGFASLRDGLGSGPRQCAIRGDLQPAGSAKQWRH

SEQ ID NO: 268164 - protein, 61 aa, Zea mays
  Clone ID: MRT4577_176164C.1.pep
WQVTRRWLTHCRRYMNRRWCLAAAPSRLYACRWCSQLEPVERGLPATPSWSPSGSSALCSR

SEQ ID NO: 268165 - protein, 66 aa, Zea mays
  Clone ID: MRT4577_176165C.1.pep
KFSISFQTVRLVLICTVFYCFYSVFVYIDYRCSSLNNCFYVLSSAFLLEVWTKSVWVDYILLKKRF

SEQ ID NO: 268166 - protein, 50 aa, Zea mays
  Clone ID: MRT4577_176166C.1.pep
DDTVDPVRDLETISQELRLKDIEFVQVKIDDLEKSMKRSNDKQLKIDHEL

SEQ ID NO: 268167 - protein, 101 aa, Zea mays
  Clone ID: MRT4577_176167C.1.pep
IFLSFPGPNTKHDGLWPGLITTASDGCVTVTLPNLLNFVSAARLQTDQRRPTYYAQVTSTIMMLDLNHTATYSDIYRIDGLDGRCWCRTATCTRSRGTTGR

SEQ ID NO: 268168 - protein, 88 aa, Zea mays
  Clone ID: MRT4577_176168C.1.pep
FTFRGRVGGRVGGLLQYVYWTNGRQTPRRSVDNKKRAGKKLKALVGRLILAETFIRYDTFTAEVGKELLGTRVICTGVTKATSGPEGE

SEQ ID NO: 268169 - protein, 109 aa, Zea mays
  unsure (1)..(109): unsure at all Xaa locations
  Clone ID: MRT4577_176169C.1.pep
GSTHRRHACGLPALSFSPLSFSSIPILCGPRVPSPSHAPWLLFLCDYDEGLKLKKXARAVRTRGKGTXRRKKKAVSKTPTTVDKAASSTSKGIGVNMVPGVEEVNFFND

SEQ ID NO: 268170 - protein, 64 aa, Zea mays
  Clone ID: MRT4577_17616C.1.pep
SSEFGSRGACLRTVYNRVDSIMDPGDEWNRLKTSVAAKMMNLWSTTRPPCYEHTILTRASVNTY

SEQ ID NO: 268171 - protein, 58 aa, Zea mays
  Clone ID: MRT4577_176170C.1.pep
IVPLNQNFMNARFSTGQTPHSSCFACGTRPWPFHLHSKPPHLSDSCYQLWILGAGFGV

SEQ ID NO: 268172 - protein, 230 aa, Zea mays
  Clone ID: MRT4577_176171C.1.pep
MAASGMEDERVSGEVREQEDDEDNVPQLSAAAMEALREFLAEQHRSEEQNEAGGGEDGVELVPEDWRLSQFWYDGRTARELVEEVVRLVSPSGSGSAAGAVACIACPTLYAYLKKTDPGVPAQLLEYDERFGQYGGDFTFYDYNRPEELPAAMKHAYRVIVADPPYLSKECLEKVAKTVSFLARPEGSFLLLLTGEVRMDRALELLNVRPCGFRPRHSNKLGNEFRLFTN

SEQ ID NO: 268173 - protein, 149 aa, Zea mays
  Clone ID: MRT4577_176172C.1.pep
MANAASGVAVAEECVARFQELRGGRAHRFVVFKVDDALQRVVVEKAGGRAAGFGDLAASLPADDCRYAVYDHDFTVGVGDAAAAAGELEAPRSRIVFVAWAPEAAGVRSKMVYASSCEGFRKELDGVQVDLQATEPGELTLDVLNDHAS

SEQ ID NO: 268174 - protein, 140 aa, Zea mays
  unsure (1)..(140): unsure at all Xaa locations
  Clone ID: MRT4577_176173C.1.pep
QRGELHLKKTDPGVGAQLLEYDERFGQYGCDFTFYDYNRPEELPAAMKHAYRVIVADPPYLXEEISRRNGYYSLVDDXSKECLEKVAKTVSFLARPEGSFLLLLTGEVRMDRALELLNVRPCGFRPRHSNKLSNEFRLFT

SEQ ID NO: 268175 - protein, 137 aa, Zea mays
  unsure (1)..(137): unsure at all Xaa locations
  Clone ID: MRT4577_176174C.1.pep
SLILSPHKGSAAGAVACIAXPTLYAYLKKTDPGVPAQLLEXDERFGQCAFDFTFXDCNRLEELPAAMKHAYLVIVADPPYXGEVRMDRALELLNVRPCGFRPRHSNGLGNEFRLFANXDPADRLGGWEQSDGAPIYL

SEQ ID NO: 268176 - protein, 330 aa, Zea mays
  Clone ID: MRT4577_176175C.1.pep
MDNLGHRENGRQRPEQYKALHTQWMIPQRQLKDHQSMNLLALMNEKDSAIRERDHALAEKKAAIAERDMAFAQRDAAMAERNAAIVERDNALAALELARTNGFNMNSGNGFHQGPPLNGTKNIHHHDHLSHVQTSPLQLANSPYDHVREMHISEAYPIATAPASVGKAKKPRKSNSQASPSKRPSGVLRKTKKATSDWKNAGTTGGAGDSARASVMKNEWKDQDLGLNQVVFDESTMPAPACSCTGELHQCYKWGSGGWQSSCCTMNMSMHPLPVMPNRRHARMGGRKMSGGAFAKLLSRLAAEGHDLSTPVDLKDHWAKHGTNRYITIR

SEQ ID NO: 268177 - protein, 286 aa, Zea mays
  unsure (1)..(286): unsure at all Xaa locations
  Clone ID: MRT4577_176176C.1.pep
MAASGMEDERVSGEVREQEDDDDNVPQLSAAAMEALREFLAEQHRPEEQNEAGGGEDGVELVPEDWRLSQFWYDERTARELVEEVVRLVSPSGSGSAAGAVACIACPTLYAYLKKTDPGVPAQLLEYDERFGQYGGDFTFYDYNRPEELPAAMKHAYRVIVADPPYLVLFLPYQRLPIKKCLISSXFEMRGNIEEKWLLFIGXMQSKECLEKVAKTVSFLARPEGSFLLLLTGEVRMDRALELLNVRPCGFRPRHSNKLGNEFRLFTNYDPADRLGGWEQSDGAPI

SEQ ID NO: 268178 - protein, 197 aa, Zea mays
  Clone ID: MRT4577_176177C.1.pep
MDNLGHRENGRQRPEQYKALHTQWMIPQRQLKDHQSMNLLALMNEKDSAIRERDHALAEKKAAIAERDMAFAQRDAAMAERNAAIVERDNALAALELARTNGFNMNSGNGFHQGPPLNGTKNIHHHDHLSHVQTSPLQLANSPYDHVREMHISEAYPIATAPASVGKAKKPRKSNSQASPSKRPSGVLPKTKKATSD

SEQ ID NO: 268179 - protein, 69 aa, Zea mays
  Clone ID: MRT4577_176178C.1.pep
PWPPKNPPPTSPKKPRAPWATHRLNCPRPTPLIFPWGQNPHLGFKPPHKRTPFFVKKKGPPPSYPFYPP

SEQ ID NO: 268180 - protein, 201 aa, Zea mays
  unsure (1)..(201): unsure at all Xaa locations
  Clone ID: MRT4577_176179C.1.pep
MEPMKVYGWAVSPWMARVLVSLEEAGAEYELVPMSRNGGDHRRPEHLARNPFGEIPVLEDGGLTLYQSRAIARHILRKHKPGLLGAGSLEESAMVDVWVDVDAHQLEPVLKPIVWNCIINPFVGRDVDQGLVDESVEKLKKLLEVYEARLSSNKYLXGDFVSFADLTHFSFMRYFMATEHAVVLDAYPPVKAWGEELGVIS

SEQ ID NO: 268181 - protein, 87 aa, Zea mays
  unsure (1)..(87): unsure at all Xaa locations
  Clone ID: MRT4577_17617C.1.pep
GKGNTNRDHPNHXHPERIRDGSNADTAANSNQMYKTDVTPPKEKGTDTDRAWTSGTRTPADGTKQGGRNPEGRKNHRNRTKRGLENR

SEQ ID NO: 268182 - protein, 156 aa, Zea mays
  unsure (1)..(156): unsure at all Xaa locations
  Clone ID: MRT4577_176180C.1.pep
GWAVSPWMARVLVSLEEAGAEYELVPMSRNGGDHRRPEHLARNPFGEIPVLEDGGLTLYXSLLHVFCFIFDSVGILFFYQLLSNLVGVIKKPEGYXFSPQFIFXESRAIARHILRKHKPGLLGAGSLEESAMVDVWVDVDAHQLEPVLKPIVWNCI

SEQ ID NO: 268183 - protein, 127 aa, Zea mays
  unsure (1)..(127): unsure at all Xaa locations
  Clone ID: MRT4577_176182C.1.pep
AAIAGLIAPYFPSMTASTCENPRIQPYRMQQAXIATSSLPLSHLCFQHSXAISLRHSSRQTMRAQHVHQVLLPVISHVTVDNLHHYCDQQQCLALNQLSTQQXAADLQQQXLLPLXQLGTGYCHHQR

SEQ ID NO: 268184 - protein, 416 aa, Zea mays
  unsure (1)..(416): unsure at all Xaa locations
  Clone ID: MRT4577_176185C.1.pep
MAQDEAVATQKTGNTTSPSKDYPTPSPYPDWSTMQAYYGPGVLPPTYFTPAIAPGHPPPYMWGPQPIMPPPFGTPYAAVYPHGGAYPHPLVPMMSTPMSVEPAKSTNSKEKNSNKKLKEIDRTAVSAGSGNSKRTVSSIEYSAEGSSDVNDQNVNETSRKRSSDGGPGAETTTGGNTECVLAPXHTLGNATILXTHCFSAPGVKPSATNVANSRAIGTALSPPPGVMVPVHNAVPSDLSVKDERELKREKRKQSNRESARRSRLRKQVCCVIQLYNEAASXHGSGVWLGLFVLTTYLQSYTYALPWXAETEELATQVESLAAENTSLRSEIGRLTESSEKLRLENSALMVKLKDTAEPSPSKAAASPSSPRASAENFLSMIDSANAPSVSRHTEHGGPRLRQLLDSSPATDVAAVS

SEQ ID NO: 268185 - protein, 130 aa, Zea mays
  unsure (1)..(130): unsure at all Xaa locations
  Clone ID: MRT4577_176186C.1.pep
KSSSHDCISQEINLQAYRTLXAHXASPMIRDSMKQALSSPWMPFSMLIASISTKVTPENIDIIIECYDYFKIKKITQGELKNKLRHVSEDRVIISTIKPLQDKXPPRXKREDPNHHMPMCHRNHDAVIRW

SEQ ID NO: 268186 - protein, 134 aa, Zea mays
  Clone ID: MRT4577_176187C.1.pep
MKVTVLLALATAAVADIINNEYLKTEVITEAKCSRASKAGDKIHVHYRGTLTDGTEFDASYGRGAPLSFTVGSGQVIKGWDQGLLDMCPGEKRKLTIQPKWAYGERGAGPIPPNSVLIFESELVSIDGVEKEEL

SEQ ID NO: 268187 - protein, 80 aa, Zea mays
  unsure (1)..(80): unsure at all Xaa locations
  Clone ID: MRT4577_176188C.1.pep
MISQTYEDNHLICXIIGHHLTSAAIVGHERALSDKSTESAEVKXPLEXAAIMKDCDEPGHTRPTGLILGGTKYMGIQGEP

SEQ ID NO: 268188 - protein, 89 aa, Zea mays
  Clone ID: MRT4577_176189C.1.pep
LTERTDSRQKISGSERSTQAVSCPHAAVFKRSAVQASLRDSEGRVSATQNVCVSTLISRDSPMPLCLKVSSSRFVSRRVSQALRSARKV

SEQ ID NO: 268189 - protein, 106 aa, Zea mays
  Clone ID: MRT4577_17618C.1.pep
GLLDPLPRWAQQHRIWSHRAPASSCLSTAASLGNLPPSFFVVESSTSCREGIPYASSWSAQVILFSVKHLRSDIHLAQCESSDPIPDIITLCVRGAAPLLACCAAR

SEQ ID NO: 268190 - protein, 126 aa, Zea mays
  Clone ID: MRT4577_176190C.1.pep
RCCRTSISSADFSSAGAGSWTWPPRSPTPRRCALSPAPAVARCAPPRGDEGPVPPSAHRRPAPPPPPRPPPDGGPRPRWGRRMGSGRGGRRGGIRRRGTGSAPGRRAGRAGAGARRCTGAGGRGAR

SEQ ID NO: 268191 - protein, 114 aa, Zea mays
  unsure (1)..(114): unsure at all Xaa locations
  Clone ID: MRT4577_176192C.1.pep
PNTFPPKSTPNLXPSPLFLHNSPLAXSHPITFIKIXLFTMYLTFSPPTFSPTTFKRTKYHYDTKHALNYTFIAHMISTRLFFRSRMYPGTVHCGIFTHSGACGTFTSYGCSARE

SEQ ID NO: 268192 - protein, 39 aa, Zea mays
  Clone ID: MRT4577_176193C.1.pep
DLRAVCLVRPIGALVLGAQLVELVSAWIWKAIDLLRTRG

SEQ ID NO: 268193 - protein, 139 aa, Zea mays
  unsure (1)..(139): unsure at all Xaa locations
  Clone ID: MRT4577_176194C.1.pep
MGGPTRAYAHQAKRTSIDLTTLATKIFAVLALLALFGSATNAFIIPQCSLAXPSAIIAQILPPVXTSMGLEHLAEQANMQQQALAASVLQQPHAQMEQQSLPHLTLLAITTLQTQQFLPALTXLTMVNPANYLQEQLLA

SEQ ID NO: 268194 - protein, 147 aa, Zea mays
  Clone ID: MRT4577_176195C.1.pep
LGLWSKEKPVFFLPPFGVFPPFWGPPTPFTPAPGAGIKIPLWGVLPLLALFFRVLFLRWGPLTSLGFWGRVVCPSPLGGLWVFLNPGFSPIFGSVSACPSKGFPPLFGLNFCLRLVFSCGVGFFCFVLLAPLFSFYGKIRWFPGGFG

SEQ ID NO: 268195 - protein, 154 aa, Zea mays
  unsure (1)..(154): unsure at all Xaa locations
  Clone ID: MRT4577_176196C.1.pep
EDNYTVEDLDAPCNPDNPHIISDLDIFIHQRDAAQTYNLDADINLLRLCQFDAVKMSIHIEAHILIQALMTMPFPDFSLCLFLSPEHEKMEXQFKALTDLSHYLETAIAHCMICDDATYNRHILEAVPRSEHAIQSYAIDVLCLTYHKGPRYIL

SEQ ID NO: 268196 - protein, 119 aa, Zea mays
  unsure (1)..(119): unsure at all Xaa locations
  Clone ID: MRT4577_176197C.1.pep
PSASAWTPPPHPTTASSSPXEEALGRATEAYEALTGPAPGTFWTACAGCRLLHEFERKYVGYRLACPSCRRTLIGVEVTPPPEDEPVARMPAPHQMPPGKMPEKMDMTLAVMQLQLVKK

SEQ ID NO: 268197 - protein, 44 aa, Zea mays
  Clone ID: MRT4577_176198C.1.pep
SSSQSWSSEFWAHINSSRRVQVQLVYPFFLSKMSFFRVFWVIKP

SEQ ID NO: 268198 - protein, 69 aa, Zea mays
  Clone ID: MRT4577_176199C.1.pep
KEGENAVYGCYCGERQDLSRCGPCACSPIDGVGSSVLGNLAATGCWCLVGSCWVEEGVRHWLLQSRMSS

SEQ ID NO: 268199 - protein, 61 aa, Zea mays
  unsure (1)..(61): unsure at all Xaa locations
  Clone ID: MRT4577_17619C.1.pep
RYGLXXEKXCEEFEAAVTETLNHGFRTGDIYSPGTTLVGCKRMGEEVLKTVESLKEVAAVN

SEQ ID NO: 268200 - protein, 159 aa, Zea mays
  Clone ID: MRT4577_1761C.1.pep
APLRVFFFFFFFFFFFFFFFFFFFFFFFLRKIEPISNFKGPFGWEGKKNPGGTQKQRPSHREQDGGPVPLFMGPGAPPNKITNRPFTLGENFIALYGGQKGLFIFKGVPFFGNMPKFSCLKVWGVGKPLELFPLGNEPKNTCSHILSRFSLENLCKKFH

SEQ ID NO: 268201 - protein, 40 aa, Zea mays
  Clone ID: MRT4577_176200C.1.pep
MASSSKKLQAFILTLLLVLSTARDSHPLAVSARRRCSLRL

SEQ ID NO: 268202 - protein, 48 aa, Zea mays
  Clone ID: MRT4577_176201C.1.pep
KLCFLFFKKKKESRRKKKKKKKKKKKKKKKKTKKKKKKKKRYKTHALN

SEQ ID NO: 268203 - protein, 83 aa, Zea mays
  Clone ID: MRT4577_176202C.1.pep
LGKPSRIPKLNPFTTPPFFPMWYNRKGPHPSPFPTLFHPHYVLGPPPLCLILRAGCVGFPPHLHLLFSLPHSPRLFTFFPFFF

SEQ ID NO: 268204 - protein, 69 aa, Zea mays
  unsure (1)..(69): unsure at all Xaa locations
  Clone ID: MRT4577_176203C.1.pep
MDATFTGGGGKAXKGAVVLKAFWPRKNSLTRSVKAGLQFPVCLIVRYLKKGRYAQXVCSFALFYLAFVL

SEQ ID NO: 268205 - protein, 64 aa, Zea mays
  Clone ID: MRT4577_176204C.1.pep
GSAPPATLAEFTLDGSGGLDFYDVSLVDGYNLPVLVETSCCSCSSGPALFAAAGCASDLNAMCP

SEQ ID NO: 268206 - protein, 318 aa, Zea mays
  Clone ID: MRT4577_176205C.1.pep
MSMGRFVNSMDPTSGLEVIRDWNGVAQVVLRSPKGASARVSLCGGQVVSWRNDRGEELLFTSSKATFKPPNAMRGGIQMCFPQFGYSGTLERHGFARNRIWSLDDEQPPLNHNDNGSKVSVDLILKPSEDDLKCWPHCFEFRLRASLSKDGDLSLISRIRNVNGKPFSFSFAYHTYLSVSDISEVRIEGLETLDYLDNLSHKERFTEQGDAITFESEVDRVYVSSPNVVAVIDHEKKHSFVIRKEGLPDVVVWNPWEKKSKTMVDLGDEEYKQMLCVDAAAVERAISLRPGEEWTGKLELSAVLSTNCSDHLDHPVSI

SEQ ID NO: 268207 - protein, 58 aa, Zea mays
  unsure (1)..(58): unsure at all Xaa locations
  Clone ID: MRT4577_176206C.1.pep
PKKPKHTMLQTKTLIYAGNLAINLVNIYILNEKXKNIQIMKFDDYFSRSFVIASVYKF

SEQ ID NO: 268208 - protein, 44 aa, Zea mays
  Clone ID: MRT4577_176207C.1.pep
YFFLLIRERGRDNFKRADSYNHFENYKGSLIMVAKQTDVKKDQE

SEQ ID NO: 268209 - protein, 167 aa, Zea mays
  Clone ID: MRT4577_176208C.1.pep
MRGRPSEPVMAATAETSSPPPQRRPRTGPPPGLKNLSNTCYLNCVLQCLASTPPLATFCLASGHSDICKKVSPNRDKECAFCVLERQIARLLRADAGALDSPAKVIRCMPLFGEDFKWGRQEDAHEFLRYVVEALHTAGLPTRKLLLAKGANGNCGEEWRGQGACLL

SEQ ID NO: 268210 - protein, 91 aa, Zea mays
  Clone ID: MRT4577_176209C.1.pep
MGLQEEFEEYAEKAKTLPESTSNENKLILYGLYKQATVGNVNTDRPGIFYQKDRAKWDAWKAVEGKPKEEAMNDYITKVKQLQEEAAAATS

SEQ ID NO: 268211 - protein, 272 aa, Zea mays
  Clone ID: MRT4577_17620C.1.pep
GRVPHTSKVSRIQMKDFAYDDRTVFYINNPSRFAFQNLGDLETLIASDALLLSFMDLKKLHSLRHVVVSRCEETFLRGLDDGVVLPTVQSLNLGRFTPTKNSMSNLFKCFPALSSLDVMASPSDEDHEEVVLHFPPSSSLRDVTFKGCKNLILPMEEEAGFCGLLSLESVTIRKCDKLFSRWSIRGRAAQTQTQSIINPLPPCLRKLSLYYMETLPQKALLANLTSLEELTLRNCLGCEQSTEPMALPANLTSLTILELVNCRNITMDGFDP

SEQ ID NO: 268212 - protein, 80 aa, Zea mays
  Clone ID: MRT4577_176210C.1.pep
RGGFAAMGLKHFSKPRVWLSLTPMYKPKNYFPRFNDRVLTNLIPLFFGELENTFLLTKKFSFTLWKKGNNKVFPKNSFPP

SEQ ID NO: 268213 - protein, 94 aa, Zea mays
  unsure (1)..(94): unsure at all Xaa locations
  Clone ID: MRT4577_176211C.1.pep
AVSLLQEEFEEHAEKAKTLPESTSNENQLILYGLYEQATVEXVNTVSIRPGIFYQKDRAKWDAWKAVEGKPKEEAMNDYITKVKQLQEEAAATL

SEQ ID NO: 268214 - protein, 51 aa, Zea mays
  Clone ID: MRT4577_176212C.1.pep
FGGGETPVFLVRGTGPADGPQPVTNIGPLDFAFDKPTDKQKFLHNRGFRLE

SEQ ID NO: 268215 - protein, 266 aa, Zea mays
  Clone ID: MRT4577_176213C.1.pep
MGTSILDALNVRVEGSGDKYLVLAHGFGTDQSAWQRVLPYFTRNYSVILYDLVCAGSVNPDHFDYRRYTTLDAYVDDLLNILDALRVPRCAYVGHSISAMIGMLASIRRPDLFSKLILIGASPRFLNDKDYHGGFEQGEIEQVFSAMEANYEAWVNGFAPLAVGADVPAAVREFSRTLFNMRPDISLFVSRTVFNSDLRGILGLVNVPCCIMQTARDMSVPASVATYMRDHIAGKSTIQWLDTEGHLPHLSAPSYLARQLEIALSQ

SEQ ID NO: 268216 - protein, 510 aa, Zea mays
  Clone ID: MRT4577_176214C.1.pep
MFLESFRVESPRVKYGDGEIQSEYRYDTTEVVPPGNGGGAGWVVRPKSVTYNFKTSTNVPKLGVMLVGWGGNNGTTLTAGVIANREGISWETKEKVHKANYFGSLTQASTIRVGSHNGEEVYAPFKSLVPMVDPNSIVFGGWDISKLNMADAMARAKVLDFHLQKQLRPYMESMLPLPGIFNPDFVAANQGARADNVIKGTKKEQVEQIKKDIKEFKEKNKVDKVVVLWTANTERYSNVVAGLNDTMDKLLASLDKNEAEISPSTLYAIACVLEGVPFVNGSPQNTFVPGLMELAIKKNSVIGGDDFKSGQTKMKSVLVDFLVGAGIKPTSIASYNHLGNNDGMNLSAPQVFRSKEISKSSVVDDMVASNPILYKPGEHPDHVIVIKYIPYVGDSKRAMDEYTSEIFMGGKNTIALHNTCEDSLLAAPIILDLVLLAELSTRIQLKAEGQDKFHSFHPVATILSYLSKAPLVPPGTPVVNALAKQRAMLENILRACIGLAPENNMMLEHK

SEQ ID NO: 268217 - protein, 956 aa, Zea mays
  Clone ID: MRT4577_176215C.1.pep
MAEKEGNLEAVLKEAVDLENIPLEEVFENLRCSREGLSTEQAQQRLEIFGPNKLEEKEESKFLKFLGFMWNPLSWVMEAAAIMAIALANGGGKPPDWQDFVGIITLLVINSTISFIEENNAGNAAAALMARLAPKAKVLRDGRWTEEDAAILVPGDIVSIKLGDIIPADARLLEGDPLKIDQSALTGESLPVTKGPGDGVYSGSTVKQGEIEAVVIATGVHTFFGKAAHLVDSTNQVGHFQKVLTAIGNFCICSIAVGMFVEIIVMYPIQHRAYRPGIDNLLVLLIGGIPIAMPTVLSVTMAIGSHRLSQQGAITKRMTAIEEMAGMDVLCSDKTGTLTLNKLTVDKNLVEVFERGTTQDQVILMAARASRTENQDAIDTAIVGMLADPKEARAGIQEVHFLPFNPTDKRTALTYIDGDGKMYRVSKGAPEQILHLAHNKSDIERRVHAMIDKFAERGLRSLAVAYQEVPEGRKESPGGPWHFVGLMPLFDPPRHDSAETIRRALNLGVNVKMITGDQLAIGKETGRRLGMGTNMYPSSALLGQNKDESIAALPVDDLIEKADGFAGVFPEHKYEIVKRLQARKHICGMTGDGVNDAPALKKADIGIAVADATDAARSASDIVLTEPGLSVIISAVLTSRAIFQRMKNYTIYAVSITIRIVLGFMLLALIWKFDFPPFMVLIIAILNDGTIMTISKDRVKPSPLPDSWKLAEIFTTGVVLGGYQAMMTVIFFWAAYKTNFFPKIFHVESLEKTAQDDFQKLASAVYLQVSTISQALIFVTRSRSWSFVERPGFLLVFAFLVAQLIATLIAVYADWAFTSIKGIGWGWAGIVWLYNIIFYFPLDIIKFLIRYALSGKAWDLVIEQRIAFTRKKDFGREERELKWAHAQRTLHGLQAPDAKMFPEKAGYNELNQMAEEAKRRAEIARLRELHTLKGHVESVVKLKGLDIETIQQSYTV

SEQ ID NO: 268218 - protein, 122 aa, Zea mays
  Clone ID: MRT4577_176216C.1.pep
PNAPPRWAVGDKVCALLSGGGYAEKVVVPAGQLLPVPEGVSLADAAGLPEVAAVVSAAAGLRGRSAASKAQIVSEVEKNVWPAVAAGKVNPVIYKTFPLSEAADAHRLIESSMHIGKILLLP

SEQ ID NO: 268219 - protein, 165 aa, Zea mays
  unsure (1)..(165): unsure at all Xaa locations
  Clone ID: MRT4577_176217C.1.pep
TQDQEPPRSEGEGRGGEQSEKDHRGGKTQTKKGADRAPRGTREEKTRGERTGDASTRRRRGEKKRRGRPTLRAGPNRKDXSAXGHADRQKKEKDXQEQPERATKGKGPANGGATKKERRGEPAKTANKNTTAQENDKRTREPEGQPPESEPNEPPREXXXPKHDQ

SEQ ID NO: 268220 - protein, 74 aa, Zea mays
  Clone ID: MRT4577_176218C.1.pep
LCVHTYRGKYLREWLLFYTFKFKITKTLKNFTIKSSRAKPSSLAGPTSRAFRPMSTSPKGAAAEALLQQLFMSI

SEQ ID NO: 268221 - protein, 41 aa, Zea mays
  Clone ID: MRT4577_176219C.1.pep
DAWADACEYRPNLINKLGGAFDAHLGDLTQRQLLAAGATIN

SEQ ID NO: 268222 - protein, 230 aa, Zea mays
  Clone ID: MRT4577_17621C.1.pep
GGIYFGKPRGFGTNDNGDDIGFNTEVYSASEIDRIARVAFEVARKRRGRLCSVDKANVLEASMLWRKRVTALASEFPDIELSHMYVDNAAMQLVRNPKQFDTIVTNNIFGDILSDEASMITGSIGMLPSASVGESGPGLFEPIHGSAPDIAGQDKANPLATILSAAMLLRYGLGEENAANRIEAAVTETLNHGFRTGDIYSPGTTLVGCKRMGEEVLKTVNSLKEVAAVN

SEQ ID NO: 268223 - protein, 143 aa, Zea mays
  Clone ID: MRT4577_176220C.1.pep
KKKKKKKKKKKKKKKKKKKNFTYEQNHTYGGIFVDFPPTWGPLLAFFFEGAAAPFEGSSYYHFTGPRFYTIRDWGKPFCSPIYSLFITSPFFQLGCYGKGPHPSPFPKFGHPHCRLGAPFKGGLSPGGVLGPPKVTVLLATAL

SEQ ID NO: 268224 - protein, 47 aa, Zea mays
  unsure (1)..(47): unsure at all Xaa locations
  Clone ID: MRT4577_176221C.1.pep
MAPSEDPRDWRANLKGTIRETGLETSSGGKLAXHQKTVPTAHLIFVI

SEQ ID NO: 268225 - protein, 129 aa, Zea mays
  unsure (1)..(129): unsure at all Xaa locations
  Clone ID: MRT4577_176222C.1.pep
RXQPVFXGSSPFSPLHRARPQPGPLXXGEPVPVHPTRRXXSSIAPAXXPXXQXLSPXFLSLXXXXRLPGLWSLXXXAPRXRRYAHVPPXGGRASSHAARGMGAVPYSVSSHTNGAPHAARAVSPRLSSF

SEQ ID NO: 268226 - protein, 88 aa, Zea mays
  Clone ID: MRT4577_176223C.1.pep
MSVTHAVDDFKDTSHGVNDDINGIICAFELMIVCLTYCAKLISDEDIDTIRDLRRCILDEQDLLSPRSVNLHHACSDMMCIVFEATIL

SEQ ID NO: 268227 - protein, 74 aa, Zea mays
  Clone ID: MRT4577_176224C.1.pep
WKHAVWSSSLLNPQGVLGFSSDPNSDCFCGCLCGISCTRQGQAELSSRLLAVGRAQVLSTADSSFSSSDANVVV

SEQ ID NO: 268228 - protein, 80 aa, Zea mays
  unsure (1)..(80): unsure at all Xaa locations
  Clone ID: MRT4577_176225C.1.pep
KRYRQYRQVCTWCAMTGHALRPILSREDYAVTARMKASEGATXYEAYACPCEVLQVSIYISGRPWRMEFFVLSDGHSSPV

SEQ ID NO: 268229 - protein, 109 aa, Zea mays
  unsure (1)..(109): unsure at all Xaa locations
  Clone ID: MRT4577_176226C.1.pep
PRADHEPLPQQGRDPEPQPLTYESPETEPNSLYLNXPGSIATAIEYQNALALAIESIDYAPKAATTFGNGLTACQLALVTAPTSHETAVAPSTILALTLHLLTLDSLHY

SEQ ID NO: 268230 - protein, 86 aa, Zea mays
  Clone ID: MRT4577_176227C.1.pep
FRGKSATLTMPTNTRILLGTQTYAILVTPTYTEVVEVEPYTSFHLRVAKGGRRNRSRSRERPCGLSKYRQAHKQAHKQAHKSAQRS

SEQ ID NO: 268231 - protein, 75 aa, Zea mays
  unsure (1)..(75): unsure at all Xaa locations
  Clone ID: MRT4577_176228C.1.pep
RSAWPGSPSARCRPGHGSVWSCVSTPTFYGLRSRSAYLSLTGSRHRLKDRXIGGLAREPVSVCCPTFTXALDAPR

SEQ ID NO: 268232 - protein, 38 aa, Zea mays
  Clone ID: MRT4577_176229C.1.pep
ATSVLPTQPSLVVAPLFRLLMSYSSIMKFFGIMFVASP

SEQ ID NO: 268233 - protein, 84 aa, Zea mays
  unsure (1)..(84): unsure at all Xaa locations
  Clone ID: MRT4577_17622C.1.pep
DPGSFLRFDSSYYSLXARRRGFFHSDAGLFTDPAPRGYVQRQAPGFFTPEFFRDFADSMVKMSPIEVLPGQQQGEIKKKCNLVN

SEQ ID NO: 268234 - protein, 103 aa, Zea mays
  Clone ID: MRT4577_176230C.1.pep
MMMRGGRLTGLTSQVLRCFSTEIFVSRLSFYTTEEEFKDIFSPFGTVEEARLMRDHQTGRMKGFGFVKYSSQAEAEKAVKAMDGRILRGRLIFVEMAKGHESK

SEQ ID NO: 268235 - protein, 119 aa, Zea mays
  unsure (1)..(119): unsure at all Xaa locations
  Clone ID: MRT4577_176231C.1.pep
MTSRILGRRGPSGFSCSSTADQATHGISAAALTVIVTAQSHPGAFSDLNEDTATPLALRGXHVTMDVTSLPDAQIDKDAVFTQAPASNLNVMYLDLPHMHSARAFSSQLIHTPPPPHIL

SEQ ID NO: 268236 - protein, 159 aa, Zea mays
  unsure (1)..(159): unsure at all Xaa locations
  Clone ID: MRT4577_176232C.1.pep
LGTSRPAGSSLPYPQSLRPRSSLPPPPLRTQATSDLDVYSFXVCRNNDGECTAKHHSGEIDDSAGTPYYLXRRLDCVASADDSAYXGYHSSFSMSTPSSVEFQVXVNAVDAVAMMESESADGQAAASEAAAADAPTDENNDEEKEQSDXDDVGFSLFEL

SEQ ID NO: 268237 - protein, 141 aa, Zea mays
  Clone ID: MRT4577_176233C.1.pep
PRVRQPPVAARRALADEQSRLAALQQYRSGAAQSAAGQPQPAGRGGRRAARIAARRHRARGRARAAGSGQPATGQASDAHEPTPTPLDHSPRPSDQPSSRQRAVLLFHCSSSRLPGFRPACSNSRANVDEVIRGGEGPNRL

SEQ ID NO: 268238 - protein, 54 aa, Zea mays
  Clone ID: MRT4577_176234C.1.pep
LICRRAAFFFFFFVTKMLYLIYRTNVRFVSRTKDTRSDQQMSQKGHIHPLHGTD

SEQ ID NO: 268239 - protein, 103 aa, Zea mays; identical to SEQ ID NO: 268234
  Clone ID: MRT4577_176235C.1.pep

SEQ ID NO: 268240 - protein, 43 aa, Zea mays
  Clone ID: MRT4577_176236C.1.pep
HELVKKAEGTTVNLPEKGAGKAPRGDNIQIDAKDILSILGGGS

SEQ ID NO: 268241 - protein, 84 aa, Zea mays
  unsure (1)..(84): unsure at all Xaa locations
  Clone ID: MRT4577_176237C.1.pep
LSLGXXGRRVIRELNYLHRDPPTSCXSAGAGADDMVHWQGTIMGPRDRPYSGGVFLGGIHFPADYPVKASKGGFKTKGGHPNIN

SEQ ID NO: 268242 - protein, 46 aa, Zea mays
  Clone ID: MRT4577_176238C.1.pep
GRAVRPLRTARARRDSIHVLYQIRLELTTIKTRQLMFCSERGGGEK

SEQ ID NO: 268243 - protein, 124 aa, Zea mays
  Clone ID: MRT4577_176239C.1.pep
ERVTKKREKRLGDHCLVFLLRAQTDLWASSGPRECTHSFGRKDWTWVCPEMLIVVRLSPPVAPRRGQLHCPAMYGKTSDLKFTIASFSGRDFWDKVSRSRRLVWWGSSVAAVGVLAPPPVLTGG

SEQ ID NO: 268244 - protein, 55 aa, Zea mays
  Clone ID: MRT4577_17623C.1.pep
VQDKANPLATILSAAMLLRYGLGEENAANRIEAAVTETLNHGFRTGDIYSPGTVR

SEQ ID NO: 268245 - protein, 56 aa, Zea mays
  Clone ID: MRT4577_176240C.1.pep
YCLISGPPQSLSKKLHYCAITHELCNRERLQCMGCSYYSVMFARSKLVERQQLLQL

SEQ ID NO: 268246 - protein, 87 aa, Zea mays
  unsure (1)..(87): unsure at all Xaa locations
  Clone ID: MRT4577_176241C.1.pep
SSAHVSSACLLLSATLSVFSVGVAGPLVRTGSFRPPPRRAAAGILTSRPAPALLGTSFSTSAPPAAAAAAKVAVVPGSVXLASVVAA

SEQ ID NO: 268247 - protein, 227 aa, Zea mays
  Clone ID: MRT4577_176242C.1.pep
TSGLMGLGRSQLSLVSQTVDQFGGVFSYCLPLSGQSDASGSLVLGDDPSAYRNSTPVVYTSMVSNSDPLLQGPFYLVNLTGITVGGQEVESTGFSARAIVDSGTVITSLVPSVYNAVRAEFMSQLAEYPQAPGFSILDTCFNMTGLKEVQVPSLTLVFDGGAEVEVDSGGVLYFVSSDSSQVCLAVASLKSEDETSIIGNYQQKNLRVVFDTSASQVGFAQETCGYI

SEQ ID NO: 268248 - protein, 87 aa, Zea mays
  Clone ID: MRT4577_176243C.1.pep
MPESELRRGFRCAPRADYFAAVAGRDHVVIFPFMAKGHMLPLLHFATALSAQHGRLRVTLVTTPGNVAFARSRLPASVGLVALPFPS

SEQ ID NO: 268249 - protein, 113 aa, Zea mays
  Clone ID: MRT4577_176244C.1.pep
MVHCRALDLCLMDVLDRSPTWQNTSSSMEPPISNGLMAALKRAQAHQHRGYPEQQHQPLLAVKVELEQLIIFILDDRSVSKVMREASFSSPAVKGTIEQSLNAGPSTDNSGLG

SEQ ID NO: 268250 - protein, 154 aa, Zea mays
  Clone ID: MRT4577_176245C.1.pep
PSRPSGTHCQSHKGPAIFYMAKVSNAASASPSGLQWFKVAEDGLEGTTWGVDRMISNNGWTEFTVPSCIASGQYLVRAELIALHSASSVGGAQFYIGCAQVNVSASGSKTGTTVSFPGAYRADDAGIKVSIYNSQGQPTGNGQYKIPGPAKLQC

SEQ ID NO: 268251 - protein, 134 aa, Zea mays
  Clone ID: MRT4577_176246C.1.pep
MGSGSGTLKQKKRVKHAKNKYLKPGALAQIRYSRSTSRDIGKKRILLNAKDELELPPQPEVLLESNTLVLSPARLNFEPFGSNTGQVLPKTPRTPNASVSCGDSGLESLPLDLLIKIMCCLHHDELKVVFHVSK

SEQ ID NO: 268252 - protein, 199 aa, Zea mays
  unsure (1)..(199): unsure at all Xaa locations
  Clone ID: MRT4577_176247C.1.pep
MGCGASSHKDAGARRRRPGSVGDVVVFLPGLRVPRAVDFAQALGGCLARAIVERLSALRSRVVEMAMQESAAALKPRRKAAARHGSSTANLLQALEDYLPVLLGLAQQGSVLRHKVQFTWSNQEDNAEETAISDVWYEVLSVLHLMAMVCLLQANTLLXPRSYGDGYAPRVSEESRRATGDVFLKAAGYLDCAIRHVPP

SEQ ID NO: 268253 - protein, 60 aa, Zea mays
  Clone ID: MRT4577_176248C.1.pep
GKHAPLTCLLRTFIYPHTFAPIRALNTGTHVAGEFTGMNGVHRYMAEIIHGDGDLYLKTT

SEQ ID NO: 268254 - protein, 101 aa, Zea mays
  Clone ID: MRT4577_176249C.1.pep
IHFGTKKIHTIKCLYSRLVASGKTLALERKEDQDLPCQRFSAFEMELESASDRSGNLFLVVNIYIGTLKYTLEQSVSAEQFIIHELAKVQTCPNLRHHSTF

SEQ ID NO: 268255 - protein, 45 aa, Zea mays
  Clone ID: MRT4577_17624C.1.pep
LLFNMSCFCFHIRFENTLISALYHCFSKTLSSCCMLMSCNTCQCF

SEQ ID NO: 268256 - protein, 413 aa, Zea mays
  Clone ID: MRT4577_176250C.1.pep
MGCGASSHKDAGARRRRPGSVGDVVVFLPGLRVPRAVDFAQALGGCLARAIVERLSALRSRVVEMAMQESAAALKPRRKAAARHGSSTANLLQALEDYLPVLLGLAQQGSVLRHKVQFTWSNQEDNAEETAISDVWYEVLSVLHLMAMVCLLQANTLLLPRSYGDGYAPRVSEESRRATVDVFLKAAGYLDCAIRHVLPKMPLELRRQLPVDLAEGNLKALSLQALGQGVDMQLGLAIDSPKATLAVKRRLACEMVKYWQQVQESIPELPVSDGWGKKHRLFVKWKYVEAKAAAYYFHGLILDEGNTEKSHGMAIAALQASEEFLKESKMVSEAFHATPPTSRSPNAFGTAKYLFDKIPRDASSKVRIKQDLYTQEKVIGAPPPLPDFALALTPEDYDLPPLDPLWNKEDTHH

SEQ ID NO: 268257 - protein, 55 aa, Zea mays
  Clone ID: MRT4577_176251C.1.pep
VVVRIDDMVGIPLHQQLDIVGWKQLEDVLTPADLRLPEDQSPRLGATLQAMHWSS

SEQ ID NO: 268258 - protein, 74 aa, Zea mays
  unsure (1)..(74): unsure at all Xaa locations
  Clone ID: MRT4577_176252C.1.pep
GVGRGSRGGGLGGCGGRHERGGHGGDGDELHPEAGHLLICNNPXXYWAAPDLSXRVRSSREMAPKRLAGWLAPL

SEQ ID NO: 268259 - protein, 68 aa, Zea mays
  Clone ID: MRT4577_176253C.1.pep
KFLLNSKSHLYLLNCLNKKGRPFLGFDRVKLLLREGIAPNFFGLCLGANAKRKGFLSFKFLKKGIPFF

SEQ ID NO: 268260 - protein, 201 aa, Zea mays
  unsure (1)..(201): unsure at all Xaa locations
  Clone ID: MRT4577_176254C.1.pep
MQARVASMEDVKEARQAAMAAGQGRVLPTGMLKVFLGFLLLAVGLSAVGMYMARHAVAAAAPALFRPCLSGSSAEEEPEGLERWTRPPARVEHAMTDQELLWRASFAPRVRGYPFRRVPKVAFMFLTRGPLPLAPLWERFFRGHEGRYSIYVHALPSYHANFTSESVFYRRQIPXSKVAGWGXMTMCDAERRLLANALLDY

SEQ ID NO: 268261 - protein, 103 aa, Zea mays
  unsure (1)..(103): unsure at all Xaa locations
  Clone ID: MRT4577_176255C.1.pep
NNLTPDSLLTLVEGLSVPSKAGEHXFPALLGTKGVAGPAFLRAKSLNDGSETGVVGNKKGQLEQSPDLRAVEHLDLAMFKRLKYSGPLGSLPIDSLIKRLTSG

SEQ ID NO: 268262 - protein, 66 aa, Zea mays
  unsure (1)..(66): unsure at all Xaa locations
  Clone ID: MRT4577_176256C.1.pep
MDHTRETKARAYENTVXVMWASQEKWREAKHKAYDAADRAMGMGHDTREATSEKARAPTDRTMGMG

SEQ ID NO: 268263 - protein, 93 aa, Zea mays
  Clone ID: MRT4577_176257C.1.pep
LPAAKNKARLASPPSLMRKKTRTIIAFTISWELFLTKEKKEAKLYFDPSPRFGSRPETYSTRVGGGDPETYGMRRRTEKARRISKDSLRSGLI

SEQ ID NO: 268264 - protein, 204 aa, Zea mays
  Clone ID: MRT4577_176258C.1.pep
LVDLLKPIPERPGAPFLALGLLTQLAVDCPPNMLLMAEAGILEALTKYLSLSPQDATEEATTELLGILFSSPEIRHHESALGVVNQLVAVLRLGGRNSRYSAAKALESLFFADHVRNSESARQAIQPLVEILSTGMEREQHAAISALVRLLSDNPSRALAVADVEMNAVDVLCRILSSDCSVELKGDAAELCCVLFNNTRIRST

SEQ ID NO: 268265 - protein, 53 aa, Zea mays
  Clone ID: MRT4577_176259C.1.pep
NSARGVTHFFLTRERTDDRDDGQAVDMASRSPLANEGLIPVSAFIAVALVVET

SEQ ID NO: 268266 - protein, 50 aa, Zea mays
  Clone ID: MRT4577_17625C.1.pep
CSRHTQEKLPSKLICTLSLYVVLHLHVVLIELFLKKGRSALSVTTYTPFY

SEQ ID NO: 268267 - protein, 48 aa, Zea mays
  Clone ID: MRT4577_176260C.1.pep
RNVRQLDRVAEAYVLMWIIIIQTNLKLNSVSEFLIVLGMMNYMGDAMV

SEQ ID NO: 268268 - protein, 87 aa, Zea mays
  Clone ID: MRT4577_176261C.1.pep
KKRKKDIIPLPSNVGAVFFLPSQPNLLLKQGLRLAFYLKEKAVLMRNQEGRGRFWRIFFASFFLIRKVISHCFGAPAAVLGGAARKP

SEQ ID NO: 268269 - protein, 174 aa, Zea mays
  Clone ID: MRT4577_176262C.1.pep
PRVRKVLRNSKIHEFNIKLATHKRLIPAHIKGRPPSYYIVAGFVFMAVSVPYLRSEYGKEYEYDAPVKLLDKHLHAMAQSSDEQLVVVSQVLVADINIGYEDIVNIQVLAFNGTPVKNLKHLATMVEECNEAFLKFDLDFDQVVVLETKTAKAATQDILTTHCIPSAASEELKS

SEQ ID NO: 268270 - protein, 76 aa, Zea mays
  Clone ID: MRT4577_176263C.1.pep
PGLLAFYGLVEALVPQWHVLGLGYPNVVLAPTKEGAVLPSNGNMNPWLKIGMEKSKSFWDNFVAYSPPLIHQGFMR

SEQ ID NO: 268271 - protein, 92 aa, Zea mays
  Clone ID: MRT4577_176264C.1.pep
EQLVVVSQVLVADINIGYEDIVNIQVLAFNGTPVKNLKHLATMVEECNEAFLKFDLDFDQVVVLETKTAKAATQDILTTHCIPSAASEELKS

SEQ ID NO: 268272 - protein, 84 aa, Zea mays
  unsure (1)..(84): unsure at all Xaa locations
  Clone ID: MRT4577_176265C.1.pep
MGDLSADIKVGSRCEVEPGAKRGVVKFVGRAESLGPGFWVGVQYDEPTGKHDGMVKGVRYFECPPSHGGMVRPEKVKVGDXPER

SEQ ID NO: 268273 - protein, 101 aa, Zea mays
  Clone ID: MRT4577_176266C.1.pep
DERKSQILDVVKSLAGGFDMDVIFTRMDGFTMTQEWLLLDCLDLNLRHGWIAARDLLTGPEVSFESLTLASNEPGFPHAEEIKNFLRGPQLTPIGLVSLQE

SEQ ID NO: 268274 - protein, 90 aa, Zea mays
  Clone ID: MRT4577_176267C.1.pep
FSFFFFYFFFLTVMCVLHMVKKQPIECPRVALYRFTHQFVGRRTLHVHEGLVIKLHAIITDGNIIDRPSKITFHTEPHLKLLGHKRLFFL

SEQ ID NO: 268275 - protein, 155 aa, Zea mays
  Clone ID: MRT4577_176268C.1.pep
WCLNPPLLLLPFLPIMSRKPTPSMASEGRRRPMTSLASFPLSPPSLYKRDSRALSHPPYPSSLPFPASLSSSPRSSLVPFVAGVCRSSPEPVEFAGATPSAVRSQAPALLHPVETRRSIPVTRTDPRLKTTQLFCVFYKILFDAIHELYILFVVI

SEQ ID NO: 268276 - protein, 105 aa, Zea mays
  Clone ID: MRT4577_176269C.1.pep
EERNRHGYLRAAAAAAPMVSSMIASPGRETAADDEPALERRASCLGAACSENNTQQRHSAYAYWSCGLHRGPPLLRDKEYRERACINSKTDIQLNADAIQSNRSS

SEQ ID NO: 268277 - protein, 409 aa, Zea mays
  Clone ID: MRT4577_17626C.1.pep
MAAALQATPIKTLATSRWRVEGAEARPRPRPIAVSFRCSAAARSYNITLFPGDGIGPEVVAVAKDVLSFAGALEGVELRFQEKLVGGSALDATGVPLPDETLDEAKGSDAVLLGAIGGYKWDTNEKHLKPETGLLQLRAGLGVFANLRPAAVLPQLVDASTLKKEVAEGVDIMVVRELTGGIYFGKPRGFGTNDKGDDIGFNTEVYSASEIDRIARVAFEVARKRRGKLCSVDKANVLEASMLWRKKVTALASEFPDIELSHMYVDNAAMQLVRNPKQFDTIVTNNIFGDILSDEASMITGSIGMLPSASVGESGPGLFEPIHGSAPDIAGQDKANPLATILSAAMLLRYGLGEENAARRIEAAVTETLNHGFRTGDIYSPGTTLVGCKRMGEEVLKTVESLKEVAAVN

SEQ ID NO: 268278 - protein, 190 aa, Zea mays
  Clone ID: MRT4577_176270C.1.pep
MGKYMRKAKASSEVVIMDVAAAPLGVRTRARALALQRLQEQQTQWEEGAGGEYLELRNRRLEKLPPPPATTRRSGGRKAAAEAAATKEAEASYGENMLELEAMGRITRETTPCSLINSQMISTPGSTRSSHSCHRRVNAPPVHAVPSSTEMNEYFAAEQRRQQQAFIDKYNFDPANDCPLPGRFEWVKLD

SEQ ID NO: 268279 - protein, 186 aa, Zea mays
  Clone ID: MRT4577_176271C.1.pep
MGAGDGNGTRPKANEVTISCDEGPGHAFPFPKPHAPDPDPPQASDPANYAVAGKILLAAAGAFAGVLLALVALHLYSSTRRRRLGAGQPRLLRSLAIAGGDEDRRDGDGDGAGAPSPRGLDYAVLAAIPVVSIEAGAGAGDCAVCLAELESGEKARALPRCGHRFHVECIDAWFRGNATCPLCRAD

SEQ ID NO: 268280 - protein, 101 aa, Zea mays
  Clone ID: MRT4577_176272C.1.pep
WDIWPKVLVLASDRSPIWLMIGGLYKVKGSSPFKMGFMVIKVPRTIRGAFGYTRNLPGRWGVCPAGCFVPLVGSRIESSGFYCQSIERFLRLFCFGIPGLF

SEQ ID NO: 268281 - protein, 83 aa, Zea mays
  Clone ID: MRT4577_176273C.1.pep
SKLGRGVFDTNAILGKIRTISYMPQGGGSMDHSEARALNHFYLNRSKNLGKNSPPCMLMGGGQLVSHGLPPLGPFSWALTIWG

SEQ ID NO: 268282 - protein, 66 aa, Zea mays
  Clone ID: MRT4577_176274C.1.pep
AKYTSLGIFISVGSSKIWTMEERSLCTHKWRDTYQLIVGSQLASSQQSQCISASPVPSNFVMVYVG

SEQ ID NO: 268283 - protein, 128 aa, Zea mays
  Clone ID: MRT4577_176275C.1.pep
KFLPSKQPLDALQFADSKSNKSKSEGFLFLVAWGSGWDAYARAGFGFYLFWFPGCSILCWPPWPTCIAIAFFEIRNAWPPPPAQPGCVFWVPPHFLLVCLRSAPGVFCIKHIRNGLLSDWFFNLFFSE

SEQ ID NO: 268284 - protein, 76 aa, Zea mays
  Clone ID: MRT4577_176276C.1.pep
MFSFPPQYFWGEGCYKRGPPFFPDFVFGMFKMGPLKARPPKKKKKKKKKKKKKKKKKKKKKKKKKKKNSRGGARVP

SEQ ID NO: 268285 - protein, 64 aa, Zea mays
  Clone ID: MRT4577_176277C.1.pep
QIDAWQGLQFCPSLSGAIRGALEVVSIKADVSWGGGVLLGDDAYHMRLRLILQVPAVYPSEDDD

SEQ ID NO: 268286 - protein, 77 aa, Zea mays
  unsure (1)..(77): unsure at all Xaa locations
  Clone ID: MRT4577_176278C.1.pep
GYLWWGGFSIAAADVXYHCFIIGLFXATSNESLXNAFSFYSEIXLLGHHLSVDRDVSLXFYFITFSSENSMLYAIEN

SEQ ID NO: 268287 - protein, 185 aa, Zea mays
  Clone ID: MRT4577_176279C.1.pep
QQRQPTDMSSPTSPWFADLFADDRVRTLSHQVSTLGDRVWELEHKITQLMGEKAKLEKQLEEAKAISSHKEEVGRSLKAENDKLQSEVLVAEEKCSKSAAEVERLTKELGALAEAKEAAAKEFNDEKKKKTLESEDLKMRLEEMLAIKDLTESENDKLRSEALIAAEKQNMSEAEIESLKKELSG

SEQ ID NO: 268288 - protein, 176 aa, Zea mays
  Clone ID: MRT4577_17627C.1.pep
MRSASPVASPSRLLRRSARGPGALNLQLGLREDSTTPMDASPTPPAASLSPSPPASGQDPVVRPSKRVRSGSPGSAGGDGGGAANGGAGYPMCQVDDCRADLTGAKDYHRRHKVCETHSKTIRAVVANQAQRFCQQCSRFHPLAEFDEGKRSCRRRLAGPNPRRRKTPPADVFFAS

SEQ ID NO: 268289 - protein, 81 aa, Zea mays
  unsure (1)..(81): unsure at all Xaa locations
  Clone ID: MRT4577_176280C.1.pep
KTPLGGSEQTYPLLSQLILXLXYSFNMFYINLSFPFSIQHPXIFVGGGGSYXXPPPTTTKKNKIYFXPSPTPXXSXHTPXX

SEQ ID NO: 268290 - protein, 71 aa, Zea mays
  Clone ID: MRT4577_176281C.1.pep
TRYSYHWNQTKTNRGIKGPLLFQTGHPPLILTSELNLPNFGVHSVFTQVQKKQSCKDRQTNSHSDLVNSAA

SEQ ID NO: 268291 - protein, 180 aa, Zea mays
  unsure (1)..(180): unsure at all Xaa locations
  Clone ID: MRT4577_176282C.1.pep
PLFDPRVCDYEIAEDYLDWEVGKHGLIIEFTAPDSNTKHSATYLPEVAGHEGENFLFHRCDVHLSFLQRSLVSRIIAGDNKKKXLRKYVISSFXSSWTKCIIMSNNGWTHVETIDSLVRKAGYQRIITESLRKKIKVTRYQSTLYTMHYGEYVAYLKKNRGAAPSISGAPPVVNGFKPSH

SEQ ID NO: 268292 - protein, 74 aa, Zea mays
  unsure (1)..(74): unsure at all Xaa locations
  Clone ID: MRT4577_176283C.1.pep
VPGKKIQGIPPLRPGXYKRSRLPRNPRTVNRPNGGVLSGTPVKKRIIRAFLVEEQKIVQKVFKIPKTKDKAPKN

SEQ ID NO: 268293 - protein, 218 aa, Zea mays
  Clone ID: MRT4577_176284C.1.pep
MVVATEEMVVYCFDTLVAYFTGERPPPPAFEDGNHPLFVTWKKAANGSEPRLRGCIGTLESRQIVSGFRDYALTSALRDRRFPPIQSKELPTLECTVSILTDYEIAEDYLDWEVGKHGLIIEFTAPDSNTKHSATYLPEVAGHEGWTHVETIDSLVRKAGYQRIITESLRKKIKVTRYQSTLYTMHYGEYVAYLKKNRGAAPSISGAPPVVNGFKPSH

SEQ ID NO: 268294 - protein, 220 aa, Zea mays
  unsure (1)..(220): unsure at all Xaa locations
  Clone ID: MRT4577_176285C.1.pep
FVWLVRHHCSSVHVFNSLGQFFCNFSPLFVTWKKAANGSEPRLRGCIGTLESRQIVSGFRDYALTXDYCFSIEIMSDPMLKYLVGTQNVDGLMLXSRKAIVHFVLDNVXYTVILISSCSALRDRRFPPIQSKELPTLECTVSILTDYEIAEDYLDWEVGKHGLIIEFTAPDSNTKHSATYLPEVAGHEGENFLFHRCDVHLSFLQSSLVSRIIAGDNKKK

SEQ ID NO: 268295 - protein, 136 aa, Zea mays
  Clone ID: MRT4577_176286C.1.pep
GYLEAGREKDAAPHTWVSNAQLQPPTKCAAATHSHPWTTLGGWRLERATEGNWRLEGGAIGEPASSGAFPGVGDATVGTRETAHFEFGGGSRDGGSHLSRMFNWNDEQQQVPVYPSRHRLESCVTLAHLAGSARFL

SEQ ID NO: 268296 - protein, 82 aa, Zea mays
  Clone ID: MRT4577_176287C.1.pep
KKGYTHDVPLESRNSSVASSGGTLGRAARHSQPIICFPLLLAGRTFINISHRGVEYLQIFDGGEDFQQRDALRASIISPMGH

SEQ ID NO: 268297 - protein, 106 aa, Zea mays
  unsure (1)..(106): unsure at all Xaa locations
  Clone ID: MRT4577_176288C.1.pep
EDEEGIGCAARGXATPLSYPSPGPQPPGPSWTAIFDAVPTDAPTRPRVSGEEELHTGPPAPQGPLSVPQGLATQSLASPPARDALQLRSQDPTTPSAPQEATEGSK

SEQ ID NO: 268298 - protein, 85 aa, Zea mays
  Clone ID: MRT4577_176289C.1.pep
DIYIGSNHIIGDQLIYGYRRPNRINQHACRHPFMSPKTDAKHAGGGSKLKNFVFFFFTHTPHNTYVWQPARPRLLLFNHHHKLDR

SEQ ID NO: 268299 - protein, 158 aa, Zea mays [sequence omitted]

SEQ ID NO: 268300 - protein, 50 aa, Zea mays
  Clone ID: MRT4577_176290C.1.pep
IFKSWRKMHKESGLDGCECQDDDDQVGFDVEIGHQQLETHRVVLSINNYL

SEQ ID NO: 268301 - protein, 89 aa, Zea mays
  Clone ID: MRT4577_176291C.1.pep
HQTMKGAYLGVILLIGHQNTQVVDVILLRDTHLQDNIIHLLLIACILVEEITVTGTWFTRVPDIDHRRSPARDSINTNENKLLLFICYS

SEQ ID NO: 268302 - protein, 57 aa, Zea mays
  Clone ID: MRT4577_176292C.1.pep
VHGLPGFPISITVGAPPETVSTPMKINYYYLNAIVKYFLYGYQHLLFLITRHRANSE

SEQ ID NO: 268303 - protein, 144 aa, Zea mays
  unsure (1)..(144): unsure at all Xaa locations
  Clone ID: MRT4577_176293C.1.pep
RGQSGXKGQPGPPGGGGTPGNQRPXGGTXPKGGRPGAPXNIKKKDPPGGAAKRGKSHHPGGRNKGTQPGTQPGGNKGKRGPRGKRVTRQKSPQKKNRKPKGENPGGPKGGPTPNKGGGPNGPLPRGKTGGASGLKKPPNPGGRG

SEQ ID NO: 268304 - protein, 94 aa, Zea mays
  Clone ID: MRT4577_176294C.1.pep
RWIESSPKSRRIPWSAVYSYGFLPYIIRVVLQKKQGADSSVCLLSLTGPRKVPQSGCNKGCFLALPNTLFRCKSAFSSWSLFACLSSWGNFWES

SEQ ID NO: 268305 - protein, 104 aa, Zea mays
  unsure (1)..(104): unsure at all Xaa locations
  Clone ID: MRT4577_176295C.1.pep
KGLGAPRFPGFGPPGGTKFVRSQFFRAPLPPESALKKFXVTPPLVFFVAPRAAKKKFRAPVQKLFSFRAKRVPPLFGPFGKKRAFVKLPPAFGVFVGAPKMGLF

SEQ ID NO: 268306 - protein, 86 aa, Zea mays
  unsure (1)..(86): unsure at all Xaa locations
  Clone ID: MRT4577_176296C.1.pep
RNLRNRLLINQTLGLGSEXALFELXETKSILIEIFNDQATKSALAGYIPNFYKKPXEGPIRSKFQKLVXYRFLKKQLKLLLKEDDL

SEQ ID NO: 268307 - protein, 37 aa, Zea mays
  unsure (1)..(37): unsure at all Xaa locations
  Clone ID: MRT4577_176297C.1.pep
ACSKTYVSPRRPFEKSRLEXEVKLIGEYGLRNNRDVS

SEQ ID NO: 268308 - protein, 123 aa, Zea mays
  Clone ID: MRT4577_176298C.1.pep
KNPKKVFWGGGAEKHKRGALKGGPFLKFKGKKARKGEKKKGKKLKKRGLKGLEKKRGPWGEKPKPRGLKRGGKGGGKFTIKVGKIFEKGTGGGLFLISQPVKKGVCAKGFKLGKPRVFQYYRF

SEQ ID NO: 268309 - protein, 171 aa, Zea mays
  unsure (1)..(171): unsure at all Xaa locations
  Clone ID: MRT4577_176299C.1.pep
GGKGGGGGEEGGGRNGAGRKEKGGGGGQEGPPGEGGGKGGEEGGGRGGEGGGKTGEQGGEGRKQPKGGKKQGRGGGKEGAGEGGKGGRGGGAKGRGKGTKKEGGGVTTEGEKGPREGRPAAPQAGPASSGAGGESXGPEGKGQARPVGFHEAPRGIQGGHGXRGGHKGGGR

SEQ ID NO: 268310 - protein, 315 aa, Zea mays
  Clone ID: MRT4577_17629C.1.pep
MESLGVLLLHPFNAYLEQELDRRFRLYRFWETPREEFLRAHAGAVRAVVGNASYGADAALIDALPALEIVASFSVGIDRVDLAKCRDRGIRVTNTPDVLTDDVADLAVGLAIAVLRRIPQADRYVRAGLWKSRGDYTLTTRFSGKRVGIIGLGRIGQAVAKRVEAFDCPVSYHQRTEQRATYPSYTYYPSVVELAANSDVLVVACPLNAQTRHIVSREVMEALGPSGVLINVGRGPHVDEREMVAALADGRLGGAGLDVFEDEPNVPEALLGMDNVVLLPHVGSGTNETRKAMADLVLGNLEAHVLSKPLLTPVV

SEQ ID NO: 268311 - protein, 48 aa, Zea mays
  Clone ID: MRT4577_176300C.1.pep
LDRPRPRLGVGVGHSRLLETEALVRTGGRALELGRHVSTRRVGRPGYS

SEQ ID NO: 268312 - protein, 98 aa, Zea mays
  unsure (1)..(98): unsure at all Xaa locations
  Clone ID: MRT4577_176301C.1.pep
YASGSQNIXVQQLQQLVVRNLAGYSQEQRPVSFNQLDAXNSAAYLRQQLRFSQLAAGYPHQYVPFYQLAGLNSAAYFQQQQLPSFSQLADVSPVGFLT

SEQ ID NO: 268313 - protein, 76 aa, Zea mays
  Clone ID: MRT4577_176302C.1.pep
PTTCTTRTGTPSPARRRPLPKPSTVWLIESKASDDETTEDKELDLSSNDVVTKYKAAAEILNNALKIVVSQCKPKV

SEQ ID NO: 268314 - protein, 117 aa, Zea mays
  Clone ID: MRT4577_176303C.1.pep
VRSPIGPPRLSAFWLRLVCCMVLWGSCSFWRCRPLSLISASLNSTGFSRSVFPGRSPSRIGSGPVGPSWFSGGPFPFLRLDPARSALSSRAFRPRRAPAVFPLRTDSFEPRAEFRAS

SEQ ID NO: 268315 - protein, 77 aa, Zea mays
  Clone ID: MRT4577_176304C.1.pep
TEVLLLPTHSCAASTRGSFSLILLWLHETWRCGRPPLCQVGDRALGSGAAHTYTGNKKTSPGCPTRPGTMAYKNPNF

SEQ ID NO: 268316 - protein, 122 aa, Zea mays
  unsure (1)..(122): unsure at all Xaa locations
  Clone ID: MRT4577_176305C.1.pep
MAAGLRGLHMDMPFLASPPEAQSSFRRRRGGQNFIYTAIYVFICMACKHLPFYRIYSTTGAKPLYXYATILSLNPTTGLNLNNTPIXLYGVXLHLLDPSKIIEMDTDARDDLALLSGAQKLL

SEQ ID NO: 268317 - protein, 150 aa, Zea mays
  unsure (1)..(150): unsure at all Xaa locations
  Clone ID: MRT4577_176306C.1.pep
MPSLIDYSPAALRSLLRPPPSDERRAKQSGAAAGAGGALGLFKMFKLLPVLTTGCKVAAMLGRHNNHRALLADHAPTVTLFGXRRGRLSLXIHEDTRAPPAFLIELPMLAPALHREMATGSGRLATRGDTRASPRSRTRAAAGAVELSQQ

SEQ ID NO: 268318 - protein, 78 aa, Zea mays
  Clone ID: MRT4577_176307C.1.pep
PQPKIHSHEESNSLAWPKICSYGKSNLTPKKCYSDHLTNTGRGLFFLPMTVLSYLRIFCNNAICASFLSTGWFISLWQ

SEQ ID NO: 268319 - protein, 110 aa, Zea mays
  Clone ID: MRT4577_176308C.1.pep
CTTPHPRDKRPHRRLGCHWQGQQHTHTNTTAKSSSFSVFPPRPSSSFTSRSFPTNRRRRLSGYVTLMVPRKGVLGGEPVWTWSSLCRPVEIFSYRSGAWPLLLAFAALRD

SEQ ID NO: 268320 - protein, 46 aa, Zea mays
  unsure (1)..(46): unsure at all Xaa locations
  Clone ID: MRT4577_176309C.1.pep
NPPPFLFAKKKKKKKKKKKKKKKKKKKKKKKKKKKKKKGRRSRXRT

SEQ ID NO: 268321 - protein, 128 aa, Zea mays
  unsure (1)..(128): unsure at all Xaa locations
  Clone ID: MRT4577_17630C.1.pep
EHLYNLISIHSRLNNSVTQSCAFQKYKNVMNTIVVNILKELRVKGMFLILNSATFSFVVSTLVSSHHQLSLLPCASALLLLHQHPQPLGAHLDPGLQMETTHSSSLPSFSLCKRHRPLPASTIXSSLK

SEQ ID NO: 268322 - protein, 154 aa, Zea mays
  unsure (1)..(154): unsure at all Xaa locations
  Clone ID: MRT4577_176310C.1.pep
GPPGWPDDATPTPGTCLRPKNLRSTGTGTSSSVNNCSVGDHRLQLLAHAEPLIQEEPLKPWLTLKRNMNNIKYLPALADIXLQTPVFAIEADPAFHSEYATKKGVTLLPYAAWVKNETLVFEINGDPGKRXEAKANGRGMGRIRPTTGKKMSGE

SEQ ID NO: 268323 - protein, 103 aa, Zea mays
  unsure (1)..(103): unsure at all Xaa locations
  Clone ID: MRT4577_176311C.1.pep
LQFSERYLRGTLALIXSRKSQKSTTLMLRKLSSHRLXVRKSAQHSKTDARHHNHPVLXALQDAXEXYLAGLSDDTNLYALHANHVTILPKDIHVETIIPLHTG

SEQ ID NO: 268324 - protein, 41 aa, Zea mays
  Clone ID: MRT4577_176312C.1.pep
GGVWEIQIYEIFLFASKSIILMGHCLCFTILVRLENYFPKA

SEQ ID NO: 268325 - protein, 94 aa, Zea mays
  Clone ID: MRT4577_176313C.1.pep
KEVMPGGRQTPSMGPTTTTAIRVRSAAAGLNVGAGGAASGATTHKKSSSVPTAVATAATSSRITFSGRLKSFAEAPHSYRYTSAAALLSCALQI

SEQ ID NO: 268326 - protein, 70 aa, Zea mays
  unsure (1)..(70): unsure at all Xaa locations
  Clone ID: MRT4577_176314C.1.pep
NSSSSSRSLFAXLCNEPCNEPDSSAERTRQRYSEQDSYRDAPLHNTLAVTHSPLNTRSYCWGTYREPASH

SEQ ID NO: 268327 - protein, 146 aa, Zea mays
  Clone ID: MRT4577_176315C.1.pep
MSAQKTSAIADQGRGDVLFAIHEKFDLLDFAGALEVFTTASHDFKDPDNNKAFEVTIVGPEPKVISDQGVVVGSQISYKEAHERLEDFDILFVVGGNSKEVVAKELQPLSLITDFSELQKRDPARERTILSICTGALFLGKQGILS

SEQ ID NO: 268328 - protein, 101 aa, Zea mays
  Clone ID: MRT4577_176316C.1.pep
MDRLNAKLYLHNCFIMKENERLRNKALLLNQENKALLTELKQRVARTAATANGNGNAKANGNVAAAAGKRAPTIPDLNAAAPAGAHEKPAASPKPKKAVAN

SEQ ID NO: 268329 - protein, 88 aa, Zea mays
  Clone ID: MRT4577_176317C.1.pep
MDRLNAKLYLHNCFIMKENERLRNKALLLNQENKALLTELKQRVARTAAAAAAAGNHAPTIPDLNAAAPAGAHEKPAASPKPKKAVAN

SEQ ID NO: 268330 - protein, 216 aa, Zea mays
  Clone ID: MRT4577_176318C.1.pep
MSSAQIAPADHVCYVHCSFCNTVLAVSVPGNSMLNIVTVRCGHCANLLSVNLRALMHSLPEQDHQLQENIKVHGINGTLHDDHQYCGHLDQLGSSSSSRFRRLPVMCSPQNEQHLLQEQTLNNNARPPEKRQRVPSAYNRFIKEEIRRIKANNPDINHREAFSTAAKNWAHYPNIHFGLDDSGREGKKKLVDHEAAASVVAVAAAPTAAKKIQGFY

SEQ ID NO: 268331 - protein, 81 aa, Zea mays
  Clone ID: MRT4577_176319C.1.pep
MVRGKTELKRIENATSRQVTFSKRRNGLLKKAFELSVLCDAEVGLVVFSPRGKLYEFASAARTKSLKKPMTASYMGATRRS

SEQ ID NO: 268332 - protein, 261 aa, Zea mays
  Clone ID: MRT4577_17631C.1.pep
MESLGVLLLHPFNAYLEQELDRRFRLYRFWETPREEFLRAHAGAVRAVVGNASYGADAALIDALPALEIVASFSVGIDRVDLAKCRDRGIRVTNTPDVLTDDVADLAVGLAIAVLRRIPQADRYVRAGLWKSRGDYTLTTRLSGKRVGILGLGRIGSAIAKRAEAFGCSISYSSRSEKPFPDYKFHASAVDLAANCDVLIVACSLTAETHHVVSREVIDVLGPEGVLVNVGRGAHVDEPELVAALLEGRLGGAGLDVYEHE

SEQ ID NO: 268333 - protein, 245 aa, Zea mays
  Clone ID: MRT4577_176320C.1.pep
MAGSIRVTMEVGADGVALITICNPPVNALHPIIIQGLKEKYAEAADRDDVKAIVLTGAAGKFCGGFDINVFTKVHETGDVSLMPDVSVDLVSNMMEDGKKPSVAAIQGLALGGGLELIMGCHARISTPEAQLGLPELTLGVIPGFGGTQRLPRLVGLPKAIEMMLQSKFITAKEGKERGLIDALCSPDELIKMSRFWALEIANYRKPWIKSLGRTDRLGSLSEARAVLSMARQQAKKVAPNMPQH

SEQ ID NO: 268334 - protein, 82 aa, Zea mays
  Clone ID: MRT4577_176321C.1.pep
MSSAQIAPADHVCYVHCSFCNTVLAVSVPGNSMLNIVTVRRGHCANLLSVNLRALTYSLPEQDHQLQQTTEQMSAYRPYVHG

SEQ ID NO: 268335 - protein, 107 aa, Zea mays
  unsure (1)..(107): unsure at all Xaa locations
  Clone ID: MRT4577_176322C.1.pep
MSSAQIAPADHVCYVHCSFCNTVLAVSVPGNSMLNIVTVRCGHCANLLSVNLRALTHSLPEQDHQLQENIKVHGINGTLHDDHQLGHLRRRFRRRPVMXSPQNEQHL

SEQ ID NO: 268336 - protein, 231 aa, Zea mays
  unsure (1)..(231): unsure at all Xaa locations
  Clone ID: MRT4577_176323C.1.pep
MSSSQIAPADHVCYVHCSFCNTVLAVSVPGNSMLNIVTVRCGHCANLLSVNLRALTHSLPEQDHQLQENIKVHGINGTLHDDHQCGHLDQLGSSSSSRFRRLPVMCSPQNGQHLLQEKTLNNNARRKAPFHVHADDHAYACLNLHXSFFSLIXIHMHAIIRQIMIINCTTXRPCFELNAPRAAPEKRQRVPSAYNRFIKEEIRRIKANNXPDINHREAFSTAAKNVSKAFF

SEQ ID NO: 268337 - protein, 197 aa, Zea mays
  unsure (1)..(197): unsure at all Xaa locations
  Clone ID: MRT4577_176324C.1.pep
MLNLVSFETPPLGRQEISANNPTVAAVRGNEESSSNTCLHGHLDLSLGISLSHGGCGCACDASSCGGNKQESYGGRQGSSRDDKAAVGRCMTSGTTTTASVGHDAHVGDLTAGGGGWTAPFVLSPTAFMHPWSLAARQQKAAAEQDRKPPPPTTYMSSDGDRAXTSPSAVGWPPVHTSRRNIIVTAMHVSRTAAGAT

SEQ ID NO: 268338 - protein, 83 aa, Zea mays
  Clone ID: MRT4577_176325C.1.pep
RGIWPRMVSHSRPRGARSTVLIGLAPAWCGTVRNEWSSCPLATVHVLCSTPSVLCPRSSPPCSSPRSSERAAPVSSHASAQTS

SEQ ID NO: 268339 - protein, 283 aa, Zea mays
  unsure (1)..(283): unsure at all Xaa locations
  Clone ID: MRT4577_176326C.1.pep
MPGLVPSTSTSHLFCRSLAAARTLSAAAGHSSSSTSSSSVKMARSALDEVTDTGAFDRTPSTFRSFVSRDASARFPAVAGRYHLYVSYACPWASRCLAYLKLKGLDHAISFSSVKPIFERTRESDDHLGWVFPASAGEVPGADPDPFNGAKSVRDLYEIASTNYTGKPTVPVLWDKQLMTVVNNESSEIIRMLNSEFNGIAENPGLDLNPAHLQASIDEVNGLVYDAINNGVYKCGFAKKQGPYDEAVTTLYEALDKCEEILXQQRYMCGNSSPEGDXRLFVT

SEQ ID NO: 268340 - protein, 46 aa, Zea mays
  Clone ID: MRT4577_176327C.1.pep
GCNKYWFLPDREGGRFMRGILFFSQPCEYAWPRFGVNSVVIHFRRS

SEQ ID NO: 268341 - protein, 99 aa, Zea mays
  Clone ID: MRT4577_176328C.1.pep
VDRGKNSQTFYVIKACKLANELLAITENADRWKVMYRVWMGMLCYSASMCRGYLHAKSLGEGGEFLSFVWLVGRVGGAKTLADKLQMPPETTKPPPLDR

SEQ ID NO: 268342 - protein, 79 aa, Zea mays
  Clone ID: MRT4577_176329C.1.pep
VIKADWITTDEVKIHLHKHRMHSIRSTCLPATFSQTVMLAQRPFDLLLHQEHSIWQSVHSESPLYVCRSGGSATVTGYS

SEQ ID NO: 268343 - protein, 67 aa, Zea mays
  Clone ID: MRT4577_17632C.1.pep
TLGFWSYEFYFMGQTVLRRLWFGGLGINHCPSHVLTSLMCSKCHIRLMPQSLVMVWNLQMIPQIPRD

SEQ ID NO: 268344 - protein, 46 aa, Zea mays
  Clone ID: MRT4577_176330C.1.pep
PCYPPGPTDSRRGRASKAPPGQGRHATEEQAAAGAHADRANRKPPD

SEQ ID NO: 268345 - protein, 132 aa, Zea mays
  Clone ID: MRT4577_176331C.1.pep
SSHAWGPAAVPLEAPGAAVLDANDFRKYRGVRQRPWGKFAAEIRDPKKRGSRVWLGTYDTAIEAARAYDRAAFRMRGAKAILNFPNEVGTRGADFLAPPPPPPHAAATSQNKRKLMHDAEATTAGAGAGAEP

SEQ ID NO: 268346 - protein, 56 aa, Zea mays
  Clone ID: MRT4577_176332C.1.pep
FPTRRHPSSYTNYSLHFVFHNLYILLYMAIISTASGNTTLSLNPIIFCIPILTSNN

SEQ ID NO: 268347 - protein, 195 aa, Zea mays
  Clone ID: MRT4577_176333C.1.pep
TNCMFYTDNFYQGLQESSPTDKKCLETSRTSSTSRILIKNRLTETCIMAGASTKRDITNIMAATHYLYHTGMDCMNMICRLYEQDPHRESIGRRCASLQLPSEFLSLASSAMAIDPDTPFAFVCRSLPPPPSATSWRATLSVRRRPENIDARENLASVPPPSLPFACVRRRFALRCVALRVCCPVYFPPPTDSRP

SEQ ID NO: 268348 - protein, 120 aa, Zea mays
  Clone ID: MRT4577_176334C.1.pep
PRWPPIRLDRHSRGLLLLLLLREGEVRLLGRGMDLLLPHALHIALRWALVHARAAPCQHTSHALRMHQHWMVVVPRTVEKTAESRIGWDRFCALPDKVVSMVDGEREQRHGRSNVLHAKT

SEQ ID NO: 268349 - protein, 105 aa, Zea mays
  Clone ID: MRT4577_176335C.1.pep
QVEVDVMQFYRAPGVFFCSRRGCGIQAEPRDGTPARGSRCQYLSLVHHVVHHVDLGLGSFFLLLCSCRWRAIVLLVSSVLALSVIVSELNCVVSDLVPAGLEVPN

SEQ ID NO: 268350 - protein, 103 aa, Zea mays
  Clone ID: MRT4577_176336C.1.pep
YVDSNFNNQTALYTGAYSILMLLTLSACVANSTISYQCSHSSIAPIISAYLTSMIASLYANPSLHTYSMHQAISTSNIPSSLLLFKQSATLSIIQSFIQTITT

SEQ ID NO: 268351 - protein, 53 aa, Zea mays
  Clone ID: MRT4577_176337C.1.pep
SKPIRIFKNLRVCVDCHSALKYVSKATGREIILRDSNRFHRMKDGECSCGEYW

SEQ ID NO: 268352 - protein, 90 aa, Zea mays
  Clone ID: MRT4577_176338C.1.pep
SADCTAGFLSHTCTCLPFSMCICCRHRMNRWSDGKSRWSSYVQPMRYLPCAGVLENRSRLVRWLYNGAVDDIGKLASVLIEPELAIPKSP

SEQ ID NO: 268353 - protein, 141 aa, Zea mays
  unsure (1)..(141): unsure at all Xaa locations
  Clone ID: MRT4577_176339C.1.pep
MALYQYLYKDSRVAYPCKDTGIVQTKDGTFCSCMLRNSIVCTPHNGMFYAVCGFLDLNANSLLHRSDGSFLSYKTYFKERYNLDLRCEDQALLEARKLVEVRNFLHKCNXKRKRKEXGKSVVELPPELCIXVMSPMSAITL

SEQ ID NO: 268354 - protein, 125 aa, Zea mays
  unsure (1)..(125): unsure at all Xaa locations
  Clone ID: MRT4577_17633C.1.pep
MAAKIFCFLMVRDLYASVATATIFPQCSQAPIASLLSSYLSPSASSMCDTTILQPYTIQYAITTCILPLSPLILQHPSILLQXLPLLHLXVAQNIRXAQHLQQLVLAHLAAYSYQHLHLPFNQLA

SEQ ID NO: 268355 - protein, 208 aa, Zea mays
  unsure (1)..(208): unsure at all Xaa locations
  Clone ID: MRT4577_176340C.1.pep
GRPTPGRSYASALPPRPFEEVRETIEKELGEPMSDLFADFVLDPLATASIAQVHRATLADGREVVVKIQHDGVKEIILEDLKNAKSLIEWIAWAEPQYDFNPMIDEWGKEAPKELDFNHEAENTRAVSRNLSRKSDCGSGSVSSTVDVLIPEVIQSTGKVLILEYMGGIRLNDNDSLXAYGVDKQKLGEEITRAYAHQIYIDGXFNGD

SEQ ID NO: 268356 - protein, 69 aa, Zea mays
  Clone ID: MRT4577_176341C.1.pep
ITHGGSGVPDALLNQMFGNNGLESEEGISLLISRKLLKLMNGDVRYLREAGKSAFILSAELAAAHNLNS

SEQ ID NO: 268357 - protein, 124 aa, Zea mays
  unsure (1)..(124): unsure at all Xaa locations
  Clone ID: MRT4577_176342C.1.pep
VPPPGGEAGRVFFTRAVNLGWDGFPPRPEVLAILEATPTLLAGVGGFPVEAFVGAAVSQPVFNEGAGVFACSFCGFVVGALSGGVLXGVPGLLVFLIPGSPRKVPSISLLLFHPPLLPDGMPPA

SEQ ID NO: 268358 - protein, 81 aa, Zea mays
  Clone ID: MRT4577_176343C.1.pep
PRVRPRVRPRVRFVFPEPSFWHPEKMAKLKNPPGPTHLFKGPKNGFKKPKGPRQPSPKGVAPQFLGTLGFFRKGPKKSGWA

SEQ ID NO: 268359 - protein, 71 aa, Zea mays
  Clone ID: MRT4577_176344C.1.pep
FVGCSLLLCCCLPRVGCRAVRCWCPASRGPFCRGPARLWALPPGCFGRLLVSSGGGGSPGWWWLPALFAWR

SEQ ID NO: 268360 - protein, 111 aa, Zea mays
  Clone ID: MRT4577_176345C.1.pep
ENKTKELILQFANQLCEGFPSPHGESTVSCQEISKMPSLGFPIANKTFPLTPEQFIFKLEQGGPTVCISGFMGYYVPPPRGPLWIFGDVFMGAFPPVFDFGNDRIGFPEFA

SEQ ID NO: 268361 - protein, 661 aa, Zea mays
  Clone ID: MRT4577_176346C.1.pep
WRWALFRRRAQDLREQLEAHVVTIETLRAEIKTAQVQHGKELEELRETISSSYLDQTKSLRSTLEEKQKQIDSLSTSNTELQNSIKDLDERLNASKQSRADADEIISSQKGMICELEGQLNEERNLRREERDKAAHDMKSALHKVQAEAQEEIKKQAESYLRQQREQKEVISKLQESEKETRLFVETLRSKLEDARDNLVTSEKKVRELEAQFQDEQLVSANNRKKSENLETELRKLKKELENEKAAREEAWAKVSALELEIAATIRDLSIEKQRYQGARERIILRETQLRAFYSTTEEISSLFAKQQEQLKAMQRTLEDEENYESTLMSVDLNKEHLAIDNAGMKPVNCSKNTLGASIASPENTQVSEHSSSDEDANMTEQQDDDVTANGGNTQDLECTSPERSVERRPGFHGNPVPTAPEREVTDTEQVPETESEAGNVGCDDQRCDNIGGETMPLEDEVLLPENEEPTALLKDAGQPQSNMVPIPILDDGGGHCSEEKHEGACSESKRDDTHVGAIRTGDLLASEVAGSWAVETAPSVNGENESPRSLGDATERDEDGGSVAADALLTLVNSEGQAAGSQNNVEQASSKITDDRRVLSAMIGIVDPEFRKQMSRSGAGNEEPMSDAETDEGVEEGDSDSGSDGSDSDSEEAMVEDSVG

SEQ ID NO: 268362 - protein, 127 aa, Zea mays
  unsure (1)..(127): unsure at all Xaa locations
  Clone ID: MRT4577_176347C.1.pep
FWDPLAFNGPPPERINGGLAXVGFVSALPVEAPPGGGILSQAGNGAGLAWFGDTPPVLSPGSLGPLLQGESPQGRSGRFFTPHPQLWNGPLPMVGPVALPGPEDLTGGPFVNGLKTNQPPRSTLINW

SEQ ID NO: 268363 - protein, 96 aa, Zea mays
  unsure (1)..(96): unsure at all Xaa locations
  Clone ID: MRT4577_176348C.1.pep
RHDMVTGPPRASLANALGCCMHAPCRSLSPTAPSACMHGTAKTAGRLAPPPQTSGMDGHGATRHATXPMQAPXXRASPSXTRXRQGLLRRPPVXRG

SEQ ID NO: 268364 - protein, 130 aa, Zea mays
  Clone ID: MRT4577_176349C.1.pep
ATGGCARAARGRARAGQSRCQGPPGPRLEAVAAGAGAGSRVRHGAEAGAAPASRQAVARPRRHMFGAALRARRSRGRGSPRCHGRPPWPRAAWLACWGPRPPWPPALVDGRLAEPPEAAPTRSCDARGRA

SEQ ID NO: 268365 - protein, 80 aa, Zea mays
  Clone ID: MRT4577_17634C.1.pep
TMFGAKTPHYLQYFFSQKLLNYIQGKLNSFPKGPKPKQKFQIFTTTAHLNPGFKNDPFPQKGNQCKNTTGREAPSWNLKG

SEQ ID NO: 268366 - protein, 166 aa, Zea mays
  Clone ID: MRT4577_176350C.1.pep
RCAPVPPAVAARTLEIPGPPEPRKMVIHALNSGPKVFRADFEDALSPPWENLMPGQVNLRDAVAGTISFPHVGCGRTYELNGRTAKLFVRPRGGGVPEAPFLFAGEPAIGCQKKTPPPPFQNPAAFKKKQGPGFGPFFYLPKMEPSKKKKKKKKKKKKKKKKKKPK

SEQ ID NO: 268367 - protein, 50 aa, Zea mays
  Clone ID: MRT4577_176351C.1.pep
LSLLFFFFFFFCKAYTCQFSSDRVQSSDQIIGWTKVWMKFRSNPKASLVL

SEQ ID NO: 268368 - protein, 164 aa, Zea mays
  Clone ID: MRT4577_176352C.1.pep
KRWYKSKHEKCLSTLRILLDSPATDLGHGLMGSPIRLDNQEDLLPVPVQGEYRVRMDEIVGPRVGRHALAPRAGRRAPCTPSMDPALQRESNPPRIQLLWIQPCMDPPAWRRSPFADDPVVNHREREREREKERKRVVLTGDEHGGGGRWSGHSTVRDHQEERT

SEQ ID NO: 268369 - protein, 156 aa, Zea mays
  Clone ID: MRT4577_176353C.1.pep
MKRTRAQQPKVEEPQDLAANLKPQRRDKQPRQPKSGAKAKPAAGPRVAAATTLAAAAAAAAAAANAASAASSPGPETAPTVPDVCVGGDKDGDADADASAVDWDLDAGLSAAAWWTWGVDEEKLLGWFPFVEEDFRCAGGGAAEVAAFDHDIWSIW

SEQ ID NO: 268370 - protein, 125 aa, Zea mays
  unsure (1)..(125): unsure at all Xaa locations
  Clone ID: MRT4577_176354C.1.pep
MTILRIALESHQXVYHPGALKARFDEFISTLIFLFTGQGSGMAFSKLTRDRPXTTPTCLYLQRXEYAFALIKEESENANIXGGHDNPDVXTFGXFADDNITLMRRLLYCEAXQLLMSTTASFLIL

SEQ ID NO: 268371 - protein, 43 aa, Zea mays
  Clone ID: MRT4577_176355C.1.pep
KPGTGPATKSLDLPTHHLSFLHQMTFPWGRGNLKYLRSQKHTL

SEQ ID NO: 268372 - protein, 85 aa, Zea mays
  Clone ID: MRT4577_176356C.1.pep
VVRPLAPAKFSSKKKKKKKKKKKKKKKKKKKKKKKKKKKKKKKKKKKKKKKKKKKKKKKGGAPFKEPIFFPRSLQIKIFFLGPPK

SEQ ID NO: 268373 - protein, 157 aa, Zea mays
  Clone ID: MRT4577_176357C.1.pep
CSAPRRRSLHGHRQRPSSIPWSSCSALDPKTSSCSPSIAPRRVAPLLQINGAQHLERPCLCSSTGISSSRRPSLRWSSASHAPGRGSVFVPDSVSSRPRPSCSTPAFDAQESWTSSSPDLLVSRASIHLCSPNPRRHNTLGTLVDHVMQRTKDESTT

SEQ ID NO: 268374 - protein, 106 aa, Zea mays
  Clone ID: MRT4577_176358C.1.pep
ILLTAGSPLRADGIYLFLGSLSFRPQLHSFVLEEAFALLKAGPPLWSHPKSCFLPGIVSVRNGPSFFTNNRIHCVCCALKLSVMGMVLLSPPYFSACAFLGYCSQP

SEQ ID NO: 268375 - protein, 260 aa, Zea mays
  unsure (1)..(260): unsure at all Xaa locations
  Clone ID: MRT4577_176359C.1.pep
MKTTSYVSALLGLASAVSAHYTFDKLTLSGQQEGTDNQYIRKXKTVTCPPSSRVFPTVPSXNDKDFTCNKGSTASPDVFKVKAGDEIGLKQAFGGTGMQHPGPIQVYAAKVDDATKADPSNLDWYKIHQALVCKAGTPXAPRPLLVLLGRGLCSLQDXSTLPDGQYLVRGEHIALHGAHGGEAEFYYACAQLEISGNSASSIPGTSVKMPGVYKQDDPAVNFSLXGSSTAYDVIPGPDVIPGGTIRGTADGASGDVQKGV

SEQ ID NO: 268376 - protein, 93 aa, Zea mays
  unsure (1)..(93): unsure at all Xaa locations
  Clone ID: MRT4577_17635C.1.pep
SDVGFGIIVRGGFGFMGHGHGVGGCAFIALFHGSLLECKVSCHTQLLLHCSIVLCILGLFLVGVGFFKLDGPRFXFVGGDIKKSLKRVGAVEV

SEQ ID NO: 268377 - protein, 85 aa, Zea mays
  unsure (1)..(85): unsure at all Xaa locations
  Clone ID: MRT4577_176360C.1.pep
KPCCYFKQQQFFPFNQLRFIELLXSYLQQPNKLTHSSQAYPCLPLPXQANFSFPFQTKPIAKPFETSSLAYFTSKQPTYLPFQPS

SEQ ID NO: 268378 - protein, 73 aa, Zea mays
  Clone ID: MRT4577_176361C.1.pep
LLCVVFQQRPGTDGTPKYSNSWHVVKETAKYEGVRGFYRGITSNLLKNLPAASLTFVVYENVIKLFKATKEKT

SEQ ID NO: 268379 - protein, 86 aa, Zea mays
  Clone ID: MRT4577_176362C.1.pep
GRQAPALYGHGFRGQVIFCKDRPVQRWFKGARRVKAPLLRCKKVIFFRGMDAPLSKSLVRPGLFEHTCVFLGLSMKSKTKSPSFPV

SEQ ID NO: 268380 - protein, 97 aa, Zea mays
  unsure (1)..(97): unsure at all Xaa locations
  Clone ID: MRT4577_176363C.1.pep
LPIDVALRDHLRKRRDEDDDDMILFSPMLHILGSSSNIATEKKRRHTSKLSGEEHVQELLXGHLNNCRVAFKMEPEIFKSLASFFCSTLSHVAYTKL

SEQ ID NO: 268381 - protein, 65 aa, Zea mays
  Clone ID: MRT4577_176364C.1.pep
RRFHIPASTIYGLLSFHRHIHSCLDICLEALVGTLVPITHCIKIWLLLTELGKGDFHKSCLCHVR

SEQ ID NO: 268382 - protein, 86 aa, Zea mays
  Clone ID: MRT4577_176365C.1.pep
MIQRLRCCEFIFCNYKKNRVVLCIAPEKNGLRLKLCNPIKYWGGYVTRHDILFILAGVMDHIFRGLPQDFQPGNNLQKFDYIWVGD

SEQ ID NO: 268383 - protein, 45 aa, Zea mays
  Clone ID: MRT4577_176366C.1.pep
GDTGTGESNFTLCTLVLHNTTYAFHMSYIPNPTVDGYELYCRCLQ

SEQ ID NO: 268384 - protein, 236 aa, Zea mays
  Clone ID: MRT4577_176367C.1.pep
MATRRLTPDCFPSLLAGVLAAFLHAALHAPLAVAQERQPPWLLCSPPPDSGIAGNYTENSPYQGNINLISATLPKNTSSSPVLYAKDRVGSVPDIVYAHALCRGDANASACESCVATAFKGAQQGCPLVKDVLAFYDLCQLRFSNRNFFLDNDNFITAYYLQGSKLAAGTGTGTPMGAFDAAVLLLVNATANYAAGNSSRRFGTGEMGLGDDNRTRIYALAQCTPDTAPDICQTYL

SEQ ID NO: 268385 - protein, 152 aa, Zea mays
  unsure (1)..(152): unsure at all Xaa locations
  Clone ID: MRT4577_176368C.1.pep
PQLGYQFCLPFAVVRGVQPREGQCSSVITRLQGFSSCSPAAVPHQWPSRRMTTSLAVGRSKPGCGFPLTLSFKDVHHPCWGGGEPSRGPALRLGWRPASSSSIRRRRVFTSLAEDANLDYAXPAGCRPSAAECLALWAGRPWHRLRCCLLPL

SEQ ID NO: 268386 - protein, 52 aa, Zea mays
  Clone ID: MRT4577_176369C.1.pep
GVCRAGRVWADIEGIHAEEVPGLIFRTGPRGVTPRISVNRQKLILHNLIMIH

SEQ ID NO: 268387 - protein, 56 aa, Zea mays
  Clone ID: MRT4577_17636C.1.pep
HFFPGPTGGFLLNRGSQGYDRSTYITTRECSTSYDPPSSLDEKPTCTCFRQDPTLQ

SEQ ID NO: 268388 - protein, 82 aa, Zea mays
  Clone ID: MRT4577_176370C.1.pep
MLFNAGEMLVGLARCFFMDDISTGLDSSTTFEIMKFLQQMAHLMDLTMVISLLQPPPETLELFDDIILLCEGQIVYHGPREN

SEQ ID NO: 268389 - protein, 88 aa, Zea mays
  Clone ID: MRT4577_176371C.1.pep
RPAVLGPLEVSHHWVFEGNGSNPSGLDLRGAPFCPAGKGRASYFGNFFLPLQVSPRGRFRVVVFFCFQPVPAPPEEDGLRMIRGFMIE

SEQ ID NO: 268390 - protein, 82 aa, Zea mays
  Clone ID: MRT4577_176372C.1.pep
PPPTHSKKRWGQVKGSILAGFPGPVFFGAKRAGGEKSENGFKKRKNPSRGTLCTSKTFTGGVTSKTLGIFYFKNALALKVGP

SEQ ID NO: 268391 - protein, 137 aa, Zea mays
  Clone ID: MRT4577_176373C.1.pep
AVHRAIDRPHATRSVRLHPVERPTWRWKPRRCDAPRFTARAALERLRGKRVVFVGDSMSRTQWESFICMLMAGVDDPKTVYEVNGNEITKTIRSLAVRFASFDLTGEFFRSVLLVQQRPPARYAPKRGKSTLGFGQV

SEQ ID NO: 268392 - protein, 47 aa, Zea mays
  Clone ID: MRT4577_176374C.1.pep
IRNPCPTPKTQTRTIQTQNFSNNKPKKKRAPPWAKPATQQNNLTVKN

SEQ ID NO: 268393 - protein, 372 aa, Zea mays
  Clone ID: MRT4577_176375C.1.pep
MWKLNPFGGKAQSGLDGRTIDVGNLKITVQNAIAQGGFSCVYLACDTVHPSKMYALKHIICNDSESLDLVMKEIQVMNLLKGHPNVVTLVAHDVFDMGRTKEALLVMEFCEKSLVSAMESRGSGYYEEKKVLLIFRDVCNAAFAMHGQSPPIAHRDLKAENVLLGCDGVWKICDFGSTSTNHKCFNKPEEMGIEEDVIRKHTTPAYRPPEMWDLYRREVISEKVDIWALGCLLYRICYFKSAFDGESKLQILNGNYRIPEQPKYSTAVTGLIKDMLEASPNSRPDITQVWFRVNELLPLELQKSLPDGPSPAVSLSLQDEGAHKRAHVMPRRNPPSPSREQSNSSLSHGSSKAGDAPLGAFWATQHAQGAQA

SEQ ID NO: 268394 - protein, 80 aa, Zea mays
  unsure (1)..(80): unsure at all Xaa locations
  Clone ID: MRT4577_176376C.1.pep
RTNYNLTAVATKISSLPALFAHFASATNASIXTQSSLDPSSIIPQPLPPDTLMAXEHPSVHVYRLQQSIAASLSQQPIAQ

SEQ ID NO: 268395 - protein, 114 aa, Zea mays
  Clone ID: MRT4577_176377C.1.pep
MWKRNPFGGKAHSGLDGRTIVVRSLKISVRNVIAQGGFSCVYLACDTVHPSKMYALKHIICNDSESLDLVMKEIQVMNLLKGHPNVVTLVAHDVVDMGRTKEALLVMELCEKSL

SEQ ID NO: 268396 - protein, 211 aa, Zea mays
  unsure (1)..(211): unsure at all Xaa locations
  Clone ID: MRT4577_176378C.1.pep
STNHKCFNKPEEMGIEEDVIRKHTTPAYRPPEMWDLYRREVISEKVDIWALGCLLYRICYFKSAFDGESKLQILNGNYRIPEQPKYSTAVTGLIKDMLEASPNSRPDITQXSLIDWPFISMIXVWFRVNELLPLELQKSLPDGPSPAVSLSLQDEGAHKRAHVMPRRNPPPPXREQSNSSLSHGSSKAGDAPLGAFWATQHAQGAQAADNR

SEQ ID NO: 268397 - protein, 229 aa, Zea mays
  unsure (1)..(229): unsure at all Xaa locations
  Clone ID: MRT4577_176379C.1.pep
MAESPEQFRGRSRLPRFAEPLRYDLVLRPDLAACTFSGSASAAVAVSAPTRFLVLNAAELAVDRSSIRFQDWAPTEVVQFEEDEILVLGFDRELPLGEGVLAMDFTGTLNDQMRGFYRSKYEYKGEARNMAVTQFEAADARRCFPCWDEPAFKAKFKITLEVPAELVALSNMPVVKETVCGPLKTVYYEESPLMSTYLVAIVXVGLFDYIESSTLEGTKVRVYTQVGKT

SEQ ID NO: 268398 - protein, 114 aa, Zea mays
  Clone ID: MRT4577_17637C.1.pep
CRVGGRVGKDVISPNKIHTKLQQGMLLFGVVRVTDFIRLVPVELPVVVLGAGFWQIHEAVIDLDAVVDASYGVALHWSWPSIGSWSVTCLRSVTWVSGCACAGYPVTLSCSRSA

SEQ ID NO: 268399 - protein, 67 aa, Zea mays
  Clone ID: MRT4577_176380C.1.pep
VYNNSQLRQTGITVEDENCAHLCDTRYCLLRPVFRELCPLTAPDRQGLLIHEDLYGVLTHGMIRALL

SEQ ID NO: 268400 - protein, 104 aa, Zea mays
  Clone ID: MRT4577_176381C.1.pep
TCFQEPQQMQEGAGRWGWIHRPRKRAVPWRERILDRREREVVVCVEVGGARSYKWRELDDEVSVGIRVPALPPTPCGATVVALAARVEGGGGMVAPSREGEKRG

SEQ ID NO: 268401 - protein, 72 aa, Zea mays
  Clone ID: MRT4577_176382C.1.pep
FPFLKNKPLINNKSYNFFLSPPLLTFTPILSFFSTLFITPTTTLFFISHTINLPIKRSSQNTSTTNYLIKNN

SEQ ID NO: 268402 - protein, 40 aa, Zea mays
  Clone ID: MRT4577_176383C.1.pep
IAERQLTHHRISSGQQSSGPLVCSAESEQSSQLYQAARLE

SEQ ID NO: 268403 - protein, 71 aa, Zea mays
  Clone ID: MRT4577_176384C.1.pep
KVTQMGRASGRFSSSWLYGSCSSLSGCSPRTQSYDSLVYTPIITLGCVPEHYSQPAKHNTHRATTRASPYA

SEQ ID NO: 268404 - protein, 56 aa, Zea mays
  unsure (1)..(56): unsure at all Xaa locations
  Clone ID: MRT4577_176385C.1.pep
MATTATEADKAPPPHDQHATGNGHGXQNTRHCAVGHNSLLKSDDLYQVNKLSAMSG

SEQ ID NO: 268405 - protein, 79 aa, Zea mays
  Clone ID: MRT4577_176386C.1.pep
DEAESYRRQVLEQAGLTRYRGGSRDNTNRQRERERIPGTQQCCVVCLRVYARHVYRAEHLRCKNHIRSRYGTPHYLSTI

SEQ ID NO: 268406 - protein, 78 aa, Zea mays
  Clone ID: MRT4577_176387C.1.pep
SERERYTLSLAARTGSSTTFYRCCRRIRRSRRYPTSSSPRAHPHHVCHTQQRNYTNLYPKTIIPMTSFTTSVDKAHCP

SEQ ID NO: 268407 - protein, 65 aa, Zea mays
  Clone ID: MRT4577_176388C.1.pep
PLEGPAGPCLKKKKKKKKKKKKKKKKKKKKKKKKKIGPYRAPPDIKKIATPGNAYNKNSMRWLRT

SEQ ID NO: 268408 - protein, 298 aa, Zea mays
  Clone ID: MRT4577_17638C.1.pep
MLKPERPLLGKVFRQGFYWPKAASDAADLVQKCENCQRCAKDQKQPSSLTQLIQPSWPLQRWGLDLLGPLPPAQRNLKYVIVAVEYFSKWIEAKPLATITSATIQKFFWQNIVCRFGVLKAINVDNGTQFDAETFKDLCDRIGTKIHFALVRHPESNGLVERANGIIMTGIMKLIFNQPRGKWPDELIKVVWSHNTTVSRSTGFTPFKLLFGDEAITPEEAKTRSIRTTASVEDEADYQTTKDTIEGTRLQAIEHVNKYQPETIKWHDRKVQLKNIKPGHLVLRRVANPDTVGKLQLK

SEQ ID NO: 268409 - protein, 68 aa, Zea mays
  Clone ID: MRT4577_176390C.1.pep
MKLNFLLTAALVAAPVMAASSTTTSTETAKATKTSAASKTSKAAAAPTMGVDMLGVAGVAGVIAAMAL

SEQ ID NO: 268410 - protein, 111 aa, Zea mays
  Clone ID: MRT4577_176391C.1.pep
RDLRHSQVVRHSQVEGTRHGREPCATARMPGRELRHAIAHAVGSFPGVVSVSARGHESSEKASWYLESQVPGQEQVPQDEAHGGCYDVFVRGLGHRLPVNFGLLDRSLLIM

SEQ ID NO: 268411 - protein, 76 aa, Zea mays
  Clone ID: MRT4577_176392C.1.pep
CPWVYLMSSDYHALTQDLCGVNMFLHETPYGYPCKPKGIRELRRLILRRLGQAWPAHRPLQHQTGLRHRLTASRAE

SEQ ID NO: 268412 - protein, 57 aa, Zea mays
  Clone ID: MRT4577_176393C.1.pep
KQQSSVCPPNSLGWRQGLLTWIASDIVYCGAVLQESQFDRSLTQGVCISAVTSLMCA

SEQ ID NO: 268413 - protein, 322 aa, Zea mays
  Clone ID: MRT4577_176394C.1.pep
MQQMVWSSSGGGTDSKNMMSSSLMPCAEEQEEEGSNKMPPLSSPSMLLLPQHHLQIFSGLPLPLPPEVLNDSSATSDLHDGRESSMPESWSQLLLGGLVGDHERYNAATALLSKGLEERPAAYNCYDPGHGGGEEIQTPGTNIRSHQVSQTLLASSSPRSCITTSLGSNMLVSTDTTVPPAPDLKNHHSDNSSEGNSAGSGSAPKKARVQTSSSAQSTLKVRKERLGDRITALHQIVSPFGKTDTASVLQETIGYIRFLLSQIEALSFPYLGHDNGDSMQQHNTNNLLLNHSTSDAMVQVQGPPMTIEEVYGNGIEGSRKDL

SEQ ID NO: 268414 - protein, 38 aa, Zea mays
  Clone ID: MRT4577_176395C.1.pep
TDLPVRDTIFLLIDATQTYFVRSTARLTQYYDAYYESI

SEQ ID NO: 268415 - protein, 69 aa, Zea mays
  unsure (1)..(69): unsure at all Xaa locations
  Clone ID: MRT4577_176396C.1.pep
LTVLYEPGYCXVCLHFIVRNSVWAKGGNNQESNTPVVLSEGTSVLLQVCLSVPPGLMFARRVGRLRRRE

SEQ ID NO: 268416 - protein, 90 aa, Zea mays
  unsure (1)..(90): unsure at all Xaa locations
  Clone ID: MRT4577_176397C.1.pep
KPTRATPTRPQTGDIFLQNDPRAQGQPDKGTRPHRDRXGAEEQNENHDTGIYDAEEHPKHIHGYHCDVQATGYGNYEPAPRRRQVKRGGP

SEQ ID NO: 268417 - protein, 59 aa, Zea mays
  Clone ID: MRT4577_176398C.1.pep
KSLFFHQKKGMQGFFFLFYTQKKMFFFFLKRWVQLLLTVMKKGKIPKFFKSWNSKSVII

SEQ ID NO: 268418 - protein, 87 aa, Zea mays
  Clone ID: MRT4577_176399C.1.pep
QPPQLVPFSLLGVVRPAAFFTKQPLFWFYLPSGRDVGTLFPVLPVRPFYRRIKKKPAVFFPLTPPWWGPLFECFFRHRSIVGVFFLI

SEQ ID NO: 268419 - protein, 81 aa, Zea mays
  unsure (1)..(81): unsure at all Xaa locations
  Clone ID: MRT4577_17639C.1.pep
QNPWVTQLIPLLKHLPLHTCFNSXEARTDGPSHQFLKLNGKWDAPWDAPLSAALMAVSLMVTRTLASSLAPALFPSFLSFF

SEQ ID NO: 268420 - protein, 257 aa, Zea mays
  Clone ID: MRT4577_1763C.1.pep
PPPCSCSSDLDGHASRCRRRRRPPASSVHGNVEYDDFHWDDAAEAELQAFEAAYASASASAKRRRLPDWTSPSPSPSYHLHRSQNPVSSGSTPSWTLTPHTPQDNVRARRQQISFSGKIVYCRTPTEAEKAATDILLKIERMRTPGQVSLGFDLEWRPFPRRGEPPCKVAVMQLCMEKTLCYVLHIAHSGVPPILKTLLEDSSSIKVGICIDNDARKMLNDYNVCVQPLMDLSTLANVKLASPKRWSLASLTEMITC

SEQ ID NO: 268421 - protein, 460 aa, Zea mays
  unsure (1)..(460): unsure at all Xaa locations
  Clone ID: MRT4577_176400C.1.pep
IGYLEAGRGHPYCAHRDTDPRSRRQLPSPSPGLHCTSELHIAHAAPVLCNRLHPALLLLIGAGACLLGYGTAWLLVSGVAPALPYWLIWFALCLATNGGAWLATAVLVTNMRNFPLSRGDVAGILKGYSGLSAALFSALYTGVLRDXPIKLLLSLALGIPAVCLLGMYFVQPCEPSLVETNAEQVHFMFAQVASVLLGVYLVGATILDHVVAVNDIMNYPLLVVMVLLIFAPLAIPLKMTLFPKKKPPSESHSSTVYNDXRHSCLYLLPPNETSXLEEHDSTDIDVLLAEGEGAIKPKRRRPRRGEDFRFREAILKADFWLLFAICFVGIGSGITVLNNLAQIGIAAGAVDTTISLSVFSFCNFFGRLGGGAVSEYLVRSRTLPRSVLVICTQVVMIITYLLFALGRLATLYVSVALLGLCYGVLLSVVISTSSELFGLKHFGKIYNFITLANPLSPPAP

SEQ ID NO: 268422 - protein, 245 aa, Zea mays
  unsure (1)..(245): unsure at all Xaa locations
  Clone ID: MRT4577_176401C.1.pep
TLGLSGPTFPAPFPTASPPPTRPRAHGPQPKPANPSSTFALYSHALKVALGADQSRLALLGVACDVGENLGLLPGVLCNRLHPALLLLIGAGACLLGYGTAWLLVSGVAPALPYWLIWFALCLATNGGAWLATAVLVTNMRNFPLSRGAVAGILKGYSGLSVAVYTEIYTGVLRDSPINLLLSLALGIPAVCLLXMYFVQPCEPSLVETNAEQVHFMFAQVASVLLGVYLVGATILDHVVALMTL

SEQ ID NO: 268423 - protein, 298 aa, Zea mays
  unsure (1)..(298): unsure at all Xaa locations
  Clone ID: MRT4577_176402C.1.pep
RPSVCPASSHSRARGGGHTKPLWASSSESNLGNLEDDTTDIDILLAEGEGAIKPKRRRPRRGNXLGFREAILKADFWLLFAICFAGXGSGITVLNNLAQIGIAAGAVDTTISLSVFSFCNFFGRLGGGAVSEYLVRSRTLPRSVLVICTQVVMIITYLLFALGRLATLYVSVALLGLCYGVLLSVVISTSSELFGLKHFGKIYNFITLANPVGAYLFNTLAGYVYDLEVERQHAAAAAAGSDVVACHGPSCFRLTFCVLAGAACLGTLLSTVLTVRVRPVYQMLYAGGSFSQPRNSAH

SEQ ID NO: 268424 - protein, 89 aa, Zea mays
  unsure (1)..(89): unsure at all Xaa locations
  Clone ID: MRT4577_176403C.1.pep
MGIELDASGRNKMTKHTSPKIDHVYVKLPVKLYRLLVRRTKSXINAGVVNRLFMSXTNTPPIPMRRLVKLMERKEINIAVIDWTITDDK

SEQ ID NO: 268425 - protein, 37 aa, Zea mays
  Clone ID: MRT4577_176404C.1.pep
VFVKQFYSITSQAIHVLALMNTNKGSHGNCGLFNQGP

SEQ ID NO: 268426 - protein, 204 aa, Zea mays
  Clone ID: MRT4577_176405C.1.pep
MARGGIARLLATLLLFLLLATPLADGASEAEAAGLAQGASEAAAPDAGADAQQQHLLPRPLVIELPSSRAEDEDEPGADAVPPDVRCASWRLAAEANNLAPWRAVPPECAPHVRDYVTGVAYRSDLDLVARESAAYARAAAPLGADGRDAWVFDVDETLLSNLPYYAEHGYGAELFDHHKFDEWVERGEAAAIPSSLKLYNEVR

SEQ ID NO: 268427 - protein, 61 aa, Zea mays
  Clone ID: MRT4577_176406C.1.pep
FSQSDLVIPTKHQLPTLSIYLFTILIITLLTLFFTSISTTQSTSYYPNHTPTPTPPITYLS

SEQ ID NO: 268428 - protein, 120 aa, Zea mays
  Clone ID: MRT4577_176407C.1.pep
QIGDTIFAYGGSGFVISNPAMRKIVQYLDEQPQNEIDDYTATQWAGDCVLGKVFADAGVGLNWSWPMLQDNRPWEVDYFATVGDKRAWCFPAVSYHHMQPDGIRALYGFDREWFNSDNSS

SEQ ID NO: 268429 - protein, 133 aa, Zea mays
  unsure (1)..(133): unsure at all Xaa locations
  Clone ID: MRT4577_176408C.1.pep
RKKGKLLSPEFDNWERVDTFIAALKKIESWIFSRIVETLWWQTFTPHMQSADITGGLRSTPNPKKGYGRIPVVGNQHTSNXSMDIWKKAFKEASELLCLVRAAGHECGCLPMLTKFVMXQCIARLDVAMFNAI

SEQ ID NO: 268430 - protein, 71 aa, Zea mays
  Clone ID: MRT4577_176409C.1.pep
LAPDLTRALVIEANHQLQQTKWPLAISIQITNNPATGHLTVDVRILIVRGHLVCYSWWIAFIKQYFFFFLH

SEQ ID NO: 268431 - protein, 119 aa, Zea mays
  unsure (1)..(119): unsure at all Xaa locations
  Clone ID: MRT4577_17640C.1.pep
DMYSTAFIEPIPAIDFDAERPNRAISVRPLADSARVKXLKXALQGAKVAATHKLNMRRKYPISRLTSQATRELSFPADDRVSAKTVVQSSKEDYGFKHPDTTLPCLHVGNQHLPTYMTM

SEQ ID NO: 268432 - protein, 177 aa, Zea mays
  unsure (1)..(177): unsure at all Xaa locations
  Clone ID: MRT4577_176410C.1.pep
LLLSHRLPVYGTSTRVPASVSLLHENRLTGAILTGAGDIFAGWPSMGTCLAEVNTYQLSSDLIXYVTSATHSYCNDTNXCLTGHQSGAVKXWKMXDCSXDTLNSKSXITCGXSHGGLRLNRQPPNNRLLQQNALNXTNTPVTTLCIPPHLNHLLRGDVRSHLLSWPLKDDRSQGSYL

SEQ ID NO: 268433 - protein, 24 aa, Zea mays
  Clone ID: MRT4577_176411C.1.pep
LSTPGRMVNHHQSDELVTRRTGSS

SEQ ID NO: 268434 - protein, 74 aa, Zea mays
  Clone ID: MRT4577_176412C.1.pep
DTRASFVEKHCLLEGYHRFARVAQCAGQEFNSSTARIESVSPHYTQLIFLQKDYTPVVHHSQIRLVVLWPTDGA

SEQ ID NO: 268435 - protein, 195 aa, Zea mays
  unsure (1)..(195): unsure at all Xaa locations
  Clone ID: MRT4577_176413C.1.pep
PAGIDISSVSDRRGHRSPEHSSRSRLRDPSTPYFDLXTAGSSPGGRMVMDLPADDEPXSAHNFRELRALQNDAGKADKPVHXRRSTFNGSVTYLMRQWGCFTRASATGGESIYGDDVPDRXLLCKYIVPVVLSMVNVVCYTDVSHVFICTVATPCVYGQDDDVDQLVEYMDCVQDIEKETTHCDCISKVLQDSDC

SEQ ID NO: 268436 - protein, 118 aa, Zea mays
  unsure (1)..(118): unsure at all Xaa locations
  Clone ID: MRT4577_176414C.1.pep
FNPLFSLNPAAFFPPPLFPFSPVGYAFFXQQQIFPFYPLAPLNPPGFFPPPKLLPFSPLGSANRGSFFSQPPVVPFYPPVWGNPPPLFQIPQMLPFVPPVFSNPAASFPQPIIGGAPF

SEQ ID NO: 268437 - protein, 62 aa, Zea mays
  Clone ID: MRT4577_176415C.1.pep
KPSFFFFWGGGFSRNANGPYGRSFFFWRPPELNPFIFPKRGRGAPGFFFCPGIWTGRHKGAL

SEQ ID NO: 268438 - protein, 187 aa, Zea mays
  unsure (1)..(187): unsure at all Xaa locations
  Clone ID: MRT4577_176416C.1.pep
GQCISXIHMHQTDIHAPNPCWELDWLKHVIQXPTGQXMPDDKTIGGGDDAVNXFFSATGAGKHVLPSCVYVTPLAPTXIRVKGERRGHSYAPASYHPXGRLHQVGQGSDGMTDHXAXRGHYTIXEDIADLCLDRIRKLADDSTGXLQSLLPFNADEGGTSSALGSLLLERLSADYGKKSKLGIHRVP

SEQ ID NO: 268439 - protein, 114 aa, Zea mays
  Clone ID: MRT4577_176417C.1.pep
HTNIVAPQTLESRHVAFVSLQLHRLLLLWIISADIPRVFKCGLSPSRRVQGAFLQSCSILLGGQGRIHAGPCQFDLHRAENPNLTANGLCCFFVVSCCNHNMCQLICGLLLGEL

SEQ ID NO: 268440 - protein, 118 aa, Zea mays
  Clone ID: MRT4577_176418C.1.pep
MLDSQGVLLPSEELLAPICDELPVGMCGGLFDGTNEDAFFRFCAVDDDIDVSYIFDHAIKVDPEIDMEMMMMWDDDALACTAGPAAGTAHVETVHVKEEMDLMEMVAATQNCGEAENH

SEQ ID NO: 268441 - protein, 73 aa, Zea mays
  Clone ID: MRT4577_176419C.1.pep
LASGQIVLYQGHTYGIDQVSTMHGPWIISSLSGLHVMGMDRSTCLTTISTHVFFGGAAVSRVMAGPLINSSSF

SEQ ID NO: 268442 - protein, 47 aa, Zea mays
  Clone ID: MRT4577_17641C.1.pep
LRPCPRPRCLGGWLPTAWVWPEWLHEWAPVRPRWPWGINQHCCQKKK

SEQ ID NO: 268443 - protein, 105 aa, Zea mays
  Clone ID: MRT4577_176420C.1.pep
MTEEDKTAASLSIFLAPKLNERILSSLSIMALAAHPWPDLKIGPDAAAALNVVSTSITLEPLDVLYVWCCGERGLKWSGTIHGKAAEITKGSKVNSELDKKTGLI

SEQ ID NO: 268444 - protein, 72 aa, Zea mays
  unsure (1)..(72): unsure at all Xaa locations
  Clone ID: MRT4577_176421C.1.pep
SAFPSPEASPRHCQCMIRRHSMGGVLPVESIQWFCVYGCQRVGIGRSEHQDCVCVPSIRNRRXGFFVPRRGS

SEQ ID NO: 268445 - protein, 133 aa, Zea mays
  Clone ID: MRT4577_176422C.1.pep
RYLYLTQVHRLRRRVVVTSRSGTDASDAPCAAGIQRRYRSHLHLCGSSAGTARTSIYGAWPGLRRGGHAAEEQGWGRARARAHAMSGSYPRRWGAAGHGVSGRLRDKWEIQCRMTDEAPARQRCSLDIRPVSW

SEQ ID NO: 268446 - protein, 60 aa, Zea mays
  unsure (1)..(60): unsure at all Xaa locations
  Clone ID: MRT4577_176423C.1.pep
WNVCSYKIRMKTGECYRLVVTVVLLSHMVNTSALILPPGHAVILIQKKXTVAGPGPLSSC

SEQ ID NO: 268447 - protein, 73 aa, Zea mays
  Clone ID: MRT4577_176424C.1.pep
PRTLSLLGTVVQPHLDKPRKHLSPSRAACTIWCVPEAEDPRQVRTHGVLNLYEPGHLALLIPQFTPGRQLMSE

SEQ ID NO: 268448 - protein, 69 aa, Zea mays
  Clone ID: MRT4577_176425C.1.pep
CGISIRTAVDQNPKASQLFTAPFVNPTYVVIKERKIAKASGVSVLSTVPVAMGVFTTPRVLNARLQGAS

SEQ ID NO: 268449 - protein, 356 aa, Zea mays
  unsure (1)..(356): unsure at all Xaa locations
  Clone ID: MRT4577_176426C.1.pep
ITSEPFLALTRPRPSPGLGSLLTSISCSRAASQSSGCNGASVPAAGAGGDRHHLGVVPRRQVVAPVPHAVPLRVRLRHPVVVRQERARPPPAPPREDXPTDRAGGENPEWDAPLRXSTSPSPRPRQRRRSXTGSGQEQEQRRRRPSGAVRAQGRGGRARRRARRVRRRAGARPRRRRADAPRVLPAGGPRRQXSPMASSPSPXRLPPTERRRRRPPPPPERRRCQASRRAPLPHLHCXSSPVAQPPPTTAAPRLYPAIEWPLTEEIPIYHTPLLPVPAGAAAVTLASSRYYPPPPSSAAPVQMEPVAVYPPPLPETSSCSVYPSVLPASAMYPPVDLAPVSCYPPASTWNDRCLYG

SEQ ID NO: 268450 - protein, 366 aa, Zea mays
  Clone ID: MRT4577_176427C.1.pep
MPPQPNGGKVTPNLAMDAEATRLLNLTVLQRLDPAVEDILITAAHVTLYDFNIDLNQWSRKDVEGSLFVVKRNSQPRFQFIVMNRRNTDNLVEDLLSDFEYELQPPYLLYRNASQEVNGIWFYNQQDCEAVASLFGRILNAYAKVPPKPKVPSTKSEFEELEAVPTSAAIDGPLEPPPASAAVVLDTPDESLISYFSGAASIGSVSNAQPSGRVHPSTESIPSSHVPLIVPSAASTHQLPPSVASTASPLPVHGTNAHTSRPTNLVTPDFFAPPPSSSAPLAPPGASVVPTAPPLHPTSAASIQRSQYGTPLLQPFPPPTPPPSLNPSHSDRLTVTRDRVKDALQRLVQSDEFVDLVCRELQRSLV

SEQ ID NO: 268451 - protein, 81 aa, Zea mays
  Clone ID: MRT4577_176428C.1.pep
LVCLGMLYLKTLVRKKSVSVDCCIVCLSGLSWLLYMCNTSAGIGGCCPVFALCGYSLGPVFFMFLWPGCLVLIINKSVPAG

SEQ ID NO: 268452 - protein, 186 aa, Zea mays
  Clone ID: MRT4577_176429C.1.pep
YTQKSIFYIFILAPRLCSDLSLLSRVAKKLWSLSNLFLLRSSQNSCGHVFPDRLPHGILLHVILIHIIGKAFLHVNETGSIVLVPLVCRKLSGFQHRSGVRRHHWLVIARRHRTGRHVPFISALHHHITISLIRRSGCLGDSAVLARPILRAPFTDATAVLHGSHPTAAEGAKPWLELEATAPRAE

SEQ ID NO: 268453 - protein, 163 aa, Zea mays
  Clone ID: MRT4577_17642C.1.pep
MADRDRSGIYGGAHATYGQQQQQGGGGRPMGEQVKGMLHDKGPTASQALTVVTLFPLGGLLLVLSGLALTASVVGLAVATPVFLIFSPVLVPAALLIGTAVMGFLTSGALGLGGLSSLTCLANTAPQAGLPRKQVIHAWMDARVRVCQYQQGRRGMLCSCTCG

SEQ ID NO: 268454 - protein, 49 aa, Zea mays
  Clone ID: MRT4577_176430C.1.pep
AAATVRDCTTVLHRTELACTGCLYYSGPLTSHGYNRFFVWIRGCIRQSL

SEQ ID NO: 268455 - protein, 91 aa, Zea mays
  unsure (1)..(91): unsure at all Xaa locations
  Clone ID: MRT4577_176431C.1.pep
MAKNYPXVAPXYSEAVEKARRKLRALIVEKSCAPLMLRLAWHSAGTFDVSSRTGCPFGTMNCPVELAHGANSVLDILVRLFXPIKDDFPTL

SEQ ID NO: 268456 - protein, 599 aa, Zea mays
  Clone ID: MRT4577_176432C.1.pep
MGSLATADGPLPPLKYPQARRDEDIVDDYHGVLVPDPYRWMEQVDSKEVKEFVDAQAAVTSAVLSSCDHRGRLRGQLTALFDHPRFRAPFKRRGSYFYFHNPGLRPHSALYVQHGLGGEPDVLLDPSTFSEDGTVSLGVVGVSDDGEHLAYGTSGSGSDWVTIRVMRVRDKEHLPDTLSWVKFSRIAWTRDGQGFFYSRFPAPRDALDSGMKTGVNLNHEVYYHFLGTEQSQDVLCWRDPDHPKYIYIPQVTEDGKYVILSVSETSEPVNKLYYCDLSALAHGLGGVKSAHGNGMLPFVKLVDRFEAYYGLIANDGTQFTFLTNKDAPRYKLARVDVDDDEPGSPWWTDVVPEDEDGKAVLESACAVHGHKLLVSYLSDVRCVLQMRSLVTGELLHDIPVDIGTVSGISGRRCDAEVFVEFASFLTPGIIYRCDVGSAVPEMDVYREISVPGFDRNEFEAKQVFYPSKDGTKIPMFIVSKKEISLDGSHPALLFGYGGFGVSVTPQFSVARVVLMRNLGFVACVANLRGGGEYGEGWHRAGSLANKQNCFDDFVAAGEFLVSAGYTSPARLCVEGGSNGGLLVAACNKFFSQSPRSRQL

SEQ ID NO: 268457 - protein, 24 aa, Zea mays
  Clone ID: MRT4577_176433C.1.pep
ALNDAILPASWISRSFNHFGLISF

SEQ ID NO: 268458 - protein, 75 aa, Zea mays
  Clone ID: MRT4577_176434C.1.pep
LVQQWSLTDLQRFLRMLLQMDQTAVLHLLESPQAIKTRGCRGDAGYLQSGPPAKAQPPKLVSYPLLSMNDRLLCL

SEQ ID NO: 268459 - protein, 21 aa, Zea mays
  Clone ID: MRT4577_176435C.1.pep
KTHILWQEREPKKGILLERTA

SEQ ID NO: 268460 - protein, 159 aa, Zea mays
  Clone ID: MRT4577_176436C.1.pep
AGTHIPDADCAAAAQMAFSGNAVAGEMQMGGSMSPGRLPAATATEASSLEDANFKSARITVEERREKIIRYIKKRNKRNFRKKIKYACRKTLADSRPRVRGRFAKNDDYGEPSSRVMQNHEEYDQMAASMKAEDILDPDAAHFNGMNSYLFNHTVESWL

SEQ ID NO: 268461 - protein, 117 aa, Zea mays
  Clone ID: MRT4577_176437C.1.pep
MHGSTTRAHARQLNLQVRSHLVNCILDLTLYVVDVLMIKNLGENHQGLGKCQDVKEEKLGHSQQEKAKSDSTSSPPRSPEPVCAKMDAHDASELRLGINLHGEVTRVSWVRTNGAVV

SEQ ID NO: 268462 - protein, 56 aa, Zea mays
  Clone ID: MRT4577_176438C.1.pep
RHTNDYYGHTGAKICTLNGMRTTAVCFDLNTTPKDMCSGPQAQYRTGGEDNERSCP

SEQ ID NO: 268463 - protein, 48 aa, Zea mays
  Clone ID: MRT4577_176439C.1.pep
GLGLPHDADAQYALHEELCLEYDEDVDVNLQPYSDMLASLNKRLKFCR

SEQ ID NO: 268464 - protein, 206 aa, Zea mays
  Clone ID: MRT4577_17643C.1.pep
MKSKNEVTYFKIIVLGDIDVGKTSLLVRYVDKTFDSKTISTVSFDYKEPDVQINNAPVKVRLWDTAGQERFRTITTSFYRGAHGVVLAYDVTNRQSFENLSSWALDIDKYAQNGAKKLLIGCKIDNVAKRKVSFEEAKSFANENDLEYEETSAKEGTNVDNAFMKLIQKIYECPETNPNYANNNNNNIAKVGAHSFEKSSSNKCAC

SEQ ID NO: 268465 - protein, 99 aa, Zea mays
  Clone ID: MRT4577_176440C.1.pep
SRQYRRVKGRGLLGPIRWAHRRRVHELVPRSLACFGDIIDGLAAVGWWLETSEFVVIVRAPPRVHRAPWPGVSALQLPGIQDDDGMKTISFPKSFVQSN

SEQ ID NO: 268466 - protein, 146 aa, Zea mays
  Clone ID: MRT4577_176441C.1.pep
APASRLQLSSKQAGSKHAELHKCITSYISITIPKASDSLTGFSVLNHQLLSINQKHDLHLSKIPKASSSFYQPKAPNTCIAPSSSCMPGNCSADTPGHGARCTRGGARTMTTNSEVSSHQPTAARPSIMSPKHARLLGTNSWTRRR

SEQ ID NO: 268467 - protein, 99 aa, Zea mays; identical to SEQ ID NO: 268465
  Clone ID: MRT4577_176442C.1.pep

SEQ ID NO: 268468 - protein, 61 aa, Zea mays
  unsure (1)..(61): unsure at all Xaa locations
  Clone ID: MRT4577_176443C.1.pep
PGSTLAXRSSLXGNDNQPLPMEXHRILTKTFTXDFPHGERYXWTMVNQPNXKKXIXEGKXV

SEQ ID NO: 268469 - protein, 105 aa, Zea mays
  unsure (1)..(105): unsure at all Xaa locations
  Clone ID: MRT4577_176444C.1.pep
PTSLGXVPYVRRLIGLNHXGCEACLEYTRTFDLSHFDGLFTAERNRRKMXPYSLNMDRILRPTCYALITESTYLLDSFAPIAKGFRWTCDKYRCNNKAHTDKILL

SEQ ID NO: 268470 - protein, 55 aa, Zea mays
  Clone ID: MRT4577_176445C.1.pep
MAPTIDPNEIKFIYLRTTKREVRASPALALKIGPLGLSPNKDGEDIGKATGDWKG

SEQ ID NO: 268471 - protein, 194 aa, Zea mays
  Clone ID: MRT4577_176446C.1.pep
MVDEEELTVVEVTVVVEYESMESHASTLWQALFHWAMWRALLGHGKQPSRIFLLPRGRRLLLRRLLVLLGADCAEILSWSAASTAESCCIAEDYSIQIYNLFDDAEISEKFGGRWICLRIKSHTSWTPPSNPRMRRLRAELLNLQTELERKRAKALEEYNQDMTRINKIARGARSMAEVIQVMSLKVLKGKPIQ

SEQ ID NO: 268472 - protein, 48 aa, Zea mays
  Clone ID: MRT4577_176447C.1.pep
ILKCPILTSKNMQSQQNMCEFNHPSYFHMIMSEQALRGQVFYVRMCQQ

SEQ ID NO: 268473 - protein, 40 aa, Zea mays
  Clone ID: MRT4577_176448C.1.pep
GPRKGRARKPIQDSGAAVFKSGAILCAHLYGIWRAHTITF

SEQ ID NO: 268474 - protein, 66 aa, Zea mays
  Clone ID: MRT4577_176449C.1.pep
FLVSSVCFLFFVFDVFKLTSLDIHTGQEKGGLRWADGGQVNKASLGNMPKRPEQTKSMGRAYGGIE

SEQ ID NO: 268475 - protein, 140 aa, Zea mays
  Clone ID: MRT4577_17644C.1.pep
MADRDRSGIYGGAHATYGQQQQQGGGGRPMGEQVKGMLHDKGPTASQALTVVTLFPLGGLLLVLSGLALTASVVGLAVATPVFLIFSPVLVPAALLIGTAVMGFLTSGALGTLVTGCVVHASAVCSSSVMENIGQMYSLA

SEQ ID NO: 268476 - protein, 91 aa, Zea mays
  unsure (1)..(91): unsure at all Xaa locations
  Clone ID: MRT4577_176450C.1.pep
NTSIKNHTGGAYHLLFLPLFTFKENKPVAKWPDNRFMXRELRLMPFLLTLLRITXRKVLVCLTTVDAMMLPLFNDFLWLFGAVYFXPLIVY

SEQ ID NO: 268477 - protein, 68 aa, Zea mays
  Clone ID: MRT4577_176451C.1.pep
LMYAAHVCEELSSAARGITTGTRFIVLGGIFLCLVGGSGTSFVGVASWLRLLDLRCRRASSWKHGRVG

SEQ ID NO: 268478 - protein, 38 aa, Zea mays
  Clone ID: MRT4577_176452C.1.pep
SLFLYGRLGSFPWLTLDPSSVMLSSSNHAKGPGDISLT

SEQ ID NO: 268479 - protein, 113 aa, Zea mays
  unsure (1)..(113): unsure at all Xaa locations
  Clone ID: MRT4577_176453C.1.pep
MGIATESKATTDSVYSAALALGIANXQLTNIPRYVGEEXSNIIFLSQEXLAQAGLSDEDIFQGVVTTPLRNFMXRQIKEARMFFEEAERGVTELSQASRWPVSPHNCHISHPV

SEQ ID NO: 268480 - protein, 72 aa, Zea mays
  Clone ID: MRT4577_176454C.1.pep
NCYADKGLHMGAGALLFLAAALCISAMRVLASPRLDDVNYLNEIGSTDCKRCHSCCVVWWQTHLLMLRNYLG

SEQ ID NO: 268481 - protein, 78 aa, Zea mays
  Clone ID: MRT4577_176455C.1.pep
YIPSQRTHSQQLVSATSCIYAGQLHWFAVSSSRIWQAFCVEMSTGILLLIIELRSAFSSIAIRALEKHPQYSNGCILR

SEQ ID NO: 268482 - protein, 68 aa, Zea mays
  Clone ID: MRT4577_176456C.1.pep
RSWYPRRAFLVASLRTWVDRRWGIIYRIFVDLTVVLFISAGDVGQGEESSAQIRIGGWRREASGARIG

SEQ ID NO: 268483 - protein, 69 aa, Zea mays
  Clone ID: MRT4577_176457C.1.pep
MGLSLNKEQDNGLLWGPDITQQFLRTNHLKRRTGELIMWRSGSVMVVYQGSIYKRPLKSQALNGASSSV

SEQ ID NO: 268484 - protein, 76 aa, Zea mays
  Clone ID: MRT4577_176458C.1.pep
TTLYRTNRVPCTPRGIVCSTAARHCSLFLLDCHCFRCVYAQTPHLESGCSRSQLHHTGGNLRDLIGPYGAYRDAPH

SEQ ID NO: 268485 - protein, 88 aa, Zea mays
  Clone ID: MRT4577_176459C.1.pep
FLKKIKWAKALKKKKNSLKAPKSQGDKKSPFFSKQKRELKICNGFLGKKRIKVLKFSFPLFKLKLSPVKTYAFGKEPNQVFHNSKMMK

SEQ ID NO: 268486 - protein, 186 aa, Zea mays
  Clone ID: MRT4577_17645C.1.pep
MADRDRSGIYGGAHATYGQQQQQGGGGRPMGEQVKGMLHDKGPTASQALTVVTLFPLGGLLLVLSGLALTASVVGLAVATPVFLIFSPVLVPAALLIGTAVMGFLTSGALGLGGLSSLTCLANTAPQAFQRTPDYVEEARRRMAEAAAHAGHKTAQAGQAIQGRAQEAGAGGGAGAGAGGGGRASS

SEQ ID NO: 268487 - protein, 73 aa, Zea mays
  Clone ID: MRT4577_176460C.1.pep
RFHLFGSHEAPHIETSNTHDSSVYDLSWHPVGYLLCRYLATFANQIRGSNLVLSDLSWLKNVNAFFKSCISNS

SEQ ID NO: 268488 - protein, 313 aa, Zea mays
  Clone ID: MRT4577_176461C.1.pep
MDAAAAAAAAASPTSKRIALVTGGNKGIGLETCRQLASRGVRVVLTARNEARGLEAVERVRCARGDAEVYFHQLDVTDPCSAARLADFVRDQFGRLDILINNAGISGVHRDPVLSAAVKDKVDGMDVNQRVEWMKENSKETYEEAVQCMKTNYYGAKLVTEALLPLLQLSSSGRIVNVSSGFGLLRNFNSEDLRKEFEDIDNLTESRLEELMDKFLEDFKANLVEAHGWPTGGSSAYKVVKAALNAYTRILAKKYPTLRINCLTPGYVKTDMSMHMGVLTLEEGARNPVKVALLPDDGPTGAYFDLNGEASFV

SEQ ID NO: 268489 - protein, 62 aa, Zea mays
  Clone ID: MRT4577_176462C.1.pep
AGRLADSHSCKRSMQVQGQGQGYSVTKIGLWGGPGGSEHDITEEGAPQLVHSVTARAGVAGD

SEQ ID NO: 268490 - protein, 134 aa, Zea mays
  Clone ID: MRT4577_176463C.1.pep
IPPSVGPIQVKNFQLQVKPNPPLQREKKAKRKNGGSFTQRRRRAGGALIVPVHGAGVGSNPGHFGLTVPETAVAVHGGLLLLGPLGRPAGARGGPELHNRTVGTRGGQKGRPFLAGHDDHHGLLEPRRRPGRPG

SEQ ID NO: 268491 - protein, 66 aa, Zea mays
  Clone ID: MRT4577_176464C.1.pep
TAAVASSTFTYVARRVHQSVSSIKIDSGHGLQRWVWRPRRQSGGYPSRVLAVVVHEPLGNEAVPAR

SEQ ID NO: 268492 - protein, 55 aa, Zea mays
  unsure (1)..(55): unsure at all Xaa locations
  Clone ID: MRT4577_176465C.1.pep
IISPPRQNRGARPILFISAXHKAPQATKTEQATALPTGQPTPKLLTLLLDQLRKG

SEQ ID NO: 268493 - protein, 279 aa, Zea mays
  Clone ID: MRT4577_176466C.1.pep
KNRRTRRKEKHRRIQEQKNAKKTVSTMPPITLRRVVQAIRRAVIREFLRAYREGILDDNRIGFAIHRVMVNLVNTGATRVWIPNRRSHNRSSSRRRRAPPVVVPPPPPATATSTQVPASVFQMGETYPHGYCPFHGFGPCALRDAGVLEATLTAARQYYNSQAQPDAVPMEEMLATVAAPNLYSPTPEVEPTAPRWRPPTPAPPGFSRRPTRAARTGCPPFFNDDEAVPPPPSVVPMPSPALIERSRGVQIGLWTDLNSVKVESPNTEGAGASGFLILR

SEQ ID NO: 268494 - protein, 50 aa, Zea mays
  unsure (1)..(50): unsure at all Xaa locations
  Clone ID: MRT4577_176467C.1.pep
STRSITRVSPRLLCCVRGLDRLVQCDEWYAQLLXRRIRADMTCLTSDRLS

SEQ ID NO: 268495 - protein, 75 aa, Zea mays
  Clone ID: MRT4577_176468C.1.pep
TLGAQVHKDGDSHSGSRVPGGQVALPHPKDLISQIVFKGSTDRLPVKGLLMCVCVGESANSSFVVVALNLHHLLK

SEQ ID NO: 268496 - protein, 99 aa, Zea mays
  Clone ID: MRT4577_176469C.1.pep
VLDRELPPFFFFFFFFLCCFSVFSFLRPPAQDLRFAGTQLSKNCSRFNQKTSHETHGDTPGGRIPEGGGAENSTGGKKNALGGDPKGVGVGLDPPELGG

SEQ ID NO: 268497 - protein, 55 aa, Zea mays
  Clone ID: MRT4577_17646C.1.pep
YQYCSVGVQKLPILMTDDKILVHRSLVSIHPRTHQADSTDRVTYVTMGKESITGC

SEQ ID NO: 268498 - protein, 83 aa, Zea mays
  Clone ID: MRT4577_176470C.1.pep
FAKVSSAKLENKHWVLKQSTRGNQSGSSSYCREQQPANQAVVQWAAIDMSGDVRRRRRNRRRPGAPGVGRTRVPNVARRGLNR

SEQ ID NO: 268499 - protein, 159 aa, Zea mays
  Clone ID: MRT4577_176471C.1.pep
SWRHLSSPLPPSEEVVCFLGLGLLQRISASSDRRYVYRPPSPAMKSRRWATEEEIFNPQLGRTQDLHWMRDFGGGCNWRSASLRCCESQAATAAGGRGRGRRVAAPGGWSEFGALNSRGVSNPPMPSMTMLGARTDLRYRDRMRVACLSPVIVQHDTSA

SEQ ID NO: 268500 - protein, 87 aa, Zea mays
  Clone ID: MRT4577_176472C.1.pep
SPVSSPSAYLPRSPATSGTPRRGFSRSCASHSPASPLYLKPARAARTPQRPRPDTLIFTSRRHATVCLRRRPSPVSGRGPATVRTRG

SEQ ID NO: 268501 - protein, 64 aa, Zea mays
  Clone ID: MRT4577_176473C.1.pep
MLATRVFSLVGKRAISTSVCIKAHGQVVQSEDFSLPDYMDRRDNPLPEAAHVKHLSANQKALKE

SEQ ID NO: 268502 - protein, 70 aa, Zea mays
  Clone ID: MRT4577_176474C.1.pep
MSSHRVKWNEDNLYEIESNKPVRQKITEPKTPYHPMMDDDGSLSPTRPFDKCLDETASAETILTALNGVD

SEQ ID NO: 268503 - protein, 69 aa, Zea mays
  Clone ID: MRT4577_176475C.1.pep
TIEKDGGATARARKRPRGHSFIKRGKKRGGGLPPYMEKGIREQNKRACFHALGKFLGGVKRFAGGFLGG

SEQ ID NO: 268504 - protein, 45 aa, Zea mays
  Clone ID: MRT4577_176476C.1.pep
KWLFYITQQPLGHDPLTIDPHSFSVSHATHTYIGQLSNVHCYHCT

SEQ ID NO: 268505 - protein, 39 aa, Zea mays
  Clone ID: MRT4577_176477C.1.pep
SPRFSMVYITPSQDPCRGGDPYHLETKITLAERPRPGGF

SEQ ID NO: 268506 - protein, 61 aa, Zea mays
  Clone ID: MRT4577_176478C.1.pep
RYPGLPYLSVIYIYTRVYQDPYYWLDTLVHSTSIDSYTFTGDPFGLVGSGRLGMNILIVQT

SEQ ID NO: 268507 - protein, 73 aa, Zea mays
  Clone ID: MRT4577_17647C.1.pep
IQSPILLFYDSPTTTAELHKSTSPPTLSHSLQNPTPNPNPPSATTTTMTINVELYNLYKLGRNLSHKKTTTSV

SEQ ID NO: 268508 - protein, 74 aa, Zea mays
  unsure (1)..(74): unsure at all Xaa locations
  Clone ID: MRT4577_176480C.1.pep
RQSKQTTEHQRAQSQDPRKTAKEAHDKHQETKGDKSARSARTAXEKNPPPQSRATKKRRRKRXEGDTKDRRQDA

SEQ ID NO: 268509 - protein, 53 aa, Zea mays
  unsure (1)..(53): unsure at all Xaa locations
  Clone ID: MRT4577_176481C.1.pep
IKPSEDXLREGQGVGVAGPVGTCWISEAFEEPYRTAAKVLLKRRAYCLXMNSF

SEQ ID NO: 268510 - protein, 49 aa, Zea mays
  Clone ID: MRT4577_176482C.1.pep
QRPKKTHPAPTKENFSCWYYARSVMQDGLLRNLLCLMLIKPIQIVRTLP

SEQ ID NO: 268511 - protein, 406 aa, Zea mays
  Clone ID: MRT4577_176483C.1.pep
MEAARQQQEECPCGGAEAADQFERLHDAVLLDVLNRIGDVKALGRCALVSRRFHALVPLVDSVFVRVDCVIPDDPPPSSSSSSSSSSAAPGTPPRQAPAPTARGRGALAHIARVLLGGIARPIHALGQILSPAAAAVSRRSEALPASPRAPVADVSHHSPSEVLRSFKELRRLHIELPTGELGIDDGVLLKWKADFGSTLVSCVILGASSISSKPPTGYTQAESETATAATPDTSRETEEPGSLPDSLYTNGGLKLRVVWTISSLIAASARHYLLQPIIWNHELLESLDLTDADGQGVLTMDKRQLQELRVRPVFPSGSSHRTLMPALSMRLHYAPLIELPGGTLLKGATLVAIKPSEDALREGQGVGAAGPAGTCWISEAFEEPYRTAAKVLLKRRAYCLEMNSF

SEQ ID NO: 268512 - protein, 219 aa, Zea mays
  Clone ID: MRT4577_176484C.1.pep
GAAASPCVFMAGQHSLNYSSWSAGSSFANTAVQQALVYPSPATSAASSLVSAARVQQARYYSAGAVVIDEETVQVLITGVAKCNSVASKCLAEIHTVQDLQIITLIVILSGIAGAWYVGQQVIDRGSEILGQVQKHAPEILGAVCDEMVYQLKIPFLGSGRRLVLQDHWFNDPEKSLTRYEQRMRREAARQEMDRLRLEEFNRAQGGEETPSCANVRAV

SEQ ID NO: 268513 - protein, 108 aa, Zea mays
  Clone ID: MRT4577_176485C.1.pep
LNVTLACLGRMGATIVLQMVCLVNAELYPTFIRNLGMMVCSALCDLGGIFTPFMVFRLMEVWQALPLILFGVLGLTAGAMTLLLPETKGVALPETIEEAENLGRRTQR

SEQ ID NO: 268514 - protein, 79 aa, Zea mays
  unsure (1)..(79): unsure at all Xaa locations
  Clone ID: MRT4577_176486C.1.pep
MDPVSTWGLTXLAGADPEIYDLLEREKRGHVAAMKSSASGNLTSLAEMKAXGSGLIKSNSEGMPGARNXGGKELIDDFE

SEQ ID NO: 268515 - protein, 127 aa, Zea mays
  Clone ID: MRT4577_176487C.1.pep
VAASGAGKIACTYDLVEPMRFLYVHVVKARDLPAVSATGAIDPFVEVKLGNFKGTTPVRAASHNPSWQQVFAFSATHLQFHLLEVALKAKDLAGDDLVGRVVFDIAEVPVLVPPDSPLVQEWYRLET

SEQ ID NO: 268516 - protein, 99 aa, Zea mays
  unsure (1)..(99): unsure at all Xaa locations
  Clone ID: MRT4577_176488C.1.pep
PPFSFGGSGSXFPKAFFFPERKKGFGPEKAKKFLVKGVSPSLAPYGFIGGVFRPVPINGGGGKRNFFPGGKLPLWGGGLGPPNPVVDIFGGGDPVPLGR

SEQ ID NO: 268517 - protein, 98 aa, Zea mays
  Clone ID: MRT4577_176489C.1.pep
FAATDGPCDAVLSVRDSRHGRVHIRRRRGRRQGAAYRSGASARAAAICASGRLPADCMSGRTCGRATPTRRSRRISTPVRVLPTNAFALIHTASDLIT

SEQ ID NO: 268518 - protein, 231 aa, Zea mays
  unsure (1)..(231): unsure at all Xaa locations
  Clone ID: MRT4577_17648C.1.pep
MADRDRSGIYGGAHATYGQQQQQGGGGRPMGEQVKGMLHDKGPTASQALTVVTLFPLGGLLLVLSGLALTASVVGLAVATPVSLIFSPVLVPAALLIGTAVMGFLTSGALGLGGLSSLTCLANTXXRQAFQRTPDYVGGKARRRXMAETAAQAGHKTAQAGQAIQGRALAAAAGLPRKQVIHAWMDARVRVCQYQQGRLGMLCSLYVWVTVLWSSFSPECVLRMSWCSSCV

SEQ ID NO: 268519 - protein, 143 aa, Zea mays
  unsure (1)..(143): unsure at all Xaa locations
  Clone ID: MRT4577_176490C.1.pep
MAAKIFCLIMLLGLXSEKAAFESIVPQCSQAPIASLITPYLSPAMXSPXENAGLLPYRIQQAKAAGILPLSPLFLQQXSALLQQLPLEHLLVQNIKGQQLQQLGLANNAAYCXEQQLPWXQLLAQNIRAQNLQNKKLPNLVDY

SEQ ID NO: 268520 - protein, 121 aa, Zea mays
  Clone ID: MRT4577_176491C.1.pep
MMGGRAVLLLPLLVITALFAQIRASDPLFHESFNESFDGSWIVSGKEEYKGVWKHAKSDGHEDYGLLVSEPARKYAIIKELDYPVTMKDETVVLQFEVRLQNGLECGGAYIKYIRPQATGW

SEQ ID NO: 268521 - protein, 104 aa, Zea mays
  unsure (1)..(104): unsure at all Xaa locations
  Clone ID: MRT4577_176492C.1.pep
RVGPRGFLPRCPRFCWGWGGLLLLRGCAGGVGGGFGXLLRGGGLLGGALLLRVLGALLAALRAAAVAAFGGSLLVLSGLFLAGAVVALSVASPVLVVFCPVLVP

SEQ ID NO: 268522 - protein, 131 aa, Zea mays
  unsure (1)..(131): unsure at all Xaa locations
  Clone ID: MRT4577_176493C.1.pep
PGGGRGRXAEXTARTXKXXNPXEXXKADXAHXKRAGKKEXXEXXDXXKXARXKERGGXXXDXXXXRXAXXARKNXXRQGXGGGGXQKNXXGRQRKXXRPPHPXKSXXXXARNXXQQRQKRGXNEGEPKGGR

SEQ ID NO: 268523 - protein, 74 aa, Zea mays
  Clone ID: MRT4577_176494C.1.pep
PSCCFTRSLYSYMHGRSILSTAHTGWLAAGLYTESIRVDRFYSQIDPQPPVVGNGGHAVLHIYRSWGSTRRQRV

SEQ ID NO: 268524 - protein, 112 aa, Zea mays
  Clone ID: MRT4577_176495C.1.pep
FSLSFFFFLSHPLRGGVITLTTQSLPKKKNNPACFWYTRKKTLVFNEGPFSKPNRKKQKSHKKKDFHFFKTQNKKNFPTHPMIQPPPKAQALITALEGIPYLPKALTLFKEK

SEQ ID NO: 268525 - protein, 514 aa, Zea mays
  unsure (1)..(514): unsure at all Xaa locations
  Clone ID: MRT4577_176496C.1.pep
MELAGAASPHPPPESHVAPPRPPPQPPEEDVCEDRGDMSVTGEKPCTHRESDVGQTNSCSLNNSSECENHTPSNDEISEPESNLEMAKTDQGGDVPSGEKVLKKPDKILPCPRCNSMDTKFCYYNNYNIKQPRHFCKSCQRYWTAGGSMRNIPVGAGRRKSKSSSASCRSVLIPVPGSSSVANPGGEASLFPLSVKANQAAVSFGPDSPLCTSMASVLKIGGGGEQXELQPCLSSSTAQERXTQTQTCAPSSAATTPSDGPGNGLQKGAESAHQNQNQNQNGIIGHSNGVTPVHPIPFFPGPPFVYPWSPAWNGIPAMXAAGCAAPATNGAAISSEHGTASSTVQWNVPPAIVPVLPPGFCGPIPVPVIPPPSVWPLITPWPNAAWSAPWLGPSASVPPGSSRSSGSSTCSDSGCGSGSPVLGKHSRESRPQGDEKAERRCLWIPKTLRIDDPVEAAKSSIWTTLGIEPGDRGMFRPFQSKHGRQQELQASGAARALQANPAALSRSQSFQETT

SEQ ID NO: 268526 - protein, 80 aa, Zea mays
  unsure (1)..(80): unsure at all Xaa locations
  Clone ID: MRT4577_176497C.1.pep
RKRIHVRVEHVHQSRCAEEFKLRKKKNDEFKAAAKANGEPISTKRQLKGPNPGFMVEGMTLETVTPIPYDVVNXDLKGGY

SEQ ID NO: 268527 - protein, 57 aa, Zea mays
  Clone ID: MRT4577_176498C.1.pep
GKNFVLSDLAAAVIASSYAIFMEEAAELKNRWKHELALLTSSCNGNYQQGQAGNAQQ

SEQ ID NO: 268528 - protein, 68 aa, Zea mays
  Clone ID: MRT4577_176499C.1.pep
LASWPATSGSTWPSTSIRAPSPPSSLSPFLLPVQSEGHRISPDGHSVTSINCFLHQGALVLVTAQSSV

SEQ ID NO: 268529 - protein, 187 aa, Zea mays
  unsure (1)..(187): unsure at all Xaa locations
  Clone ID: MRT4577_17649C.1.pep
MADRDRSGIYGGAHATYGQQQQQGGGGRPMGEQVKKGMLHDKGPTASQALTVATLFPLGGLLLVLSGLALTASVVGLAVATPVFLIFSPVLVPAALLIGTAVMGFLTSGALGLGGLSSLTCLANTARQAFQRTPDYVEEAHRRMAXAAAHAGHKTAQAGQAIQGRAQEAGAGGGAGAGAGGGGRASS

SEQ ID NO: 268530 - protein, 390 aa, Zea mays
  Clone ID: MRT4577_1764C.1.pep
MKVSVKTLKGSSFQIEVEPTDKVAAVKKVIENMQEQASYPADQQVLIHQGKVLSDDTTLEENQVTENNFLVIMLRQNKGSSSAAPAKTTANQAPPTQTVPVVPPQTSAAPAAPAPIVPVSALAATATASAAPAVAVSTEADSYGQAASNLVAGSNLEGTIQSILEMGGGIWDRDTVLRALRVAYNNPERAVEYLYSGIPEQMDVPTSPPSIQPVNPVQAAQAAQTAAPSGPNANPLDLFPQSLPNASANAGTGNLDVLRNNVQFQNLLGLVQANPQILQPLLQELGKQNPQVMQLIQENQAEFMRMINEPLEGDEENEMMLDQMADAAETIAVTPEENEAILRLEGMGFDRALVLEVFFACNKNEQLTANYLLDHMHEFDNDDGLGGPPL

SEQ ID NO: 268531 - protein, 166 aa, Zea mays
  unsure (1)..(166): unsure at all Xaa locations
  Clone ID: MRT4577_176500C.1.pep
SAHAVRRRLCGGRLXXLAKPTTAPXESESPPVASXLGARRQDEGRRGGRAXIRTDDRXTXRAAAGERLHXFVIVGRQVRADQENVNLKLHASPSPXVKCAPPFRPSGCFTATRXXKSAVTKKKARQADQRSXHAAGSSWTSEKAXPXSLLFMEXXRTLHTASTXXL

SEQ ID NO: 268532 - protein, 113 aa, Zea mays
  unsure (1)..(113): unsure at all Xaa locations
  Clone ID: MRT4577_176501C.1.pep
LLXGLIRTNNLPRAMDLLNQMLDQLCDPDTVTCNIFLREIGVVEGKGRXFLEGLVVRLCCRDRYRAAGDVVMAMLAKYIVPEAAIWXTVVKGVCQTNRIQKVVDNCWTEIWRP

SEQ ID NO: 268533 - protein, 479 aa, Zea mays
  unsure (1)..(479): unsure at all Xaa locations
  Clone ID: MRT4577_176502C.1.pep
KPKLQRWLDEFGEYYSRVVVALSLVVALLGPLXSARPLFKWPFFGNSVCRGSIYRGLGLMVAASPCALAVAPLAYATAISSLASKGILLKGGHVLDALSSCQSIAFDKTGTLTTGKLMCKAIEPIHGHLGVKSGRSNPSCCTPNCESEALAVAAAMEKGTTHPIGRAVLDHSVGKELPVVAVESFECLPGRGVVATLSGVKVRENENELSEASIGSVDYISSLYRSNGESEQIRAAAKSSAYGPEFVQAALSVDKKVTLFHFEDEPRSGVCEVISTLREKAKLRIMMLTGDHESSAQRVAKAVCIEEVHFSLKPEDKLNKVKAVSREGGGGLIMVGDGINDAPALAAATVGMVLAQRASATAVAVADVLLLQDNICGVPFCIAKARQTTSLVKQSVALALTCIVFAALPSVLGFLPLWLTVLLHEGGTLLVCLNSIRALNTPTWSLVDDIRKLVDSLRNYFPSKFNSSPSSYTANTAPL

SEQ ID NO: 268534 - protein, 84 aa, Zea mays
  Clone ID: MRT4577_176503C.1.pep
ETEKKNLLYIMEKTQGVPKPRAAQKPPNQPKRRGLTRGKKHSGKPLQPFQKINFKLGGRGGPKGWNKPGQKPGGGARNPFFPLD

SEQ ID NO: 268535 - protein, 69 aa, Zea mays
  Clone ID: MRT4577_176504C.1.pep
PPTRPPTRSEPNLDRQTIEHKGGFVSNLPTYVPHLDCHLPNARSFQHLSLNNHLICDLYFVHPTINDHT

SEQ ID NO: 268536 - protein, 91 aa, Zea mays
  Clone ID: MRT4577_176505C.1.pep
MFMRWRSFFALSIHKIEIFLLVYEVYDGADPMELHVYDFKGPGVALSMYNSDEFIRPFAESSMDMALSKKLSLYLSTKNTILKKYDDRSQL

SEQ ID NO: 268537 - protein, 176 aa, Zea mays
  Clone ID: MRT4577_176506C.1.pep
MPAAEGAVAAAAVADQMYGPKEDRKLAIVLVGLPARGKTFTAAKLTRYLRWLGHETKHFNVGKYRRLKHGTNQTADFFRGDNREGVEARNEVAALAMEDMLSWMQEGGQVGIFDATNSTRIRRNMLMKMAEGKCKVCLNHCVHLGHPFGLNFFCLLPIGNSIFISLTKQELHMSFH

SEQ ID NO: 268538 - protein, 37 aa, Zea mays
  Clone ID: MRT4577_176507C.1.pep
PSYSIPHSDCHLKKTGTVNTTSKHQLLPSSTITFYTK

SEQ ID NO: 268539 - protein, 264 aa, Zea mays
  Clone ID: MRT4577_176508C.1.pep
MASSGGISDQLFVSVKLESPHLAELDLAPHLFGSHPVAGSWDPCKALPLERAATAVWEFSCVVPSQHESLDFKFVLKRKGDNPQYIIEEGPNRPLGCQRNEFEMGNALFKLNEGKEVLECKVQVETEMLSPFDLAASWRAHQEYFQPSRVRGTHDVTINPGLEGRAKNGFASGLELDLDKYVVPTPNMGSGVVYAASLTENPRSLLQTGSSSNNDTTKDILHNSTKGDSSLNHYVNTMKLRHFSYATLLKVVVLFAEICKILGA

SEQ ID NO: 268540 - protein, 82 aa, Zea mays
  unsure (1)..(82): unsure at all Xaa locations
  Clone ID: MRT4577_176509C.1.pep
ACNALSPAGASPVCTSRGRVSGAASAPRCSGAGGGDGAGTPPSSAAMTPVARTTRPXWVVLARPTSYDPPPSXGSWGSGSPS

SEQ ID NO: 268541 - protein, 186 aa, Zea mays
  Clone ID: MRT4577_17650C.1.pep
MADRDRSGIYGGAHATYGQQQQQGGGGRPMGEQVKGMLHDKGPTASQALTVVTLFPLGGLLLVLSGLALTASVVGLAVATPVFLIFSPVLVPAALLIGTAVMGFLTSGALGLGGLSSLTCLANTARQAFQRTPDYVEEARRRMAETAAQAGHKTAQAGQAIQGRAQEAGAGGGAGAGAGGGGRASS

SEQ ID NO: 268542 - protein, 72 aa, Zea mays
  Clone ID: MRT4577_176510C.1.pep
CQADLAEPFCGWMQNPSVVGCWLLVLRSVATLFIVIVVAIKLAGSCVYSSFIEKGHVGRSRANLTLWLLIIL

SEQ ID NO: 268543 - protein, 66 aa, Zea mays
  unsure (1)..(66): unsure at all Xaa locations
  Clone ID: MRT4577_176511C.1.pep
SQIKLGDSPQPLTLAMSRPPAAAAQMAPKANKKPGRHTPPSPMHDPTYTENATXQNAATTVRRHPP

SEQ ID NO: 268544 - protein, 92 aa, Zea mays
  unsure (1)..(92): unsure at all Xaa locations
  Clone ID: MRT4577_176512C.1.pep
KKKKKNXPKSCRGVPGNTRFTLFLCRGEFELFFGLIAFLTYLVLQGFLIKGVYGTRPIYPCPWYRVVLEVMFALFRMLEIFKSHTTVKPIES

SEQ ID NO: 268545 - protein, 112 aa, Zea mays
  Clone ID: MRT4577_176513C.1.pep
IGHCWLPPNKRRTSQSYSAASLNLFHLRLQQCDCGVGCASGDGGGFGCLPPCTGSTCTARTMKNAAAAKIAKKRSRSTSEEQGRRGASIFILLLCAGRPALSFSMLSVFRGG

SEQ ID NO: 268546 - protein, 138 aa, Zea mays
  unsure (1)..(138): unsure at all Xaa locations
  Clone ID: MRT4577_176514C.1.pep
MGTQISKKKKFVXDGGLYAELNXEMLTXELAEDGYYDVEEHATPMXTEIIMRAARTRNVLGEKGRKIRGLTFDCQKRVHCCASGVXLYAEKVVNRGLWAIAQAECLRYKLLGGLADRRAXYGVLRYAMRDGAKGXCEV

SEQ ID NO: 268547 - protein, 103 aa, Zea mays
  unsure (1)..(103): unsure at all Xaa locations
  Clone ID: MRT4577_176515C.1.pep
SFQLPNTNPPXIFIYXHYLPXPKLINXXXXSLPXXXXXFLXLPLXNXTLNLHHPSPPXXXPILPXKXXTPQIXXXXXXHKNXXIXQXIXNHXIXXXXXXHPFI

SEQ ID NO: 268548 - protein, 308 aa, Zea mays
  Clone ID: MRT4577_176516C.1.pep
MELHFQAQPPVFQLENYSSSSSYYYYQQQEAAAQAKPSKPRGRKKGSNNHSKFVGVRQRPSGRWVAEIKDTTQKIRMWLGTFETAEAAAKAYDEAARLLRGTDARTNFAPRISPDCPLAVRIRGLLHHKKIKKAKAAAAAAKQQASSSSPASTTSNSNSNSHSTNSARGGGSSITTTTTSSSSSSSSSSAVSCDDDMATQGGGTGALDAGEVYRPGFATAGTEEEFDSWMFDSAFPALDSFAAVDSAVPAAGTTEEPGAEMAEFERIKVERRISASLYAMNGLQEYFDRVLDASACDSLWDLSPLCHH

SEQ ID NO: 268549 - protein, 79 aa, Zea mays
  Clone ID: MRT4577_176517C.1.pep
EYCCSSSHWEGCPPCDREREREKERESARERERESAIASLQVTSTSGFTEWNELKFEGLYLLHTPIGFWPNQAQVIDNN

SEQ ID NO: 268550 - protein, 393 aa, Zea mays
  Clone ID: MRT4577_176518C.1.pep
MSWWWAGAVGAVKKSQEERTELSFQSVALVIGSTGIVGTSLVDILPRDDTPGGPWKVYAVSRRPLPPWSPQPSPAVTHLLLDLADPVAVAEALKPLTDITHVFYAAWSSHPTEAQNREANSAMLRNVLSVVVPGCPALAHVCLQTGRKHYIGPYEAIGKIPVPDPPYTEDMPRLDYPNFYYDQEDVLFDEVSRRDGAVSWSVHRPTTVFGYSPRSAMNLVGSLCVYAAICRKEGTTLRWPGSRVTWEGFSDASDADLIAEHEIWAAVDPFAKNEAFNCSNGDLFKWKQLWPILADHFGLEWAGYEGEENRFKLEEVMAGKEAVWAEIVRENDLIATELDEITNWWFVDAMFAVETQLLDSMNKSKEHGFLGFRNTVSSFNTWIEKLKVFKIVP

SEQ ID NO: 268551 - protein, 74 aa, Zea mays
  Clone ID: MRT4577_176519C.1.pep
GTIRQDLVLAKCGCDAASRPRSTRADQPRPGVRRRIRAASRTDGSVTPGSASRLDVLPQCSQLAEKRWPRTTRG

SEQ ID NO: 268552 - protein, 82 aa, Zea mays
  Clone ID: MRT4577_17651C.1.pep
YNFLWVQDRPNKRINNCNSYMNICASLFLENVELEFPEEFRCRLFWLQDRLNKKRNHSDSNMNIFASLFLENEELEFSEGIC

SEQ ID NO: 268553 - protein, 100 aa, Zea mays
  unsure (1)..(100): unsure at all Xaa locations
  Clone ID: MRT4577_176520C.1.pep
ETQRSPGFGFVPFFTEDPLRSPIKGMNGKELYGPNIPVNEAQSPAARGGGGGGYGGGPPXGDGSGGXGGGFAGGFXGFAGGGXGYGGATPGGGSGTNTGN

SEQ ID NO: 268554 - protein, 115 aa, Zea mays
  Clone ID: MRT4577_176521C.1.pep
GGGGFPARSLDPALTIAWFSPEPRNHGSRTMNRTETIQLLEALKPSYISTSSPYQLATPAAPHPHFLTNPAATLESHKFTYRQTQAKLIILTLSLLKLWVFMHIMNAIFIGVSFM

SEQ ID NO: 268555 - protein, 99 aa, Zea mays
  unsure (1)..(99): unsure at all Xaa locations
  Clone ID: MRT4577_176522C.1.pep
MMRALAVVVXMLXXXFFAVPARAEKCGSKDGGALCPNCLCCNHYRRSGCTSNYRGSARYSQCSRNCGSXANPQSTGEEDSFITKPIHNQMPPQSNHHFF

SEQ ID NO: 268556 - protein, 57 aa, Zea mays
  Clone ID: MRT4577_176523C.1.pep
KARWQAFPQKFLGGGVNLNLAAFHQGPKQDDTQSWQNLSSSTSSIRGSRRYEGQEHH

SEQ ID NO: 268557 - protein, 65 aa, Zea mays
  Clone ID: MRT4577_176524C.1.pep
VLWQLHVRHEPVSASSCNICLDHRSICEVVIKVCDIHMHRAVRITAGVFQYRQDGTSTNHAVVTR

SEQ ID NO: 268558 - protein, 440 aa, Zea mays
  unsure (1)..(440): unsure at all Xaa locations
  Clone ID: MRT4577_176525C.1.pep
MQLPQHHQKPSAHSCCSSWIRRSPPPSPPPHKRAGGVGRSRYACRLVPLLVLTVYSVVTVLRIPSSSLVVSTADSERVERREDLEALKTHLPSNQNGLEAREETRSVASLPCSAFISGEAGHGAAADAEGVLCCDRSHYRSDVCYLRGDVRTDPSTTSVLLYNAPRGSAPEKVRPYTRKFEGSVMSSIDEVTIVPVPAGGXAAPTAXSVGVGGGGRRCDVRHPRGVAAVVFSTGGYTGNVYHEFSDGLVPLFVTAQRFAGEVVFVVLEYHYWWLGRYGAVLEQLTNYRVVDFRHDRRVHCFDEMVVGLRIHGELVVDPKLMPDGKSIKDFQALLHQGYSRTTTTASASASSPTPLLPLAPPTRPCPRSANKPKMLIFIRKQNRVLLNLPQVVTACRRAGFAPHVMNLRRQTPLAAIHAALASADAMVAVHGAAVTHFLFM

SEQ ID NO: 268559 - protein, 56 aa, Zea mays
  Clone ID: MRT4577_176526C.1.pep
SFFLEILFSFFFFLPKSCSVCTFYQIIQIEISKHIDIFVFIRVIFLKYHCLSYSIN

SEQ ID NO: 268560 - protein, 40 aa, Zea mays
  Clone ID: MRT4577_176527C.1.pep
KKKKKKKKKKKKKKKKKKKKKKKKKPKITNKKKQKNNKKY

SEQ ID NO: 268561 - protein, 76 aa, Zea mays
  Clone ID: MRT4577_176528C.1.pep
ILNTTQLSTMKREERILPCITQWTSTQALLRIMRLSQSTFTKDKESLPLIYLFNLLAKSIVGNNNSSYQHQSRIEN

SEQ ID NO: 268562 - protein, 39 aa, Zea mays
  Clone ID: MRT4577_176529C.1.pep
GDRSVQNYHGGSQPIGHPKLTTAGSEPQTRSGLVHSDLT

SEQ ID NO: 268563 - protein, 407 aa, Zea mays
  unsure (1)..(407): unsure at all Xaa locations
  Clone ID: MRT4577_17652C.1.pep
MTASTLQMNMNPRSDHGSIMAGAVDRILFRRRYYIYTTRRRPLDSRAPSPDRLSCSCSRSSRSWCRSCRCCSRSRRPRWPPRSRRHRRRWPWWSKPPALALVVGAARTVVLMLLAAAVSTLGDMQLHELPQEQLEPQSHLPLLQDMITGEGEQALAVLGGGGRRRRGVVPCCLPRVRPRVRPRVRPRVRVCKAPPRSIHRSLHRPAAPRSQGLANETAAMADRDRSGIYGGAHATYGQQQQQGGGGRPMGEQVKKGMLHDKGPTASQALTVATLFPLGGLLLVLSGLALTASVVGLAVATPVFLIFSPVLVPAALLIGTAVMGFLTSGALGLGGLSSLTCLANTARQAFQRTPDYVEEAXRRRMAEAAAQAGHKTAQAGQAIQGRAQEAGAGGGAGAGAGGGGRASS

SEQ ID NO: 268564 - protein, 44 aa, Zea mays
  Clone ID: MRT4577_176530C.1.pep
HNQTRWGAYSSKYSLQLLITVSHNVRNGPLCCYSLPFYPPVPSH

SEQ ID NO: 268565 - protein, 96 aa, Zea mays
  Clone ID: MRT4577_176531C.1.pep
SELGSEHDVQAKFSSISSRAQVPAEAQNEPKVRPSLGPKTVSTEAAGPVTNAVAYQVQQPLMHPSVEEKLLPCNLFYKSVCQGTIVAPSQGKTATS

SEQ ID NO: 268566 - protein, 155 aa, Zea mays
  unsure (1)..(155): unsure at all Xaa locations
  Clone ID: MRT4577_176532C.1.pep
RDEANSLASSISPTTMGKEKCHINIXAIGHVDSGKSTTTGHLIYKXGGIDSFVRERXEKEAAEMNKRSFKYAWVLDKLKAERERGITIDIALRKVETTKYYCTAIDAPGHRDLIKNMITGACQADXARLIIDSTTGALGGGISKDGPHREHALLA

SEQ ID NO: 268567 - protein, 56 aa, Zea mays
  Clone ID: MRT4577_176533C.1.pep
ELLSCSMHCTLHTYVYKLGSSCIPAQVWCLTPTTVAYLIYQLHCKIRGIWFVGTNF

SEQ ID NO: 268568 - protein, 64 aa, Zea mays
  Clone ID: MRT4577_176534C.1.pep
SRQVPYLFFFPQGIAGDSLPRRDLKSVELVGLSYNCPFKLERRVKAEAADTASERMAEPSNSKL

SEQ ID NO: 268569 - protein, 60 aa, Zea mays
  Clone ID: MRT4577_176535C.1.pep
SEKKCFPQGLLPRHLPGFSWLFLKRAKGFWGLAPPDLTLTVGTIWAPDFLSLQGPPPFRF

SEQ ID NO: 268570 - protein, 64 aa, Zea mays
  Clone ID: MRT4577_176536C.1.pep
SRECAYQAWLGSYNSNKSIGLDKSIFVHLAEQFSHSMGLAVPSCIPSNIISKMGLNKVPGLCSS

SEQ ID NO: 268571 - protein, 285 aa, Zea mays
  unsure (1)..(285): unsure at all Xaa locations
  Clone ID: MRT4577_176537C.1.pep
MSSGEDGYCSSDSPRAESPDQPQAAADAESPRAGAGPNKREPGRTSATSTPXSPAAKRSRRSVEKRVVSVPLAECGDRPRGASGEGPPPSDSWAWRKYGQKPIKGSPYPRGYYRCSSSKGCPARKQVERSRADPAVLLVTYTFDHNHEAPQPKTSGXAAAATSKASRPPNEXSSRSELGPEHEPEDEQEPEQKVVPGLAGPETAPATATLAPVAEEDESFDLGWFDQYPTWHRSALYAPLLPPEEWERELQGEDALFAGLGELPECAVVFGRRRELSLAATAPCS

SEQ ID NO: 268572 - protein, 90 aa, Zea mays
  Clone ID: MRT4577_176538C.1.pep
AFIVDCHAPASATPDLRKPRRRDPPTAAILKHANPYANRVVPVSTAVSRPPHAQLLPLRNPSLSCYLRAPDPRQHPCLDPAYRMPPPPCP

SEQ ID NO: 268573 - protein, 52 aa, Zea mays
  Clone ID: MRT4577_176539C.1.pep
DDNYALLAALPDTAPARPDGRAYPMLAGMSRKSMLGAVIGGKPPLERVAASV

SEQ ID NO: 268574 - protein, 161 aa, Zea mays
  unsure (1)..(161): unsure at all Xaa locations
  Clone ID: MRT4577_17653C.1.pep
RDDPHHPRRQEGRQRVHPAPRMRPLWPAPPRLRLGGGPAPKEGIRLRINWEVHWTPASSSSGFFFFFYGLLLLLPPXXVCLARRCCSXQKKLFLFLXGXXGLTTHLLPFFPLSAXLXGXVXGXXWCGRRPXXCAGLFSFXXVWSRPVLXFSFPFSCLPPPP

SEQ ID NO: 268575 - protein, 76 aa, Zea mays
  Clone ID: MRT4577_176540C.1.pep
SASRRGLERCWPAGAGAGAVRPGGGRGRPQPRPRQGRASPSALVAGLPGAVDLAHVAQSDGKHCWPWLRQGRPGPH

SEQ ID NO: 268576 - protein, 468 aa, Zea mays
  Clone ID: MRT4577_176541C.1.pep
MAEGDGPTPARGARVVLFPLPSQGHLSPMLHLASALHARGLAVTVLHTAYNAPDPAHHPGLAFVAVPDVIPEAVAATTNGIAKILALNAAMEASGHVRGALASLLAEEAGGQRLACLIFDSTLFAAQKAAAGLGLPTLVLHTGSAAGFRLFRSDTYNMLHDRGYLPATESNLHMPVKELPPLQVRDLFDPSKLPNKEIVQKILGRATESTTNSSGAILNTFEALESRELEMIRDELADRGIPPFAVGPLHKLTAVSNDGADETSLLSQDRVCMEWLDARAPGSVLYVSFGSVVHVTPDELVEIAWGLANSGVPFLLVVRRGLVVGVDKQELPDGFMAAVEGRGKVIEWAPQQEVLAHPAVGGFWTHNGWNSTLESIYEGVPMLSRPIFGDQLPTARYVCDVWRIGVLLEGVLERREVEKAIKKLMEEDEGVGIRGRAKDFKEKVRMCLESNGSSQLAVDKLVDHILSL

SEQ ID NO: 268577 - protein, 51 aa, Zea mays
  Clone ID: MRT4577_176542C.1.pep
ITNQDRSRIAFPMLTSRLAALAALSAAMSAAMMAATSSSQITPLDFVNLHN

SEQ ID NO: 268578 - protein, 154 aa, Zea mays
  Clone ID: MRT4577_176543C.1.pep
MSGVELTDPHEAAELKRKRTFRKFQYRGIELNALLDLSNEQLMEVVHARARRRFQRGLKRKPMTLIKKLRKARKEAPPNEKPAVVKTHLRDMLVVPEMIGSVIGIYNGKTFNSVEIKGEMVGHYLAEFSISYKPVKHGRPGIGATHSSRFIPLK

SEQ ID NO: 268579 - protein, 114 aa, Zea mays
  Clone ID: MRT4577_176544C.1.pep
LSSQIIATELNRSNQTKHNRQHARLHLRLRCCFRRCIGPGLIFRSLIFHRPGPPDYLPHPTNSLGVVTGMPAADTSIATQPDAVTSQPAAVTTQPVPADIPAVGPGVHTLTLAG

SEQ ID NO: 268580 - protein, 106 aa, Zea mays
  unsure (1)..(106): unsure at all Xaa locations
  Clone ID: MRT4577_176545C.1.pep
ESDKGAFSAEQREAAKKECLEAAGAAENGNGNGDQMENGDGQEDGEESNTLPDEQYGYPKAESEKWVSCIRILDPRSTDTTXLLELQDNEAAVSICTVNFHDKEHG

SEQ ID NO: 268581 - protein, 36 aa, Zea mays
  Clone ID: MRT4577_176546C.1.pep
LDHKSCPKLKKKKSSMISLAQKCLYVQTHPTLRTCN

SEQ ID NO: 268582 - protein, 56 aa, Zea mays
  Clone ID: MRT4577_176547C.1.pep
GTDASVPASSGHGSHRGPAVHGPELADDLRGPANAGRADVSFRPVFWDDTGADYAQ

SEQ ID NO: 268583 - protein, 83 aa, Zea mays
  Clone ID: MRT4577_176548C.1.pep
FSFFFLAAFIYLGFFSILCRFCHQTMGTQDVVLNRHAPFILYRCPTHYRMGSEICGTRIIWANVYNSMIEGLYSYLSRWREGN

SEQ ID NO: 268584 - protein, 46 aa, Zea mays
  Clone ID: MRT4577_176549C.1.pep
DAWADAWADFVGGLVGGRVGEMCRSLYHVWVFMAFGLLDFCEKKKA

SEQ ID NO: 268585 - protein, 186 aa, Zea mays
  Clone ID: MRT4577_17654C.1.pep
MADRDRSGIYGGAHATYGQQQQQGGGGRPMGEQVKGMLHDKGPTASQALTVATLFPLGGLLLVLSGLALTASVVGLAVATPVFLIFSPVLVPAALLIGTAVMGFLTSGALGLGGLSSLTCLANTARQAFQRTPDYVEEARRRMAEAAAHAGHKTAQAGQAIQGRAQEAGAGGGAGAGAGGGGRASS

SEQ ID NO: 268586 - protein, 75 aa, Zea mays
  unsure (1)..(75): unsure at all Xaa locations
  Clone ID: MRT4577_176550C.1.pep
RASAAVREGPRRRREIPADPLQAPPASSSPCTTEVGRRARQGGPRAGSARIHGAGSPLVXWKKRTSKPKQMQRPQ

SEQ ID NO: 268587 - protein, 60 aa, Zea mays
  Clone ID: MRT4577_176551C.1.pep
MAKSKNHTAHNQSFKAHKNGIKKPKRHRQTSTKGMDPKFLRNLRYSRKGNKKSGEAESEE

SEQ ID NO: 268588 - protein, 60 aa, Zea mays
  Clone ID: MRT4577_176552C.1.pep
MAKSKNHTAHNQSYKAHKNGIKKPKRHRQTSTKGMDPKFLRNLRYSRKGNKKSGEAEAEE

SEQ ID NO: 268589 - protein, 202 aa, Zea mays
  unsure (1)..(202): unsure at all Xaa locations
  Clone ID: MRT4577_176553C.1.pep
HVWVEEKXLSWVDGEVSRIDGKKAHVRTTKGKTVIANISDIHPKDTEAPPDGVDDMTRLSYLHEPGVLDNLAVRYXXKNIIYTYTGNILIAINPFQRLPNLVDARTMXEKYKGANLGDLDPHVFAIADVSYRQMINEGKSNSILVSGESGAGKTETTKLLMGYLAYLGGRSGTGERTVEQQVLESNPVLEAFGNAKTVRNNN

SEQ ID NO: 268590 - protein, 267 aa, Zea mays
  unsure (1)..(267): unsure at all Xaa locations
  Clone ID: MRT4577_176554C.1.pep
GIYRLFYPGLFXAFFIXREYKNLXINGEVXDLQXEFTDGKXLVICGVCIYDSSKDXKVGVGFLMEKXMVPAXPEXXLYMEEVXXKFGEEFWLXIGGKXIXFGASQXDXWTDLGGLCGIHEKQVDQMXIXXAXEARLRRTFCGDYFXNYFWRGIDILFNGQTNRIKKFVLNKNXPGXXDXNSYKKCNFVIYEAEVEGKCXPNNAXKNXITPSKKWEQXKEILGDCXGXEIQXKGSMKNPFGSXFVYGYQNMXFEVMKKGYIAIXTFFQ

SEQ ID NO: 268591 - protein, 60 aa, Zea mays; identical to SEQ ID NO: 268587
  Clone ID: MRT4577_176555C.1.pep

SEQ ID NO: 268592 - protein, 60 aa, Zea mays; identical to SEQ ID NO: 268587
  Clone ID: MRT4577_176556C.1.pep

SEQ ID NO: 268593 - protein, 43 aa, Zea mays
  Clone ID: MRT4577_176557C.1.pep
SCTRTYTCYFLARQALITCYYDHPMIGGLQYRHFSRLTADTQT

SEQ ID NO: 268594 - protein, 60 aa, Zea mays; identical to SEQ ID NO: 268587
  Clone ID: MRT4577_176558C.1.pep

SEQ ID NO: 268595 - protein, 65 aa, Zea mays
  unsure (1)..(65): unsure at all Xaa locations
  Clone ID: MRT4577_176559C.1.pep
PKKNNILXHPPPPVKARSNQQKDQNMFHCSEQVMVNLVRGVPTCCEAFPSATLVAFHQQFDAGRP

SEQ ID NO: 268596 - protein, 174 aa, Zea mays
  Clone ID: MRT4577_17655C.1.pep
RCCRCFKQERNPPSDYCEPRPQWPCAPGKKYFGRGPIQISFNYNYGPAGRAIGVDLLNNPDLVATDPVISFKTALWFWMNARDNKPSCHAVITGQWTPTAADRAAGRGAPGYGVITNIINGGIECGHGTDPRVTDRIGFYKRYCDVFRIGYGSNLDCDGQRPFNSGLAVEVAAQ

SEQ ID NO: 268597 - protein, 95 aa, Zea mays
  Clone ID: MRT4577_176560C.1.pep
ASSSSYFLVNHHAATTGSNEQGRPGQGDLVRFRRAPNCHESESKLTTLRMHSKRTRRSREVRFGLDLPRRQGKREDPAGQDPVLEQQPPQSTRKV

SEQ ID NO: 268598 - protein, 127 aa, Zea mays
  unsure (1)..(127): unsure at all Xaa locations
  Clone ID: MRT4577_176561C.1.pep
MAASTMASFFTVMAGTPIXVGSFGEGRMTMRKTVGKPKVAASGSPWXYGPDRVKYLGPFCGXPSSYLTCQFPGNYXCHTVGLSCDPETFSNNRXLDVNHSRWAMLGALGCIYXPELLSRNRVKFDEA

SEQ ID NO: 268599 - protein, 71 aa, Zea mays
  Clone ID: MRT4577_176562C.1.pep
GGGQTVRELVKEQARAGANVKYLYPGLGYACGPGIRTCTYVLTQKQVTDGGSHGALNGKKENGGGRIGYIK

SEQ ID NO: 268600 - protein, 43 aa, Zea mays
  unsure (1)..(43): unsure at all Xaa locations
  Clone ID: MRT4577_176563C.1.pep
IKNNTFFFSFQLFIXGKALTDTKKNLYSLHIITQSSPINDSTN

SEQ ID NO: 268601 - protein, 52 aa, Zea mays
  Clone ID: MRT4577_176564C.1.pep
RRGAENGATPRSSRRAKTQSDREVGNKYNPGALGRNGRDLARHAKGICRYPS

SEQ ID NO: 268602 - protein, 33 aa, Zea mays
  Clone ID: MRT4577_176565C.1.pep
SQVLSTGDRSFYDIIEIVVCFLLLGTRPSRATH

SEQ ID NO: 268603 - protein, 306 aa, Zea mays
  unsure (1)..(306): unsure at all Xaa locations
  Clone ID: MRT4577_176566C.1.pep
MAPPSTSDSALTLALENQTSSLLAELDKRIQSMDSKWESRVSVLENTATDAARSVTEFSTALRADVEAHLTASDAATEGRLHHFEAGGGNRIAALESAMQMFDFWRPRVDSSIDSLQSNMDWMRAEIAKMDAQWSHGARVGGATMPGVLGSPGSLAASPSILGTPGAFASTGSGPGHPPAAVDYTDGPRFGHGFDSYLRDSGLRHPTADGRYPVTGMWRPPFSTFSFAHQXFGGGDVDLRGALNKHGXXLPKLTFPTFDGSSPKLWQRRCEKYFEMYATEEMVWVKVATMYFEGAAGRWLQSVGPR

SEQ ID NO: 268604 - protein, 125 aa, Zea mays
  unsure (1)..(125): unsure at all Xaa locations
  Clone ID: MRT4577_176567C.1.pep
SLADKPACAYATLKQGRATXRRVGTGCGTYLAVALKHLVAEGVTHRANQGKDNNMSRIMPXHVLLKIXNDEELGKLMNVLTIAHGGVLPNIHCVLLPKKARDKVDSGGSKEPKFPKKGAKYPKKA

SEQ ID NO: 268605 - protein, 76 aa, Zea mays
  Clone ID: MRT4577_176568C.1.pep
VAIHLCVAGISCSNIAQQRANRKLIVLLTILNPLILIHIKRAAVQQRSCQVLPIFDYTLLAWLASLSVLTCPRTRG

SEQ ID NO: 268606 - protein, 88 aa, Zea mays
  Clone ID: MRT4577_176569C.1.pep
EVFRRSSAEGYYRISRSACWGDEAALTANDVRIPSACVSSVFAPRKEADARYPFLGSALAAVVEDEEADTSYIAVASLTCRNVSRPAS

SEQ ID NO: 268607 - protein, 60 aa, Zea mays
  Clone ID: MRT4577_17656C.1.pep
GQSFGGINATVGRGKTLWFSYCSYLRSTYCFRLLTVWHGKPLWSPFLTVAQTKRFLGRAL

SEQ ID NO: 268608 - protein, 49 aa, Zea mays
  Clone ID: MRT4577_176570C.1.pep
PRYRRCRSQGRSLTTLSRGRRGGRSFVELSPRLVQRRLLNGNDLGLRTD

SEQ ID NO: 268609 - protein, 84 aa, Zea mays
  Clone ID: MRT4577_176571C.1.pep
KLRTELSQEFSSLQKLRCSSRRSRSISSLDWKINTVTQGSAEYIKNLVRFIPVIFPVISQHCCKILIVHSQGHQPFQIHSHSAL

SEQ ID NO: 268610 - protein, 111 aa, Zea mays
  unsure (1)..(111): unsure at all Xaa locations
  Clone ID: MRT4577_176572C.1.pep
VSSKKGSVIFKLDFEKSFDKMEHPVIRSIFTHKGFGPKWXLXWINMIMDSGTSQVLLNGVPGXGLRCQRGVRQGDPLSPLLFVLAMYLLQSIINKEKTLTCSSSPPDWGGL

SEQ ID NO: 268611 - protein, 65 aa, Zea mays
  Clone ID: MRT4577_176573C.1.pep
PLFEMHQPTRKLSSHPFMQTCIFVVPQHISYIQIRTCLKDGFFLAGAFELAFHIIVMFLLDTIFR

SEQ ID NO: 268612 - protein, 223 aa, Zea mays
  Clone ID: MRT4577_176574C.1.pep
MAMEEGSGAVEKGPAVGTVADASASVIGEGAVKEEAGGRRQPSAGYAAVVIGGTFDRLHQGHHLFLKAAAELARERIVVGVCDGPMLAKKQYADLIQPIEKRMQNAKDYIKSIKPDLDVHVEPIVDPFGPSIVDPGLEAIIVSKETLPGGHAVNRKRAERGLTQLQIEVIELVPEESTGDKISSTAFRKMEAERALQQQNKQEDTAVGTPVGVQNIAVQSHGA

SEQ ID NO: 268613 - protein, 47 aa, Zea mays
  Clone ID: MRT4577_176575C.1.pep
VPILCINNCSFFTSPATMIMFSNCHKLMITNQLHAKLAASFIDRILN

SEQ ID NO: 268614 - protein, 52 aa, Zea mays
  Clone ID: MRT4577_176576C.1.pep
ELNITEFQTFKLIITNPLKQLPKRYQKSCLLCGGGGREGKEMEQVVFVLACG

SEQ ID NO: 268615 - protein, 170 aa, Zea mays
  unsure (1)..(170): unsure at all Xaa locations
  Clone ID: MRT4577_176577C.1.pep
GAWAGAPGALAPVPLSSLDLADLDRVMXVNARFTVGXLKHAGRVMVPQAAGCVLFTXSTTGMLGSLIVLTYSLFKVTVXISVVRAVADELKRSEVRVNAILANAIGTPMMLRSLGRLXPMRTLRVRLMLGGDWHELAXGAELQVHDLVRVDVYLAYREVKFKXGHNLEVD

SEQ ID NO: 268616 - protein, 35 aa, Zea mays
  Clone ID: MRT4577_176578C.1.pep
DPPRLFHHRCFRTVLLIRLLTIATSHSGTTPETLT

SEQ ID NO: 268617 - protein, 41 aa, Zea mays
  Clone ID: MRT4577_176579C.1.pep
GILAFLGFLIQHNVPGKGPFDNLLQPLFDPWPNPIIQAFSG

SEQ ID NO: 268618 - protein, 50 aa, Zea mays
  unsure (1)..(50): unsure at all Xaa locations
  Clone ID: MRT4577_17657C.1.pep
LKPPSRLGPPGNFPLGQRVPPRGNFPLCXLRSAPATRRWSSKTFVPFRGG

SEQ ID NO: 268619 - protein, 240 aa, Zea mays
  Clone ID: MRT4577_176580C.1.pep
MAAASSAHLFGLGDGQMQMQIQQQQQAPPPPLVNNPAAPPPKKKRNQPGNPNPDAEVIALSPKTLMATNRFVCEVCNKGFQREQNLQLHRRGHNLPWKPKQKNPKETRRRVYLCPEPTCVHHDPSRALGDLTGIKKHYCRKHGEKKWKCDKCNKRYAVQSDWKAHSKTCGTREYRCDCGTLFSRRDSFITHRAFCDALAQESARVPPMGAGMYGTGGMALGLSGMATSQLQSFQDQTHSS

SEQ ID NO: 268620 - protein, 79 aa, Zea mays
  Clone ID: MRT4577_176581C.1.pep
KQIIHGITCLPHIVTNYKYLPSTLQAYKVPTNTQSFPQDTIRRNFRLTIVDIQQQIKSKWTSKITYCLIVLRIDSSSIA

SEQ ID NO: 268621 - protein, 98 aa, Zea mays
  unsure (1)..(98): unsure at all Xaa locations
  Clone ID: MRT4577_176582C.1.pep
MAAASSAHLFGLGDGQMQMQPQQQQQAPPPPLVNNPAAAAPPPKKKRNQPGNPNPDAEVIALSPKTLMATNRFVCEVCXKGFQREQNLQLHRRGHNLP

SEQ ID NO: 268622 - protein, 72 aa, Zea mays
  Clone ID: MRT4577_176583C.1.pep
FLRKCTGAPVGIPRLVLCKVQSPHVINVPVSQTNYLIASALIFSPCLRPPTFVPSRKNEAPALVVLSMRGRR

SEQ ID NO: 268623 - protein, 62 aa, Zea mays
  Clone ID: MRT4577_176584C.1.pep
MAAASSAHLFGLGDGQMQMQQQQQAPPPPLVNNPAAPPPKKKRNQPGNPSKYPGWPYSLFAG

SEQ ID NO: 268624 - protein, 181 aa, Zea mays
  Clone ID: MRT4577_176585C.1.pep
MAAASSAHGLFGLGDGQMQMQIQQQQQAPPPPLVNNPAAPPPKKKRNQPADPDAEVIALSPKTLMATNRFVCEVCNKGFQREQNLQLHRRGHNLPWKLKQKNPKETRRRVYLCPEPTCVHHDPSRALGDLTGIKKHYCRKHGEKKWKCDKCNKRYAVQSDWKAHSKTCGTREYRCDCGTLF

SEQ ID NO: 268625 - protein, 501 aa, Zea mays
  Clone ID: MRT4577_176586C.1.pep
MAAASSAHLFGLGDGQMQMQPQQQQAPPPPLVNNPAAPPPKKKRNQPADPDAEVIALSPKTLMATNRFVCEVCNKGFQREQNLQLHRRGHNLPWKLKQKNPKETRRRVYLCPEPTCVHHDPSRALGDLTGIKKHYCRKHGEKKWKCDKCNKRYAVQSDWKAHSKTCGTREYRCDCGTLFSRRDSFITHRAFCDALAQESARVPPMGAGMYGTGGMALGLSGMATSQLQSFQDQTHSSATTAISSNPAAQFEHLMQSSTGSPVFRGAQPTSSSSSPFYLGGAEDGHQSLSGHTSLLHGNKQAYHGLMLLPEQQHQAGSNGLLNLGFFSGGSSGQDARLVFPDQFNGAVGGNVRGDGSEHGHSGANTESAAIFSGNLMGNHQMASSAGFSSSLYNSSETVAPAQMSATALLQKAAQMGATTSSGNVNSLLRGLGSSAGGTLNGRPAGAAAGFMAGEGSSSRSTSQAENESQFRDLMNTLAAFRAAELLAQRSAGVSRAWTTAS

SEQ ID NO: 268626 - protein, 95 aa, Zea mays
  Clone ID: MRT4577_176587C.1.pep
MNGQYPHEPVITELQGRITKAEAVLRDKEEENVMLKQQLEQYESKWSEYEAKMKSMEEAWKRQLSSLQVIMFIIFMFACKFEEWVKIFLQHEFIC

SEQ ID NO: 268627 - protein, 115 aa, Zea mays
  Clone ID: MRT4577_176588C.1.pep
DPSPGARFNAVPVARHDLSKCCCRTPRALVGTALVRSSEPLHKRYNQLSYQLIHLSLRLPLHPCVVSSKEIVLDILVAPPPWFGVRRCRTAAFQYPLLLLLLSQEYVNLLGKVNW

SEQ ID NO: 268628 - protein, 130 aa, Zea mays
  Clone ID: MRT4577_176589C.1.pep
PRKALGRGLFKPPQDGGQAPSLYTPTGFLSVHAQEQSELGKKALPAKPPKFLWWMPRVFSNNHALHGCRDIPGVFFSPARFEGFQRWEEGRLLPFKAPKFFFFERPGGVPVLLLKKEKGPPPLLGPRSAF

SEQ ID NO: 268629 - protein, 62 aa, Zea mays
  Clone ID: MRT4577_17658C.1.pep
FTPKRRQRATAPPLKRSIFIPPYVGARGSPPPSHIYLPTHYFPDLHFYYFYFYYFLIKTLSP

SEQ ID NO: 268630 - protein, 80 aa, Zea mays
  unsure (1)..(80): unsure at all Xaa locations
  Clone ID: MRT4577_176590C.1.pep
PSTKSMQFGRFLGRGFVLLARAVAETLCATLSNRMFRHSGPTIMATXQRCCQLRVATVLVGDAYAKEVHATLTCAYRLNL

SEQ ID NO: 268631 - protein, 104 aa, Zea mays
  Clone ID: MRT4577_176591C.1.pep
SVPYDDKNQGLFLYIRRCRLRAFALPGLRANAAESFLGCLRAATKITELLSFAMLVRSSSRISQLFLAHLQFIACVKQKEHPNRLGHGSVVYSYGWLIAMLCKR

SEQ ID NO: 268632 - protein, 68 aa, Zea mays
  Clone ID: MRT4577_176592C.1.pep
NGIGASLRVAFIDDHDGYGHSTVSSHRGCAPTGRRWIILRISDKLLLCRIRVRHSSSASSSSSIDLLA

SEQ ID NO: 268633 - protein, 66 aa, Zea mays
  Clone ID: MRT4577_176593C.1.pep
IHLFVFELKKKKKKKKKKKKKKKKKKEKKKKKKKKKKKKKKKGGAAPNLKRFRKIKACFSTFAVAA

SEQ ID NO: 268634 - protein, 60 aa, Zea mays
  Clone ID: MRT4577_176594C.1.pep
NTHKWAVNISGHREKEYTNTARNIELWVTQEYITAPHPYKNQDIHSTYRKHNTHTSFNLF

SEQ ID NO: 268635 - protein, 44 aa, Zea mays
  Clone ID: MRT4577_176595C.1.pep
GFRQGWSNLNPSQKIKVGQRFGPSRPPACQLPCAFQVFEPVDSH

SEQ ID NO: 268636 - protein, 62 aa, Zea mays
  Clone ID: MRT4577_176596C.1.pep
GLPDLLSAEDVPSERRNEQKRAHYNGSCDSKITKPGNTHHEYNLPFLHRGLPHPVLLPINGP

SEQ ID NO: 268637 - protein, 140 aa, Zea mays
  Clone ID: MRT4577_176597C.1.pep
MSKRGRGGSAGAKFRISLGLPVGAVINCADNTGAKNLYVIAVHGVSGRLNRLPAAGSGDMIVATVKKGKPELRKKVMPAVVIRQRKPFRRKDGVFIYFEDNAGVIVNNKGEMKGSAITGPVAKECADLWPRIASNASSIA

SEQ ID NO: 268638 - protein, 83 aa, Zea mays
  Clone ID: MRT4577_176598C.1.pep
HYTDCFYNKTDPHYLKRTALLFVIVSFLPHHCQAPTTIKPDPRYQQTYFFLTTCDQPQSVDKTPLDLHIPPSMEPEREGEGWP

SEQ ID NO: 268639 - protein, 72 aa, Zea mays
  Clone ID: MRT4577_176599C.1.pep
PAQNQHLRVVIGDGTQARRRVPQPHDRHHLLRWHIHHEPYSHLRMRVCHDRGTDEHTHTQLALVMCNNTTSV

SEQ ID NO: 268640 - protein, 131 aa, Zea mays
  Clone ID: MRT4577_17659C.1.pep
FVSSAVSSSWRASKAYLSAANAWIADGVRSVLGGRWAAVAVPLFVLTALVRRMGQYLLLLHRALLLAQVYLAIYFATLALAVAATGLEPLRFFRAASPAAYAWSQAAQSLGLGVRLRRRPHGGDGKRLWRL

SEQ ID NO: 268641 - protein, 108 aa, Zea mays
  Clone ID: MRT4577_1765C.1.pep
QELGKQNPQVMQLIQENQAEFMRLINEPLEGDEENEMMLDQMADAAETIAVTPEENEAILRLEGMGFDRALVLEVFFACNKNEQLAANYLLDHMHEFDNDDGLGGPPL

SEQ ID NO: 268642 - protein, 84 aa, Zea mays
  unsure (1)..(84): unsure at all Xaa locations
  Clone ID: MRT4577_176600C.1.pep
WISRAVFFFFFXMQKREGXXXRXCGVLYXXRIEXIXRFXSXXGGMXFVLLXXFGXFFFXFXGFCGGGXXXXGXXGXCXXGGWVG

SEQ ID NO: 268643 - protein, 108 aa, Zea mays
  unsure (1)..(108): unsure at all Xaa locations
  Clone ID: MRT4577_176601C.1.pep
DVPFQTIYLKLKKTTQRLVGWSDKQVGHIRSQLALAKEILHRLEIEGGGRTLSPAQIXLKNKVKKHSLPLSSLKXTMARLRXRSRISWLKEGGANSKLFHLHARHRKK

SEQ ID NO: 268644 - protein, 55 aa, Zea mays
  Clone ID: MRT4577_176602C.1.pep
SKQARYRIKSKSIAIFYMKMAKAKEAPWLRIQTRSKRAAPQHNNKQKERGRGKNK

SEQ ID NO: 268645 - protein, 54 aa, Zea mays
  Clone ID: MRT4577_176603C.1.pep
ISRVNKLISYEGNLSIEFHQTVYSLLNEQFEDGMVRLVDTVPCRNHSLIQAYVY

SEQ ID NO: 268646 - protein, 143 aa, Zea mays
  unsure (1)..(143): unsure at all Xaa locations
  Clone ID: MRT4577_176604C.1.pep
MGPSVAGKGDGEKTDGATKREGVSFVPHEYGANTLAAVATADKQXLHSTMVKLMTLEDEGDXRKYKHYYXLMHIATESLILVXAGCGADYPYTAVALHTMSLDFQSLKDAIKDHITDNKKKLGXDDDASGREGKLITLGCMDQ

SEQ ID NO: 268647 - protein, 158 aa, Zea mays
  unsure (1)..(158): unsure at all Xaa locations
  Clone ID: MRT4577_176605C.1.pep
GFGHEPRDEATTSMASGYSYVGDWTGEDRGFKGRLRRPWRAKGSRAGGGGGADDGGGIRIWRRTVVWALRMGHGEEACVVEAALVSVVRGGCVMRRGCGCAGGSAGIRAVDGRMAEDGRSGYGAGADAGGCGAAARCGHLRAIERWLWTPTLLTXVVV

SEQ ID NO: 268648 - protein, 55 aa, Zea mays
  Clone ID: MRT4577_176606C.1.pep
IDNMKPKIQANQGIPPDHQRLIFPANQLKNVRTLPDYNIHKESPLHLVLRLPGGY

SEQ ID NO: 268649 - protein, 68 aa, Zea mays
  Clone ID: MRT4577_176607C.1.pep
MGGFKSGDIFIYARTAPTLSPTLAVGWGLLGGQGRPIGNTDRVQGSLLVRVVIMRQSLAVGMQSSLRI

SEQ ID NO: 268650 - protein, 65 aa, Zea mays
  Clone ID: MRT4577_176608C.1.pep
FCHETPVLSQQPFSFYKTNTYYHLGTPHRKASTQTTRFFYIYRKLIFGSRVGVFVYTNWGEQGPL

SEQ ID NO: 268651 - protein, 139 aa, Zea mays
  unsure (1)..(139): unsure at all Xaa locations
  Clone ID: MRT4577_176609C.1.pep
FMAQENTATENKEASESLNNPPSRDPSCHVTTQNPLSCRLPPARASRPMTPCRRPISIPQFFPTPGRRARAAALGPPSARGPVAAATGAAASVLSNRADHLACTYDARLHGGTXXPAPRXATAAAAHXSRGGEPXEQGG

SEQ ID NO: 268652 - protein, 91 aa, Zea mays
  Clone ID: MRT4577_17660C.1.pep
MLQRFALAPADPASNSISFNVRGTSCSGRPSARQRRGSRCGRLRCLRRPPTSAAGRLRPPPRRRLAGPSSPSRDLTTVFCSLPPKKRIRVV

SEQ ID NO: 268653 - protein, 180 aa, Zea mays
  unsure (1)..(180): unsure at all Xaa locations
  Clone ID: MRT4577_176610C.1.pep
AAGYAPSACRRSSAAWCPPPSPALSSRSAATRRRRGPRRRRRPSAAPLSRXAAAAAPPVRRLAQVHVVPPEXRSPRRPPPPPPPPRXRRAEAEQVXRRGPSWSSSPTRRRLRRWRPRARARRASGPSSPSRRPPPTRSRPPPPPPHPRRTPPTWAPPPREGSRCPWRRRRGRQGAPARRT

SEQ ID NO: 268654 - protein, 196 aa, Zea mays
  unsure (1)..(196): unsure at all Xaa locations
  Clone ID: MRT4577_176611C.1.pep
RAQFTHTLYKPQHPAARSLNMSATQKAAPVPQEPNPPASATTTLRQAKPADSSSSNSSSILGKGKKLLGLGKKKGDEGDRPAMEQTGTTAAPAASITATTTNKTTTTTLAPTLLPSPPMSPPERRASPRGSPRMLPVGASPSRRIRSTSPNLHSPASSLIFERNVQEPEPSVDVPAHIKTEGHIPXALDATSLAIT

SEQ ID NO: 268655 - protein, 134 aa, Zea mays
  Clone ID: MRT4577_176612C.1.pep
MKGGTQAISLMVHLAVPWLRLASWAALLPALASGNVGAAAPILRADYIKLNFSTASATPDKYKSFIASVRAGLVSKAGGNSSGIPVLVDEDDPLALESFLNITLVNKAGRSVSLKMDVSRAYFVAYVAVLHCNS

SEQ ID NO: 268656 - protein, 84 aa, Zea mays
  unsure (1)..(84): unsure at all Xaa locations
  Clone ID: MRT4577_176613C.1.pep
RVLRNVVKGDSYFSGLAISSIESWXQRDGYVKSVADLIEKEVSAFSSPEEVVIFFSAHSVPLSYVQDAGDPYRDQMDDCISLIV

SEQ ID NO: 268657 - protein, 597 aa, Zea mays
  unsure (1)..(597): unsure at all Xaa locations
  Clone ID: MRT4577_176614C.1.pep
MKGGTQAISLMVHLAVPWLCLASWAALLPALASGNVGAAAPILRADYIKLNFSTASATPDKYKSFIASVRAGLVSKAGGNSSGIPVLVDEDDPLALESFLNITLVNKAGRSVSLKMDVSRAYFVAYVAGQRSCLLKRSGRTFSSAICXLRWPVGNKFGSCHXRPAAAAGDGEDPGVAAWRARDLDEAISSLFLFPTGNATEEELRRGVAACDMMVASAATFPYVERRMSAGMWDSNGVANDPSLRGLQARWPWLSAAVQQSYQGAFAAPVPVQRSNGKWMRVRNVRSAVPLVSFLEHGSCNRTRGAPALLIRSVVQEPDEDMQPGGGARATTAACGLPAEPTVRLVGPEGRCVDVPYGYYYNGNQVQLWSCKSTSAVNQLWTLKRDGTIRSNGKCLTSSGDAAGARAVVDDCPRFPTGRVVWEVRVDGTVALKWSRGLVLAVTSSTLFAGLTVRQDDRGTGQSWTPTNVTAPLDAAIVGFRDLCLQADYAGSVSVAACRDGVQWSLYPDGSVRPPAWLLLQWQCLAADASGGVTVKLCDGAGSSCERWVFRNDGTIFNTGTGMVLDARPSAGANATASQVIVSPATGSPTQQWTLML

SEQ ID NO: 268658 - protein, 198 aa, Zea mays
  unsure (1)..(198): unsure at all Xaa locations
  Clone ID: MRT4577_176615C.1.pep
RLQXGVPXVHTWVPCASGLYSSKTAYNSFWNGTTSFEPAKRXWKSWAPPKCKFFIWLASLNRCWTADRLARRGMDHHDKCLFCDQQEETVQHILLSCVFSRNIWWRVWCKVGMQHLAPGPEDMIFQDWWSNAEGQVPKEKRKGFNTLVILVAWWLWKHRNTCVFEGASPSTRDILQHIHEDAMLWGMAXARGLKGLWP

SEQ ID NO: 268659 - protein, 607 aa, Zea mays
  unsure (1)..(607): unsure at all Xaa locations
  Clone ID: MRT4577_176616C.1.pep
MKGGTQAISLMVHLAVPWICLASWAALLPALASGNVGAAAPILRAEYMNLNFSTASATPDKYKSFIASVRAGLVSKAGGNSSGIPVLVDEDDPLALESFLNITLVNKAGRSVSLKMDVSRAYFVAYVAGQRSCLLKRSGRTFSSAICXLRWPVGNKFGSCHAXRSTRRGSDRAAGDGEDPGVAAWRARDLDEAISSLFLFPTGNATEEELRRGVAACDMMVASAATFPYVERRMSAGMWDSNGVVNDPSLRGLQARWPWLSAAVQQSFQGAFAAPVPVQRSNGNWMRVDNVRSAVPLVSFLEHGSCNRTRGAPALLIRSVVQEPVEDEDMQPGGGARATATATATTATCGAEPTVRLVGPEGRCVDVPYGYYYNGNQVQLWSCKSTSAVNQLWTLKRDGTIRSNGKCLTSSGDAAGARVVVDDCPRFPTGRVVWERAWTVPSRLPRPGAVVALPXDGSVRRAPRGSSFNGSAWLPMXRGCDPWTXAIVGFRDLCLQADYAGSVSVAACRDGVQWSLYPDGSVRPPAWLLLQWQCLAADASGGVTVKLCDGAGSSCERWVFRNDGTIFNTGTGMVLDARPSAGANATASQVIVSPATGSPTQQWTLML

SEQ ID NO: 268660 - protein, 140 aa, Zea mays
  Clone ID: MRT4577_176617C.1.pep
LGGLLPLIQELGNADEGIRTTSAWVLGKASQDNVLVQNQINGYGALDRLVKMGYSSSGPEAAKALYTISSLIRDNEHGQELFLSENGYAMLQVEKGNHILNIKAKARLKCTNALFVCSTYCQPQTLVFGFRKRLCLYWHI

SEQ ID NO: 268661 - protein, 74 aa, Zea mays
  Clone ID: MRT4577_176618C.1.pep
HTVHKIPFQSEKVWCRFKLPTSRSGLICHHHRCLDPLHPRVPLCSALNSMCGTAPLAASQRELRSGAPPHNGIY

SEQ ID NO: 268662 - protein, 139 aa, Zea mays
  Clone ID: MRT4577_176619C.1.pep
MAPPAGTGAGTEGRPARRRGTGTSPGRTKVWVEPPGKSHGHHHHQAPPPPSPPKRVAVVYYLCRNRHLEHPHFIEVPLAVPEEGLYLRDVMNRLNVLRGKGMASMYSWSCKRSYKNGFVWHDLSDESSGAGMFQRELGC

SEQ ID NO: 268663 - protein, 81 aa, Zea mays
  Clone ID: MRT4577_17661C.1.pep
IWPITSTKSSRGGRTPRGAGDYEMLRTVFFNGTPLDGHKIVDYHSRQPLRRCPSSSPLPVLIDTRRTTRGGDQHERRHRGV

SEQ ID NO: 268664 - protein, 77 aa, Zea mays
  Clone ID: MRT4577_176620C.1.pep
LLRQLGIQRYLDWTFPSQTNYNSIFYSYLNPTRLNSTQLGIQHNVCKPKTPKINSGCSGGDQYGEGCATVPRAENGW

SEQ ID NO: 268665 - protein, 136 aa, Zea mays
  Clone ID: MRT4577_176621C.1.pep
MAPPAGTGAGTEGRPARRRGTGTGTSPGRTKVWVEPPGKSHGHHHHQAPAPPSPSPSPPKRVAVVYYLCRNRHLEHPHFIEVPLAVPEEGLYLRDVMNRLNVLRGKGMASMYSWSCKRSYKDGFVWHDLSDDNLVL

SEQ ID NO: 268666 - protein, 687 aa, Zea mays
  Clone ID: MRT4577_176622C.1.pep
SRASFHHLSSPNLIHRGVRFELPLPPCAFLGLPSQAGLTVSFFHAQRAAPCDLSRGSSIPPSVNGSSSRVWGDGGRAGTAARHRHTGTSPGRTKVWVEPPGKSHHQTPARSLPPPSPPAPSVAAKRVSVVYYLCRNRHLEHPHFIEVPLAAPEEGLYLRDVMNRLNVLRGKGMASMYSWSCKRSYKNGFVWHDLSDDDLVLPAQGSEYILKGSELLDRSPPPPDRQHDGGASNPNVEENLKHRKEEESPQSRGSQEGCSSSSSPSASAAGKEISPPPATPRPQQQAQSAALPPPPSPSPASTSREDDPCRTAHSGSSGNQSPEPAARNAPPSEASSPGPSEYRVCRPVGAQDAATQTDDSERDAAENHSTRVAGASTMDTTSDAEIQECHRRSSPLSPKVPETVRESPPAVCSSDAASPGGRVETLESLIRAEASRRSSFRTLEEGHMLGPVGVKLKPANLLMQLITCGFVSVKEHRGFGFIPTYRPRFTQVEFPSPVFSTPVALRHLDRIPCNTKATGSTRAPEPECFSGSLVVETKQQDEPGRGIASLKRSSSYDEDRVYRAAHPKSDTESSCEPGSFRCLPQTIRIISCKQSRSGTVLSPPASDVRNGSSQQEHSTMSSPLGSSKSASNRMADPSPPGKLSCARAESLFREEKDMIKIEERLPSGARVIIQSAPLCEESDDSSE

SEQ ID NO: 268667 - protein, 83 aa, Zea mays
  Clone ID: MRT4577_176623C.1.pep
INNRQAPTDLPYKHSRRLNSETHPPCSHSSSAVCGVLTRRPIDSLASYLPLVSFSFFPFFLRHVGCLCQAIYKWLALWMLSID

SEQ ID NO: 268668 - protein, 118 aa, Zea mays
  Clone ID: MRT4577_176624C.1.pep
VLEGPAVSVKDVYTFEYPVYPPQYSHEGRLQTVIKVNPITDTALIRPDLAGPITMGRITHEPPPTVGMWEARRHHAGPSSATPERGGAKGSHRSSNGSRPRPALACCGCSLLQSDEET

SEQ ID NO: 268669 - protein, 86 aa, Zea mays
  unsure (1)..(86): unsure at all Xaa locations
  Clone ID: MRT4577_176625C.1.pep
DGNGIHKKRQAVVIDSSRWARVRYTSFVSDILCICIMYRYVLLTTSADYNVKKKKKKKKKSTLRCYHCLRAISGVLAXVAGGSGLG

SEQ ID NO: 268670 - protein, 39 aa, Zea mays
  Clone ID: MRT4577_176626C.1.pep
LLTNPYQSNPFTEIIHKIEGQYDSGPIGRRHCCGRYWGP

SEQ ID NO: 268671 - protein, 142 aa, Zea mays
  Clone ID: MRT4577_176627C.1.pep
SLSILYQISSCEAGLKDHIKKAKTLLEELECLVENVYGITLTSSLSALEVSDSHCLDNMPSTDCYAMEEDKCADHLDMDVSLVTVMVMVRNMLKLDYTMQEKIVTALSLKTPASELEGYCLMWDLRPYIDDDVMRLAWNMCP

SEQ ID NO: 268672 - protein, 102 aa, Zea mays
  Clone ID: MRT4577_176628C.1.pep
KVSRAFVTFVEAMERVPPVPPAKVFPVLTQDAPGVIFLMVRYDLFLVILESFRIFRICKNRLRQVNKACYACPAWPLFFYSYRLKRKNFEGFGGHRVVMHGI

SEQ ID NO: 268673 - protein, 41 aa, Zea mays
  Clone ID: MRT4577_176629C.1.pep
NQPWDFTDPMPFLHYLTNLTQHAQQVHNALFNILYMHRSHT

SEQ ID NO: 268674 - protein, 488 aa, Zea mays
  Clone ID: MRT4577_17662C.1.pep
MVTVEGEREPGAASTLLPPALSSPFAAAGYSALHPGTPATPTPSSAAGYSALHPGVPAPRPPATRSGAPSSVLPPAPVSGAMKIAVEGCMHGELDIVYDTLRRLEEAEGVKIDLLLCCGDFQAVRNENDLQCVSVPQKYRTMNTFWKYYSGEAVAPYPTIFIGGNHEASNYLWELYYGGWAAPNIYFLGFAGVVKFGNIRIGGLSGIHNKHHYHLGHYERPPYNKDTIRSVYHVRHYDVLKLMHLKEPLDVFLSHDWPLGITEYGNWQKLISVKKNFEDEVNNRTLGSKPAAELLNKLKPPYWFSAHLHCKFPAVIQHGKNGPTTKFLALDKCIPGRNFLQVIDIPSNPGPYEIQYDEEWLAITRKFNSVFPLARTQFTMRDEQLDTQEDRQWVRSKLNTRGAKPFDFVQTAPSFNPSSTTSKQSITVCCRNPQTESFLQLLELPYLLDSSKSEMFGRNESTSQTGNTLDNEDIELPDEDEDALEDDE

SEQ ID NO: 268675 - protein, 60 aa, Zea mays
  Clone ID: MRT4577_176630C.1.pep
KAEAYSYSRGHAECSVLGSKKSREMIWHQVKLPLYTGSTHAGHTNPCFFHPFVSHVALRR

SEQ ID NO: 268676 - protein, 73 aa, Zea mays
  unsure (1)..(73): unsure at all Xaa locations
  Clone ID: MRT4577_176631C.1.pep
MGRGRGDDAYNTLMTVTALTKHVNRSDFVDXLRPXVINDVRTVSXSQLFHPEQLIYWKEDSXTNFARDHYSIV

SEQ ID NO: 268677 - protein, 38 aa, Zea mays
  Clone ID: MRT4577_176632C.1.pep
KKKKKKKKKKKKKKKKKKKKKKKKKQKKKKKKKNSRGG

SEQ ID NO: 268678 - protein, 53 aa, Zea mays
  Clone ID: MRT4577_176633C.1.pep
KHKNSMPLLSRACGTNAGGCPILQLHLYLLYKLLKTCVVYLLHEIARNDVDPL

SEQ ID NO: 268679 - protein, 21 aa, Zea mays
  unsure (1)..(21): unsure at all Xaa locations
  Clone ID: MRT4577_176634C.1.pep
XXXFYXMXXRPTLTFSXQFNL

SEQ ID NO: 268680 - protein, 75 aa, Zea mays
  Clone ID: MRT4577_176635C.1.pep
PPYINNFGPFPDYLLKKTPNPSGPKGPPYYFGEIPLGPPFKQAPPALILLNLPAVHLQTKKTPPGVFCGPKTQHL

SEQ ID NO: 268681 - protein, 190 aa, Zea mays
  Clone ID: MRT4577_176636C.1.pep
VAPARQHPISSLEPASRRAPPHVLFPARPWKLRPAFVPIAPIRARQGHLPLPSSTPFPATKFAVCPYVACCLDPSQVDLVMVLDLSLIRHVVDLAAPASRIVTLFTPSTCCPCWFGVRFRLPRRMHTSGARRCHVLVSIMSCATRSSVVCRVLHVLTTSNFQRSTVVRYAQPCDNHAIHGMCSRQKFRED

SEQ ID NO: 268682 - protein, 97 aa, Zea mays
  Clone ID: MRT4577_176637C.1.pep
MPLTMLSYIFIHQMSVPISMFGCLQSMMLYYTAIVHSSILTPCIGRSQWCSSCAPSYLCTLTQVSTCVPTIKHSSTKFSRPTMWYKSSPVIASHNAV

SEQ ID NO: 268683 - protein, 32 aa, Zea mays
  Clone ID: MRT4577_176638C.1.pep
VALNPIASKKWFYVRIKGSVSKIGEGFQHLLV

SEQ ID NO: 268684 - protein, 121 aa, Zea mays
  Clone ID: MRT4577_176639C.1.pep
PAGVLFVFEQKQKIALAKQLKLRPRQVEVWFQNRRARTKLKQTEVDCELLKRCCESLSEENRRLQRELQELRALKLAGPHPQAPSSSPAAATQGVPVPVPPPLYVQMQMQLSSCRCCRPPR

SEQ ID NO: 268685 - protein, 84 aa, Zea mays
  Clone ID: MRT4577_17663C.1.pep
GKKPLRYQGKYLGWHNVNGGKNSRGNPPPNTHLSATTGKQMFLFLNQAGNYSKTLIQNHPNPGREAEPARQASRAGPKKPATRS

SEQ ID NO: 268686 - protein, 273 aa, Zea mays
  unsure (1)..(273): unsure at all Xaa locations
  Clone ID: MRT4577_176640C.1.pep
MAGKDLGEHAVPHASPNTASYKRKFVTGAVLGLAALALLRNCTTTPTSTWNFLSNPSKSRLDSQCHQAEPLFPSRKTKELDDMESYLTSDDFRNVAIERLSGAVKIPTQSYDDMGDIGADPRWDIFYSFAEYLSKTYPLAHATLQLEKVNTHGLLYTWTGTNPSLKPNLLMAHQDVVPVPDSTLKQWTYPPFSGHYDGKFVWGRGASDCKNQLMAILNAVEALIAADFTPQRTLILSFGXDEEISGGRGAKHLSAYLVEKLGHNSIAAIVDEG

SEQ ID NO: 268687 - protein, 55 aa, Zea mays
  Clone ID: MRT4577_176641C.1.pep
NSETSSTGTVAAEYARADYYNNDAEGLGFGVLPPSPLEAAKHPGHSALTTSPTEM

SEQ ID NO: 268688 - protein, 188 aa, Zea mays
  unsure (1)..(188): unsure at all Xaa locations
  Clone ID: MRT4577_176642C.1.pep
EAAKVAAKSEPGCSASPGWTPLSGKKRPAEDNTRETTGHGSASVPPGFSTRQKRKLQHAPDRHDGDTVEWEAARQLLQGVITPARDRAFLVADPFSVIATSYIATLQAANYATFSLGHALKLHEELEKAKAELAEAKKTTEAELKSAKEAAVQEFLGSEEHERRLVEEALKGYERGLEXEARRAAAPP

SEQ ID NO: 268689 - protein, 73 aa, Zea mays
  Clone ID: MRT4577_176643C.1.pep
LKFTPPAGLRHNMWRSQEFQNVWFFESKRPKRTLPLYFLRRSFHVHYRLLGSHQIVFVKLVDPKGLSPKPSIH

SEQ ID NO: 268690 - protein, 34 aa, Zea mays
  Clone ID: MRT4577_176644C.1.pep
TWSIFGAHLLPYSKNNYYWAVTAHGHNNGASHNY

SEQ ID NO: 268691 - protein, 148 aa, Zea mays
  unsure (1)..(148): unsure at all Xaa locations
  Clone ID: MRT4577_176645C.1.pep
MRQWISIXVGQATIHRANRSXKLYCRELGMQADGQTPSDXTIARSDDASNTMISETGAGKHATRAVFADLACSVIDEVRTGTYSQLLHPEQLISDKEDADNNXYARGHYTIGKKIVDLRLDRITKFATNCTGLQGLLEHINLAISNIH

SEQ ID NO: 268692 - protein, 145 aa, Zea mays
  unsure (1)..(145): unsure at all Xaa locations
  Clone ID: MRT4577_176646C.1.pep
PPEPRPLPPSESPKKGXEKKSPPPTRGXPKPSTPLTPPWAPKGAIAQPKDPRPPXNQPRPAEXPPPGNPLAGGKKKNPKPPRXKVADPLPNPLPPPKHGAPVKPRGIKNPPNYPKAQGEPVKKSPPPPPPRWPYSLGPPKKKGLN

SEQ ID NO: 268693 - protein, 69 aa, Zea mays
  unsure (1)..(69): unsure at all Xaa locations
  Clone ID: MRT4577_176647C.1.pep
MALAHXPFGLLLVASVGGFGGGDHGLTHIHLYVHETYTGANATGGGVLESPVGANLSVGSMGLVDHQIP

SEQ ID NO: 268694 - protein, 76 aa, Zea mays
  Clone ID: MRT4577_176648C.1.pep
LLQGAIFMHIGVFLLNKRAQKITCSFFMGNRAHIPHQGSGAGIPYIGGTLISLSLDYPPPMHQLHWLPPGHNGRCH

SEQ ID NO: 268695 - protein, 107 aa, Zea mays
  unsure (1)..(107): unsure at all Xaa locations
  Clone ID: MRT4577_176649C.1.pep
MPAQQLPYPQRGGAGASKIAGGPVGCAVVKMNDADDSKXMQQMVRSIRQEADEKANKVSVCDEEEFNXIEKLQLVEAEKKKIRQAVERKEKQVEVRKKIGATMQVNA

SEQ ID NO: 268696 - protein, 677 aa, Zea mays
  unsure (1)..(677): unsure at all Xaa locations
  Clone ID: MRT4577_17664C.1.pep
TEEGGGGATSSSYXVKCNDIGFYISVLCKPVRNDGVDGSLVSTEAIGPIIXMATGVESLELAGSMIEGGRLTFHAVYTGGLRGSCIQEWFRLHDDGHKDKLTADECLDLDLADIDCRIELMYTPVREDGVHGLPRSVTSDTILPGEPKGVNLILPECFEDNEISPIKTYFGGKEGTGKYTWFRNKEKLDNLEFDLVAESSEVVGETLKYKPSLNDVSSYLILYWVPTRRDGKVGDPLMAISDDPVMAAFPSVSDVHLEQKSSDVYCGLGIYYGGYEGLSLYRWYRESSDGTRLHIDGADSVTYEVTDADYSCRLLFGYTPVRSDGISGEEKLSEPSDVILPELLKIETLNFKGNQVERETLTAAEQIPYSEIQQHIWKNYKKEMKYQWFISNGSGGDQSFEPLATQCSRSYKVRFEDIGRCLKCECFVTDVFGRSSELVSAVTAPILPGRPKIEKLEIEGRGFHTDLYAVQGTYSGGKEGKSKIQWLRSMVGSPDLISIPGETGRTYEANVDDVGYRLVAIYTPVREDGVEGQPVSVSTEQIAVEPELYREVKQKLDDGSVKFEVLCDKDRTPKKAQVMGXLERRVLEVNRKRIKVVQPGSKTSFPSTEVRGTYAPPFHVELYRNDQHRFKIVVDGDTEVDLMVQTRHMRDRIILTIRGLAQKFNSTSLNTLLRIEA

SEQ ID NO: 268697 - protein, 433 aa, Zea mays
  unsure (1)..(433): unsure at all Xaa locations
  Clone ID: MRT4577_176650C.1.pep
SEIRNQIPSLFIPSLAPASYASMRHHQACSRAHQVGALVLVSATFLLTRLFDRFLLDTYSSAPINPGRPFSSADLRIYVYAEDEIQGLRALLRGRDGTINAATCLKGQWGTQVKVHQFLLKSRFRTFNKDHANLFFVPSYVKCVRMTGALSDKEINQTYVKVLSQMPYFRRSGGRDHIFVFPSGAGAHLFRSWAIFLNRSIILTPEGDRTDKRGTSAFNTWKDIIIPGNVDDSMVKSDAPAVQPIPLTKRKYLANFLGRAQGKAGRLQLVELAKQYPDKLESPELKLSGPNKLGRIEYFKHLRNASFCLALRGESSWTLRFYESFFSRCVPVILSDEVELPFQNVIDYSEISLXSISDERIEEMIGHGREMRCLWVYAADTEPCSAMSGILTELQKKVRRFHQSPETFWLHNRTIVNRDLIEFHSWRTPVPLP

SEQ ID NO: 268698 - protein, 110 aa, Zea mays
  Clone ID: MRT4577_176651C.1.pep
EQRTAIWLRPKGYKGFIRKLMIMPMNNIISPVRDRLTGVQRRLAWVAAQYRLELLGNEDAALSNNTANEIFRPCQGQSNSVHLSRPAGYRNLNRPLNPWWTSQSRSPSLR

SEQ ID NO: 268699 - protein, 88 aa, Zea mays
  Clone ID: MRT4577_176652C.1.pep
FVFPCNANINLCYFLRTNLFQRCVYAVIKSFLYVINCFQNTKNIYCYKNIFFAPKKMCLLFTQRFGLLIHNKFVLAWNKTTERHVLSA

SEQ ID NO: 268700 - protein, 181 aa, Zea mays
  unsure (1)..(181): unsure at all Xaa locations
  Clone ID: MRT4577_176653C.1.pep
MVDSRRSARARDDGARLHAATQEDYFLPFNFSPVDKCTALTACIDDGRCHRVSKGAPEQKQIMTLRKCQEDVTNKVHATIDKHAERGLAVARQVGVQIDLEHACMHDTCHGTLXQEVPEKRSKEDDGTGGPWQFVAPPLLPLLDPPXRRTTAEAHRRGPTWRLPARRRKRDKIAPIAVPPT

SEQ ID NO: 268701 - protein, 148 aa, Zea mays
  Clone ID: MRT4577_176654C.1.pep
SEEAPNDSASRIVPRFTSSSSTLSMAHAVGDVVPCAVPAMQAVSRIRCAARRLALIFYRHLPVASVSAVGHLAVLSNRRTIHPPREGSATLPVRCPRHGSRSNFTFAQLPPKLLGSGLPSQQQQWRCRAWPWRRQLLSGQAHEHYCRA

SEQ ID NO: 268702 - protein, 83 aa, Zea mays
  Clone ID: MRT4577_176655C.1.pep
GAAADNIITTTVANAASISGHVLSGRTALQIGDSLNIDKATLIIVHTDGSIVESIGLKGAVAHLMQGPQSHPTPLDLDQEIGG

SEQ ID NO: 268703 - protein, 75 aa, Zea mays
  unsure (1)..(75): unsure at all Xaa locations
  Clone ID: MRT4577_176656C.1.pep
ARRLXLLCCXPGPPLAPTXLLLRLALAGPPLXHSXLLTWXXDXWPPSLWPPGVLXCLVGWAWLPXXXXXXXXXXS

SEQ ID NO: 268704 - protein, 87 aa, Zea mays
  Clone ID: MRT4577_176657C.1.pep
GITWGGGGFSNNPWSVIKNYLRLWVGVCDRPESKWGWCAPLTIESSHFTRVWGGFLFYFWFSGKKGQGWGVYFYGWSKNSREWQRAK

SEQ ID NO: 268705 - protein, 187 aa, Zea mays
  unsure (1)..(187): unsure at all Xaa locations
  Clone ID: MRT4577_176658C.1.pep
MANALPGQKTGEVTATQNPFEFHVYGPRHLSSPSWWDLLRSSWXVYLLELDRQDKRDERTALAPQWWRHFMYRLSQTLVDERDGSIYGAVLEWDRRALLAGYAPFRPAGAPAAVVALRGTLLSGATFRRDVVDDLRFLAWDSLXGSVRFAGALAALRSAARRHGTGNVCVGGHSLGAGFALQVGKAL

SEQ ID NO: 268706 - protein, 250 aa, Zea mays
  unsure (1)..(250): unsure at all Xaa locations
  Clone ID: MRT4577_176659C.1.pep
GQKTGEVTATQNPFEFHVYGPRHLSSPSWWDLLRSSWKDPSYRRMVIACFIQGVYLLELDRQDKRDERTALAPQWWRHFMYRLSQTLVDERDGSIYGAVLEWDRRALLAGYAPFRPAGAPAAVVALRGTLLSGATFRRDVVDDLRFLAWDSLKGSVRFAGALAALRSAARRHGTGNVCVGGHSLGAGFALQVGKALAKEGVFVECHVFNPPSVSLATSLXGFAETAGEMWGYVRAWLPYVGSAXAADAGG

SEQ ID NO: 268707 - protein, 153 aa, Zea mays
  Clone ID: MRT4577_17665C.1.pep
DSIVSPIIPPTLASDQVVSSLGAMFFFCSMMVIFICVLNQIVTEKELHLRHSMQMMGLKTLVYWFSWWLSNAVLVLISAVVICGFGIAFGFSVFKNSNFLALLVTFFLFGLSMVTMAFWITTMVKASRTAIVIGIFLFTLGMLLESMVFSNSY

SEQ ID NO: 268708 - protein, 58 aa, Zea mays
  Clone ID: MRT4577_176660C.1.pep
QIYDISLRLQYNRLVCCASRTLLYSQAILTINPKHTLLRRESADHPVTFRSIPFSTND

SEQ ID NO: 268709 - protein, 129 aa, Zea mays
  Clone ID: MRT4577_176661C.1.pep
FLGFSAPSSFSGELIFFFPGKPFLPGTFFSSGEFFLPSPLPPGAFLFSPLPVSWLEKCNFPLASQGGGCFFFLSPGGGSSGPPFSLSKVWFFSPGFLLPFFFPPPLRFVCLGGSGFCPLVWSVQCFKLP

SEQ ID NO: 268710 - protein, 212 aa, Zea mays
  Clone ID: MRT4577_176662C.1.pep
LRCLGYFSEASLVRRAPAERPPDPTAADASVRAQPPRASHAGRRADLATQHSGSSHPAHRSSLPNGLQARREEWRGWKKGAGDGKGREMREKTVPPLSSSLLAGLSASCSGDGEVKTCAAGGVEWDRWRSRPCRPEEDDAVAFFLPVDKIKHSQMQKRTETVEGHGGRVSFIEGECRVSPGDGSSANAKDSSAPARSPRLQTARTATTHDCG

SEQ ID NO: 268711 - protein, 404 aa, Zea mays
  unsure (1)..(404): unsure at all Xaa locations
  Clone ID: MRT4577_176663C.1.pep
MANALPGQKTGEVTATQNPFEFHVYGPRHLSSPSWWDLLRSSWXYSHLIFCEAHDKSSVSLVLGLGFLRKDPSYRRMVIACFIQGVYLLELDRQDKRDERTALAPQWWRHFMYRLSQTLVDERDGSIYGAVLEWDRRALLAGYAPFRPAGAPAAVVALRGTLLSGATFRRDVVDDLRFLAWDSLKGSVRFAGALAALRSAARRHGTGNVCVGGHSLGAGFALQVGKALAKEGVFVECHVFNPPSVSLATSLRGFAETAGEMWGYVRAWLPYVGSAAAADAGGXGQGSVAGAXGTAKWLPHLYINTNDYICCYYTDTAAGTATVTARGGSGGSKVAGGDGGIGKPGLARMLTVSKGPTKFLDAHGLQQWWADDVELQVALNHSKLIDRQLRSLYAAQPASPQVNQ

SEQ ID NO: 268712 - protein, 65 aa, Zea mays
  Clone ID: MRT4577_176664C.1.pep
YKLHPSSCVPSCINPSGQGHAAQNSLVGPVEGLPGPKRRQVYSIEFYRIYRNSVLCFKGPPIGFQ

SEQ ID NO: 268713 - protein, 45 aa, Zea mays
  Clone ID: MRT4577_176665C.1.pep
LKCCRVERVKLHAQVGRKRTCSHGVYARRLQGKERCVRLHGMLPQ

SEQ ID NO: 268714 - protein, 124 aa, Zea mays
  Clone ID: MRT4577_176666C.1.pep
ALNMSKITDIKAKIAELYKENCTKAEIEPNKALLRFLSEPETKSERLNIVFRGNNKLNFSCRLGDEDVILLCSALEPFADLIAHVDLSYNHITDTGMNSLSKLFGMIPNLESINLQGNQIEIDG

SEQ ID NO: 268715 - protein, 64 aa, Zea mays
  Clone ID: MRT4577_176667C.1.pep
ILKFSSHFDRQKPKIVTSLRTNWTQLPGYIVDDQNKDVANLMVPRSSAPSGPRLRAGQQVAAFG

SEQ ID NO: 268716 - protein, 153 aa, Zea mays
  Clone ID: MRT4577_176668C.1.pep
LKKKKKPKNKTKKKKKKKKKNKKKKLFFPLPHPPKGPFFWIPPPLGVLLGLRSPLAPFVLFFIVFPFPCPSFLRPLFGPPLSPSPFFPFSPFPFFLVGPWRKSFYPLPFPQFFPPLLFMGAPFSGVFLPSGFRAFSPNLPPFFPPPLPPRFFF

SEQ ID NO: 268717 - protein, 91 aa, Zea mays
  unsure (1)..(91): unsure at all Xaa locations
  Clone ID: MRT4577_176669C.1.pep
RRGPRGQXIRAXTGTPTPDQREHPRWGGTRPPPIRGXXXKVDMRPPTGPXXKXEXENPCFKQHGLRNEGKSYPRQAXIRVNRKEKTGLXAP

SEQ ID NO: 268718 - protein, 35 aa, Zea mays
  Clone ID: MRT4577_17666C.1.pep
LPTSGSMLSFRISRKTVNNHIRLWPMGTICLMKFC

SEQ ID NO: 268719 - protein, 86 aa, Zea mays
  unsure (1)..(86): unsure at all Xaa locations
  Clone ID: MRT4577_176670C.1.pep
VPSYHLKGSFRPFGNTGTDTHREAGHMMAKISTFYDSTSWGGGGDTTSHRVFSGGQGGENPPGMVTXFWVRYLVFIGALLCLAWAX

SEQ ID NO: 268720 - protein, 103 aa, Zea mays
  Clone ID: MRT4577_176671C.1.pep
GCPVSHLQRCFSMGPLGSRTKNLLGNGSGKTPPRRCKVKFPPGSCQAGLFSGPALCPRRRSGKISPAFVVRKKKGKKKLSGPGHFLFHGQSVPGGLFCNYPPC

SEQ ID NO: 268721 - protein, 42 aa, Zea mays
  Clone ID: MRT4577_176672C.1.pep
DVFTFLDTFFAMHLAIHYVYIQSKRHVSKNAKTSYNLERSDY

SEQ ID NO: 268722 - protein, 35 aa, Zea mays
  Clone ID: MRT4577_176673C.1.pep
LAKTWASRVERRRCRIRRQSIVIESARGEIKMAAV

SEQ ID NO: 268723 - protein, 77 aa, Zea mays
  Clone ID: MRT4577_176674C.1.pep
HCQTAPRGRFVFKGLPTKLHMLSRPGSNPPGFVGMHATAQQTPGNRGWVIFVLGQPLLYVPGPWGDGLIKVPSAPVR

SEQ ID NO: 268724 - protein, 88 aa, Zea mays
  Clone ID: MRT4577_176675C.1.pep
KLHWWEAVKFFCRNLEALIPQLINQLHQVQHSEKVSYYIGPPSTIILSLDNMEHFYLQAHPTTQNFTIRERCIVLRQCRQQRLTKPES

SEQ ID NO: 268725 - protein, 90 aa, Zea mays
  Clone ID: MRT4577_176676C.1.pep
CRSVGSILGLFTNSVTVSCHCCWDSEDGGEKCSSGLQWPSSRYQGIAGRLASGRRVLRHHLRAVVTRTFGEGGGQRRRAKGGAGVGNGGG

SEQ ID NO: 268726 - protein, 68 aa, Zea mays
  Clone ID: MRT4577_176677C.1.pep
NYYNKGGVLFEKGLVNSQHKSKSTQNHQKGPKKIPTHTQENKLSQNTKATAQLTHLVPTIPTPDHNTP

SEQ ID NO: 268727 - protein, 62 aa, Zea mays
  Clone ID: MRT4577_176678C.1.pep
IPPSHRAFMSVAQGPQILCILITFYVGNLCINHYLYTKNPTSVYQYNCMFNHDLEYWVPLIY

SEQ ID NO: 268728 - protein, 37 aa, Zea mays
  Clone ID: MRT4577_176679C.1.pep
PNFKMVWGVPVFLICQRLNVSLKKKRFSKPKKSRLFG

SEQ ID NO: 268729 - protein, 143 aa, Zea mays
  unsure (1)..(143): unsure at all Xaa locations
  Clone ID: MRT4577_17667C.1.pep
MTIDLRCPVGQMKKNTRSAPKTHDSXYLLLVKIYRLLVRITIINFNDVIFFSVLMRITSRPPISMSQLVNVMQYYEKNXYAVIDVTEHXDKRIXQCPPTRGTALRLTQTAILRIAHAXGQRLTFDQLALRDPVGQNSLLLRPP

SEQ ID NO: 268730 - protein, 82 aa, Zea mays
  Clone ID: MRT4577_176680C.1.pep
DQYPHPTALAVGGVASCPLMTCICVENEQQSVVLVPCVLSSQPVRYGLWPVAVEPACCRFKCPLICLGNVVKAVSLFKITPK

SEQ ID NO: 268731 - protein, 62 aa, Zea mays
  Clone ID: MRT4577_176681C.1.pep
GAFFFFFFEWCLDLSFIYRLLSYGYEIPHDRLLTVAKKIDNVETGWCLGAAIAILGELEHTQ

SEQ ID NO: 268732 - protein, 33 aa, Zea mays
  Clone ID: MRT4577_176682C.1.pep
PLKVTVNKVKRYEQLVNVNSRINIYKPLISFDL

SEQ ID NO: 268733 - protein, 130 aa, Zea mays
  Clone ID: MRT4577_176684C.1.pep
MSSSVLRAAADRAIRRQALTLTDAAASRIRQLLSLRQRPFLRLGVKARGCNGLSYTLNYADEKGKFDELVEEKGVKVLIDPKALMHVIGTKMDYVDDPLKSEFVFVNPNSKGECGCGESFMTTGSKGSPS

SEQ ID NO: 268734 - protein, 102 aa, Zea mays
  Clone ID: MRT4577_176685C.1.pep
MELPMGALLLALLTVSASSAVATLAVTAPPPAPARAPAPVTAPAPAHASPQAQDAEGLLMNGNFETAPRKVNKTLIVGRHSLPGWTLRGHVEYVLGGPQPGG

SEQ ID NO: 268735 - protein, 102 aa, Zea mays
  unsure (1)..(102): unsure at all Xaa locations
  Clone ID: MRT4577_176686C.1.pep
WHWAGLADTARAGGGIGNYWGQNGKKGTLAQTCATGNYRVVNXVRFLPTFGRGQTPELKLEGHCDTXKSGCTGEGAXTKTYQRMSAKGLRSIXGGVGRYRLS

SEQ ID NO: 268736 - protein, 59 aa, Zea mays
  Clone ID: MRT4577_176687C.1.pep
PALLVGPGLSRIPWVRVWFPPPPGFPCCKKKKKKKKKKKKKKKKKKKKKKKKKKKKKKK

SEQ ID NO: 268737 - protein, 107 aa, Zea mays
  Clone ID: MRT4577_176688C.1.pep
MATALKSFLNSPVGPKTTHFWGPVANWGFVVAGLVDMNKPPEMISGNMTAAMCVYSGLFMRFAWMVQPRNYLLLACHASNESVQLYQLSRWARAQGYLEKKEPETQQ

SEQ ID NO: 268738 - protein, 108 aa, Zea mays
  unsure (1)..(108): unsure at all Xaa locations
  Clone ID: MRT4577_176689C.1.pep
MATALKSFLNSPVGPKTTHFWGPVTNWGFDIAGLVDMNKPPEMISGNMTAXGGLPGIVVSQCMFDGSNQTAVDAYMFLYYXAMCVYSGLNMRVAWMVQSRNYPLLACH

SEQ ID NO: 268739 - protein, 50 aa, Zea mays
  Clone ID: MRT4577_17668C.1.pep
PCLVSHLALGAFTTAIPHLALRGLHPPLIFRDEAQAGHVGACRRGSLKHR

SEQ ID NO: 268740 - protein, 96 aa, Zea mays
  unsure (1)..(96): unsure at all Xaa locations
  Clone ID: MRT4577_176690C.1.pep
QSTRXRITLRQHPRGXRNPLFELGSRIPLVRTSYESVVQRPCKASEGPVPGPSPGRHTLARSLRASSSSLPPAPVGFGVWTPEPIPQSRSFSRNTG

SEQ ID NO: 268741 - protein, 117 aa, Zea mays
  Clone ID: MRT4577_176691C.1.pep
MVLLKYLCLRSTDIKYLPRNIHKLKYLETIDIRETEVQRLPATVGKLQRIKNILGGDKRARKTLKLPREFKGTTRTLRILSGVEIAEGSTTAASDLKYFTGLRKLAIYKIHQNEDIF

SEQ ID NO: 268742 - protein, 115 aa, Zea mays
  Clone ID: MRT4577_176692C.1.pep
SVFHDPPEGSRGPPKFGDQGPKGTRGGNFLKSALQRSLLVFAELAALLPPKASKVSNGCHRFLKSAPHACKTPIFEWSWSFISFLASVGFLRLSLFMKHPRLGGMPKWAGPPFLL

SEQ ID NO: 268743 - protein, 46 aa, Zea mays
  Clone ID: MRT4577_176693C.1.pep
RGRKKVEEELKEALASLESQKEETIKALDSQIAALSEDIVKKVLPS

SEQ ID NO: 268744 - protein, 41 aa, Zea mays
  Clone ID: MRT4577_176694C.1.pep
KKKTPLPPDKQNPSPGGLAHFLNQQAREVSLIKKGQVAPLN

SEQ ID NO: 268745 - protein, 58 aa, Zea mays
  Clone ID: MRT4577_176695C.1.pep
KKKKNLKQQKKKKKNEKLQIIRFLSYALLHLYFLLIIYNHLPTLHCTQLYYTLNCKNP

SEQ ID NO: 268746 - protein, 68 aa, Zea mays
  unsure (1)..(68): unsure at all Xaa locations
  Clone ID: MRT4577_176696C.1.pep
IMERKNNGTKEKNGPSRTQSRRSPNEWWWSSTTMSAXGLSARIIFLAYLTLSKNTPAHDVLPPVKEKS

SEQ ID NO: 268747 - protein, 146 aa, Zea mays
  Clone ID: MRT4577_176697C.1.pep
IGSASKATSIPHFYWQKKKKSSNLMHVNCHVEPPRKQMKRHRNRTSVPCQCEGKNTPPGNSENNVFNSTFLFTLLNSVPIRHLTTSFAQLSTCPISTELSTPYHLHQQAAQEQSTPHHHASGRLQRRVYRLSAAEVSTLLGQGGKD

SEQ ID NO: 268748 - protein, 92 aa, Zea mays
  Clone ID: MRT4577_176698C.1.pep
TGPRYPKAQYSSIQSLAGRGHPSPTISHAQGAVVFSPLEKTGSSLPWPIFRACGPLKKSLIIKAFIPLQSLNNPGGSFPVPTPRPDLKTFHP

SEQ ID NO: 268749 - protein, 69 aa, Zea mays
  Clone ID: MRT4577_176699C.1.pep
VNMASKPPMVFDQPLVTPIINVDPHFRPLFSNSWKDEFLFPFNQYMANVSPVIKSNVFRNVKFALDHPV

SEQ ID NO: 268750 - protein, 53 aa, Zea mays
  Clone ID: MRT4577_17669C.1.pep
GILITYPWAVLTPGIKIPLGGEKTRAQFISTPHRFVSPPFKGNRTQSIGLRKA

SEQ ID NO: 268751 - protein, 67 aa, Zea mays
  Clone ID: MRT4577_1766C.1.pep
AACRKMVEDEMRRHAKAIDATRTATITGVQEKLPAVFQSMAAFSASLANSLEDACRAPQQNTNNMQS

SEQ ID NO: 268752 - protein, 137 aa, Zea mays
  unsure (1)..(137): unsure at all Xaa locations
  Clone ID: MRT4577_176700C.1.pep
NPIXLQPYRMQQAVASGILAXSPLLLQQLSDILQQLPLEHVLTQNIKAQQLQQLALANLDVYYSLTXIIPFNQLTALNCGFYWHQQQLPFSXLPGAYXHQLLTFNQMTVLNSPADLQXTLLLTFSHLYXESPGSFLI

SEQ ID NO: 268753 - protein, 72 aa, Zea mays
  Clone ID: MRT4577_176701C.1.pep
EHKIIIRKAGWLATKIDLFDLCPFHVDELCNSVTQLQLRVYSNFNNKMVHLKCCIYTCSRQKHPTQLAERQN

SEQ ID NO: 268754 - protein, 69 aa, Zea mays
  Clone ID: MRT4577_176702C.1.pep
LVLAQPKRLYLQQLDPAAAPYLRLRLRGAVTSGRRVYPRRRRSRGRRPPVVESSWQCLPDACLDVVVDP

SEQ ID NO: 268755 - protein, 243 aa, Zea mays
  Clone ID: MRT4577_176703C.1.pep
GRPGHQNMSTGGVVYKDLLPIPDTDPTEHEGKSATLRDAPTDSHALALDGARVPPTEEKGAAQVEHQKEVVDLGWNEPKEHVAKPLVGGLDNEHVWMLVRRFNKQIYQVKEIPTAPPGGLDLNVADEEEFTPDKFRANLERLYMTIIIGIIGFANHIARIRSWRESRRTAWFCSAYFAAWTFDMIVPLLSVTLLTLIVHPPAREVMFPPAPIALVSSSGGVQKPKSGTLGSIDSVTGAPENTG

SEQ ID NO: 268756 - protein, 113 aa, Zea mays
  Clone ID: MRT4577_176704C.1.pep
QRGSKKKRKFFYQRWITNQGWGLVEAEVVGHGEEVAKTGRLHVIDGIEVLLEIPKAGAVVTEAGQGHIGTGWAIQLDGPLGYAYNLMLIGGGGARAGRGHARRAEKTRGCWCF

SEQ ID NO: 268757 - protein, 52 aa, Zea mays
  Clone ID: MRT4577_176705C.1.pep
VHRGSCLLHSARVMVFRYTCGGFWHASALALSVHRALIPKVAPVLGLPSRVS

SEQ ID NO: 268758 - protein, 101 aa, Zea mays
  Clone ID: MRT4577_176706C.1.pep
GGGGMNDLGWFKYLYNTFVTRKENHLQSVASAPPIFGYLVSFRCVKVNPHSSTCAWWAPICALVCAGVVSKVGVSHPCYGCYVVVEVAANSAVNYLKVRVP

SEQ ID NO: 268759 - protein, 113 aa, Zea mays
  Clone ID: MRT4577_176707C.1.pep
MAVAFLSSVHLLLLAVALVGMSANAATFTITNNCGFTVWPAATPVGGGTQLNSGWTWTVNVPAGSSFGRVWGRTGCFFNGNSGSCHTGDCGCALVCTLLGQSSLTLAEITIGG

SEQ ID NO: 268760 - protein, 33 aa, Zea mays
  Clone ID: MRT4577_176708C.1.pep
DGFVICLKHLEDLPPMVPMAKTASGCSRSRRSH

SEQ ID NO: 268761 - protein, 50 aa, Zea mays
  Clone ID: MRT4577_176709C.1.pep
QFVHHCEWRAFTCSNQRSPYSPEAFMSHAIGTARNPAAFGARVRRRPISR

SEQ ID NO: 268762 - protein, 107 aa, Zea mays
  Clone ID: MRT4577_17670C.1.pep
SVSTPLVGFSMFLFWSSLRSSSASADRYDCFCGLSYFPFNLAGKELVDAATRFLLIQNMLHHSAAGIKGHQQCLPKKQNPKYPNLEYLNLNFVLEFRMVSCKKKLDV

SEQ ID NO: 268763 - protein, 95 aa, Zea mays
  unsure (1)..(95): unsure at all Xaa locations
  Clone ID: MRT4577_176710C.1.pep
GGGALDHCSNKVQCDYNFYNKQVPCXRVMQKNKINHIFGAPPAKGYEGVINRWGVDCVGITTNRGVHKMACIGARHQDRVWYSGDIDGDNPPPSA

SEQ ID NO: 268764 - protein, 75 aa, Zea mays
  Clone ID: MRT4577_176711C.1.pep
HVSARQPQFLIGPVKPGSFCVSLAMQPLVPPHHELGSRYLSEMWSIVSRAFRSWQKCPCCHRRSYAFIVHSPQGR

SEQ ID NO: 268765 - protein, 28 aa, Zea mays
  Clone ID: MRT4577_176712C.1.pep
TLQLWSQISVCLLCISYGNNVMLHGMGL

SEQ ID NO: 268766 - protein, 99 aa, Zea mays
  Clone ID: MRT4577_176713C.1.pep
TAKNGQRETLPKFGVKKLEVSSRVGQKERLKNWKTKKKRLGKWRVPPFKAKKKKTLLIKKKSVYQSKKIPGPRGGGGFKKTKFGLGRPLRKRLNPFFFP

SEQ ID NO: 268767 - protein, 76 aa, Zea mays
  Clone ID: MRT4577_176714C.1.pep
KKGPSPWLIRWAFSKFFPFFQFCEKQGGVLHWKLNPSKGHGLSFPGKTSLLFFTLSWGNPRKLLGIGFLFKISNLW

SEQ ID NO: 268768 - protein, 129 aa, Zea mays
  unsure (1)..(129): unsure at all Xaa locations
  Clone ID: MRT4577_176715C.1.pep
MEAGGGRGSVHGHDRQQRHTAEGEDPXRSDQVQGAREPGALEGMAMGREPVEEEEEEVACHCCGFTEECTAPYIAGVRARYGGRWICGLCGDACCEXRXRTSPPISATEALDAHARVCRGASSRRRHPR

SEQ ID NO: 268769 - protein, 63 aa, Zea mays
  Clone ID: MRT4577_176716C.1.pep
AFFPKYDGSLATFVGCRVQHDNARGPQPAHYQTNTDANSKYLDNLPMERAPNNAGASAALNDP

SEQ ID NO: 268770 - protein, 98 aa, Zea mays
  Clone ID: MRT4577_176717C.1.pep
LEGIYLGETYKDHENIVIAKMDSTANEVEAVKVHSSPTLKFFPASADRTVIDYNGERTLDGFKKFLESGGQDGAGDDDDLEDLEEAEEPDMEGDDDQK

SEQ ID NO: 268771 - protein, 61 aa, Zea mays
  Clone ID: MRT4577_176718C.1.pep
MGAYKYVSELWRRKQSDVMRFLHRVRCWEYRQKPSIVRLTRPTRPDKGRRFCYKAKQGYVV

SEQ ID NO: 268772 - protein, 101 aa, Zea mays
  unsure (1)..(101): unsure at all Xaa locations
  Clone ID: MRT4577_176719C.1.pep
MYYRIDLLXGSAKHLLNDCXTKISLKTALTLANQMIRTVXHAHNGLLHWDLKPGYFLIGLRPXANQVFVNDYCPAKKYXDIQTYXHIPFRENTNFTQNTTI

SEQ ID NO: 268773 - protein, 247 aa, Zea mays
  unsure (1)..(247): unsure at all Xaa locations
  Clone ID: MRT4577_17671C.1.pep
MEHKETGCQSREGPILCVNNCGFFGSAATMNMCSKCHKEMAMKQEQAKLAASSFDSIVNGGDAAKEHLAAGSTAVAVAHVEAKTLITAQPADIAGPSEGAMDNPKGPSRCSTCRKRVGLTGFNCRCGNLYCATHRYSDKHECKFDYRAAAMDAIARANPRXVRAEKLDKILGKGPPLQSAEHKVPNQICATSSSCVFAALSFHHVGFCNLSCWAIVMHGTRASAAAPGPNGLLVGYVVKLLLWSSLC

SEQ ID NO: 268774 - protein, 477 aa, Zea mays
  unsure (1)..(477): unsure at all Xaa locations
  Clone ID: MRT4577_176720C.1.pep
MAAAEARAAWQRAANRCLVQEDRKRAPKLACCPSSAEQHGTNNGNCRNSADRPICSLMPLSCNPMHSNLPPDVRWWVQSQPNFGIQKDIVSKRLCSLGRDIHEKQVEDSVPQPKHEETLLCQAVDTSTEKIGDALEPPWMVSPAFTKYSLETGLEEMKTVGSYSQVSKCIETLSNCLYKDNEFPDFECIDPAPLKNPDKANFHIDAPWKGEKTRPWWQIADEDQLASLVAERATQHIENCDLPRPTQTVRINRTEPYTQKHIGDFGGPSSPAGRVSHPVPGHCDHIECTYSTGSTNELVLLYGNGVWEQHGSSDTYSAVQYFSSXHNRXKANKHSRMALSEXILEALRHSQTRAREADMAAKKAYNEKDDVIKLLLRQASHLFACNQWLKIMQLENIVLQLKNKEXIDSSHHXELPWLTLKEKPTQGQEQRDWTRRKGRRQKKAAGFFDAILFAVGLGLAGAGFLLGWTLGWLLPKF

SEQ ID NO: 268775 - protein, 151 aa, Zea mays
  Clone ID: MRT4577_176721C.1.pep
MAAAEARAAWQRAANRCLVQEDRKRAPKLACCPSSAEQHGTNNGNCRNSVDRPICSLMPLSCNPMHSNLPPDVRWWVQSQPNFGIQKDIVSKRLCSLGRDIHEKQVEDSVPQPKHEETLLCQAVDTSTEKIGDAEPWMVSPAFTKYSLETG

SEQ ID NO: 268776 - protein, 136 aa, Zea mays
  unsure (1)..(136): unsure at all Xaa locations
  Clone ID: MRT4577_176722C.1.pep
MILEALRPSQTRAREADMAAKKAYNEKDDVIXVLLRQASHLFACNQWLKIMQLENIVLQLKNKEHQIAAIIPELPWLTLKEKPTQGQGQRDWTRRKGRRQKKAAGFFDAILFAVGLGLAGAGFLLGWTLGWLLPKF

SEQ ID NO: 268777 - protein, 102 aa, Zea mays
  Clone ID: MRT4577_176723C.1.pep
VAERATQPISNCDLPRLTQTVRINRTEPYTQKHIGDFGGPSSRAERVSHPVPGHCDHIECTYSTGSTDELVLLYGNGVWEQHGSSDTYRCAFFSLAALPSRH

SEQ ID NO: 268778 - protein, 113 aa, Zea mays
  Clone ID: MRT4577_176724C.1.pep
MGGVQLDDLSELAVLRPIQTAVAARPPGDDAEDGPDAADTGCVTPTASSSRLMPMPRLDGGCGALDSTAGAAGAGCVTPAASPCPGARATVCPPAPRKPARPAPDNKRKRCCC

SEQ ID NO: 268779 - protein, 44 aa, Zea mays
  unsure (1)..(44): unsure at all Xaa locations
  Clone ID: MRT4577_176725C.1.pep
LRXNYHTKTGESYFSEVIQMVYIGSKTLRTDTLTVTGRSVYISY

SEQ ID NO: 268780 - protein, 77 aa, Zea mays
  Clone ID: MRT4577_176726C.1.pep
PSQLVLGALASQPASSYPRSSPPFSELDYMFDGRRPTRQPLQNGRAPADPDSGSGSAAGRRRRRLPGRRRHGLRHAN

SEQ ID NO: 268781 - protein, 91 aa, Zea mays
  Clone ID: MRT4577_176727C.1.pep
FWLILNKTCLRLLRQRSPTPPRNLCRIPPYFPKTSYKPAVCETHPSTYVLVSAAGSVLNRQVTRADVERRRCRVAVAIKSNTHTPPSHSVH

SEQ ID NO: 268782 - protein, 221 aa, Zea mays
  Clone ID: MRT4577_176728C.1.pep
MATPLAGKGPIAAAIPRSPPPLAEGGAGGSAAEAPVLIFVYFHKAIRAELERMHAAAVRLAMGRAGGDVATLEARCRFLFTVYRHHCDAEDAVIFPALDIRVKNVAGTYSLEHKGENDLFAHLFTLLQLDVQNDNAIRRELASSTGAIRTFVSQHMSKEEEQVFPLLIKKFSHEEQADLVWQFLCSIPVNMMAKFLPWISASVSTDENQDILDCLSKIVPE

SEQ ID NO: 268783 - protein, 150 aa, Zea mays
  unsure (1)..(150): unsure at all Xaa locations
  Clone ID: MRT4577_176729C.1.pep
KIDGPEFSNKSITYTIPPPSPKPWGGGEKPAPRPMGGRRAPKNPTPPSPQQGDPGPPTPPKSRGGGPPPREKPLNPPGGGEPPPGKQKNLGHPKPKGAEGGGPDLKKPKXAPPKDLSPGPKTERLPGGGGGPRGPPCRGARRHAPPPRGG

SEQ ID NO: 268784 - protein, 31 aa, Zea mays
  Clone ID: MRT4577_17672C.1.pep
KARPVVFSSWAALGSLAVTRDLLVSLFSSAY

SEQ ID NO: 268785 - protein, 56 aa, Zea mays
  Clone ID: MRT4577_176730C.1.pep
QAPYTKSNVGGNRNFPIFKFERKNNTLGMVQSQTPGGKMDLKGPLNALLCCRGNKQ

SEQ ID NO: 268786 - protein, 99 aa, Zea mays
  Clone ID: MRT4577_176731C.1.pep
FLCVHTYVTSRDADPKLCLGLTGEVSLDRSAPPCPLLSLPSSGTPISGLTAPYLSCEIHLKQALRRELPPSSSLSNTLSVVHLVRKMQSVAPPFSEDPH

SEQ ID NO: 268787 - protein, 102 aa, Zea mays
  unsure (1)..(102): unsure at all Xaa locations
  Clone ID: MRT4577_176732C.1.pep
TXPFPINIIKFHYKKFFFFPNITXYXKXNXIFFXNPQXPXSNIKISFXTLFTXKTPHPPLLFXIPLPPSNSSPPPLTHNLTXPLFYNPYISLHTNSLTLYPH

SEQ ID NO: 268788 - protein, 123 aa, Zea mays
  Clone ID: MRT4577_176733C.1.pep
FFFFFFFFFFFFFFFFFFFFFFFWGPKNSLIHCQNKFGATPINPTGLGPQNYFFNSFKKKIFCFGFLKPKKKKKPPKIQLLKAPWAKGFTWVWPWKYFPFKEKLALVKKNLMLLGFPNLRIPR

SEQ ID NO: 268789 - protein, 134 aa, Zea mays
  Clone ID: MRT4577_176734C.1.pep
MVETEKHMIFPLVYKLIELSLILPVSTASVERAFSAMKIINKPHNMILDEWFNHLMVPGIGDLIDPRCSAQKRRSYPLLPLKNVQIGLDYDILEAAYNFSEENKLGEGGFGPVYKGQFPEAAGIGVKRLASHSG

SEQ ID NO: 268790 - protein, 181 aa, Zea mays
  unsure (1)..(181): unsure at all Xaa locations
  Clone ID: MRT4577_176735C.1.pep
ATRLGESDFSTMQTEINLPFITVDAYGAKYFNITLTKSKXESLVDILIERTLIPXVNCLQDADISVMXVDDXLLMGAMTIVPEVLHIRVXICNDPPSKFDLPDVAVAMRTAIRNGXLHXSENELLXLMKDTPLSLAIRTLGGXIITRLCNRKSTIPSXNNKHFSTAGDMQTQGVSNVLLAD

SEQ ID NO: 268791 - protein, 569 aa, Zea mays
  unsure (1)..(569): unsure at all Xaa locations
  Clone ID: MRT4577_176736C.1.pep
GDELIIPCHALRGSRSLSNFTCHVSRKKTLGSRVDAPQKPNCRSLVQGLERQGLRRHLPSRFSVRAESRDGNTLTRLLDCVLKVFSRVYRVTGVLLYLTSRRGKLKEKGRRVTPRVGRFDLNQEPVHLFDLNVAAPVESVQRKDASEVVLNQVFQELLRRSKNGVLPRNATSEVVVMYNLGIRTVQRCWAEGKLSLDLGIMVSFASKKRGKCGRKPSPVNYERLRYVPLKERTTLEDLAKVLGVCKRTLLKHVKQEKVRRHTSSIKPHLTDENKKSRLQWCVDMLEHETLHDNPRFKSLFDHVFIDEKWFFITQKSERYYLLPDEDEPYRTCWSKNNIPKLMFLCATARPRFENGICTFDGKIGCFPLVTFERAKRSSINRPAGTMEVKSITSIKRDVVREFMIQKVLPSIKAKWPREDVNKPIYIQQDNAPSHIEVNDPMFCEATQQDGFDVRLTCQPTNSLDFNILDLGFFRAIQSIQYKKSAKTVQDLIPVVQEAFHEYRPCKANRMYLTLHQVLKETMKVHGSNKYXLPHMKKGTLERQGSLPVQVHCERSLVYEAMQKLATWNI

SEQ ID NO: 268792 - protein, 113 aa, Zea mays
  Clone ID: MRT4577_176737C.1.pep
FRNGKLKKFKHGGGHNPKGTQKKTKTWGVFQEKRKKQNYNQIGISDKKKTRPILCKQRPILQKDRIIQALNKNKNFLHLQFNVVGNKIQLLKKLMPKYLGVKNYPFKNGRQNI

SEQ ID NO: 268793 - protein, 75 aa, Zea mays
  unsure (1)..(75): unsure at all Xaa locations
  Clone ID: MRT4577_176738C.1.pep
AMLQGSXEPEGAELGEHHEDAQDRAEFEFGEVFDHHQIHTIEYDMGAVSNNEIKQIKKRKRKKSKKKKKKKKKKV

SEQ ID NO: 268794 - protein, 146 aa, Zea mays
  Clone ID: MRT4577_176739C.1.pep
MAEQGGAAGEAAGSDPPAPAPATAPAPAPALAADAAGQRSLPTPFLTKTYQLVDDPAVDDVISWNEDGSTFVVWRPAEFARDLLPKYFKHNNFSSFVRQLNTYGFRKMVPDRWEFANDFFRRGEKRLLCDIHRRKVAPAPAAGLAT

SEQ ID NO: 268795 - protein, 181 aa, Zea mays
  Clone ID: MRT4577_17673C.1.pep
MGQKETVQSQLDNFRRVAIDENFDDHAIRQWDQRNRSSESLPHNVSEDALSSFDTYDVVYGEQDGLGPKAFDVHPISILHQPRNHISDNIQIYQPNKEASSEVSEEHCKEVQCIETNELRRSPLFFPVDRYHVGTNIDEGKHDENITDTSDSAIKLYTCDSEPSSDTEKTNNDESLALRGA

SEQ ID NO: 268796 - protein, 67 aa, Zea mays
  unsure (1)..(67): unsure at all Xaa locations
  Clone ID: MRT4577_176740C.1.pep
MKFNIANPSTGCQKKLEIDDDQKLRAFYDRRESQEVSGDARGEEXKVFFFKXXXGXDKQGXPXKQGP

SEQ ID NO: 268797 - protein, 78 aa, Zea mays
  Clone ID: MRT4577_176741C.1.pep
YPIDTMKMSSLTLLTDYGCERTFSIQHAAVLTSTAYVYLPHGDASITYSNLTTSGYQRPPVHLSPTVHLTLTSHEPSH

SEQ ID NO: 268798 - protein, 123 aa, Zea mays
  Clone ID: MRT4577_176742C.1.pep
ILFCLLFFFFCFFFDQRDAHSMEKRISQYFHETQGGNFKRPSICLLVKNNQRKLTENFLKNAQIPHACGSADRVKFSFNIWPHDRGILSRLFTSRELPRLQKLVKKSFEAHLMFYLCKHKGRP

SEQ ID NO: 268799 - protein, 60 aa, Zea mays
  Clone ID: MRT4577_176743C.1.pep
KTWPALIINPTTGGFKAVISKNGQTRYHPLLGLKLEKKKIIFSSNKMDAPTPKSLKVLYQ

SEQ ID NO: 268800 - protein, 146 aa, Zea mays
  Clone ID: MRT4577_176744C.1.pep
MGALVPQQAAVLLAALLVLAVSLLGKTAWKAEAAAPPAVVVGSVKCLDCSPSDVDAFKDLQVAIKCKSGADEGYETKARGPLDDTGVFRIPLAAELLRDDGSTDRDCFAQLRSSPDDTPCVGQAPPRMIAPASQVDGSSSTNTTYL

SEQ ID NO: 268801 - protein, 94 aa, Zea mays
  Clone ID: MRT4577_176745C.1.pep
YLLASSPRVRDTTDARLVIVRMRRSWGLVIEDRGVIRAWEATTGSFALLRALSSNTEFAHGLPEYSLSTPLSPENSTARELGHTVISQHSVPSV

SEQ ID NO: 268802 - protein, 112 aa, Zea mays
  unsure (1)..(112): unsure at all Xaa locations
  Clone ID: MRT4577_176746C.1.pep
RTAPPPPPPPGSPPYSRTXPPALAHRPPXAQKPRPRPRPRPRPRPXPSAKHPPPPPPPSSSSTPPPPPPAAALVRTTCNSTSYYALCVSALAADPSSATADVRGLSAIAVSA

SEQ ID NO: 268803 - protein, 123 aa, Zea mays
  Clone ID: MRT4577_176747C.1.pep
MASQADYKDRQFLAVIGDEDSVTGLLLAGIGHVTTGADAQKNFLVVDGKTDTSAIEAAFDRFTEDRKDIGIVLINQHIAERIRHRIDTYTAAFPAVLEIPSKDHPYDPEKDSVLRRVRRLFGE

SEQ ID NO: 268804 - protein, 84 aa, Zea mays
  Clone ID: MRT4577_176749C.1.pep
RVLRQVHPGLGVSGHAIQVLDMMMADMFERLADEAARLSKATGKATLTCREVQSAVRLVLPRELVRHAISEGTKAISKYMSYAA

SEQ ID NO: 268805 - protein, 175 aa, Zea mays
  Clone ID: MRT4577_17674C.1.pep
DIKEPLGRIRAEPSNRVHTTSVGYYSQHAAQDPISSCKEIKVPLRDGARDSGRDRTLELVVTSPREETPRWRQEQYALQILEDVQNSRIAERSRMEMEIRVLKAQVSSMERQVMNLDHFSEVKSRSSLNQQMVHLHKPYFRNCNGFKFFEINTNPCKFSVPSSTTYLLEVGLFYS

SEQ ID NO: 268806 - protein, 173 aa, Zea mays
  unsure (1)..(173): unsure at all Xaa locations
  Clone ID: MRT4577_176750C.1.pep
MDAAKEAAKQFARPTAGTVHRIAQCXTLKYNMKSRAAIGYTLAELMADNLPKNLAPTIDLRVEHQRMNKLLDGLQTIDPYLNTYNVKLSISPRGTPKDNAADYTXHDLDTHTHYQRDSMPYTRGEKRSNDADKVTDYTNSFAVYLKLLLERLNKKHLDTPHKTATEAKKEDKK

SEQ ID NO: 268807 - protein, 84 aa, Zea mays
  Clone ID: MRT4577_176751C.1.pep
RATTCPATMLSLFFFDLDPNLTRRRALSRSGPPQPRPPIPTPPHRPPSDPRRPTRWSSFSAWWLTQARTPDPSFGSFHIIFTPT

SEQ ID NO: 268808 - protein, 110 aa, Zea mays
  Clone ID: MRT4577_176752C.1.pep
SKPAILFGYIWLVKLNSGPQTVEPGDLVPSTTTGLPVLSSRKGSFWARFFGGPWANQTIEQSQQTLLAPTRLAVLQFALWPHACQYLEPVTHTRQPAPYIVWAYQACGFH

SEQ ID NO: 268809 - protein, 67 aa, Zea mays
  Clone ID: MRT4577_176753C.1.pep
FGVVGWCWGPGGRCVVVVAWSASVLGLVPRVRRPRLVGAVLLALGSRLAGLSSQKSNFGFPPNGPFS

SEQ ID NO: 268810 - protein, 377 aa, Zea mays
  unsure (1)..(377): unsure at all Xaa locations
  Clone ID: MRT4577_176754C.1.pep
MGDAVEDVVIAGAGLAGLATALGLHRKGVRCLVLESSPALRASGFAFTTWTNAFRALDALGVGDKIREHHLLYEXATGEAAAEVSLKIQSKSGPHEIRCVKRDFLLRTLADELPEGTIRYSAKVVAMEEDGVGGAKTLQLHLADGSTIKAKVVIGCDGVNSVVAQWLGLPKPILSGRSATRGLAEYPGGHGFGPEILQFIGHGFRSGVLPCSDTSVYWNYTWYPSPADGDAEESVAKMRSHVVAKLRGAKVPAEALEVVERSEMSDVASSPLRFRSPLALVRGSISRGGVCVAGDALHPMTPELGQGGCAALEDGVVLARCLGKAFALLGHERDEGRVVTAALEEYAAARRWRSIQLITAAYVVGFIQQSNNAVVRR

SEQ ID NO: 268811 - protein, 117 aa, Zea mays
  Clone ID: MRT4577_176755C.1.pep
MLHAEEKKGKVKRGWLAVRVGAAEGDGGSQRFVIPIAHLYHPLFRRLLEAARDAYGYDYSAGPLRLPCSADEFLRLRALVERETPPHAAPAPASSHRVHEGGHYSTLSPCTRAKVTS

SEQ ID NO: 268812 - protein, 408 aa, Zea mays
  Clone ID: MRT4577_176756C.1.pep
MGDAVEDIVIAGAGLAGLATALGLHRKGVRCLVLESSPALRASGFAFTTWTNAFRALDALGVGDKIREHHLLYERMIAFSAATGEAAAEVSLKIQSKSGPHEIRCVKRDFLLRTLADELPEGTIRYSAKVVAMEEDGVGGAKTLQLHLADGSTIKAKVVIGCDGVNSVVAQWLGLPKPILSGRSATRGLAEYPGGHGFGPEILQFIGHGFRSGVLPCSDTSVYWNYTWYPSPADGDAEESVAKMRSHVVAKLRGAKVPAEALEVVERSEMSDVASSPLRFRSPLALVRGSISRGGVCVAGDALHPMTPELGQGGCAALEDGVVLARCLGKAFALLGQERDEGRVVTAALEEYAAARRWRSIQLITAAYVVGFIQQSNNAVVRFVRDRFLSRLLSKTLVAMADYDCGAL

SEQ ID NO: 268813 - protein, 54 aa, Zea mays
  unsure (1)..(54): unsure at all Xaa locations
  Clone ID: MRT4577_176757C.1.pep
GRVCCKLEALASDRERHGTRPIPLGVVLVSTRSGVPFGYGLMARRRGSARXFLP

SEQ ID NO: 268814 - protein, 215 aa, Zea mays
  Clone ID: MRT4577_176758C.1.pep
MAGSLMMSGSFDPPAADPAGANPSRYPFWVLLDSTAYFANRDNATTVKGTTSAGHEFKVTFCLADPPAVSYFCVHFTGVSIQELCTTEPRVVSSTYYLALLCFPIRTALEYFVYKAFSGGKSIIQRVPPSPAYKHQWLSAVVPREGDNFLVADLSPGGDLGHYNLHIFSSETKEWSTKHLQLQAPSDVLSRDLPSQTDKVIFLGANTVEWVDLWR

SEQ ID NO: 268815 - protein, 44 aa, Zea mays
  Clone ID: MRT4577_176759C.1.pep
SRANVSAAEHGTEEGAMRRRRRCGRIGHRRYPPISLWVGGMTRP

SEQ ID NO: 268816 - protein, 40 aa, Zea mays
  unsure (1)..(40): unsure at all Xaa locations
  Clone ID: MRT4577_17675C.1.pep
RQHXHVARETRAWPSPKPAAAVVRRGGSGHFHRTLVDSEG

SEQ ID NO: 268817 - protein, 116 aa, Zea mays
  Clone ID: MRT4577_176760C.1.pep
FPYKKNGKPAGVQYQTGAIADFFSEDSDELGDLDLNHQECIAATKVPDLTLMVAKFDGVHGLGYQEISVENATPVCYNMVKQGLMSDPVFSLWYNRHADDRDGDELMYDAMDSKHY

SEQ ID NO: 268818 - protein, 179 aa, Zea mays
  Clone ID: MRT4577_176761C.1.pep
MGLTSTLSERKISRLLSSKNTSGASDFSTGDSSAMALIASTHRGMLNLSLSPPRVPGLLLSLGGATATARAASTASEAPSSPGLPEKRHTSPRGSSAGLLAAESCQEDGSGRTWVSGFGYRCPFIVWTSTPTRVSCWNDDSLDTGDGESCRFMYNRRLPVVALVSRLSAMYGATWMPKA

SEQ ID NO: 268819 - protein, 99 aa, Zea mays
  Clone ID: MRT4577_176762C.1.pep
RPFFFFFFFFFFFFFFFFFFFFFFWTLYLFSFFKKVKGFRGKFFFTSGLNFKSPNKKIVFKKLFLKEKNRFKNPAKQREKNFLFFWGQHFMTFLQNFYN

SEQ ID NO: 268820 - protein, 123 aa, Zea mays
  unsure (1)..(123): unsure at all Xaa locations
  Clone ID: MRT4577_176763C.1.pep
SLPFVFHYSELPDRGLWRRWGVPIAFKLVTKPAAASPAASHCIDLSLCPYVTSRVAFLPSPMNNWLLTANNSASPMAKEERFDRXKIIXFNIIRQVSILLEYNIIFVLLERAQFCYNADTYDI

SEQ ID NO: 268821 - protein, 179 aa, Zea mays
  unsure (1)..(179): unsure at all Xaa locations
  Clone ID: MRT4577_176764C.1.pep
VAILLAVHDISFLAFCWPGCFQQCQMSMIMPGIMPPMSIIPIPSITLSMMVXLMMSPILMPSMMPPIIKPSIVSPIAILSISSCCRFTPMMSPMMTPCIMPPIMIQSMVSPLITPHSLTVPPCLVVPSLSIIHQSTDHQFMFSASTHDDNQPCYSMHPSCWSAIKDKSVDCHRTGGRSS

SEQ ID NO: 268822 - protein, 99 aa, Zea mays
  unsure (1)..(99): unsure at all Xaa locations
  Clone ID: MRT4577_176765C.1.pep
LLTLQNVYWHAKALRLGFIHATPGVYTVARGDHLGKXYNTPXSVINFRCTDIPIPVPAMIKVTDPMNXSCDTRLQGGQGYTNYWIVKKESSMSMILYKG

SEQ ID NO: 268823 - protein, 210 aa, Zea mays
  Clone ID: MRT4577_176766C.1.pep
MVALLTGSLALSGAATITFFYSLGEHGLQTALLYYLKAQFGYNKDEFANLLLIVGAAGMLSQLTVMPILAPILGEEMLLIVGLLGGCTHVFLYGIAWSYWVPYFAAAFVILSAFVHPSIRTNVSKNVGSNEQGIAQGCISGISSFASILGPLIFTPLTAWFLSETEPFNFKGFSILCAGFCTLIAFVISLRMPGARSSTCKKTAVQHEQA

SEQ ID NO: 268824 - protein, 82 aa, Zea mays
  unsure (1)..(82): unsure at all Xaa locations
  Clone ID: MRT4577_176767C.1.pep
SIRVVARIRSRPRRKYREKKKAHTASLEEEEVHLRALNQRLVKKLQSHAALXAQVASFRCLLXVKLRGRIQGEIGPFPNQRP

SEQ ID NO: 268825 - protein, 142 aa, Zea mays
  unsure (1)..(142): unsure at all Xaa locations
  Clone ID: MRT4577_176768C.1.pep
MLVYSSCSLALSGAATITFFYSLGEHGLQTALLYYLKAQFGYNKDEFANLLLIVGAAGMLSQLTVMPILAPILGEEMLLIVGLLGGCTHVFLYGIAWSYXVPYFAAAFVILSAFVHPSIRTNVSKNVGSNEQGIAQGCISGD

SEQ ID NO: 268826 - protein, 98 aa, Zea mays
  unsure (1)..(98): unsure at all Xaa locations
  Clone ID: MRT4577_176769C.1.pep
HVLPDLKEEDGSLSLDGADSTGVVAKLSPANQRKCERVLLALFCHEPCRPCXSVSTDSTFSLDQPGGTLDLTLIRARLQEKLSPXPYSSPQEFAQDVG

SEQ ID NO: 268827 - protein, 61 aa, Zea mays
  Clone ID: MRT4577_17676C.1.pep
YTFNYIIIIVHDDNTKVENILTIDEHNKPKTHSNHIVTFYKPYIYYYQKKDNMSLCHKYMY

SEQ ID NO: 268828 - protein, 44 aa, Zea mays
  Clone ID: MRT4577_176770C.1.pep
PKHQPLLSCRHYLVIPHMIMCVVIPAIISYIDKQGWKEGISPIS

SEQ ID NO: 268829 - protein, 75 aa, Zea mays
  Clone ID: MRT4577_176771C.1.pep
SIKLLTTHLGYLTNPTEQIESNRRAMLGPANKRLGAVGISWARCGWTRSWRRSRPSRRPSGARTPCTGTCAGTAA

SEQ ID NO: 268830 - protein, 131 aa, Zea mays
  Clone ID: MRT4577_176772C.1.pep
PPVRRLPEVGSPESGYSFWLRAVGRGGGGGHDLWEREHYRQLVARAGHAVRAGARRRGAASAAAGRHVGASVVLEARARGPPPWPRLDGLGDAPAALGTQVKRREVTVPPGVPAGVGRLALSVIRPERTAL

SEQ ID NO: 268831 - protein, 121 aa, Zea mays
  Clone ID: MRT4577_176773C.1.pep
MQLVDMGCIYNTIDDFHFKSAGIPDLHPSVQQTYYQQRMSTFQAPVTSGPSGSETDLLKQVLDILQEPASIEKQHGVHFDEIVKRFKLPERKIMDALMYHLDAGHIYTTIDDYHFVPVIWG

SEQ ID NO: 268832 - protein, 37 aa, Zea mays
  Clone ID: MRT4577_176774C.1.pep
TSHSIQEQRQTLQRHNQSIQSTPSFEITSISLRLERG

SEQ ID NO: 268833 - protein, 1124 aa, Zea mays
  unsure (1)..(1124): unsure at all Xaa locations
  Clone ID: MRT4577_176775C.1.pep
IFELIHYIRTVQFHHEYPWIVSASDDQTIRILNLKSRTCEAVLTGHNHEDMWEYYHADGAEFGSESLDKTVRVWDIGAVSNMTVSPADHILRLTQMNTDLFGGVDSGVKHVLEXVGNAHSALFAAPTPGIPVSQIWTQRSSLAGEQAAAGNFDTAMRLLSRQLGIKNFVPLMPLFLDLHMGSHTYLRGLAAAPVISVAVEKGWNESASPNVRGPPALVFSFSRMEDRLKAAYKATTEGKFPEALRQFLSILHTIPVIVVDSRREVDEVKELIEIVREYVLGLRMELKRKELRDDVTRQQELAAYFTNCKLQRVHMRLVLASAMALCFKQKNYATAAHFARMLLENSPQEAQAKKARQVLQACHDKDDSHQLNYDFRNPFVVCGATYVPIXVAKRMFRAHTVDPDLFLPSKDSFVPYASLLRLGQMHQASSALLHSRDKRWXVRGXYILSSVSSSKXIIYMLPESXDXGISIIHAVEFFFXRFFANNIFFVCRNGXNKLIAVDASEYIFKLALLRKRYDHVMSMIKNSQLCGQAVISYLQQKGFPEVALHFVKDEKTRFNLALESGNIQIAVASAKEIDDKDHWYKLGIEALRQGNVGIVEYAYQRTKNFERLAFLYLITGYLDKVGFMCKIAGQNNNLMGQFHNALYLGDAKKRVEILENAGQLPLAYVTAVTHGLTEIAERIAAELGENVPSLPEGKPNSLLIPPAPLTACGDWPLLRVMRGIFEGGLDATGRADLEEDDEAAGADWGDEDLDIVDASEVVANGDGFDVEEGEPNEEDGEEGGWDLEDLELPPETETPKSVGNARSALFVAPTPGIPVSQIWTQKSSLAGEQAAAGNFDTAMRLLSRQLGIKNFVPLKPLFLDLHMGSHTYMRALAAAPVISVAVEKGWNESASPNVRGPPALVFSFSQMEDRLKAAYKATTEGKFPEALRQFLSILHTIPVIVVDSRREVDEVKELIEIVREYVLGLRMELKRKELRDDVTRQQELAAYFTNCKLQRVHMRLVLASAMALCFKQKNYATAAHFARMLLENSPQEAQAKKARQVLQACQDKDDSHQLNYDFRNPFVVCGATYVPIYRGQKDVSCPYCGSRFVPSIEGQLCTICELGAVGADASGLLCSPTQSR

SEQ ID NO: 268834 - protein, 88 aa, Zea mays
  Clone ID: MRT4577_176776C.1.pep
GAEPRLKVASTSYCIILPKVFLTLGPSVEKKTTNLRIAARTMFKDELDSSFFYSHPETGHVLHCPVTRRIKEPIKQTKIRRLSGPCKI

SEQ ID NO: 268835 - protein, 42 aa, Zea mays
  Clone ID: MRT4577_176777C.1.pep
IERPKNLEVLSDNCFGYKWITLTPEPSMPPISYHLARTGWIS

SEQ ID NO: 268836 - protein, 51 aa, Zea mays
  Clone ID: MRT4577_176778C.1.pep
ENISRVPSITIKVGISGENASFVIKYSDATISAASSFTYGSFSQGVFSPMF

SEQ ID NO: 268837 - protein, 62 aa, Zea mays
  Clone ID: MRT4577_176779C.1.pep
PICGIFSNQTGITSFDFSFSAAVFFFGWVGEAERGTRGNQTVQRNTHRSTIHFHNHRLHLRT

SEQ ID NO: 268838 - protein, 167 aa, Zea mays
  Clone ID: MRT4577_17677C.1.pep
QAFQYIKDNGGIDTEKTYPYEGIDDKCRYKAKNSGATDKGFVDIPTGDEAKLAAALATIGPVSVAIDASQESFQFYSKGVYFDENCSSEQLDHGVLAVGFGTDAATGQDYWLVKNSWGTTWGDQGYIKMARNKENHCGIATAASYPLEISDQLIDGLMDFWTSERIA

SEQ ID NO: 268839 - protein, 91 aa, Zea mays
  unsure (1)..(91): unsure at all Xaa locations
  Clone ID: MRT4577_176780C.1.pep
YFKLCVTLLDQLLMSCIKCIITSRPFFLSCQGGVCVISLVLSRYNMWYGYGLIPFPIGKVYFKFEFGSNWHVWIYLRLVMKVMQWXMFVVN

SEQ ID NO: 268840 - protein, 145 aa, Zea mays
  unsure (1)..(145): unsure at all Xaa locations
  Clone ID: MRT4577_176781C.1.pep
HASGIVTGDIDNTDKVLNEEFGSLNFSEKGNEDTFVSNQGLEYPMEHSAGASRKKSGNSERFSSSLLDGNTKLVSHEVCTKTLYYLSRFDRMKDAWDKDANSLPRRAVGTMEMIGKASAIRHAEIAELDKXINTLKEEILALEAA

SEQ ID NO: 268841 - protein, 64 aa, Zea mays
  Clone ID: MRT4577_176782C.1.pep
PPNKSKQRKVTHIFPQCVQTKQFRNELKLGHYYNCLLESNSTALIHAIINLTYGTPVIKLGQLY

SEQ ID NO: 268842 - protein, 104 aa, Zea mays
  Clone ID: MRT4577_176783C.1.pep
FFFFFFFFFFFFGFWFFFFFLGKPKYTPWNHISSKGPKEVQINPRGGTKQILKGPTRKKKSKKWPNMGGQKVSRNHSGTQFGNHLRAPKPKGGINRPQLLPFCF

SEQ ID NO: 268843 - protein, 173 aa, Zea mays
  unsure (1)..(173): unsure at all Xaa locations
  Clone ID: MRT4577_176785C.1.pep
RTQRRLSEDISTARTRERASARPYHYNYTALYANVNLLLLIQIGLTFSVARAEMTAFRLXRRMMLLTLXLREFEDLHYIFASDSFELLRRTEIYFLRNAERDVNARLFCEFLMASGGQLNASLNGVNFXSXYYFLYLLXILTCNRLPXNEAVIFILMHIFFAIGNDIKDLMKC

SEQ ID NO: 268844 - protein, 119 aa, Zea mays
  Clone ID: MRT4577_176786C.1.pep
PNTGFLPKIWVTNSKFNTIGILCLVPKQVSKQRLFAQYQFLAHFKGKGHYHSLKKTGTENKGLKKKTHRARVVPTRGSQARRRFPFFFFPFLPPRRRSWPPAWPSRRQGGWRQGSFFRV

SEQ ID NO: 268845 - protein, 36 aa, Zea mays
  Clone ID: MRT4577_176787C.1.pep
GIRYPTTVGKSCFIFTQLVPLEQCSHHSLTLSLWFL

SEQ ID NO: 268846 - protein, 55 aa, Zea mays
  Clone ID: MRT4577_176788C.1.pep
FNCSNSLLQLMVAATLVLLCTKPLETSLLNDGPWLLTVPSIAIIGREVVTLPICI

SEQ ID NO: 268847 - protein, 230 aa, Zea mays
  Clone ID: MRT4577_176789C.1.pep
MDQSIRTACEFLSSVLNHAESSSRELADAVSQRPVHLEMARTSFLQKLEHRVEASAADLQHIESIALDTVSFEELLGHCGEALKVYARHADALQSHLASFGYEPPDAQHPEIDVDVEDGDVGKVGDPGDRCLSVSRSVLRSDACLATLSSEGAHYGESPKKLYKNAESTDDGEKIMNEAEIMTPLNERNGQGNSFEGVIRASKGDYEQLPPYMKSLASWGRVAGGNIQTK

SEQ ID NO: 268848 - protein, 75 aa, Zea mays
  unsure (1)..(75): unsure at all Xaa locations
  Clone ID: MRT4577_17678C.1.pep
MAPKAEKKPAEKKPASRRXAEKTTAGKKPKSEKRLPGSKFSGKEGGEKKGKKNANKNVETYKIXIFKVLKQVQPD

SEQ ID NO: 268849 - protein, 311 aa, Zea mays
  unsure (1)..(311): unsure at all Xaa locations
  Clone ID: MRT4577_176790C.1.pep
MDQSIRAACEFLSSVLNHAESSSRELADAVSQRPVHLEMARTSFLQKLEHRVEASAADLQHIESIALDTVSFEELLGHCGEALKVYARHADALQSHLASFGYEPPDAQHPEIDVDVEDGDVGKVGDPGDRCLSVSRSVLRSGKRRFDSHSDAIFEESLKDLGFSDACLATLSSEGAHYGESXRSFTRMLKVLXGEKIMNEAEIMTPLNERNGQGNSFEGVIRASKEDYEQLPPYMKSLASWEELQEGISKLNSYLGGDKLQGSVALNQDRVAEIGLGRKGRACLLMLLRLNQLTMETVDGSTFYTLCKNNV

SEQ ID NO: 268850 - protein, 120 aa, Zea mays
  unsure (1)..(120): unsure at all Xaa locations
  Clone ID: MRT4577_176791C.1.pep
SRGFXGFVTXFSTEEAMRSAIEGMNGKELDGRNITVNEAQSRGGRGGGGGGGYGGGRGGGGGYGRRDGGGGGYGGGGGGYGGGRGGYGGGGGGYGGGGGGYGGGSRGGGGYGNSDGNWRN

SEQ ID NO: 268851 - protein, 51 aa, Zea mays
  unsure (1)..(51): unsure at all Xaa locations
  Clone ID: MRT4577_176792C.1.pep
PTPPXPHPKHISYXASRAIAAARAEQWPRTERTRARRGDGSCRLLQPKNPL

SEQ ID NO: 268852 - protein, 170 aa, Zea mays
  Clone ID: MRT4577_176793C.1.pep
MDQSIRTACEFLSSVLNHAESSSRELADAVSQRPVHLEMARTSFLQKLEHRVEASAADLQHIESIALDTVSFEELLGHCGEALKVYARHADALQSHLASFGYEPPDAQHPEIDVDVEDGDVGKVGDPGDRCLSVSRSVLRSGKRRFDSHSDAMYPLWFDFVRKARLALPR

SEQ ID NO: 268853 - protein, 118 aa, Zea mays
  unsure (1)..(118): unsure at all Xaa locations
  Clone ID: MRT4577_176794C.1.pep
GAAPPSLGTXSAPSXRCSPPSRSLTGSPWTSRRKFRRTTPCWVPGKCPTRVPPCPLGPRPCSPIDDCLPQPPPHKFXAVNWGWLAPKQKKLGASQQHSHLLPTWVLLKIQGPYYLLLC

SEQ ID NO: 268854 - protein, 107 aa, Zea mays
  Clone ID: MRT4577_176795C.1.pep
LFFLYLFLLHQELQEGISKLNSYLGGDKLQGSVALNQDRVAEIGLGTCTCYIYRAEQNRFVRLLFHWHTALVVDITFLFSAFIPCRAQRKSLFADAVATQSANYGDS

SEQ ID NO: 268855 - protein, 52 aa, Zea mays
  Clone ID: MRT4577_176796C.1.pep
GEQQTSGWYAFFSLGTESYCRLGMHYFSIRHNLEQTSGLIHRRIYVASYLRN

SEQ ID NO: 268856 - protein, 139 aa, Zea mays
  unsure (1)..(139): unsure at all Xaa locations
  Clone ID: MRT4577_176797C.1.pep
MSIDCLKQKIPPSFFYKDTYVGPNEVLKNGMYCSLYEVVEKTRIGSNMECLLQKLEKEKLVLVKPLGDRGYLFLLSPFQMVAPYEHQTVEXRVLHALLVLQEPRCLIITHEGIMNTTPLGKPENLADILKITQLLQFSL

SEQ ID NO: 268857 - protein, 57 aa, Zea mays
  Clone ID: MRT4577_176798C.1.pep
MQIKKFRDALAKHKADKCSLGPTWGLESELLALAANKDVQGDTTGFKHGRLRGGQDR

SEQ ID NO: 268858 - protein, 446 aa, Zea mays
  Clone ID: MRT4577_176799C.1.pep
DTEEASSSATSHHQSFPVQAAAIAAGGRLATASTAANFLRRAAALNAVHIRSLGATSLKPSASFKASIVVEHGTQPGGSQHLEPLNASAVHDVSGVAAVNQSGPLAGACSETKKALSTALAPVPCDSEEKEDDSEFCVITIDDLFPEDAKQPETVDTKAKQPQTTGLKANQPENADPKVMQQETMDPKSKQSDTVEVEIVDPKDKDMLEFDQYVASQGGHLNTDDLNKSKCTNSVSQAQGLVGSQQKLIPADGKGSPVTVVGKGKPVTAGVAATGRKTKFPVSHLAAGTPRGIVDTVNANAPNKTLVRRAAIPAPVPAGCQVRKDAMNSKGNQMTPGNAGSGVPASSQTSVAAQAASKANLPSSSSQAKPNNMVVNGGNRLVVNPPSSSQASAAVNDANRAATPQSSNPVNGANNREVNPPPSSQASTAVNGAANKGNVPAAARPP

SEQ ID NO: 268859 - protein, 50 aa, Zea mays
  Clone ID: MRT4577_17679C.1.pep
SRRPPPLSENKCLSLLCASLRQGGDASLRLPSTVTWRLGRQGSHDNDNLQ

SEQ ID NO: 268860 - protein, 245 aa, Zea mays
  unsure (1)..(245): unsure at all Xaa locations
  Clone ID: MRT4577_1767C.1.pep
MKVSVKTLKGSSFHIEVEPTDKVAAVKKVIENMQEQASYPADQQVLIHQGKVLSDDTTLEENQVVENNFLVIMLRQNKGSSSAAPAKVTANQAPSTQTVPATPPQTSAAPDAPAPIVPVSAPAATATASAAPAVAVSTEADSYGQATSNLVAGSNLEGTIKSILEMGGGTWDRDTVLRALRAAYNNPERAVEYLYSGIPEQMEVPAPPPSSQPVDPVQAVQPAQAGPNAXPLXLFXQSLPNDSLM

SEQ ID NO: 268861 - protein, 174 aa, Zea mays
  Clone ID: MRT4577_176800C.1.pep
CNTFCLHVRLIKPVHCSCASSLSTLLTATSRGDPHVCLRVVDDPAARRWTSSLAWTPYPRISYFSPLDMTSPDLPLLPLHDPALHRHDLLHHHQPDLRTVAPRRLQGPGADTQPEHRRPCVTCADASRLTSSHSQVRIRHSCRCPFTTVTFRITNSKNAPSLLLLISLFLDAFY

SEQ ID NO: 268862 - protein, 74 aa, Zea mays
  Clone ID: MRT4577_176801C.1.pep
SPGHSYNYRCLLEQVQRIMPSTFDKTFAEPGGSTYSLFVHWCYNIQRGEWYYLINEPIHVNMPHDILRFEGSIS

SEQ ID NO: 268863 - protein, 85 aa, Zea mays
  Clone ID: MRT4577_176802C.1.pep
HSLCTLIFLLFFIFNLFEIILNTQGKWGMNLCDVGNYLALNNLLFHHSKVALDICYTNYSGCCSCGVDFWMLHLRNYLSSTLVQK

SEQ ID NO: 268864 - protein, 54 aa, Zea mays
  Clone ID: MRT4577_176803C.1.pep
NLKRSRGTLPPLPHTRIAPGPDINHTQVEINYREYPSKCLITSGTLFITLIIKS

SEQ ID NO: 268865 - protein, 45 aa, Zea mays
  Clone ID: MRT4577_176804C.1.pep
RPYPYIPTCNYTCAPSQPFHPPNPTDGAVALRRGRRFPGESARFG

SEQ ID NO: 268866 - protein, 64 aa, Zea mays
  Clone ID: MRT4577_176805C.1.pep
PPPPLLQTVLPTTPLLPRAPPPFLGNGVPLVPMAPPSSTSSPINARGRPPPKSNPKVFLLVPAS

SEQ ID NO: 268867 - protein, 194 aa, Zea mays
  unsure (1)..(194): unsure at all Xaa locations
  Clone ID: MRT4577_176806C.1.pep
MGTERKRKVSLFDVVDETSVSGKLGRAASNGAAATAAGGNPSVNRWNGRPYTARYFEILEKRRTLPVWQQKEEFLRRLRDNQTLILVGETGSGKTTQIPQFVLETEGLGNRSMVACTQPRRVAAMSVSRRVAEEMDVTIXEEVGYSIXRFEDCSSHKTVLKYLTDGMLLREAMADPLLEKYXXVLXLDEAHERT

SEQ ID NO: 268868 - protein, 299 aa, Zea mays
  Clone ID: MRT4577_176807C.1.pep
MPWLPAQCRTESKHSMAMAQARVVALALCALLLVSGVARRAEAVSYNVGNSAGWDLSADLPSWADGKTFNVGDVLVFQYSSYHTLDEVDQAGFNNCSAANALLSRSDGNTTVPLTAPGDRYFICGSQLHCLGGMKLHVLVSQPAGGAPAKATPQSTPQTGSGAALGPSTDDAGLAGIPWLVLGGSHRATVGSMLLTWLNAAMVISCVIKGLLVHNVLVDTSSAADIIFVKAFRQMQEPEDKIHDATHPLCGFGGRQIVALGKITMPVTFGFINNTRTKQVVFDIVDMEYPYNAIIGRGT

SEQ ID NO: 268869 - protein, 94 aa, Zea mays
  Clone ID: MRT4577_176808C.1.pep
PTTPWWPSWTRSGTTSACPTATTSRHYVNMSVNFFDLYADVHGDALRITVRVIGHKVAYYGTHFIMHNIVTKLVIAVGEALALRLDEDQEQHLN

SEQ ID NO: 268870 - protein, 80 aa, Zea mays
  unsure (1)..(80): unsure at all Xaa locations
  Clone ID: MRT4577_176809C.1.pep
RLNPXYXGTYXFXKPNCNVXFIIKXKLRRVTPQGETAKSKKVVCDPSYLPDKVKKIGKVFRASAIMSHPIPNTAESHSAQ

SEQ ID NO: 268871 - protein, 59 aa, Zea mays
  unsure (1)..(59): unsure at all Xaa locations
  Clone ID: MRT4577_17680C.1.pep
YELAGMRHSIRERTAAPAAAGNTTAAIGPGFAIGSXALVLLALFGAFVRRAGVPVVARL

SEQ ID NO: 268872 - protein, 37 aa, Zea mays
  Clone ID: MRT4577_176810C.1.pep
VSRCSSRLVFFIICSYCFKKCFVAAKLLLQSVVACDI

SEQ ID NO: 268873 - protein, 261 aa, Zea mays
  Clone ID: MRT4577_176811C.1.pep
GQVKRQASGFLQDKYKQARLALGDVTPAELLAQEATNNEPCVPDAKTLACIADSAFDMDDFWRIAKVLHQRLSRAADWKEWRPVYKALVVLEFLLTHGPEDVPSEFLADMRAMHDLRSFNYVDDKGFNWGTCMQRRTDSVLLLLTDADRLREARRRAIRVSHEVRGGGVGGGSPTSSSSPSSASSSASSRTSRTWSFGGSSHYSDGPAMCLTCASDADYRHDKKCDAYTADDDCWASSNHKSSRWGGQVGRKRRRGPAPGP

SEQ ID NO: 268874 - protein, 55 aa, Zea mays
  Clone ID: MRT4577_176812C.1.pep
MQKQLCNSWCFSSLELAFSFLKKKKKQVKKPNQGLVWEPYFSKRFSFSNGKLGYF

SEQ ID NO: 268875 - protein, 69 aa, Zea mays
  Clone ID: MRT4577_176813C.1.pep
NYRAVHTCRQFEERILYKFFKQFAILRAKCLLTWNTAHAALVLSIEKPITHALSILLSLYIFPLLSHCN

SEQ ID NO: 268876 - protein, 87 aa, Zea mays
  unsure (1)..(87): unsure at all Xaa locations
  Clone ID: MRT4577_176814C.1.pep
MASNLLALLALQALITSPSYAIIITQRSLASSAIISHILPPVTXNNLXHPPIQAYMLQLAPAYHDLQQPIAQLQQHFLTHLNLQTIG

SEQ ID NO: 268877 - protein, 77 aa, Zea mays
  Clone ID: MRT4577_176816C.1.pep
SHSLASRQVSVKEIKKQPAYLEDSPRKEPFRCTPCLKSPVFVLPCKRWCPLQRINRRAGSFPRWEWRLWSNVHYHRL

SEQ ID NO: 268878 - protein, 111 aa, Zea mays
  Clone ID: MRT4577_176817C.1.pep
GASAEGAVFWWARGCPSRLVLGAGARAAGRSWGRATSRSWSAWGAPGWGAHVLSASGGAFSSRASAMPGASGGGAGLCWGAPPLVLLVSSLLLPVLGRAWFLCGWLVSVYL

SEQ ID NO: 268879 - protein, 65 aa, Zea mays
  unsure (1)..(65): unsure at all Xaa locations
  Clone ID: MRT4577_176818C.1.pep
MLRADFQQIDFSNDXYTCTVTSHGNTQEYLRPPSDDTLAPQTKECYESGNYTCLTVQSAMDEEQI

SEQ ID NO: 268880 - protein, 42 aa, Zea mays
  Clone ID: MRT4577_176819C.1.pep
MKKRRAHPVSSRFRPFEDVTFLLGVCERNLRKLNPTRETWEN

SEQ ID NO: 268881 - protein, 54 aa, Zea mays
  Clone ID: MRT4577_17681C.1.pep
INKWLAQLKCQPSYQPSSSTPCQIVQLVTFAKDNPLDQIVGDLISGVQTRSLLA

SEQ ID NO: 268882 - protein, 70 aa, Zea mays
  Clone ID: MRT4577_176820C.1.pep
PCFVFSPTRHDFYPVTDDSFIPAAPPLFIILGRRFRGRAGGPSKSPPLLLFLYGPDYNETHKNPVATFAW

SEQ ID NO: 268883 - protein, 141 aa, Zea mays
  Clone ID: MRT4577_176821C.1.pep
FDLPPDAHRTRYLALSYPSRRAAAIAEPGAGAGLVSPPPRSTLSFRLPRPPAHASAHLLGRLNAHAPLHLALADIAAAAPHPQLLLSSPSVDTIDGRAADVRRQAQSDRCCNGRDADLDMHTSAFLKGMQEATRFLPLPWL

SEQ ID NO: 268884 - protein, 84 aa, Zea mays
  Clone ID: MRT4577_176822C.1.pep
PIHHIFSTGGRGREKFWGGRESQVLNHPLDLTKGKKFRSLALQKRPRRKAKEKSPPWGRALGYSRKKYPAHTCLEPHATPPPRK

SEQ ID NO: 268885 - protein, 93 aa, Zea mays
  unsure (1)..(93): unsure at all Xaa locations
  Clone ID: MRT4577_176823C.1.pep
GIPWDYMGSPPPLFMVAXTXLFLFPGRFGLAPSPNPKATGGFKLEGRDSGLQRGAPPGFPLPDTLALGPVGPILGVGFVFGFKNPGALAQIMG

SEQ ID NO: 268886 - protein, 62 aa, Zea mays
  Clone ID: MRT4577_176824C.1.pep
MIVFYISASVVFYPPFSKHPFFALVLIHQFSVVADSYHTLATVGVLALIMLILFCGGLLPVL

SEQ ID NO: 268887 - protein, 102 aa, Zea mays
  unsure (1)..(102): unsure at all Xaa locations
  Clone ID: MRT4577_176825C.1.pep
VWGGGPVAPVSPRVGLVFPWPPGWAPQALWGGGGPASVSPXKENPKRLPAPLPRVPPRPGRVLLGSPPPQVVRCRWGYKGASDPRPGEENNPFSPFPQKMGG

SEQ ID NO: 268888 - protein, 75 aa, Zea mays
  Clone ID: MRT4577_176826C.1.pep
LLQSEVVETIGKLDDHYYGPGVTGDGSFSEDFPAAEEHWEPIHFWEGRSCFYLLQETGATSRPSALTSCCNQSTS

SEQ ID NO: 268889 - protein, 64 aa, Zea mays
  unsure (1)..(64): unsure at all Xaa locations
  Clone ID: MRT4577_176827C.1.pep
MKMVLAVYACQATTSDKYFHKIMPCPCAVLQGLYGAGAGLTTMMGAGGLYPYAEFLRXQPQCNP

SEQ ID NO: 268890 - protein, 460 aa, Zea mays
  Clone ID: MRT4577_176828C.1.pep
MVNGERRADAECTRASLLGRYEIGRTLGEGNFGKVKYARHIASGGHFAIKILDRSKILSLRIDDQIRREIGTLKLLKHPNVVRLHEVAASKTKIYMVLEFVNGGELFDKIAIKGKLSEHEGRRLFQQLIDGVSYCHDRGVYHRDLKPENVLVDRKGTIKISDFGLSALPQHLGSDGLLHTTCGSPNYIAPEVLQNRGYDGSLSDLWSCGVILYVMLVGCLPFDDRNLVVLYQKIFKGDCQIPKWLSPAAQDLLKRILQPNPMKRINVAGIREHEWFKKDYVPAVPHDDDEDVLPSPAPSIKPIDEPAQEKCSPINAFQLIGMASSLDLSGFFEEEDAAQRKIRFTSTHPPKDLFDKIESVVMEMGFKVHRGAGKLKVLKNSKCSRNPSSLLVCTEVFELGPSLYVVELRKSHGDSTLYRQLCERLSDELGACKTDQIARTESSSDDLSSVDGEAFPLSGF

SEQ ID NO: 268891 - protein, 68 aa, Zea mays
  Clone ID: MRT4577_176829C.1.pep
GEDDDDDDDDDPEANGEGGSDDDDDGGEDEEEDDDDDDGDGDNDEDDEEEEEEEDDDDVPQPPTKKRK

SEQ ID NO: 268892 - protein, 51 aa, Zea mays
  Clone ID: MRT4577_17682C.1.pep
LHCARISISWRSTVQSAPYFVAMTFSRKGRGDLLLSILPPCLNKKKKKKKG

SEQ ID NO: 268893 - protein, 74 aa, Zea mays
  Clone ID: MRT4577_176830C.1.pep
GGRPVGLKFHHGLTRGRGPRRRAVAMQVSSEPSHGQKASCWWCWRGGGWYWEWKEATHPGLERPRRRVGRNERK

SEQ ID NO: 268894 - protein, 127 aa, Zea mays
  Clone ID: MRT4577_176831C.1.pep
GLFVSFSTRILSKNKNATDFENKDDGESDDDNDEEGDDEDAENQEDDGGDEGSDDNGNEEEDDDDDDNDPAANGEGGSDDDDDGGEDEEEDDDDDDDGDGDNEEDEEEEEEEDDDDDVPQPPTKKRK

SEQ ID NO: 268895 - protein, 68 aa, Zea mays
  Clone ID: MRT4577_176832C.1.pep
LLTNLSAHTAGSACQHLFYAVQPTRTVWTTPSLYYHAQKARAPQLRLNSKRKTPCWQGSSPAAFQLIE

SEQ ID NO: 268896 - protein, 89 aa, Zea mays
  Clone ID: MRT4577_176833C.1.pep
RGPPPRARRKRQRQRKTAPPIRVEKNTDTVSRLHEDAYILGVQGPPDHWIMHRAIALPPLARHHRNGFCIPRFFFFFSMYARTSSCWRT

SEQ ID NO: 268897 - protein, 79 aa, Zea mays
  Clone ID: MRT4577_176834C.1.pep
RQHMRSAKTLYAARDHHLQHGRQPHHQMSTVFLAAPSTCPTSTLATILKFVNFLTSPAACPSSPTSTLAVIPKSVNLLL

SEQ ID NO: 268898 - protein, 80 aa, Zea mays
  Clone ID: MRT4577_176835C.1.pep
DAERVMWEMARAGRVVDDITRRALVDELSRAGKREDADRLAREMEQKGIVSARELRALLSSIRDDGDDNLDVYGSGRNTW

SEQ ID NO: 268899 - protein, 170 aa, Zea mays
  unsure (1)..(170): unsure at all Xaa locations
  Clone ID: MRT4577_176836C.1.pep
TLRSVSPLXSAMRGSXSDAAAKADGYVRSEETGXTDPATVHRMRHIQRTHPNKSNRTPRVICGSMHQSPKELKENNPKNQSVAAEDKDVGDMRKSLSDIKNDHYVVKGNKIKLKYXKAIAAYHKGESTATKKGPAKEEXEEHEEESDKCKSXVNDEDDEYVSEEDEDDDE

SEQ ID NO: 268900 - protein, 88 aa, Zea mays
  unsure (1)..(88): unsure at all Xaa locations
  Clone ID: MRT4577_176837C.1.pep
FLGVFXLGPFXXWLXXLXXXGLFXAVWPPCVVXXLPXGVXXXAXVLVXXLXPXPLAXXXGGGGXXGSWCGASPLRLGPPRSRRVAYRX

SEQ ID NO: 268901 - protein, 52 aa, Zea mays
  unsure (1)..(52): unsure at all Xaa locations
  Clone ID: MRT4577_176838C.1.pep
WLXTFGLIYVLVYVLESVDPGPVRVPGTFAGIPIYEAAIPRHRVLETSSGVW

SEQ ID NO: 268902 - protein, 55 aa, Zea mays
  unsure (1)..(55): unsure at all Xaa locations
  Clone ID: MRT4577_176839C.1.pep
ERNPARRNRSLKLLLPNPMVXTSSVCSGRELWTVSRSARYAYRVYPTGYLYYYLA

SEQ ID NO: 268903 - protein, 208 aa, Zea mays
  unsure (1)..(208): unsure at all Xaa locations
  Clone ID: MRT4577_17683C.1.pep
MNSSSSTMNEEPDALSVVNQLRDLAADPLNRRAIVQDQGCLPGLILFMDHPNPPVVHSALLALRYLAECRANREKMKGELGMMLSLQNVIQKTTTPGETKLLASEIYDILQSSNLADGDSFNEMNSRRRKAQFFLGTTNKRAKTVVLHIDGLDDTSRRNLCEEALXKIKGVISFTFQMAVXRCVVGIRSDLKAEALASGIASTKVMKA

SEQ ID NO: 268904 - protein, 49 aa, Zea mays
  Clone ID: MRT4577_176840C.1.pep
LMRARTQHQTPTNLKRRRPDSLVGHVMPGLGQMGARLGLSEASSGGDGR

SEQ ID NO: 268905 - protein, 57 aa, Zea mays
  unsure (1)..(57): unsure at all Xaa locations
  Clone ID: MRT4577_176841C.1.pep
GGRQIPMTXDFEHXAWAIXLLPPLSYTXSSPSAQSPFRGHGWAQHIGLPXXCKIPRV

SEQ ID NO: 268906 - protein, 57 aa, Zea mays
  unsure (1)..(57): unsure at all Xaa locations
  Clone ID: MRT4577_176842C.1.pep
FNFLLVLSPPPLXXSFIGCAQRAEVLHGLGLLFPSYPLFVFGRVAPSPTLGGRTRVG

SEQ ID NO: 268907 - protein, 72 aa, Zea mays
  Clone ID: MRT4577_176843C.1.pep
IIPWECQSIRSPFGSRFPEIRFNDLVISKPRLSDVPNDMQDHQPALSKVLRGFCLEMFGRLSSVKQPIDSMF

SEQ ID NO: 268908 - protein, 50 aa, Zea mays
  Clone ID: MRT4577_176844C.1.pep
KAQQLIRFLNEGFVCKKNFPTDKQRAYFITINVVGDQCYYMFVCYEVFEI

SEQ ID NO: 268909 - protein, 136 aa, Zea mays
  Clone ID: MRT4577_176845C.1.pep
PGGIPAQSRDKITSGPIFPEQNKIALGSPLSRPNPRERKGLSGLASRGRAGNPRLSLSRLSKTPRPPPRPTGTLPPPSAARGFRPPPPHSPTTSPTKRSTARGPDTARGFRGPDAARGFRGRSTVRGPAAATSPTR

SEQ ID NO: 268910 - protein, 126 aa, Zea mays
  Clone ID: MRT4577_176846C.1.pep
LLRAIGFLEAGRARLSWSRLSKTPRPPPSPTGTLPPPSAARGFRPPPPHSPTTSPTKRSTARGPDTARGFRGPDAARGFRGRSTVRGPAAATSPTRCADPIQFSEYVDNLNLVQAIPSLYYRCLTR

SEQ ID NO: 268911 - protein, 71 aa, Zea mays
  unsure (1)..(71): unsure at all Xaa locations
  Clone ID: MRT4577_176847C.1.pep
VLRWPRARXXXFLPVPXSFVLLRPSLLFVXSLVRSVPPXAGSRCGXFXXXWLXXVVVXPLFXLLXLPRFRS

SEQ ID NO: 268912 - protein, 220 aa, Zea mays
  Clone ID: MRT4577_176848C.1.pep
MAATTGTSSSPPQLPVHGGLLLLLPLLTITSAASSAPLPLLALLSLKSSLHDPAGALRAWTYAAAASAGATRSLAPPWCAWPGVSCDPATGDVAGLDLSRRNLSGTVSATAARLLARTLTSLNLSANAFAGEFPPSVFLLRRLQSLDVSHNFFNGTFPDGVAGLGGSLAALDAYSNCFVGSLPRGLGELRRLQRLNLGGSFFNGNIPGEIGQLRSLRFLH

SEQ ID NO: 268913 - protein, 49 aa, Zea mays
  Clone ID: MRT4577_176849C.1.pep
SFFWGNFKMIWGVRTMNYQGHMQTNDKVLLQSIVMNTNPQFIKMPPRLL

SEQ ID NO: 268914 - protein, 97 aa, Zea mays
  Clone ID: MRT4577_17684C.1.pep
TRVWATETAAGQGQPAPGDLALPRTTSGPGPAHAPALTVGTCITAAANHGHRCTRAEARRHPHCYAAYQPDARRGPPARPTERRTSQYLPGAHCPFC

SEQ ID NO: 268915 - protein, 129 aa, Zea mays
  Clone ID: MRT4577_176850C.1.pep
HVVRQRRPQARTPPAQSPQLPNLLPIVLTLSCNSREAPSPGSIDGPRRRPGRRAPAPSSSSPGPRCKPRTCRPSALQRQRNPGQSCSRRRQPGRIWPTRPGLPRRCLCPGPPPDCRPLAWSVRETGTAR

SEQ ID NO: 268916 - protein, 79 aa, Zea mays
  unsure (1)..(79): unsure at all Xaa locations
  Clone ID: MRT4577_176851C.1.pep
MSASVASVISRFLEEYLSSTPQRLKLLDAYXLLYILLTGALQFGYCLLVGTFPFNSFLSGFIXSCVGSFILAVCPQIQI

SEQ ID NO: 268917 - protein, 177 aa, Zea mays
  unsure (1)..(177): unsure at all Xaa locations
  Clone ID: MRT4577_176852C.1.pep
MTVIDVLTRTXSICQKCDRDDAXKLNGANVAEDEPFARLYASDDTXINQCVYKAECXDTYKNRPVXVXLNAQIRRTKVEXLEEDLPKLXRLIDLKVKGLTEXEIATQXDLDAALPDIIQSFPLARSTATNENXAEEPHDLTXGSSIKFDXSADGIFDDEYFEATDQSDLFRREYEMR

SEQ ID NO: 268918 - protein, 170 aa, Zea mays
  Clone ID: MRT4577_176853C.1.pep
LGTSRPAGKIPTKYSTEEGNSGEREVGGRRWKARYAAHPPGHQPEILNAISLSLSALPPALRVEGHRGQIGSGKESLMRAHHPQRVRRTSHAVARCSEWGQESRLHQMECVTSTMCAGQELEKSLRKIAAPGCPTDEQDSREVDKERDTEKGHLGEVARPDVSNDLHMHP

SEQ ID NO: 268919 - protein, 60 aa, Zea mays
  unsure (1)..(60): unsure at all Xaa locations
  Clone ID: MRT4577_176854C.1.pep
RVGXRRRRGVGGXVRHXGXRRRXXEQRXEGAGFXDWLXPLERGDAARLXPDNVDSFEPPP

SEQ ID NO: 268920 - protein, 100 aa, Zea mays
  unsure (1)..(100): unsure at all Xaa locations
  Clone ID: MRT4577_176855C.1.pep
ARLEDEKWKYCSRLSTYSDTVCDDDAAIAGLEEPEHVTWGHHVPGWGSRFQIVVGVGHTNYLEYVKXEKIGYIKAFILKQINSWVTDIYGHDDIRLFAPY

SEQ ID NO: 268921 - protein, 83 aa, Zea mays
  unsure (1)..(83): unsure at all Xaa locations
  Clone ID: MRT4577_176856C.1.pep
GGVLELPVIVVPPDPNVWGKDGPQFRPERFPQGVXKGAKGHQPGFFPFGWGPRIFFGQKFSLFEAKMAPSMILQGFQFRGSPF

SEQ ID NO: 268922 - protein, 38 aa, Zea mays
  unsure (1)..(38): unsure at all Xaa locations
  Clone ID: MRT4577_176857C.1.pep
VYQLTKCTNANSGNNRSDKYSIHVYIVYRFLSSXDPIH

SEQ ID NO: 268923 - protein, 101 aa, Zea mays
  unsure (1)..(101): unsure at all Xaa locations
  Clone ID: MRT4577_176858C.1.pep
HWQPHRTSFTVTCIKAYLSEFIATVLFVFDYLHYSITFRQLTNGCTLDPSXLVTIWRAHSLAFFLGMSLVTNTCTGHLNPGVTFWLTLGRHITRLTSLLYW

SEQ ID NO: 268924 - protein, 64 aa, Zea mays
  Clone ID: MRT4577_17685C.1.pep
MNLDLWPKKKKKKKKKKKKKKKKKKKKKKKKKKKCKGRRVGRIKLMKGAMESKYVDNGETINLV

SEQ ID NO: 268925 - protein, 115 aa, Zea mays
  unsure (1)..(115): unsure at all Xaa locations
  Clone ID: MRT4577_176860C.1.pep
RPGPPSPXPNRAEADVPAHGGFQTAIHSELRGIDGQASVTKRSNSSSSTRLKILSICLVKVAFGAIYAQVKKKASRRISRSSRTSTSSRIRLATSPSQLPVVGLFTLAMFLFCVL

SEQ ID NO: 268926 - protein, 66 aa, Zea mays
  unsure (1)..(66): unsure at all Xaa locations
  Clone ID: MRT4577_176861C.1.pep
KXARSMLYSGRRPGIKDGIGFQKGDNVKLNAPPKCHTRFWKVNRMRTMYVPGSEIHVHGDYINDSS

SEQ ID NO: 268927 - protein, 109 aa, Zea mays
  unsure (1)..(109): unsure at all Xaa locations
  Clone ID: MRT4577_176862C.1.pep
GALNSSNQWARTTYRSNWWRHTPNQFYKAIKQGKRSPPWRREGLELTLISGKDLKDVNLMYRMEVYAKVLLCGDPPFGQGFQADRTGXRNPTWNATLRFDLLTIDTGSL

SEQ ID NO: 268928 - protein, 136 aa, Zea mays
  Clone ID: MRT4577_176863C.1.pep
GRDVAHSSRVSAVPRRIPKKTCSSLSLAQGRSRLAGLSSPQTVPPPLRPPPVGRWPRRPAQRFGVARRPTQRSRCPIFAGPNPSTLVPVDHILPRRVHVEIAIYFRASRNRQSSFGDQVIKFFEFYEIEDHEHLFW

SEQ ID NO: 268929 - protein, 46 aa, Zea mays
  Clone ID: MRT4577_176864C.1.pep
ADVPPLQAQHIPDGRGNAERALRHGRQGPGPSHHDGLQGSIAPMTF

SEQ ID NO: 268930 - protein, 124 aa, Zea mays
  Clone ID: MRT4577_176865C.1.pep
TPEFGRAGTNTLDRSLHPPRMPCAVATHRAHQAAPSPIHLLQTASPHPSRPCSRNPEPNPSQSTSALRRAALHVLATQSFAASIAQEDLRCSHRCRDRDLFPSFEELTIKRWRPSDLALRVLRG

SEQ ID NO: 268931 - protein, 52 aa, Zea mays
  Clone ID: MRT4577_176866C.1.pep
VSLSRAVVEASELLRGLPVLAFGSHYFWRVISCLCGPALLLTAGGGLPRGVD

SEQ ID NO: 268932 - protein, 102 aa, Zea mays
  Clone ID: MRT4577_176867C.1.pep
SRQVEPSHARLIGAAPVASSLPRFILAVVDSSLRSSTRLLAVRCPYQSLSRCRLAESPTSMAPEFSAAAHVSSSPASLRVSASRLRSVSKHRGIDDQASATK

SEQ ID NO: 268933 - protein, 91 aa, Zea mays
  Clone ID: MRT4577_176868C.1.pep
TDAQGLQPCGTRRTGSLGRQRLIFDPSKLGNGSQSGRERREQLIRVEKDGRRRLVRRRSSFAVCAGAGRHTRGFISVGVVVVYLGEKSPAG

SEQ ID NO: 268934 - protein, 128 aa, Zea mays
  Clone ID: MRT4577_176869C.1.pep
SLGRRRLIVDSSERGNKSRSRQRLHAGSSADDVECGRDSSAVIQSRRLALDRRKGITGGPRSAGMGMAAAMATARGCSRPAAVRRGPSLPCCVRGGDLRRILAGASGGRLRANHVMGHSGPGRLERRT

SEQ ID NO: 268935 - protein, 55 aa, Zea mays
  unsure (1)..(55): unsure at all Xaa locations
  Clone ID: MRT4577_17686C.1.pep
MNVLNLMKMAGAVRSGGXGSVCLMMKAVHKTSTSDDKPLQSSSKRVGENRVSGDE

SEQ ID NO: 268936 - protein, 135 aa, Zea mays
  Clone ID: MRT4577_176870C.1.pep
PAPALGPAGLASSRRGKPVRPAQRGGLTRLASMDASPTRPRTRPIIAWRSCTASPSARRSCPTMHGRRHQEERRGEHAHHLRRASKPRHHRARRRLRPLAIEEGATPRSPYGSLSRRLRSISELRGIEDQTSATK

SEQ ID NO: 268937 - protein, 101 aa, Zea mays
  Clone ID: MRT4577_176871C.1.pep
PFSVASAPLHAHMRAGADATPRSLQNHPRRFPCTHSSPSSPSQAAHDQSRPAYTGLALLETPLLPSSTCTDRDLFLSFEESTVKLRRPNDPVLQVLRDRRP

SEQ ID NO: 268938 - protein, 181 aa, Zea mays
  Clone ID: MRT4577_176872C.1.pep
MLQHSHSANEMLLRRKLEEQQQAAAAELQQAMELQSRRLMRLQLLDLKPRASPSPIGSMPLGPTQRAVDSPPDSGREESSAGDASPNADSDQSAEHNLPDSPFASPTRSAALARDPFAAIDGEMAASPGRRNGAGSFAGISSSSGVLAGHLRPSALDIPSPFFPMSMTRLSSDHGAGAIGM

SEQ ID NO: 268939 - protein, 114 aa, Zea mays
  Clone ID: MRT4577_176873C.1.pep
RAASPNACSRCLLLQQASPTSPNLTPNPSFRPGSSALALPSRPRHRRPCSRSLRSEFRPRRAPTSLKPPTCQASIAPSPSCRSACTYRDLFPCFEESKIKSWRPSDLVLRVLRD

SEQ ID NO: 268940 - protein, 127 aa, Zea mays
  Clone ID: MRT4577_176874C.1.pep
LHPDRAGAVIGGQPATGLTASEQINHGEHTRPRDLRPPCCLHYITYLVMDMGKNDEGMSRADGLRWPARTPLLLLMPAKEPAPFRRPGEAAISPSMAAKGSRAKAADLVGHANGLSGRLRLGAAWSP

SEQ ID NO: 268941 - protein, 65 aa, Zea mays
  Clone ID: MRT4577_176875C.1.pep
GNPHFICDARVLVKPYKEKGKVPDKYRKQQLQGERAVDFFSNGLDGRENHLDLHQLGKALSSVAK

SEQ ID NO: 268942 - protein, 172 aa, Zea mays
  Clone ID: MRT4577_176876C.1.pep
MGVVVDGRTRMFPDGAMKAYFGNVLTIPYGVIGSKDLRCMALADVADDVHRWVAEAATGDHFRGLVDWVEALRPKPAAARAYLGGTGGNEAMACIVSSGMSFPVGKADFGTGLPAFASYHFPWPAGAGYVMPMPSARGNGDWVVYVHVAPEVAKVMEESTVFQALVNSYAFE

SEQ ID NO: 268943 - protein, 54 aa, Zea mays
  Clone ID: MRT4577_176877C.1.pep
MASTAGYLARRAAQKERVRLLYRRALKDTLNWAVHRHLFYQDLWTSLRRSSPCR

SEQ ID NO: 268944 - protein, 72 aa, Zea mays
  Clone ID: MRT4577_176878C.1.pep
SNCLLILLLLRRLKYCWWWLLHRTSQQQQHHRQKHRLFHALRCQITDASASHGEKHQSKLFPYLPLSFLCIN

SEQ ID NO: 268945 - protein, 55 aa, Zea mays
  Clone ID: MRT4577_176879C.1.pep
FNPFAESSSTHFGFNRGAIAGVQAHTVHRRTFSHPLRLSPMAAIGKHPKVTFFLS

SEQ ID NO: 268946 - protein, 51 aa, Zea mays
  Clone ID: MRT4577_17687C.1.pep
RSVLCDLGPSAAGAEVLLPRCGRGCKCSVFMLLGRVVAYLARWVLLLLAVG

SEQ ID NO: 268947 - protein, 88 aa, Zea mays
  Clone ID: MRT4577_176880C.1.pep
NSHRLVLRASGSDRDHPWPSASAKLVVPKPHQFPPFTFLFSTCTQGRLLMLLYRYTKVYSNIFFFFFFFKIIKLPLRRDNDMPRVNLR

SEQ ID NO: 268948 - protein, 52 aa, Zea mays
  Clone ID: MRT4577_176881C.1.pep
EPPPAPRMRLDTAQRAGEADRRTTFGNVSVSRRERHSGLVLVSTVVVGLRVG

SEQ ID NO: 268949 - protein, 173 aa, Zea mays
  Clone ID: MRT4577_176882C.1.pep
KKKKKKKKKKKKKKKKKKKKKKKKKKKNFLYFLPKPSFLGIFIKFPSQLGVGFCFFLGALFGVFLGFFLPLLGGFFTSFLGGAIPLFLPAFIKLFWAAFFYTGGGGKKRGLPHFSFLKFFPFFWGLDPPYCAPLYRVFTGGSPHLVSFSPLGPTFNSFGFFVFLPGAFSFFSP

SEQ ID NO: 268950 - protein, 170 aa, Zea mays
  unsure (1)..(170): unsure at all Xaa locations
  Clone ID: MRT4577_176883C.1.pep
HASEMTNLMIILFIIPLNTLLVTMILSQSIKASIMALLMGVVMAVGTDLEMNLLXSXGSLIIVLTSVGTSVTHIMPKQLQGRLTDLLNQLLSHQSAELFVTLLFTDNLLNKRDTLRDSYTTQYTTLILVSILIAGCINLSTILMMGTTIGATYHVMCHVLTRLETCLGFF

SEQ ID NO: 268951 - protein, 95 aa, Zea mays
  unsure (1)..(95): unsure at all Xaa locations
  Clone ID: MRT4577_176884C.1.pep
MSYVEFEVGFFRLRGLFLVRTKGTQKAGKVSKLAKFKIFMLNIGSMSTGAGVLAVMGDLDKLRLTGPVXTSRREKVALSRQCSQAYGSRGIRPHA

SEQ ID NO: 268952 - protein, 102 aa, Zea mays
  unsure (1)..(102): unsure at all Xaa locations
  Clone ID: MRT4577_176885C.1.pep
MPAATMAITSRALISKPAAGTRDVFGQGRITMRKTAHKTKPAASSRPPVGDHRALHLGPLSGSPPSYLDGELPGEXGRDTEEMAAKPENFTQNPQLEGNHRP

SEQ ID NO: 268953 - protein, 78 aa, Zea mays
  Clone ID: MRT4577_176886C.1.pep
ACMPSPCGGEKDGHHPIYEPHAQQATTPASQSAASLRAVVTSSSERGRIDLARGDKRAQTAGGSGQPIVFEREIGRGT

SEQ ID NO: 268954 - protein, 62 aa, Zea mays
  Clone ID: MRT4577_176887C.1.pep
DTITSMVARVYILSLIDTQADRCRRYKTTSTWESLIRSIYNCYHTHAKTECDWILQLYSISA

SEQ ID NO: 268955 - protein, 313 aa, Zea mays
  unsure (1)..(313): unsure at all Xaa locations
  Clone ID: MRT4577_176888C.1.pep
DDAACTAFSIYRYRRLASSSSGSITRHLAPRSHYPAVSIRSVHRGGHGHEHRPCPGHGRSRGAATXLLHSGVRAESLPRHVGLVIDGHARWARARGLSVSEGHAVGRRTVEHTVRLSRAWGIRVLTVFACSHENMTTRPKAEMDFFMQLYEGFIRDNVDQFCREGIRLHLIGDSPGLPASLLRAAREANQLATQSESEMVLMLAMGYSGRRDILRACQELATEVQRNLLRPEDIDEALIAGKLGTSIAGGELSYPDLVIRTSGELRLSNFLLWQSAFAELFFSDVMWPDFGEDEYLGALRSYQTRQRRFGQRK

SEQ ID NO: 268956 - protein, 221 aa, Zea mays
  Clone ID: MRT4577_176889C.1.pep
MGISRDSMHKRRATGGKQKTWRKKRKYELGRQPANTKLSSNKTVRRVRVRGGNVKWRALRLDTGNYSWGSEALTRKTRILDVVYNASNNELVRTQTLVKSAIVQVDAAPFKQWYLTHYGVDIGRKKKVPVAKKDATEGQEGEAIAEETKKSNHVQRKIEKRQQDRALDTHIEEQFGSGRLLACISARPGQCGRADGYILEGKELEFYMKKLQRKKGKGVAS

SEQ ID NO: 268957 - protein, 74 aa, Zea mays
  Clone ID: MRT4577_17688C.1.pep
MSPYHKLDSYVYTTHSLSTAFLSTFPVRNQQDRRMRTRHLLLVATPLLLLLAVSSGTSSPGRSFRRTHCLCISD

SEQ ID NO: 268958 - protein, 100 aa, Zea mays
  Clone ID: MRT4577_176890C.1.pep
LVWVSNPPNFFQFPWIESYPTNPVVGQGGNPFFSGVPGPTRFLFVCGEVTVTLLPPNQFAFCACSCTGKPEKKIKCKFHFLAQIPAKLVVPPGYEPLGPF

SEQ ID NO: 268959 - protein, 52 aa, Zea mays
  Clone ID: MRT4577_176891C.1.pep
RRFIKSGRTQGYCFFLWKNVIPCLLPKLNQPEAIKEKPGGPKGVAYTKIKLL

SEQ ID NO: 268960 - protein, 117 aa, Zea mays
  Clone ID: MRT4577_176892C.1.pep
LPGFWPGLFLHQGLARPRKLRPWDGPFLFDTLPEKKKALEGKRPSRALFLSGSLRLDTFVDALPLYILELFGAGPPSKYQSPLDTTPPSFAGVVAAAHAGNDDNMLLLLLKNVCSGR

SEQ ID NO: 268961 - protein, 68 aa, Zea mays
  Clone ID: MRT4577_176893C.1.pep
KKKKKKKKKKKKKKKKKKKKKKKKKKKKKKKKKKKKKKGRPLLKGPSLFLTRSIRNVPGFLFIGHTLF

SEQ ID NO: 268962 - protein, 61 aa, Zea mays
  Clone ID: MRT4577_176894C.1.pep
IHCVDLVGVSFPGRLDVIAAVISHQLPWPPACRCRPRSRGCCWCSSFAVAVLTTLGAQAQL

SEQ ID NO: 268963 - protein, 67 aa, Zea mays
  Clone ID: MRT4577_176895C.1.pep
PTPRTHQCPGTPGDPPRRLLLYLSIDCTKGKLVFCESKGEYTSTYSANVPFGCSGLALCGVKSSSCF

SEQ ID NO: 268964 - protein, 284 aa, Zea mays
  Clone ID: MRT4577_176896C.1.pep
MASEVAGLAVVSAAASVALVYARLATSRLAPGTPRLAALLPVLLLLPVLPFAFSSIHLRTVSAFFLVWLCGFKLLLLAAGHDGPLHPALPLVRFVACAALPIKVRDENEKEKKQQSRISHSSLPSGFLLSYAAKAALFSALVSVRCYRARMPAYAVPVFDGAHVYLMLELFLASAAALARALLGAELEPQFDRPYLASSLRDFWGRRWNLMVPGVLRPCVYRPVRARFGAAAGVLAAFLVSGAMHEVMFYYITLEAGTGEVTAFFALHGACAVAERWMARQGGM

SEQ ID NO: 268965 - protein, 75 aa, Zea mays
  Clone ID: MRT4577_176897C.1.pep
MAPPGARLLVALPACSCAHDNKQLVVPEGVTEDLPEQQPVFEGLFVGKVCNLCRVLETGISAVLTVKSSLGILFD

SEQ ID NO: 268966 - protein, 126 aa, Zea mays
  Clone ID: MRT4577_176898C.1.pep
ESQPRFISQISNHLPTSRGPGIHGALAADQPVFGTPSPAAGLPSVPYAPRWSSRVVSVEIVIRFRALRDRRSSVGDQVIKLSEFYKAEDSEHLFGEGCLWCNLCLGKDEGVKTDTQEFQDFDEFVV

SEQ ID NO: 268967 - protein, 122 aa, Zea mays
  Clone ID: MRT4577_176899C.1.pep
PNPRTRRSPRTPGDPPRRLLLYLSIDCTNSNLHQTDAQGLRSRRTRRTRSHGRRSLIFDSSSSETDHILALATTDGGSRISTDGSDELRQMGGATKQAERRAVLVNRIRKKNTWGRGKKTGK

SEQ ID NO: 268968 - protein, 53 aa, Zea mays
  Clone ID: MRT4577_17689C.1.pep
KLSSVVLLRVDLQGPLSMALADIGRFAWLLLVLNHSGGEGSKKEWSPLHRQYA

SEQ ID NO: 268969 - protein, 47 aa, Zea mays
  Clone ID: MRT4577_1768C.1.pep
KRLCSCKIATLEQRDAYHDQCRQRMGGGLSHIDMAHLVLELADDLKL

SEQ ID NO: 268970 - protein, 58 aa, Zea mays
  Clone ID: MRT4577_176900C.1.pep
FWALKGPKSFLAWLELEPLCCRVKRQKSSENPPPFQCKTVTRQHLLVDTPCVLYDLNP

SEQ ID NO: 268971 - protein, 141 aa, Zea mays
  unsure (1)..(141): unsure at all Xaa locations
  Clone ID: MRT4577_176901C.1.pep
SARGALVQVLFNTVMHLARAQHARGVWITEIXTAXTLAQDPARYSGDYRFAPLPLKVTPELMALDDMVAMATALKAGCEAPLRDRLXGLLSAXDGTAXEAGGRARXRSTDCRXDTLLWAGQGLGEPALLVMTGRYGTLLVY

SEQ ID NO: 268972 - protein, 82 aa, Zea mays
  Clone ID: MRT4577_176902C.1.pep
IKSRRSCRPCTWRFPIAIRFRASRDQRSSVGDQVIQFFEFHKVEDPEHLFSEGCLWCNLCSGKEEGVEANLQEFQDFDEFED

SEQ ID NO: 268973 - protein, 83 aa, Zea mays
  Clone ID: MRT4577_176903C.1.pep
RRTPPRPCRCNHGQSLGDAEARKGVAVAGWRFQRCRRRGTDHETASSLENLACRSLFLHSSAIQVNGVYDGKSGQLGFLLLHS

SEQ ID NO: 268974 - protein, 76 aa, Zea mays
  Clone ID: MRT4577_176904C.1.pep
SRGTRRTGSLGRQRLIFDPSKLRNGSQSWRGTTATNKAPSRDGKPVGCAGEAAAQHPEAWADAWADAWADAWADAW

SEQ ID NO: 268975 - protein, 203 aa, Zea mays
  Clone ID: MRT4577_176905C.1.pep
IDFYTSSGKRKPDQIIIFRDGVSESQFNQVLNIELDQIIEACKFLDENWNPKFTLIVAQKNHHTKFFIPGSPENVPPGTVVDNAVCHPRNYDFYMCAHAGMIGTTRPTHYHILHDEIHFAADDLQDLVHSLSYVYQRSTTAISVVSPICYAHLAAAQVAQFIKFDEMSETSSSQGGGHTSAGSAPVQELPRLHEKVRSSMFFC

SEQ ID NO: 268976 - protein, 52 aa, Zea mays
  Clone ID: MRT4577_176906C.1.pep
NPSPMYLCKQPKKIFWEPNWPHTHNQTRFTGCTQPVQSEPGSLNTSQAHPYK

SEQ ID NO: 268977 - protein, 74 aa, Zea mays
  Clone ID: MRT4577_176907C.1.pep
MKGSGYQIAIRFRALRDQRSRVGDQVIWFFEFYEIEDPKHLFGEGCLWCNLCTGKEEGVEAVLQEFQDFDEFED

SEQ ID NO: 268978 - protein, 89 aa, Zea mays
  Clone ID: MRT4577_176908C.1.pep
GMATRAPTQLDQTTGRQATWAVLPRPAPNRPSRCLMKRLLLSKKKEKKKLRGAGSELRGCDAKGAPPPSTVTPSGMAAPACLPSSAHTS

SEQ ID NO: 268979 - protein, 94 aa, Zea mays
  Clone ID: MRT4577_176909C.1.pep
PNPRTRRRPGTPGDPPRRLLYLSIDCTKGNLHHTDAQGLQPHGTRRARSLDRRSLIIDSSKRGNKSRSRTATAKVEYEQGELQRTMGHQSSFGR

SEQ ID NO: 268980 - protein, 57 aa, Zea mays
  Clone ID: MRT4577_17690C.1.pep
IFFSFSCRSTKKSKWPITWILLLKSAFTGVVWFKKCNPNGNFNGPRSKKKKKKKYKK

SEQ ID NO: 268981 - protein, 79 aa, Zea mays
  unsure (1)..(79): unsure at all Xaa locations
  Clone ID: MRT4577_176910C.1.pep
LADYILWNDTRTFNRKLPIYLNTFXETSXGGSYGSVKATVVHAFPFHWSEIWQDCRKSILEQKVVVHTTLLRLYRHGPE

SEQ ID NO: 268982 - protein, 128 aa, Zea mays
  Clone ID: MRT4577_176911C.1.pep
SVAAFPVVVLFSLVAGARFSVLPFCLCLRVCLLVRSVPCSLWLCRCFGLGAALPFLCVSRSAFVVWSPLLLASWPSGLRGWLGFFGSRWLLRFCCCVARFCFPCFFPVGGSGGSPFFFPPLRSCVCVG

SEQ ID NO: 268983 - protein, 90 aa, Zea mays
  Clone ID: MRT4577_176912C.1.pep
LVPPRSRSFPQIQIAGVKGNCYQIMIRFRASRNRRSSFGDQVTWFFEFCKIEDPEHLFGEGCLWCNLCSGKEEGVEADLQEFQDVDEFED

SEQ ID NO: 268984 - protein, 75 aa, Zea mays
  Clone ID: MRT4577_176913C.1.pep
MAWAGCAGQGAGAGAARRGSGCAREQGEGACTPVRWGRPRRAGLAEDRPRRARLHLRCFRGCRTAFAVEGAGAGG

SEQ ID NO: 268985 - protein, 95 aa, Zea mays
  unsure (1)..(95): unsure at all Xaa locations
  Clone ID: MRT4577_176914C.1.pep
CGGKNRAPPGKPPPXEPQGEPXAPPGGRPPPYKKPLIPRPSXPPEPAPEWDMGKPXAPSPSXPPIGALNPTPPNAPPPXGPSPPGCCPPKGKEFP

SEQ ID NO: 268986 - protein, 88 aa, Zea mays
  unsure (1)..(88): unsure at all Xaa locations
  Clone ID: MRT4577_176915C.1.pep
FLCRQYLVGGRPXXXGVFFEIHACTPRGVLEKMTHAGYNRAWTQSHIAGWGEMGLLITGIVGDTLLHHHARCNVPEHLNDLTLSRYLL

SEQ ID NO: 268987 - protein, 289 aa, Zea mays
  Clone ID: MRT4577_176916C.1.pep
LGTSRPAGLATAVLIFWRAMPIPCALLSAERLLHACLSLPGACSRQAPAPFRGRVLSSTAGRAQLLSLGAHSSLSPLVPAMAAVPWSEFLLARISSLRRPSSMAAAFFSRRVLPSPSPSPRRPACPAFIYGRSPPMSRPSQAPASIPVRAWRLRCSGAQALARSSSARHLLELAPVFLLGAQIPARFCVARVAFRCFYACCREALCSVHLHRVVVRAKLLAPRYRRFLVPAGRAPLQLPVRQNVWTSARRVLGRSAPMFLPNIDCLILGRSTHAWCSMNGSNRIALSKS

SEQ ID NO: 268988 - protein, 129 aa, Zea mays
  unsure (1)..(129): unsure at all Xaa locations
  Clone ID: MRT4577_176917C.1.pep
AAARGAVGFTPGVRASXLRVSXETYGXTARXPDKEIXXIVKENFALRPGVICAXNLDVKXGGQXGLPSRRXYGXFGRDDPDXTWEVVXQXXSENPSCLRRPFFVRFWWSAVLTCFSVASYVVVLFLLLL

SEQ ID NO: 268989 - protein, 106 aa, Zea mays
  Clone ID: MRT4577_176918C.1.pep
LVRFFCPWGPFKAPKVFSKKTPLLNPCPVLGWWGLPPGILGLGGTVCLSKTPQGGFGFRPPKKFFLFGGNFWPLKNPPRGVCFRGPRLSPQGGLTPPIFKFFGFPP

SEQ ID NO: 268990 - protein, 66 aa, Zea mays
  Clone ID: MRT4577_176919C.1.pep
MVPLLAPINKASERKTRHQIWTQRLLSMFTTSGRSKYLNGRLVMIRRRLLGRPNYLIRSEPLIDFI

SEQ ID NO: 268991 - protein, 56 aa, Zea mays
  unsure (1)..(56): unsure at all Xaa locations
  Clone ID: MRT4577_17691C.1.pep
RRVRLACVPYLLEXXTIXLMLSKTRAAHQYAVVCLVPLLRRRPRLGLLWTSSLKIP

SEQ ID NO: 268992 - protein, 60 aa, Zea mays
  Clone ID: MRT4577_176920C.1.pep
FLSSSQSVQGVCRFPVAPIVGGPCSATPCLLVLVTGFARLVTVPFLFYPGWVWCLRSVVQ

SEQ ID NO: 268993 - protein, 68 aa, Zea mays
  Clone ID: MRT4577_176921C.1.pep
PGVHDSGSPQIVAAAAHHSPFPSLLSLAPRPHQLAFYSSEADQQFQVENLGSQSLSLSSARAYHDQAS

SEQ ID NO: 268994 - protein, 104 aa, Zea mays
  unsure (1)..(104): unsure at all Xaa locations
  Clone ID: MRT4577_176922C.1.pep
LELLDVHNNSFTGGIPPQFGELMNLEQLDLSMNELTGEIPASFGNFSYLNKLILSGNNLSGPLPKSIRNLQXLTMLDLSNNSFSGPIPXEIGALSSLGISLDLS

SEQ ID NO: 268995 - protein, 117 aa, Zea mays
  Clone ID: MRT4577_176923C.1.pep
GEQIMVIRISFLRNARLQSPFLPSGVKETPIVDHNKRPASSDILDIVECKRLKQEDQIVTKEDNHTSAEEEFHDYPTYTTCERSFDSPLYESEESEDEGVDSPLHCSHARTYVEDGL

SEQ ID NO: 268996 - protein, 109 aa, Zea mays
  unsure (1)..(109): unsure at all Xaa locations
  Clone ID: MRT4577_176924C.1.pep
XXGXXRMGTSKPAGPGFDHCTDDSVTVPAHDSIRGSSCRFIRAPCCPTTASSRSHRNSCTYREGRTSNGDRPEMGEESACGLERLSPLQVWGHFCRQKGRLLHDLTKWC

SEQ ID NO: 268997 - protein, 165 aa, Zea mays
  Clone ID: MRT4577_176925C.1.pep
EMPDCSFHRRGEKVGLFDEELVHGVHLTSPCVQSPLVPSGVKETPIVDHNKRPASSDILDIVECKRLKQEDQIVTKEDNHTSAEEDFHDYPTYTTCERSFDSPLYESEESEDEGVDSPLHCSHARTYVEDGLWPASFHQSVGPFSLRKPVPIGSNHQAELPECRP

SEQ ID NO: 268998 - protein, 62 aa, Zea mays
  unsure (1)..(62): unsure at all Xaa locations
  Clone ID: MRT4577_176926C.1.pep
CTCLLFIPVVTKEDNHTSAEDFHDYPTYTTCERSFDSPLYESEESEDXGVDSLSMXTCSPLX

SEQ ID NO: 268999 - protein, 77 aa, Zea mays
  Clone ID: MRT4577_176927C.1.pep
KMLDTKRSELRKAESEVDTMGDKVDALLSLVQKIYVTLEHYSPVFQHHPVLLDAFLKTCKLVAGIRSRQKKDLQDTI

SEQ ID NO: 269000 - protein, 80 aa, Zea mays
  Clone ID: MRT4577_176928C.1.pep
HNTLWPATSRSGRRHAGSAGVMHGDKVNALLSLVQKIYVTLEHYSPVFQHHPVLLDAFLKTCKLVAGIRSRQKKDLQDTI

SEQ ID NO: 269001 - protein, 80 aa, Zea mays
  Clone ID: MRT4577_176929C.1.pep
WLGKIIVETCISHIAASAPMKRTFRKYSYRDINLDALLNMSTDDLVQLFLVDAWRRFQRGLKRKPMEIIKKLCNAMELPK

SEQ ID NO: 269002 - protein, 85 aa, Zea mays
  Clone ID: MRT4577_17692C.1.pep
DALGSAPGYYQNVYHNIQGGLPMMAPEITMDHMVDQIQPATQAVAQAMHHEIHRDSQSNVTHMEHHMHRPGDGQWDPDGHIARHL

SEQ ID NO: 269003 - protein, 111 aa, Zea mays
  Clone ID: MRT4577_176930C.1.pep
SSPRSKRAGAGTPTVTRRRLRSISELRGIDSQASATKRSNSSSSTKLKTLSICLVKVAFGATYAQVKKKASRRISRSSRTSTSSMIRLAISPSQLPVVGLFTLATFRFCVL

SEQ ID NO: 269004 - protein, 594 aa, Zea mays
  unsure (1)..(594): unsure at all Xaa locations
  Clone ID: MRT4577_176931C.1.pep
MVAAVASPSSAAPSAGRPHPTYKEMIMQALTELRDPSGSSRSAIASYIADHFSGLHSRHDALLSVHLRSLKSHGQLRLVSGNYFVSTAAQRQGRGSNIPPNPKPAPGQKRGRGRPRKHADSAPSASTPAFQGAKRGRGRPRKRKSAQDPVASSPSXAATGSKCSAASIXVKRGRGRPRKDALVPPPSSSSPLLGGIDPPPPSGIKTGRARPRKALVPVRSSFSELLGAVVLPPPSGVKRGRGRPRKSAYPAVAPLVGAEKGPAGGQPQRNTTPLSPTPATMSHSGXVRLSGCPRLLLISVLCVVPPXISASSNSLVGAKRGRGRPPKVVVAGKEKMQQPESVQSVDASLTKRGRGRPRKEKALESGRMKASQMTEGQREALTADQAGAVQNEVEDRDLQSLGTPLTEKRGRGRPRKRPLEIETAKAGAAKRGRPRKEKTSETGDLKVAQMTEGRHEALPAQAVDQTGPVQNEVEAMILQSLATTPLMEKRSRGRPRKRPLETETAETQVAASVEKRGRGRPRKKNPSAGWSAGTRDTALKGIKRGPGRPRKARPFETESVKTALEVSRDLTEDGPQKDGDLVSGKKADTHGVVW

SEQ ID NO: 269005 - protein, 55 aa, Zea mays
  Clone ID: MRT4577_176932C.1.pep
PPPRSNFFAAARGRWRRCPCLLRGEERSSSHARLHHFTLPLLQMRSHAPGRGADR

SEQ ID NO: 269006 - protein, 121 aa, Zea mays
  Clone ID: MRT4577_176933C.1.pep
PAGFGQHAASPQLASHAIPSLHLASPRSELCLLVVRSNHSPASTLAPSHRRLQPRLLRACAGQHAPSPRCLGCCAIVAMEYRCCSSTSTPLCWRSSSSDCDPFPSFEGSTIKRWRPSDQAL

SEQ ID NO: 269007 - protein, 104 aa, Zea mays
  Clone ID: MRT4577_176934C.1.pep
QQLHLKSPLPGARDQARLAAPPISRSSPRPFMPIHNTSGHRRERENAIHLQASRNRQSSFVDQVIKLLELYEIEDSEHLFGEGCLWCNLCSGKEEGVEADLQEF

SEQ ID NO: 269008 - protein, 40 aa, Zea mays
  Clone ID: MRT4577_176935C.1.pep
MGRTTDTMVAGLLLLLLLRSVGHDEVWGSWVREEHLSRAW

SEQ ID NO: 269009 - protein, 80 aa, Zea mays
  Clone ID: MRT4577_176936C.1.pep
PHIKLVHYSQTGHLLSTLMCNHPCFTTKHQVVHIATTAQEKTKPWKETSRSSKTTTSSRCGLAATPSQLPVKTLSLLRFA

SEQ ID NO: 269010 - protein, 363 aa, Zea mays
  Clone ID: MRT4577_176937C.1.pep
EGLPRSDGFNCILVVVDRLTKYAHFIPLRHPFTANQVASAVLTHVVKLHGVPASIVSDRDRIFTSAFWKGLFKLLDTKLLVSTAYHPQTDGQTERVNQCLEMYLRCTIYNSPAKWKAWLPLAELWYNSSYHSSLQCSPFKALYGYEPKLPSFPVLADVSTTDLSSLIKERDLHLELLKHNLLAAQTRIKLQADKKRIDRQFAEGEMVLLKLQPYTQSSVASRPFPKLAFKYFGPYKILQKIGVAAYKLELPAGSLVHPVFHVSQLKPYTADYSPVYADLPKIPDLTQRDLQPQCILQRRLVKKGGAAIVQVLVQWQGLPADSATWEDWTVMQARFPDSSAWGQASIPGGGDVTPAPTITGVTA

SEQ ID NO: 269011 - protein, 68 aa, Zea mays
  Clone ID: MRT4577_176938C.1.pep
PPPPCFLRLKTALLFFFPQNKLLAGLLVFQNRFFLAPCPVIRGAPLTPKYRVSRAPFKSFFFFLPKPL

SEQ ID NO: 269012 - protein, 400 aa, Zea mays
  Clone ID: MRT4577_176939C.1.pep
WNLMVDGYVKHGKIHDAIELYSKMSEKNLEASTTLMSCFIDNGMLDKARDVFYSMPQVDVVSCTTLLFGYVKGGYIYDALDLFCRMHKRTVVTYNVMIAGLLHQGKVTEAYKLFDESPTRDLVTWSCLINGLAQNGLNNDAIKLYKKMLLSNIRPSDSILSSLISCFSHHSMIVHGQQFHASTIRLGFGSHLLIQNALISIYCKCGEMIIAQTIFDRMDNRDTVTWNTMICGYAFNSFGQNAIETFDNMKKAQVDPDEITFLGILSACNHMRLLEEGKHFFNMMTCNYGILPNKMHYACMVDLFGRTGMLEQAEELMKSMPFKPDFAIWTSLLSSCRLNGNDRLAEHAASQLISIKPTIKMPYLHLIRVNGSTKRWNVMENLRNQIRNAATDKEVGYSWS

SEQ ID NO: 269013 - protein, 165 aa, Zea mays
  unsure (1)..(165): unsure at all Xaa locations
  Clone ID: MRT4577_17693C.1.pep
KSSKSPSKKKKEVGYFALKKILALGMWDPPIVDRMSCLFPNFKDAKLKNMHAFYRHKPDGKVXHLTHGKQWQNFNDKPRDFVDEPKNVRFALRTDGKNPFAERSHMHNPWLVILPKNNLPPMLMQKRKDILLTVFIFGPKXPKVDMDVFLESLLEEMKILWETGV

SEQ ID NO: 269014 - protein, 98 aa, Zea mays
  Clone ID: MRT4577_176940C.1.pep
RRRFPALLPSFSSGAQQPRPVFWRSWTPPAQTAIHFRASRNRQSSFGDQVIWLFMFYKVEDPEHLFGEGCLWCNLCSGKEEGVEMDLQEFQDVDEFED

SEQ ID NO: 269015 - protein, 106 aa, Zea mays
  Clone ID: MRT4577_176941C.1.pep
YHLVVADHSAQSKAPRRAPRRPAWLSRRGLFFSGESFDQFAIRFRASRDRRSSFGDQVIKLLELYEIEDSEHLFGEGCLWCNLCSGKEEGVEVDLQEFQDVDEFED

SEQ ID NO: 269016 - protein, 106 aa, Zea mays
  Clone ID: MRT4577_176942C.1.pep
WFDSQNRSSLCLSRRAAHLPELTATVCADSRPTVRRREGKIAVRFRASRNQRSSFGDQMTQLFEFYKAEDPEHLFSEGCLWCNLCSGKEGVEADLQEFQDVDEFKD

SEQ ID NO: 269017 - protein, 119 aa, Zea mays
  Clone ID: MRT4577_176943C.1.pep
MPKTPPVNASKNTEPQKQSAPNLTITNGHTSTKVVVKKEHPINDVKHISTWVCKNLACKAVRPAEDSFCKRCSCCICHKFDDNKDPSQWLVCSKKKKKKKKKKKKKKKKSKKKKKKPAA

SEQ ID NO: 269018 - protein, 66 aa, Zea mays
  Clone ID: MRT4577_176944C.1.pep
CVLTLAFTKYQVAFGAIYAQVKKKVSRQISRSSRTSTSSRIRIATSPSQLPVVGLFTLATFLFCVL

SEQ ID NO: 269019 - protein, 121 aa, Zea mays
  unsure (1)..(121): unsure at all Xaa locations
  Clone ID: MRT4577_176945C.1.pep
NKFTSVKSLDEIDGDKINSREPYEISYETDVLAIRCSFHNVLKIWNLNEHSSVVGAFNCQGAGWCRVAKKNLIHDHQPRTVSGVIRAXDVEHLAKVAGHGWNDDVVVYSHVGGKPSSFFMN

SEQ ID NO: 269020 - protein, 78 aa, Zea mays
  unsure (1)..(78): unsure at all Xaa locations
  Clone ID: MRT4577_176946C.1.pep
QAARETDAVFAKAGCNHLKTVNKPTFGLLASNLDNIPAEARSVGNMFITQIXTKGGRRVAGDEARALINKARLMKNDN

SEQ ID NO: 269021 - protein, 75 aa, Zea mays
  Clone ID: MRT4577_176947C.1.pep
SVCVCPFPSYSNLKLVLRPASITIVTTDTIHNKAEKGVVLSPLLTAASLLTSTRKCMAKLQTDMMLPSDDSQWTS

SEQ ID NO: 269022 - protein, 92 aa, Zea mays
  Clone ID: MRT4577_176948C.1.pep
ACHNKERCWSASSENRTAAPFESHPKLLLVFPRFPEDIAFGKDRKKQGVACHHPKLIVLQREDSMRVIVTSANLVPRQWHLITNTVWWQDFP

SEQ ID NO: 269023 - protein, 122 aa, Zea mays
  Clone ID: MRT4577_176949C.1.pep
KRRPSPELGARRPNQAVGPLGRVNPPGAFSSSLAKFCKNLGQVPPKFPEGREGVKAAMEGKGGVSFSREASMGRSPPKKALFAFDGVLGGLPAANAEGVLRSMGQKMEQLKAELKQLEDFGP

SEQ ID NO: 269024 - protein, 443 aa, Zea mays
  Clone ID: MRT4577_17694C.1.pep
RDILDYLRRDMIGKEGEIFSAEDADSAEYEGAPRKKEGAFYVWTSKEIEETLGENAELFKNHYYVKSSGNCDLSPMSDPHNEFSCKNVLMCGKPASSMSSKCGKSLDEYSQILGDCRQKLFDVRSKRPRPHLDDKVIVSWNGLAISAFARASQILKSGPSGTIFNFPVTGCKPVEYLETAENAANFIKEKLYDASSKRLHHSYRNGPSKAPGFLDDYAFLISGLLDLYEFGGKIEWLLWAVQLQVTQDELFLDKQGGGYFNTPGEDPSVLLHVKEDYDGAEPSGNSVAAINLIRLSSIFDASKSTGYKRNVEHLLAVFETRLRQLSIALPLMCCAADMLSVPSRKQVVIVGQKGSEEFQDMVAATFSSYDPNRTVIQIDPRNTEEMEFWDGNNANIAQMARGSPPGKPAVAHVCQDFKCSPPVTSPGSLRELLNKTLAAASSA

SEQ ID NO: 269025 - protein, 86 aa, Zea mays
  Clone ID: MRT4577_176950C.1.pep
FFSSGLRDHFFTPPPRCQSGGVNFKNSCAEKKPGTIKLTGFIRGNIPPLGVLPQCAHTYPQLKIPLSCNLLNTIKNNRELLCTLKQ

SEQ ID NO: 269026 - protein, 63 aa, Zea mays
  Clone ID: MRT4577_176951C.1.pep
IEPLDFIYPGGNHLILDRKAFPRGGGPEKLPPHLVGGPKPHGPPGLSRPLEPGVYPCNELPAP

SEQ ID NO: 269027 - protein, 184 aa, Zea mays
  Clone ID: MRT4577_176952C.1.pep
MAETAGAAPAQQPARVATTTTNSDVSTWAWLQQVLALLFPSSLAAKAALFALVVALLPLLPSGQAPRIWELPHLLLLGIIISYGVFGQKNADAEVATAAYATPVDVEASVEAYVSQMMQGSLVFDENDGNDGANKDGSVQQQAWSSRYLPDDPLVVVADTSAPGTNSGNGDTDTGGKGKPLLLP

SEQ ID NO: 269028 - protein, 66 aa, Zea mays
  Clone ID: MRT4577_176953C.1.pep
CTQLCLDSIFYFATKKNTFPRFRRQLTSYYSNSATAKPNITPILLGHHPSQIPLLKICLLMHPLHS

SEQ ID NO: 269029 - protein, 69 aa, Zea mays
  Clone ID: MRT4577_176954C.1.pep
LRTPRPSMRPSRLKEEDAGWLPPMRLSLCSCPVLGYLLYPYVVVRVPYPTFPYLASSLSFWKGREGKAS

SEQ ID NO: 269030 - protein, 108 aa, Zea mays
  Clone ID: MRT4577_176955C.1.pep
PFPDPPPRDLFLLSPVISPTTITGIIHKQKGRKEDSPSVGTSADGARRPRTALPPVLFALRAPGFRKPPHAIQPAVRRSRSPPGCHSFFSPSASPLTLPLPPEARAPE

SEQ ID NO: 269031 - protein, 60 aa, Zea mays
  unsure (1)..(60): unsure at all Xaa locations
  Clone ID: MRT4577_176956C.1.pep
RGVAGRRRQNARHRRARVWQLVYFSSHAQVYTTLVSAWFFGVFLLLSDRADCRVYXRYSM

SEQ ID NO: 269032 - protein, 39 aa, Zea mays
  Clone ID: MRT4577_176957C.1.pep
QITRRRITRFKIKLSPVRRGTYLIEYINLNLLSCLLQAD

SEQ ID NO: 269033 - protein, 105 aa, Zea mays
  Clone ID: MRT4577_176958C.1.pep
HLCRCTLCSLFCPHFLVYGRHVGCFPGTCGGLRVSRAQSASAQTVAIFLEEELALLVSIWCVNARRVWVFGLGFVGHLRGEEEKQEDDLVSPGGWREPRPGRPRG

SEQ ID NO: 269034 - protein, 79 aa, Zea mays
  Clone ID: MRT4577_176959C.1.pep
MSVGFSKPGEEWNSEVEDGLDSLKELGQSKWSKDFEDETTKSENTEENTHALSGLARTYSTGRKNVSWGDRLEKFHLCN

SEQ ID NO: 269035 - protein, 139 aa, Zea mays
  Clone ID: MRT4577_17695C.1.pep
NRTIKGINLLSTSSANIALPLSLYSLLTKVKTPEAAKSASHAPKTGNDGIQLQHIMLATVFQNTTSTSYSSPACNLCQEHPPGHHTKHQQINRRRSPLSTHRNYFYPLCLALAIQKASGGSGRLLLSPDRILLFLSLSA

SEQ ID NO: 269036 - protein, 53 aa, Zea mays
  unsure (1)..(53): unsure at all Xaa locations
  Clone ID: MRT4577_176960C.1.pep
MEIDGDACSNAXFVDHYYRTFDTNRAALVGLCQETYKLTFEGQMLQGLPVIDG

SEQ ID NO: 269037 - protein, 67 aa, Zea mays
  Clone ID: MRT4577_176961C.1.pep
ACQFFFKLKPHCLFLSEHEKNLELCDISFTGASSMITLETSERDQARVREIHAVGCQQFQRCTRSTI

SEQ ID NO: 269038 - protein, 62 aa, Zea mays
  Clone ID: MRT4577_176962C.1.pep
SGTDCDEVEWVKNTHRPLCPLVHHLKGLPTPAFLAHNPVLNIFSSSYRNYFFGRRLPYIFPV

SEQ ID NO: 269039 - protein, 247 aa, Zea mays
  Clone ID: MRT4577_176963C.1.pep
MAAAAALPVAKTAPDLPEMDLISSLPGEILSIIISLLPIGSAVRTTSLSRRWRPLWRSSPLNLDISHIDGCGRDRAAAVSKILSDHPGPARRFLTACLQITDPDGWLGSPALRDLQEIDFWLPRYEIPMPLSILRFAATLRVARFGNCRFFEYDAPPSFNFLCLEKLTMRFIFVREDTLHCLLDGCPVLESLLLDRCHGFYYMVINSLTLKRIGTNGGRHGCQLVIENAPRLEKLIRTDLHPESTSG

SEQ ID NO: 269040 - protein, 143 aa, Zea mays
  Clone ID: MRT4577_176964C.1.pep
PNPRTHRRPRTPGDLPRHLLLYLSIDCTKGNLHQTDAQGLQLCRIRRVWSLGRQSLIVDSSKLGNRSRSRRDDATSTAADGATAGAARHDATSTTADSATAGIARHCANGGGSAGLLRMTMSTARRVESAHARCASEAAGPGR

SEQ ID NO: 269041 - protein, 107 aa, Zea mays
  Clone ID: MRT4577_176965C.1.pep
PRGRPGRVFTLSHPRYAHPPLPMLGSLRCRVMPRPRTATSVSSHITELRRALENGHQPPPSEGLQRPKLRQSTTDIDASDCDPFSSFKESTVKLRQPSDRIFRVLQS

SEQ ID NO: 269042 - protein, 37 aa, Zea mays
  Clone ID: MRT4577_176966C.1.pep
PPALELASILEALVNPMLTRTTKPRATSLVLVAIVTC

SEQ ID NO: 269043 - protein, 205 aa, Zea mays
  Clone ID: MRT4577_176967C.1.pep
PHISHPTSCSPSGRGAVPRSPSLMSKPSASRPCIKIAIRFRASRNRRSRVGDQVIWFFEFYEAGDPEHLFGEGCLWCNLCSSKEEGVEADLFGRVFFFPYPAHPAAPAAVHDAMCRSIVVRHRFADSAAFFWSSSSSPIAIYFRASRNRQSSFGDQVIWLFEFYKIEDPEHLFGEGCLWCNLCSGKEEGVEANLQELQDFDEFED

SEQ ID NO: 269044 - protein, 144 aa, Zea mays
  Clone ID: MRT4577_176968C.1.pep
TFSPNPFPSSRYCSPKFGAVPTPASNYSQSVHRLRNPRVPLRSSRRGLRRSAFGSSIGSPNLRQSTDFLSAPARIFFPDRDSLLSFEESTIKHGDQVTELFEFYEIEDPEHLFGEGCLWCNLCSGKEGVEADLQEFQDVDEFED

SEQ ID NO: 269045 - protein, 113 aa, Zea mays
  Clone ID: MRT4577_176969C.1.pep
SLSSSGVADDALDLRHAVDILVQLHSARADAVLEHTSPCMMYLVRRSRALTMVVVTVPRGSEEQQHLDHRRLRDQPHPVSTEERAEAPPAPSITVNRGSGPLEDPSCPTTTNQ

SEQ ID NO: 269046 - protein, 101 aa, Zea mays
  Clone ID: MRT4577_17696C.1.pep
FFLCLTFQEVMKCKLVVQIGPQSVVVARGQAYPPKDVVTVHGIERRDDHTKVQVDFVFDNLLEFPLPIPIAGGDMFTLGEAKNSFVLWPKSGIQLAEVHFY

SEQ ID NO: 269047 - protein, 191 aa, Zea mays
  unsure (1)..(191): unsure at all Xaa locations
  Clone ID: MRT4577_176970C.1.pep
GSAGHPSYLSYYLLLARALPTSINKRGRLYALLALLCFVISXASVTIISQCSDHYLSSVQGARLEYPSILYYSIHYAMTSRIVRYVGLTGQHPYALLYRPYLAYRNRQYIESQHLHHRMVSSHNXVNAVNLAVYLNLQHFISFNXLNGVNXAVYLTGQHILSYHQIDLSPAVLLLYXQMMSCHLQDEANIA

SEQ ID NO: 269048 - protein, 111 aa, Zea mays
  Clone ID: MRT4577_176971C.1.pep
RYLIRDGWFTGGDKDDGYDYGNGKWHSFLFPRVEFAGVKDSGDKIAICFRASRNRQSSFGDQEVELFEFYKAEDPEHLFGEGCPHCNHCSGEDEAVEGDFQEFQDIDEFED

SEQ ID NO: 269049 - protein, 101 aa, Zea mays
  Clone ID: MRT4577_176972C.1.pep
MAVAQRLTALELHHCCCPTPRHTSRLDLSSLRAGSPAEFAVEHRRGRLFLPCVVARLRSISELRGINSQASATKRSNSSSSTRLKILSICLVKVTFGAIYA

SEQ ID NO: 269050 - protein, 192 aa, Zea mays
  unsure (1)..(192): unsure at all Xaa locations
  Clone ID: MRT4577_176973C.1.pep
TALFFLPLFRLPHXENEQHKEIYAYSYGTGGIFDITTPHDTDNGNTDGTNDIHKEYYSKCLATASPTNLIPIVDFLVTSLHFTXTCKGTPDHSQMXGNXLLSTTDLSMITXHDIRIQIQHLDNLNITXKXNPDTYLPCAQDLRTHCHSDQYDCXILPISVLMDFINKHYMLCCSLFYSKLLHMNLXRTYDML

SEQ ID NO: 269051 - protein, 118 aa, Zea mays
  Clone ID: MRT4577_176974C.1.pep
PAGARNRPREAPAKILRRSPPRTQQGRDGPLRTAAGRLQPLAVAMAAAIPIPADLGPPVMPLRRSSASRLLWMTAELSRPHSTSSAEEPAWSRCRDRDLFPRSEESTIKRRRPSDQAL

SEQ ID NO: 269052 - protein, 93 aa, Zea mays
  Clone ID: MRT4577_176975C.1.pep
HPNPCGSPAIRVPCVLGWSSRVVAVEIAICSRASRNRRTSFSDQEIELFEFYEAEDSEHLFGEGCLWCNLCSGKEEGVEVDLQEFQEFDEFED

SEQ ID NO: 269053 - protein, 127 aa, Zea mays
  Clone ID: MRT4577_176976C.1.pep
RPVRGAQIARRSCPRPSPHTSLPEPPSTFPRPHNSLWRSPSTAALSFASRCNACRSSSISPSAVRHHETAIHFRASKNRQSSFGGQVIELFEFYEAEDPEHLFGEGCLWCNLCSGKEEGVEVDLQEF

SEQ ID NO: 269054 - protein, 157 aa, Zea mays
  Clone ID: MRT4577_176977C.1.pep
ALGSDRSATRAEAALALAELCGNAGKAGLRQEAVVADAVPRLVWMLEAKPAGERDAAARALAAVLDASSGCRKAFRKDERGVVNAVQLLDPSAPGVETRFPVSVLLAVAQSRRCRKQMVAAGACGFLQGLVASEVVGAKRLAERLGKGKMLGVFPRT

SEQ ID NO: 269055 - protein, 75 aa, Zea mays
  Clone ID: MRT4577_176978C.1.pep
SGGTLSMRAGLELNSFRAQLESRPMRCQPFSRQCFSTNVRQVSLLTGKIASLVCTILSIDGSMNLIHIRIYTIEL

SEQ ID NO: 269056 - protein, 126 aa, Zea mays
  Clone ID: MRT4577_176979C.1.pep
MEPPITALPIFPMREHSKPHGQPIRRLSRSGEQPHPHELRRRCHRADPRSLLWQLGKSLDYDPFRASRNRRSSFGDQMIQFFEFYEIEDPEHLFGEGCLWCNLCSGKEEGVEVNLQEFQDFNEFED

SEQ ID NO: 269057 - protein, 100 aa, Zea mays
  Clone ID: MRT4577_17697C.1.pep
CASREPLPGARFGHPAARSMHASSDPSSSSSWLFDPQLYAYARQWQRRQPMNRANKKLGAKICISNQSEQGIFRSRGEETHFWRVTISRTRGRTRGRTRG

SEQ ID NO: 269058 - protein, 102 aa, Zea mays
  Clone ID: MRT4577_176980C.1.pep
YPINEPSTNNKVRIFTTQEQTHNRGRQPISAYTSIHFGPERPRRYLIPIPNPGITVCAWVYMLYRCGYFTGHGDIHLGVVFIKPHHSPLGSIFRAQSCKIEK

SEQ ID NO: 269059 - protein, 527 aa, Zea mays
  Clone ID: MRT4577_176981C.1.pep
MHRRLATAATAPALRRFSHHSARPQPDPRFAFLCSEVDNLDLSSSHKPSPRPPHREQFQVLEELRSDLALAGDAPAAVAIAHPWPEWISLMEHLLRQGHVDPSTFAAASLSSKDANAVRTACLRFGRQRPELIRHVSRWDIQVAVRCGCPSIDRKVVNSGKRLRAYVGLDEGEVCSQCNLRGSCDRAYVKARKEDVGRTVDVMRILLTYGLDVITGNVDNRACLNKSVKESIKILLSEVVEVDSRGPGSSTVKAAQRKGQSAVPMKQGDWNCPKCDFLNFAKNIKCLRCDGEFQERYQLLHEDREHLPLKKGDWICKRCNFLNFAKNTRCLQCHEKPTNRLLNPGEWECVSCNYVNFKRNGFCLKCGWKRPKSLNSQNSVELCHDLEHSKNPRISFVQDGVQMKGWQSLQKKGSPSDTDLDFWSADDEEGGSRDNDTLLRQKDYRFLESFPIVGGRTANSQDLLAREKWKDEMSRRDKGLQTTESQESNRPSSHGRLPRSMELVDSDDDIASWFSGGDNNNRNLDKV

SEQ ID NO: 269060 - protein, 112 aa, Zea mays
  Clone ID: MRT4577_176982C.1.pep
AKLSIIILFSYEARALAAVLDASSGCRKAFRKDERGVVNAVQLLDPSAPGVETRFPVSVLLAVAQSRRCRKQMVAAGACGFLQGLVASEVVGAKRLAERLGKGKMLGVFPRT

SEQ ID NO: 269061 - protein, 272 aa, Zea mays
  unsure (1)..(272): unsure at all Xaa locations
  Clone ID: MRT4577_176983C.1.pep
GPGSSTVKAAQRKGQSAVPMKQGDWNCPKXFEKLICXLSPIPPGHNXAFTVRCDFLNFAKNIKCLRCDGEFQERYQLLHEDREHLPLKKGDWICKRCNYVNFKRNGFCLKCGWKRPKSLNSQNSVELCHDLEHSKNPRISFVQNGVQMKGWQSLQKKGSPSDTDLDFWSADDEEGGSRDNDTLLRQKDYRFLESFPIVGGRTANSQDLLAREKWKDEMSRRDKGLQTTESQESNRPSSHGRLPKSMELVDSDDDIASWFSGGDNNNRNLDKV

SEQ ID NO: 269062 - protein, 98 aa, Zea mays
  Clone ID: MRT4577_176984C.1.pep
ACRSHGTCRCSLLSFPHQMARCHCLRPRKLCQCLARSHRSSHLCGQVDTPVSPFAVGESVAYLWRSCGKGSRDSFVTGGIAQNRGQCSEGEAFSVSVG

SEQ ID NO: 269063 - protein, 191 aa, Zea mays
  Clone ID: MRT4577_176985C.1.pep
MDPKGKGIVINDKEKESFVNEPKDNKPTDSGSGNKRKDGKKKKTRHIKEIVYYDDSDESSSSQKDDDNNYEKKKTVNSNFSFDYSRIPHSSNAHLLSIPLGKPPHFDGEDYGFWSHKMDEYHKVSGLDNAKQIWDTLKISHEGNNVTMLTKMELVEGELGRFAMIRGEEPTQTYNRLKTLVNKIRSYGSTR

SEQ ID NO: 269064 - protein, 630 aa, Zea mays
  unsure (1)..(630): unsure at all Xaa locations
  Clone ID: MRT4577_176986C.1.pep
MDPKGKGIVINDKEKESFVNETKDDKPTDSGSGHKQKDGKKKTRHIKEIVYYDDSDESSSSQKDDDNDYEKKKTVNSNFSFDYSRIPHSSNAHLLSIPLGKPPHFDGEDYGFWSHKMCSHLFSLHPSIWDIVESGMKFDSSDSPLFINEQIHKNAQATTVLLASLCRDEYHKVSGLDNAKQIWDTLKISHEGNDVTMLTKMELVEGKLGRFAMIRGEEPTQTYNRLKTLVNKIRSYGSTRWTDHDVVRLMLRSFTVLDPHLVNNIRENPRYTKMSPEEILGKFVSRRMMIKEARYVDDALNGPIHEPQTVALKATRSKEALPSKVAQVEAAGLNEEEMALIIKRFKTALKGRKEHPNKNKTKGKCSCFKCGKIGHFIANCPDNDSDREKKSGKWEEKKNYKKAKGEAHLGKEWDSDCSSSDSDNEGLAATAFNKSSLFPNEHHTCLMAKEKKDLLYEEHDKFVSAQNSLALEVKRNEMLSCELSICHETISTLKGVNDDLNAKLEVANKSNSCVEHVMICNRCKDFNVDACSEHLVCIAKLNDEVASLNAQLKTSKSELDKLKFARDAYTIGRHPSIKDGLGFKREVQNLTSHKASIYAKEKGKAPMASSAQKNYAFMYHDRRHXRNGYR

SEQ ID NO: 269065 - protein, 277 aa, Zea mays
  Clone ID: MRT4577_176987C.1.pep
MALIIKRFKTALKGRKEHPNKNKTKGKRSCFKCGKIGHFIANCPDNDSDQEKKSGKWEKKKNYKKAKGEAHLGKEWDSDCSSSDSDNEGLAATAFNKSSLFPNEHHTCLMAKEKKGLDKTKIDKINELIDALNDKNRLLEKQDDLLYEEHDKFVSAQNSLALEVKRNEMLSCELSTCHETISTLKGVNDDLNAKLEVANKSNSCVEHVMICNRCKDFNVDACSEHLVCISKLNDEVASLNAQLKTSKSEFDKLKFARDAYTIGRHPSIKDGLGFKRE

SEQ ID NO: 269066 - protein, 51 aa, Zea mays
  Clone ID: MRT4577_176988C.1.pep
MAVLQGIPGKALGRILLRWQSCKGFLLGRPSGGFCCDGGPGDYVRARVLDP

SEQ ID NO: 269067 - protein, 86 aa, Zea mays
  Clone ID: MRT4577_176989C.1.pep
LPWCTWLQVRCRFYKFISAARKKNKQENRKHKVEFGNLYYYEECKGVGCHPVLPLPRSVLSRLLLSQQKKLHQAQESNPECLEQNA

SEQ ID NO: 269068 - protein, 88 aa, Zea mays
  Clone ID: MRT4577_17698C.1.pep
GGPTPGNSCGFPCLVFPAHPLNGLSFTLPEFRHVAQGALRPHRPLKQFVPFGYSNPLGRYEGAPFRVSLLNLLRVFFTVVSWGCLQSP

SEQ ID NO: 269069 - protein, 39 aa, Zea mays
  Clone ID: MRT4577_176990C.1.pep
VVNVKDPSLLQVMKRWHILSRPASQLRGRLRKELGLLKY

SEQ ID NO: 269070 - protein, 348 aa, Zea mays
  unsure (1)..(348): unsure at all Xaa locations
  Clone ID: MRT4577_176991C.1.pep
MGAMTLPPGFRFHPTDDELVGYYLKRKVDNLKIDLEVIPVVHLYKSEPWELPEKSLLPRRDLEWFFFCPRDRKYPNGSRTNRATSTGYWKATGKDRRIACDGGVYGLRKTLVFYRGRAPGGERTAWVMHEYRLCQDLAHGTCNFIGAYALCRVIKRHEGGLXRARATRKEPPAARXSGQMSKVSSSSSLVSNDQLSASFTPPPTLDVGTMAGSGNAFQSPVGYGYGVTTTATATATTAGLPSSALATPLLIVPSPHDTFXPSAATATSSPPRPSRARSHAHLFDTVGMGMGGVSEQELKWDSFACPSTFSSGADMAAASPATLCRQASDGFDDLLAAFFFSDDNRIVF

SEQ ID NO: 269071 - protein, 49 aa, Zea mays
  Clone ID: MRT4577_176992C.1.pep
MVILVNCIQSTQTRALIVLGQPYSGYEALASRAENQSVRIQQPNTLNNY

SEQ ID NO: 269072 - protein, 53 aa, Zea mays
  Clone ID: MRT4577_176993C.1.pep
RTLNRIHIFIQLTYSTIILARDSFIYLPQHYNIYPIHILLSAYTYSPPYYLHH

SEQ ID NO: 269073 - protein, 87 aa, Zea mays
  unsure (1)..(87): unsure at all Xaa locations
  Clone ID: MRT4577_176994C.1.pep
RERXSAGRIKLASLPTETKAVKADRNSHPLSYDRTGSQTPSTLIIVKMGRSNIELQVLPGKKHLSKTSIKQGLTTFTERKFEMVCVY

SEQ ID NO: 269074 - protein, 45 aa, Zea mays
  unsure (1)..(45): unsure at all Xaa locations
  Clone ID: MRT4577_176995C.1.pep
PNYMDPKKKVTGIACRRFFDEFIPCFVPLTYCFATKILCWQKFXD

SEQ ID NO: 269075 - protein, 111 aa, Zea mays
  Clone ID: MRT4577_176996C.1.pep
HNHPFPFSNPDHTRAHRLPFSLPSDDRPTASGRSSSPPDPSPPRALPLAMAAPCLENARCFDEPSSLISIRGRYTLRCQVRLRFALRLDCDLFSCFEESKIKRWRPSDQAL

SEQ ID NO: 269076 - protein, 137 aa, Zea mays
  Clone ID: MRT4577_176997C.1.pep
GPFFFFFSGKPGHFIAKCPLSSDSDRDNDKKGKRREKKRYYKKKGGDAHVCREWNSNKSSSESSSDEDAANIAVTKGLLFPNVGHKCLMAKDGKRKKVKSKSSTKYATSSDEDNSSDEEDNLRNLFANHRQLTGGGR

SEQ ID NO: 269077 - protein, 74 aa, Zea mays
  Clone ID: MRT4577_176998C.1.pep
HLLKPLECQHRVHLADVPVKLSVVVIVVHHGLSSSPSSSSGVRPRSRLAAGCVPQPSLPHDGAATLIGAVQLSV

SEQ ID NO: 269078 - protein, 59 aa, Zea mays
  Clone ID: MRT4577_176999C.1.pep
MGAWLFLTEVSLRQGKPPAAGRRCCFTTVGCLWCNLCSGKEEGVKADLQEFQDFVEFED

SEQ ID NO: 269079 - protein, 44 aa, Zea mays
  Clone ID: MRT4577_17699C.1.pep
ATHTPRGYAQPYAPNLTHTRGQWGLPETNIYTYPSYTRARNNTT

SEQ ID NO: 269080 - protein, 329 aa, Zea mays
  unsure (1)..(329): unsure at all Xaa locations
  Clone ID: MRT4577_1769C.1.pep
HQKCSIYLINCNLSQNKGSSSAAPAKVTANQAPSTQTVPATPPQTSAAPDAPAPIVPVSAPAATATASAAPAVAVSTEADSYGQATSNLVAGSNLEETIQSILEMGGGTWDRDTVLRALRAAYNNPERAVEYLYSVFCXGIPEQMEVPAPPPSSQPVDPVQAVQPAQAGPNANPLDLFPQSLPNDSANANTGNLDVLRNNSQFQNLLGLVQANPQILQPLLQELRKQNPRVMQLIQENQAEFMRLISEPLEGDEENEMMLDQMADATETIAVTPEENEAILRLEGMGFDRALVLEVFFACNKNEQLAANYLLDHMHEFDNDDGLGGPPL

SEQ ID NO: 269081 - protein, 161 aa, Zea mays
  unsure (1)..(161): unsure at all Xaa locations
  Clone ID: MRT4577_176C.1.pep
MRESISIHIXQDGIQAGNACWELYCLENDMQADEQMPGDKTIGGGDDAYXNTFFKETGAGKHEPRAVFDDLEPTGIEDVRTGTYRQLFHPEQLISGKEDAANNFDRGHYTIEKEIADLCLDRITKIDDDCTGLQDFLVIHAVDXGTGSGLASLLLECLSDD

SEQ ID NO: 269082 - protein, 143 aa, Zea mays
  Clone ID: MRT4577_177000C.1.pep
GVSCLLPGSRRAPPHLQAGWVHHRAFIYRAGIAPRGGPLAFHRRPLRAATAPRPWPRGHCAHHATTLLPPGSAIPAHPCPANSASTRPAEDLRRGAPHLGQGQFLRHQEPDGDALLLPRPSLRQQCCRSSAGERHRTGDLRVA

SEQ ID NO: 269083 - protein, 93 aa, Zea mays
  Clone ID: MRT4577_177001C.1.pep
TDAQGLQPCGTRRTGSLGRQRLIFDPSKLGNGSQSGRERREQLIRVEEDGRRRLVRRRSSFAVCAGAGRHTRGFISVGVVVVYLFRKEFFPAG

SEQ ID NO: 269084 - protein, 63 aa, Zea mays
  Clone ID: MRT4577_177002C.1.pep
GPGNKGGGLTKQGGGPITGSFIPLFNPPVKILKNPPTNFGHIPHAKGAKNSGFPPENQTRGVH

SEQ ID NO: 269085 - protein, 128 aa, Zea mays
  Clone ID: MRT4577_177003C.1.pep
SIRPLPPPCGGAASAHNAPPPCGGTARRVRIPGAPPPCSLLPAPYGGTMRRVRIRCTPPPCSLLPPPCGVVARLVGIWCSLLPPPCSSCSKFCGSVRNQCASDLHRSPRRVSDGTNAPDLLLTVTGEW

SEQ ID NO: 269086 - protein, 71 aa, Zea mays
  Clone ID: MRT4577_177004C.1.pep
NARQVSCTIFWESCIHLVVCSQQRSIALLAVEQLSLAALSLRVPTTSTVKGGVCDLFPQSWQGVSRSQCPR

SEQ ID NO: 269087 - protein, 70 aa, Zea mays
  Clone ID: MRT4577_177005C.1.pep
RASYTLSPSLRELSAFINTSVTTAFPTSHRTVSSPPPPSIALLISLPSHCLYAFRSYIFWHSIRLHFLTC

SEQ ID NO: 269088 - protein, 36 aa, Zea mays
  Clone ID: MRT4577_177006C.1.pep
SGLGKKCVLFNGGPSPFVLYHGAFFCCAPINKTPLL

SEQ ID NO: 269089 - protein, 197 aa, Zea mays
  Clone ID: MRT4577_177007C.1.pep
MGILGKGSGWCFCSRGAKLERIKSSLLAAKGAAIAAVSFPSGGGGGGAGGKGGSGFLIHRSLLLTTHGTIPSAAAAGAAEVRLSHGRLLARLVPQRFFITSSILDLTIVGLDVVDDDLSSHGQQPHFLKTCLNHSLDLGSTVLLLGHNRNDLAVGEGKVVIATDNLIKFSIDESLWHPGSAGFDMHRNLAFMGLGSH

SEQ ID NO: 269090 - protein, 209 aa, Zea mays
  unsure (1)..(209): unsure at all Xaa locations
  Clone ID: MRT4577_177008C.1.pep
RAATGRPSIPXAXRRCPAGTTLRTAPCPAAWTTTXMLSHRFFSMSSAGSGGGHGLLPRPDVDGDAANGSDGPRRGDTAAACWSTSPPPISRGSRKQDSMWGARIKTRCATSRAACRRRYRCTTSRADGVATRQTTAAPPPVALLAAPPLPPPHSRCLITGLHAPKLKQSIFTTHKLTKIPNSHAHASNSQIDDNPVYYCGVATLSTKHA

SEQ ID NO: 269091 - protein, 195 aa, Zea mays
  Clone ID: MRT4577_177009C.1.pep
PPPPSSPSLGSSLSWLSRSDQPLSRPPRLDPSSLWLDRRLHGWIRRCHGFLDWIRRYPFFSATGAATLSGADACAAAGLPCEAPRRPVAEGSKKALRFLLSFCVASPTVDARTSTPPEEQTTAACLPTTATSTSATSASRGYCLLEVHTGLYSSRNIRTLTTLRLRGDLNPSAPTFGFYYSLIVFGAPVASAGGC

SEQ ID NO: 269092 - protein, 95 aa, Zea mays
  Clone ID: MRT4577_17700C.1.pep
LEDLLQKLFMIFLLADLFRPRPRHPQGGEPTPTGPLKGGSQAPPIVRATTRGVGTRRKRAYTYKPHKKRARSVKRQSRGGKGENPNKIKKGAQQA

SEQ ID NO: 269093 - protein, 109 aa, Zea mays
  unsure (1)..(109): unsure at all Xaa locations
  Clone ID: MRT4577_177010C.1.pep
DKIVEIYLLSLPVKEHHILVTFLPLLRDYVMNITPVHNHTLSCQLTLFKAFVVVCYRDCHVGLDVKCSKEVATAILVAIILSKLSVVPVMKCYCXNNICQPYTVPCKVT

SEQ ID NO: 269094 - protein, 71 aa, Zea mays
  unsure (1)..(71): unsure at all Xaa locations
  Clone ID: MRT4577_177011C.1.pep
ILSVCFTMWVVASFKKGYRSSAPWITLAGRKKLSNKLQTSDGWAKFTGGLFFXGICGVFWASFLLYVPYLP

SEQ ID NO: 269095 - protein, 399 aa, Zea mays
  Clone ID: MRT4577_177012C.1.pep
MAIPPRTPSPPPSWSRSVTETVRGSHQFTVRGYSLAKGMGPGRYLASDVFAVGGYHWAVYLYPDGKNAEDNSNYVSVFVALASDGIDVRALFELTLLDQSGRGCHKVHSHFDRSLKFGPYTLKYRGSMWGYKRFYKRTLLEESDFLKNDCLVMNCTVGVVKNRIETPKDIQIHVPRSDMGRCFKELLSRCIGCDITFEVRDEKVRAHKWILAARSPVFKAQFFGPIGKPDLHTVVVEDVEPVVFKAMVNFIYADELPSIPELAGSASTWTSTVVVQHLLAAADRYGLVRLRILCESKLCDELTPETVATTLALAEQHHCAELKSACLKFIALRGNLGAVMETEGFDYLEDTCPSLLSDLLATVAVVDDDLASLNRKRGVSGNQVMALVGSVERRTRRKL

SEQ ID NO: 269096 - protein, 279 aa, Zea mays
  unsure (1)..(279): unsure at all Xaa locations
  Clone ID: MRT4577_177013C.1.pep
PAPPRAPPLVRPPPPSLHLAPPAAPGPVLPQFQPRPSCFPLLPRRRSRRRNHQFRRSLRCRPRPPGRRERQFIEELASFLGENLTVDYEERSFHGTPQNSFHKAVNVPDVVVFPKSQYEVRNIVMTCNKYKVPIVPYGGATSIEGHTLAPHGGVCIDMSSMKKIKSLHVEDMDVVVEPGVGWIELNEYLKPHGLFFPLDPGPGATIGGMCATRCSGSLAVRYGTMRDNVINLQAVLPDGDVVKTGSRARKSAAGYDLTRLIIGSEXDFRVXTEVTLRLQ

SEQ ID NO: 269097 - protein, 148 aa, Zea mays
  unsure (1)..(148): unsure at all Xaa locations
  Clone ID: MRT4577_177014C.1.pep
YPXGXRPGRXKKKKKKKKKKKRDTEQGALRSEEKRDHDRGLYLVRRPGSLRLPLPPLGLPRVCLPPSSPSCSHTPQIPSRLSILCSSPTRGRSFPAGPPLRWLLSSGSGPGGSCSDVLNRNPSSAMRRCEMRFGAFFFEFDAXDPTVS

SEQ ID NO: 269098 - protein, 361 aa, Zea mays
  Clone ID: MRT4577_177015C.1.pep
MSAFVGKYTDELIKTAKCLATPGKGILASDESTGTIGKRLSSINLENVESNRQALRELLFTAPGVFDYLSGVILFEETLYQKTSDGKPFVDVLIAGGVVPGIKVDKGTVEIAGTDGETTTQGLDSLGARCAKYYEAGARFAKWRAVLKVGPAGQGQPSELAVRQNVEGLARYALICQENGLVPIVEPEILTDGGHDIGTCAAATERVLAALYKSLSDHKVLLEATLLKTNMVTPGSDSPKVSAEVIAEYTVAALRRTVPPAVPGVVFLSGGQSEEEATQNLDAMNKLEVLKPWTLSFSFGRALQQSTLKKWVGKKENVAAAQATFVIRCKANSEAALGKYAGSGAGDAAASESLYVKGYKY

SEQ ID NO: 269099 - protein, 84 aa, Zea mays
  Clone ID: MRT4577_177016C.1.pep
MIIRAFSMFHTIMFIPLYIAMNKLLRTSDQQHPWGGTAPNDMALVPHVPLLRMATRYKLRKYTIAMSKIAGVPTTIIWYMPPSL

SEQ ID NO: 269100 - protein, 371 aa, Zea mays
  Clone ID: MRT4577_177017C.1.pep
IAAAYRCTYSTVHNTRARADELIKTAKCLATPGKGILASDESTGTIGKRLSSINLENVESNRQALRELLFTAPGVFDYLSGVILFEETLYQKTSDGKPFVDVLIAGGVVPGIKVDKGTVEIAGTDGETTTQGLDSLGARCAKYYEAGARFAKWRAVLKVGPAGQGQPSELAVRQNVEGLARYALICQENGLVPIVEPEILTDGGHDIGTCAAATERVLAALYKSLSDHKVLLEATLLKTNMVTPGSDSPKVSAEVIAEYTVAALRRTVPPAVPGVVFLSGGQSEEEATQNLDAMNKLEVLKPWTLSFSFGRALQQSTLKKWVGKKENVAAAQATFVVRCKANSEAALGKYAGSGAGDAAASESLYVKGYKY

SEQ ID NO: 269101 - protein, 52 aa, Zea mays
  Clone ID: MRT4577_177018C.1.pep
PGQAQPVDMSTCACRCSRRHLILTQRPHLGSTAVGVWSCFYGPDGLDNKVSD

SEQ ID NO: 269102 - protein, 52 aa, Zea mays
  Clone ID: MRT4577_177019C.1.pep
GHTESSRRLSSSRISSRVRRPPQPWPSITVSAQRPRIDLLKPGSKRRSSRFP

SEQ ID NO: 269103 - protein, 34 aa, Zea mays
  Clone ID: MRT4577_17701C.1.pep
VILRELDSENSAHSELRNLASRLITSHVHGYRLL

SEQ ID NO: 269104 - protein, 116 aa, Zea mays
  unsure (1)..(116): unsure at all Xaa locations
  Clone ID: MRT4577_177020C.1.pep
VIDAYRTLGDRGHYAADEAVKDLVGTFAFVVXFDSRSGXIMRTWRRLHKNSAHTCGLRRLRLLLQIDQRLTGISVKHGCCERYAHFRAVCMMHRDERLNSFELFMNRLNVMPCVHC

SEQ ID NO: 269105 - protein, 193 aa, Zea mays
  unsure (1)..(193): unsure at all Xaa locations
  Clone ID: MRT4577_177021C.1.pep
FTQLSPQHSCLRVQQANGCRPPAPPAAAPYPPAPPLRPALAAAASXTAAPSTSTSDARLSDYERLSVLGHGNGGTVYKARHRRSSQPLALKIFADGDASAAREAEILMLAADAPHVVRLHTVIPSAAAGEAPAALALELMPGGSLAGLLRRLGRPMGERPIAAVARQALLGLAALHALRXVHRDLKPSNLLVG

SEQ ID NO: 269106 - protein, 330 aa, Zea mays
  Clone ID: MRT4577_177022C.1.pep
MALVRQRRQLPHLTLPLDHFALRVPPQPQPTAAPSTSTSDARLSDYERLSVLGHGNGGTVYKARHRRSAQPVALKLFADGDTSAAREAEILMLAADAPHVVRLHAVIPSAAGEAPAALALELMPGGSLSGLLRRLDRPMGERPIAAVARQALLGLAAVHALRVVHRDLKPSNLLVGADGEVTIADFGAGKVLRRRLDPCASYVGTAAYMSPERFDPEAYSGDYDPYAADVWSLGVAILELYRGHFPLLPAGQRPDWAALMCAICFGEAPEPPAAASEEFRDFVARCLEKKAGRRASVAELLEHPFVAEREAAGAQEALAALVKEAEQLDL

SEQ ID NO: 269107 - protein, 217 aa, Zea mays
  unsure (1)..(217): unsure at all Xaa locations
  Clone ID: MRT4577_177023C.1.pep
MSSSRMLPIVEPEILVDGPHDIDRCAYVTETVLAACYKALNEHHVLLEGTLLKPNMVTPGSDSKKVTPEVIAQYAVRTLQRTVPAAVPAVVFLSGGQSEEEATLNLNAMNKLSTKKPWALSFSFGRALQASTLKAWAGKVENVEKARAAFLARCKANSEATLGTYKXXDAAADTESLHVKDYKXLSCFSLRSPVFWNSCLRVGWLSGLLVRAFIIRT

SEQ ID NO: 269108 - protein, 147 aa, Zea mays
  Clone ID: MRT4577_177024C.1.pep
ALQESRLLEKVTSWIQPFGWLLAFRGAKAKAKSQTKHTLTPLVGKCDCEEGLWIMWMWGGRGARIVAPAVRPRARLRGWDETSARGPPAPACVCVCGCGPPSFNLMAWAAAAQGHTRHGALEQRHGTPTKKRVAFASPACCCPLNRV

SEQ ID NO: 269109 - protein, 157 aa, Zea mays
  Clone ID: MRT4577_177025C.1.pep
LARYAIICQENGLVPIVEPEILVDGPHDIDRCAYVTETVLAACYKALNEPHVLLEGTLLKPNMVTPGSDSKKVTPEVIAEYTVRTLQRTVPAAVPAVVFLSGGQSEEEATRNLNAMNKLSRRANYPRQGLQVLSCFSLRARFGTPAYELGCGVWFAR

SEQ ID NO: 269110 - protein, 216 aa, Zea mays
  Clone ID: MRT4577_177026C.1.pep
MSAYCGKYKDELIKNAAYIGTPGKGILAADESTGTIGKRLSSINVEILVDGPHDIDRCAYVTETVLAACYKALNEHHVLLEGTLLKPNMVTPGSDSKKVTPEVIAEYTVRTLQRTVPAAVPAVVFLSGGQSEEEATRNLNAMNKLSTKKPWSLSFSFGRALQASTLKAWAGKVENLEKARAAFLARCKANSEATLGTYKGDAAADTESLHVKDYKY

SEQ ID NO: 269111 - protein, 333 aa, Zea mays
  unsure (1)..(333): unsure at all Xaa locations
  Clone ID: MRT4577_177027C.1.pep
MSAYCGKYKDELIQNAAYIGTPGKGILAADESTGTIGKRFASINVENVEDNRRALRELLFCTPGALQYLSGVILFEETLYQSTKGGKPFVDILKAGNVLPGIKVDKGTIELAGTNGETTTQGFDDLGKRCAKYYEAGARFAKWRAVLKIGATEPSQLSIDQNAQGLARYAIICQENGLVPIVEPEILVDGPHDIDRCAYVTEVVLAACYKALNDQHVXLLEGTLLKPNMVTPGSDSKKVTPEVIAQYTVRTLQRTVPAAVPAVVFLSGGQSEEEATLNLNAMNKLSTKKPWALSFSFGXFLARCKANSEATLGTYKGDAAADTESLHVKDYKY

SEQ ID NO: 269112 - protein, 125 aa, Zea mays
  unsure (1)..(125): unsure at all Xaa locations
  Clone ID: MRT4577_177028C.1.pep
PKERSAXLVRTVRTEYNYVDATVRECCLPTSRAMVTCVVLALLSGGGSFLTVTENTVFLQHVVILEDVRSNIVSAELVLVVARRRAALSCQCMARSARSVVLVMSFPISAARPHLQCSVIPETPL

SEQ ID NO: 269113 - protein, 334 aa, Zea mays
  unsure (1)..(334): unsure at all Xaa locations
  Clone ID: MRT4577_177029C.1.pep
MSAYCGKYADELIKNAAYIGTPGKGILAADESTGTIGKRLSSINVENVEENRRALRELLFCCPGALQYISGVILFEETLYQKTKDGKPFVDVLKEGGVLPGIKVDKGTIEVVGTDKETTTQGHDDLGKRCAKYYEAGARFAKWRAVLKIGPNEPSQLXPIVEPEILVDGPHDIDRCAYVTETVLAACYKALNEHHVLLEGTLLKPNMVTPGSDSKKVTPEVIAQYTVRTLQRTVPAAVPAVVFLSGGQSEEEATLNLNAMNKLSTKKPWALSFSFGRALQASTLKAWAGKVENVEKARAAFLARCKANSEATLGTYKGDAAADTESLHVKDYKY

SEQ ID NO: 269114 - protein, 59 aa, Zea mays
  unsure (1)..(59): unsure at all Xaa locations
  Clone ID: MRT4577_17702C.1.pep
CFHIHILQLMIIRGFAMIHKRVNQCIWAHGGTRFKYTWQGHSSTYSXYLIKRNNFLGSS

SEQ ID NO: 269115 - protein, 59 aa, Zea mays
  Clone ID: MRT4577_177030C.1.pep
KACRQSLRAIQSMKNTHKRDITLGGPIHGINGKKTTSIENARNSSIEWIIIKRHAGRHY

SEQ ID NO: 269116 - protein, 156 aa, Zea mays
  Clone ID: MRT4577_177031C.1.pep
MSSSRMLPTLAPPARVSLLLMSPLAPLASAFPGSDSKKVTPEVIAEYTVRTLQRTVPAAVPAVVFLSGGQSEEEATRNLNAMNKLSTKKPWSLSFSFGRALQASTLKAWAGKVENLEKARAAFLARCKANSEATLGTYKGDAAADTESLHVKDYKY

SEQ ID NO: 269117 - protein, 49 aa, Zea mays
  Clone ID: MRT4577_177032C.1.pep
ITTYNRNFKLKLILQSIYTNNIIHIYRKSLIPSTKTTRSITNTSTHNFQ

SEQ ID NO: 269118 - protein, 322 aa, Zea mays
  unsure (1)..(322): unsure at all Xaa locations
  Clone ID: MRT4577_177033C.1.pep
MSAYCGKYADELIKNAAYIGTPGKGILAADESTGTIGKRLSSINVENVEENRRALRELLFCCPGALQYISGVILFEETLYQKTIEVVGTDKETTTQGHDDLGKRCXFAKWRAVLKIGPNEPSQLAIDLNAQGLARYAIICQENGLVPIVEPEILVDGPHDIDRCAYVTETVLAACYKALNEHHVLLEGTLLKPNMVTPGSDSKKVTPEVIAQYTVRTLQRTVPAAVPAVVFLSGGQSEEEATLNLNAMNKLSTKKPWALSFSFGRALQASTLKAWAGKVENVEKARAAFLARCKANSEATLGTYKGDAAADTESLHVKDYKY

SEQ ID NO: 269119 - protein, 150 aa, Zea mays
  unsure (1)..(150): unsure at all Xaa locations
  Clone ID: MRT4577_177034C.1.pep
MVEYPAASAARLGHTNHFPLINALQTYRRGVGGRSKLSRTQGPRLFGFSSTLLPRGAMLELPFDGHENGKVXLDGRNITCQRRPSPRGXXRGGGGGGYCGGRGGXGYGGGGRRDGGGGYGGGGGGYGGGGGYXGGGGGYGGGNRGGGYGI

SEQ ID NO: 269120 - protein, 254 aa, Zea mays
  unsure (1)..(254): unsure at all Xaa locations
  Clone ID: MRT4577_177035C.1.pep
MSAYCGKYKDELIKNAAYIGTPGKGILAADESTGTIGKRFASINVENVEDNRRALRELLFCTPGALQYLSGVILFEETLYQSTKGGKPFVDILKEGNVLPGIKVDKGTVELAGTNGETTTQGFDDLGKRCAKYYEAGARFAKWRAVLKIGLTEPSQLSIDQNAQGLARYAIICQENGLVPIVEPEILVDGPHDIDRCAYVTEMVLAACYKALNDQHVLLEGTLLKPNMVTPGSDAKKVXPEVIAEYXVRTLRGR

SEQ ID NO: 269121 - protein, 258 aa, Zea mays
  unsure (1)..(258): unsure at all Xaa locations
  Clone ID: MRT4577_177036C.1.pep
MSAYCGKYKDELIKNAAYIGTPGKGILAADESTGTIGKRFASINVENVEDNRRALRELLFCTPGALQYLSGVILFEETLYQSTKGGKPFVDILKEGNVLPGIKVDKGTVELAGTNGETTTQGFDDLGKRCAKYYEAGARFAKWRAVLKIGPTEPSQLSIDQNAQGLARYAIICQENGLVPIVEPEILVDGPHDIDRCAYVTEMVLAACYKALNDQHVLLEGTLLKPNMVTPGSDAKKXVAPEVIAEYTVRTLQRXVPA

SEQ ID NO: 269122 - protein, 103 aa, Zea mays
  Clone ID: MRT4577_177037C.1.pep
MAGLQRSSETFRRSGSSGLVWDDNKSFSGEIKPAEEDGGAGAARAVERSRSTGHGHAGYRATGRVPPALDPPSPRVAVCGFCRLFGGGKGKDGGNAKAKGRRH

SEQ ID NO: 269123 - protein, 143 aa, Zea mays
  unsure (1)..(143): unsure at all Xaa locations
  Clone ID: MRT4577_177038C.1.pep
RSSRRAGILPSPSFLLSLFLSIPRRETRAPDWRRPPVREARQIFDSRGNPTVEADVCCSHGTFAKAAVPSGGSTGAYAPLKLRDGGSDYLGQGVSKAVNNVNSIIAPXLVGKDPTRSLXFDIFMAQELDGTXNEWGXWCKEKA

SEQ ID NO: 269124 - protein, 39 aa, Zea mays
  Clone ID: MRT4577_177039C.1.pep
EHSNETMSIVPCILLILKNPNYIALYKAITPASQPTQET

SEQ ID NO: 269125 - protein, 201 aa, Zea mays
  Clone ID: MRT4577_17703C.1.pep
MQYRQPCRLRLFEEMSSSSSSSLLSGSNTVSVELPLIPCKLCNGVVIERVSKQPESTSRKFYRCRAKKMDGSQCDFFHWQASYAVLLIKDGVVSGDQCLELLMVALNDHGKAVESLTNSIREMKKKLSDLELVMEELDNVKKSMKAAMVEIEENKKSIAALKLMENEMQMLKGSTKVKPRNMELCFLLLALIGWFVMGQMN

SEQ ID NO: 269126 - protein, 88 aa, Zea mays
  Clone ID: MRT4577_177040C.1.pep
LRSSSDLKYLKWIQTISAMQTIKCVVVGDGAVGKTCLLISYTTNKFPSEYVPTVFDNYAVTVMIGGEPYTLGLFDTAGQEDYDRLRPL

SEQ ID NO: 269127 - protein, 126 aa, Zea mays
  Clone ID: MRT4577_177041C.1.pep
KKKRSWILALYRFCTLRIYLSFGRLRAETGIKPWHLKVMMPRELPNCFIPFCWAENWGTKEKGGVHVSTMAIQTNGILFLYKRERVATIEPLSLAGKDRGHSQHWLIIFDVSISKPNMKSRFHTVP

SEQ ID NO: 269128 - protein, 84 aa, Zea mays
  Clone ID: MRT4577_177042C.1.pep
KMGGDGHHEDPGRVTPKRVWTPCGGQGNYVAQWRQRSAVGAGVVFFLSFLAVNLIGKHAERRSPPSIPVPSQRWCTHTLDDSPN

SEQ ID NO: 269129 - protein, 45 aa, Zea mays
  Clone ID: MRT4577_177043C.1.pep
DIGGNTTKVDMGKKSYPYQFKKKPTNLFQVCIFKKKFFRASIKLI

SEQ ID NO: 269130 - protein, 152 aa, Zea mays
  unsure (1)..(152): unsure at all Xaa locations
  Clone ID: MRT4577_177044C.1.pep
WLVLVWHGNATTEQIGEPRSALQYEYKVFINPSISDVLCTTTIEALSMGKFMICARHPXNEFFMSFXPNCLTYKTSEEFVARVKEAMDREPQQLTPEQRYNLSWEAATERFMEYSDLEKVLNSEAAQPEQGRKRKNKRTSQPNLSSVFRAHL

SEQ ID NO: 269131 - protein, 45 aa, Zea mays
  Clone ID: MRT4577_177045C.1.pep
PISKKDTIAGNRISGFSCVGARVLHVTECQQEHLESILIRLHLRK

SEQ ID NO: 269132 - protein, 81 aa, Zea mays
  Clone ID: MRT4577_177046C.1.pep
MQNEEGKTVDLYVPRKCSATNRIITAKDHASVQINIGHLDANGLYDGHFTTFALSGFVRAQGDADSSLDRLWQKKKAEIKQ

SEQ ID NO: 269133 - protein, 69 aa, Zea mays
  Clone ID: MRT4577_177047C.1.pep
SWCSKHVHRNWNKKNNPNRGALMLNHPKMAGPPLWALSVGTLALNKCPVGFKGFPRTHKSLKKKRVLKC

SEQ ID NO: 269134 - protein, 81 aa, Zea mays; identical to SEQ ID NO: 269132
  Clone ID: MRT4577_177048C.1.pep

SEQ ID NO: 269135 - protein, 81 aa, Zea mays
  Clone ID: MRT4577_177049C.1.pep
MQNEEGKMVDLYVPRKCSATNRIITAKDHASVQINIGHVDANGLYDGHFTTFALSGFVRAQGDADSSLDRLWQKKKAEIKQ

SEQ ID NO: 269136 - protein, 154 aa, Zea mays
  Clone ID: MRT4577_17704C.1.pep
SEHVLDEAERSLHDALCVLSQTVNDTRVLFGGGWPEMLMAKEVDELARKTPGKRSHAIDAFSHALQAIPTIIADNAGLDSAELISQLRAEHHKENCTAGIDVITGTVGDMQRLGIQESFKVKQAILLSATEAAEMILRVDEIISCAPRRREDRM

SEQ ID NO: 269137 - protein, 249 aa, Zea mays
  Clone ID: MRT4577_177050C.1.pep
GKVIVDLCLDCVRKLADNCTGLQGFLVFNAVGGGTGSGLGSLLLERLSVDYGNKSKLGFTIYPSPQVAQLFYGLVKAGKQARPEKFEIPSKIKKKAEDYINSLQQEAQAKAQALHFEDELARKRMPDWISSLTRSATLSVSEVEALYKLFKKINLAFIDDGLINKVSNGCLLLQANHARRSRRPTTLRARSAAAMQGFPGGAPDPQQLQATMLAIEQACSLIQLLISDWESVRWSLHHVCSLWVCPCSG

SEQ ID NO: 269138 - protein, 461 aa, Zea mays
  Clone ID: MRT4577_177051C.1.pep
MVEGLLVGAESTVDLPPEKVELLKEAFDDLVAPFASFVVESPAGVCRAKRTSGVVASASVASPTGNIANYLSLAEVDSIYLPVPVYFIFIGFDGNGRHELKLGPEELERWFTKIDHVFEHTRIPLVGEVLTPFYKTTVKKLQHYDLPLVGHVNHNFSVHAIHMGEDVLSVFEHAIKVLSCKDDLVDSRFPLLLRTSLARIRLLTVSRYVIDVCLPDSCGVLIRFVDMSDNEKLVGEGTTPQGADWEVVTLTASATQSSSSRGRRTQLTTLPVATTRGFLVFNVVGGGTGSGLGSLLLERLLVDYGNKSKLGFTIYPSPQVAQLFYGLVKAVSVSEVEALYKLFKKINIAFIDDGLINKVSNGCLLLQANHARRSRRPTTLRERSATAMQGFPGGAPDPQQLQATMLAIEQACSLIQLLISDWESVRCHFTTFALSGFVRAQGDADSLLDRMWQKKKAEIKQ

SEQ ID NO: 269139 - protein, 81 aa, Zea mays; identical to SEQ ID NO: 269132
  Clone ID: MRT4577_177052C.1.pep

SEQ ID NO: 269140 - protein, 64 aa, Zea mays
  Clone ID: MRT4577_177053C.1.pep
FSMSPVVAELCLEVPSCARSWSEVSGGASATTGGRSWRRWSSYKCSQLLCSEALSAAPSPLRLA

SEQ ID NO: 269141 - protein, 87 aa, Zea mays
  Clone ID: MRT4577_177054C.1.pep
HSKGPNPGGTLRNANVGKKGPPPKALGNLISPKGDPQGSPQREERFKPPPGIGPALRKKIFFCPALALTIYQLVSVPKKKETPQPGI

SEQ ID NO: 269142 - protein, 97 aa, Zea mays
  unsure (1)..(97): unsure at all Xaa locations
  Clone ID: MRT4577_177055C.1.pep
WAGTKLLPAGDHLLLLYVIKEPDYEHSEAILWXEXTGSPLIPLSXLSDPTITKKNGGKPDKENLYLLNTTATQREIMXVVKVLRGXDPREQALSSYP

SEQ ID NO: 269143 - protein, 209 aa, Zea mays
  Clone ID: MRT4577_177056C.1.pep
MGTRMPIFPRLSSALSTALLEWILMLLLFIDAVYSFLVTRFARLCRLPAPCPFCSRLDHFLGNEKPCFYRDLICKTHKSEISSLAFCSLHQKLAGARNMCEGCCGEVAGDDKTDETDSNQRIGDAFNSPREKVCSCCGQHFKRRSVALSSRETAELEPTRAFGSPKTYTEYSVVCQVDEPLEPKDIYHQSDYRSNEPDGLLQMTSDSET

SEQ ID NO: 269144 - protein, 162 aa, Zea mays
  Clone ID: MRT4577_177057C.1.pep
AQPQQQKPLPGLSCPRRRWRIWAPSAATIGSRASPSTTCRSRGTPPFFRAPCWSRRWPPKWSRTGASPFFETLRRPRGRPDAAQPKLCIVQFFFMDPPPPPKKVLLISCSRGVGQKYPPAFFKFPCSIDVHPPLIFAKCRHSFVFWRQIFRCSEYNFRWVIP

SEQ ID NO: 269145 - protein, 70 aa, Zea mays
  Clone ID: MRT4577_177058C.1.pep
PPNRLEGRVKDMGPDFHRKRIQRFWTYLKEVGEGTNLAGLLFQPIYSNWRVFLLGFRSHRERRPGPHPIT

SEQ ID NO: 269146 - protein, 47 aa, Zea mays
  Clone ID: MRT4577_177059C.1.pep
PLPFLPSGIFGANYPRISGGIYLIWRRLPELGLGVGGSERVGRVESV

SEQ ID NO: 269147 - protein, 56 aa, Zea mays
  Clone ID: MRT4577_17705C.1.pep
MPSLSSLLSGSNTASAELPLIPCKLCNGVVIERVSKQPETTSRKFYRCRAKKTDGS

SEQ ID NO: 269148 - protein, 86 aa, Zea mays
  unsure (1)..(86): unsure at all Xaa locations
  Clone ID: MRT4577_177060C.1.pep
LRSKPKRELRLVQRGRGLPAQCCEYAPYDDRKGPERVEGAYHQRARRGRQQHRGRAGRGHRQGSPATTTSRXRSATYVRFSASHAD

SEQ ID NO: 269149 - protein, 416 aa, Zea mays
  Clone ID: MRT4577_177061C.1.pep
MVDVEETGNKLQSQMRLHAEPEDDAADLPLPALFDRASRLHALASSSALDQDGIRTGVDLLRRCDDMVSKLGLFSPNETKEDVSTANLKYLLVPYYLAEMTEKIAQEDRIPVLKTSQDHLKEFIALCEVLELIPEDELELSRQKQPDTMTNRRAQKVARFKRQKAAETKLQEIRERKERRGRSLRAAALSAPIEAGEEDDLENDGEEEREAWLATISLAICKAFDLLDMLKKEEEMLLAVKERKAKDGNAFAREMLDERTKKAEAWHHKAASRVAYSKPADPITCATFAQDVIEGRASVSQAHEHKHQPLIFGPASIVGGGLTSERERMAAQVFQPSYRMPTMSIEEAGLREMKMMEKWQERTAELMKESTSAWHKDGSSSAQEDEDAEEEKARAWDDWKDDNPRGAGNKKLTPCG

SEQ ID NO: 269150 - protein, 415 aa, Zea mays
  Clone ID: MRT4577_177062C.1.pep
MEVSSGTLEAGLLLLLLLPLAATPSRAATMARSPSSSTAVFQLQGDVYPTGHYYVTMNIGNPAKPYFLDVDTGSDLTWLQCDAPCRSCNKVPHPLYRPTANRLVPCANALCTALHSGQGSNNKCPSPKQCDYQIKYTDSASSQGVLINDSFSLPMRSSNIRPGLTFGCGYDQQVGKNGAVQAAIDGMLGLGRGSVSLVSQLKQQGITKNVVGHCLSTNGGGFLFFGDDVVPSSRVTWVPMAQRTSGNYYSPGSGTLYFDRRSLGVKPMEVVFDSGSTYTYFTAQPYQAVVSALKGGLSKSLKQVSDPTLPLCWKGQKAFKSVFDVKNEFKSMFLSFASAKNAAMEIPPENYLIVTKNGNVCLGILDGTAAKLSFNVIGDITMQDQMVIYDNEKSQLGWARGACTRSAKSILSSFP

SEQ ID NO: 269151 - protein, 127 aa, Zea mays
  unsure (1)..(127): unsure at all Xaa locations
  Clone ID: MRT4577_177063C.1.pep
GLDPRPKKKKKKKKKKKKKKKKKKKKKKKXRKKTKKNQKKKKKKNKKKNKRRQQKKNKGHGRKKHNLWGSRGPKXNSLKKKTQNNHWARDEKPTKREKTGHAKKHPPGRGTATTHRRDKKKRTRGRL

SEQ ID NO: 269152 - protein, 131 aa, Zea mays
  Clone ID: MRT4577_177064C.1.pep
EPVACVHDVSYPEGYDPSASTSRAIAGGADASEPAKKFPFQLDPFQAEAIRCLDNGESVMVSAHTSAGKTVVALYAIAMSLRNQQRVIYTSPIKALSNQKYREFKEEFSDVGLMTGDVTIEPNASWLVMTT

SEQ ID NO: 269153 - protein, 57 aa, Zea mays
  Clone ID: MRT4577_177065C.1.pep
KDAHPSIFRKQNLIFEERRSPQKFQDCSPWGLPGVPNFWNELVYVQLLIKQHQMGPQ

SEQ ID NO: 269154 - protein, 478 aa, Zea mays
  unsure (1)..(478): unsure at all Xaa locations
  Clone ID: MRT4577_177066C.1.pep
MAGSSMDTEAAGKELKQGSGGGGGYTMPATAHAVDTDSWQQVGLLLVIGFNCAYVLSFSNLMMVPLGWAWGVACLLLVGAAAWYANWLLAGLHFVDGQRFIRYRDLMGFVFGRNMYYITWFLQFATLLLCNMGFILLGARALKVKKTVXPVVTPPSSIYXSKSXYVLVVIIIINQAINTEFTHTPARLQWFITATGIVYFAFAYFVPTISAMRNWLATSAALTLAYDVALLAILIRDGKSNKQKDYDVHAGSQAEKVFNALGAVAAILVCNTSGLLPEIQSTVREPAVRGMRRALLLQYTAGAAGYYGISVAGYWAYGSAVSEYLPNELGGPRWAAVLINATAFLQSIVSQHLFTVPIHEAMDTRLQRLDEGMFSRYNLTRRVCARGLVFGFNVFVTALFPFMGDFVNLVGSLALVPLTFTFPSMAVLKIKGKSGGRCNRLWHWGIIVLSSALCVATTAAAVRLIFNNARIYHFFADM

SEQ ID NO: 269155 - protein, 70 aa, Zea mays
  Clone ID: MRT4577_177067C.1.pep
LRSWPKSSAASSPRVQFSTVITSLRDKISSQDVNHMIRRAHTAGAGQVMPDEFVLMIQPAYRRICGSRAR

SEQ ID NO: 269156 - protein, 48 aa, Zea mays
  Clone ID: MRT4577_177069C.1.pep
GSLCDSKYDHCIPGSVRKSCCSVSSYNLVMWMLPFKSEFTVINLIMCF

SEQ ID NO: 269157 - protein, 204 aa, Zea mays
  Clone ID: MRT4577_17706C.1.pep
MKLKLLSPCLLLLAFFATAAYAASASASRAAAVVRGAGAPSQSELESDPENQCVYTVYVRTGSIWKGGTDSTIGVTLLGPDGTGIRIRDLAGWGGLMGAGHDYYERGNLDIFSGRGPCMSQAPCAMNLTSDGTGAHHGWYCNYLEATVTGPHLGCAQQLFTVEQWLATDASPYRLYAVVDKCKTKRQEPRRSPAGEAEATVTAL

SEQ ID NO: 269158 - protein, 141 aa, Zea mays
  unsure (1)..(141): unsure at all Xaa locations
  Clone ID: MRT4577_177070C.1.pep
NARRREIRRRETSPPTIRPPAANRAPKTSPPRNLAAHLRPTEHRKPRRPLTTSSGMRQMRREVGPSTSRRATCREQSASSAAIAQGGADEGGANTAADGEEGGDYAVAASESLSAYTEGLLITIQGGATQGESGPRXACSG

SEQ ID NO: 269159 - protein, 76 aa, Zea mays
  unsure (1)..(76): unsure at all Xaa locations
  Clone ID: MRT4577_177071C.1.pep
RSGWRLRRRCCPPGPPSAPGCSVGCSRGCPPARSRPCPPRPLWRARCPXPLSRSXAPASXCAWGVRAGWXXFGGFL

SEQ ID NO: 269160 - protein, 102 aa, Zea mays
  Clone ID: MRT4577_177072C.1.pep
MERVASSYCVSLLAQSRRAYTVAAAMAKKGAAARRVDEKKAAAALTKRVMGKKEVNTAAAAAAEEKAWVPDPVTGYYRPAGSAKEVDAAELRAKLLTEAAAN

SEQ ID NO: 269161 - protein, 90 aa, Zea mays
  Clone ID: MRT4577_177073C.1.pep
GRKLREESPKGGQFSEGWGVKSDGLNIRSFSTRVQLLPEGPCHWPRPDILMAPILILISFGSVLLKSFLFFLGFSKEFFVPMFYKSFICL

SEQ ID NO: 269162 - protein, 324 aa, Zea mays
  unsure (1)..(324): unsure at all Xaa locations
  Clone ID: MRT4577_177074C.1.pep
MASSAVAPRWLRGKVKAVTSGDCLVIMGCTKAEIEPEKSITLSYLMAPRLARRGGVDEPFAWESREFLRKLCIGKEVTFKVDYTAPNIGREFGTVFLCDKNVAYSVVSAGWAKVKEQGSKGGEQNPHLAELLRLEEVAKQQGVGRWSKEPGAAEESIRYLPPSAIGEASGFDAKGFAVENKGKSLEAIVEQVRDGSTVRVYLLPNFQFVQIYVAGVQAPSMGRRPSVPTVIAETDDTANVANGEDSEGTPAQLTTAQRLVASAASAEIPPDRYGREAKHFTEARVLSRDLRIXVVEGTDSFXNIIGXSVYYPDGETAKDLALEL

SEQ ID NO: 269163 - protein, 129 aa, Zea mays
  Clone ID: MRT4577_177075C.1.pep
MASSAVAPRWLRGKVKAVTSGDCLVIMGCTKAEIEPEKSITLSYLMAPRLARRGGVDEPFAWESREFLRKLCIGKEVTFKVDYTAPNIGREFGTVFLCDKNVAYSVVSAGWAKVKEQGSKGGEQNPTLV

SEQ ID NO: 269164 - protein, 97 aa, Zea mays
  Clone ID: MRT4577_177076C.1.pep
SGPCYIPGPMGPKAAIQPSQNKPSTKHNAVNTTTMNTSHAKKTLPTFHSYITDAHHKKQNTHATHNFYTYNIYILNALTQTLHHLQLFSNDIYLINS

SEQ ID NO: 269165 - protein, 43 aa, Zea mays
  Clone ID: MRT4577_177077C.1.pep
DHQLPLLIKEYYPYITLVYQILYFFITFKHYKLLYFNSINFKI

SEQ ID NO: 269166 - protein, 66 aa, Zea mays
  Clone ID: MRT4577_177078C.1.pep
PQTNLSFNRSGIWDKGDSHFGPRYIQGLKFFGLRDQKMDLNFGRAGPGNTRGQEIFYPPTKSPWLF

SEQ ID NO: 269167 - protein, 59 aa, Zea mays
  Clone ID: MRT4577_177079C.1.pep
LRYCVQKEEVGDLSCDNCDVIYPSGTKASVVGIEQKTNGTHEDKQDKTTDDETSYYYVC

SEQ ID NO: 269168 - protein, 361 aa, Zea mays
  unsure (1)..(361): unsure at all Xaa locations
  Clone ID: MRT4577_17707C.1.pep
MERVLKDDAVEEKGDRARMASFVGAMAISDLAKTTLGPKGMDKILQSTGRGRNVTVTNDGATILKSPHIDNPAAKVLVDISKVQDDEVGDGTTSVVVLAGELLKEAEKLINMKIHPMTIIAGYRMALECARNALLQNTMDNKENTDKFRADLMNIAMTTLSSKILSQDKEYFAELAXDAVLRLKGSTNLEAIQILKKPGGSLKDSFLDEGFILDKKIGIGQPKRIENAKILVANSAMDTDLRXYGACVWVDSMFRVADIEAAEKQKMRKKVQKIIAHGINYFVNRQLIYNFPEELFVDVGILAIEHADFEGIERLALVTGGEIASTFDNPESQAARLTILHRGAVRSSAKEAVEIRGDRKP

SEQ ID NO: 269169 - protein, 54 aa, Zea mays
  unsure (1)..(54): unsure at all Xaa locations
  Clone ID: MRT4577_177080C.1.pep
RSFRDVXSHERSHTGEKPFVCTECGKAFSYYSSFHRHRRTHQTVTLNTELEKTS

SEQ ID NO: 269170 - protein, 79 aa, Zea mays
  Clone ID: MRT4577_177081C.1.pep
EIDKGTAITANATTIQRVGLNATGDFYPRMNECWRHPIAWNQLLLATLWLSIAIVALPIYLLDDAGYNHLYRPYDDNHH

SEQ ID NO: 269171 - protein, 147 aa, Zea mays
  Clone ID: MRT4577_177082C.1.pep
SARPEPAASPPGMSATEAKLSTRQIHCCSAASSARPPRHHRSVMAAGTFIRCHTPPGLAHVLIQPANGRIRFPLVRPRPFYLAGVVKAPTLSTKSTASRPCSVSGGAASQRPPLHRALLNPTASPKAHSAVAALLRPRSPPAGEQHL

SEQ ID NO: 269172 - protein, 113 aa, Zea mays
  unsure (1)..(113): unsure at all Xaa locations
  Clone ID: MRT4577_177083C.1.pep
QQRQGRAQHAADPAGGRQAHHRQDPRPRRRAAAAPRRRRRKKTXAGARRRPTGRQDAEERGPXRHRSGGHKEAASAQRAQQGQPQAXQRERKRKRGDGSTXGARPQQRRRAGR

SEQ ID NO: 269173 - protein, 82 aa, Zea mays
  Clone ID: MRT4577_177084C.1.pep
YYSTRCYECIKYYYIPGRQNTLPNKSLVFSNWEANILPHTRSLIWLLLWYHLRTKTTKLRCFLTYNNMGLKTLSTKYTFASL

SEQ ID NO: 269174 - protein, 59 aa, Zea mays
  Clone ID: MRT4577_177085C.1.pep
SNKKTKQCFRRKKPYNQDALVELPRSLPERMLAMELVQPTLVKHKHQHRQNELATTTNN

SEQ ID NO: 269175 - protein, 62 aa, Zea mays
  Clone ID: MRT4577_177086C.1.pep
AYVGSEFGSRGGSDDYVYGGEDEEEDDDDYDDGDGDNEEDEEEEEEQDDDDDVPQPPTKKRK

SEQ ID NO: 269176 - protein, 42 aa, Zea mays
  Clone ID: MRT4577_177087C.1.pep
SPVELMRATTQAVPAAPGGSQTAVGGPSSCSRDRHHLPSLQG

SEQ ID NO: 269177 - protein, 58 aa, Zea mays
  Clone ID: MRT4577_177088C.1.pep
TTTEFQLNHISMYRNKKIARALLICSSLKHLAKNISARKMKIANRQARTYINITCLTP

SEQ ID NO: 269178 - protein, 76 aa, Zea mays
  Clone ID: MRT4577_177089C.1.pep
KAAHAGCRELSDAYSPVHDTQPADFCCPEPTLARDCTPLYAYTYAIDPSAIYRLKNAASDSSTSPSAELVTRGNWT

SEQ ID NO: 269179 - protein, 35 aa, Zea mays
  Clone ID: MRT4577_17708C.1.pep
DIDAARRPALLEKSGQLRQELLALEQHHRGDAGST

SEQ ID NO: 269180 - protein, 54 aa, Zea mays
  Clone ID: MRT4577_177090C.1.pep
KERAIWKINIHRMTFCLQVFRSLSWAFVYNLISAVDSLPPGFRRAPRVYSNSVS

SEQ ID NO: 269181 - protein, 45 aa, Zea mays
  Clone ID: MRT4577_177091C.1.pep
HLKVLSTFIAAVLEDSVINRSARTKDLRDVYWAFPIFLSIKGYII

SEQ ID NO: 269182 - protein, 385 aa, Zea mays
  Clone ID: MRT4577_177092C.1.pep
MILADGLFNFLSIVACTLHTMRKRRSRQQPIIIQGGGCGGGSEAGPGDTPPTRPHCLNAAAEQPKKSFDDRRRAQVFLRDHISNSVNIVCYVLLSMVSVAAIPYLYPQMRRAHVALIYLAAPVVAFCDAYAFGVTDMNLSSTYGKLAMVLVGSSVGRNDGGVVAGLVACGIVMGTMSNANNLMQDLKTGYLTLTSPHTVFISQAIGTALGCVVNPVMFWAFYRVVQNGDTDVFDAPYARVYRSIAMLSAGQDGIPMHSLWLCKLFFALALALSVFREVAMWKRWRVAHYIPSIICVAIAFVVPARIPIDMFVGSLVLYLWRRADPSKAPTFSMAVASGMICGDGLGMLLSSTMALMHARAPICIKFMSRTDNVKLDAFLATLPVT

SEQ ID NO: 269183 - protein, 57 aa, Zea mays
  Clone ID: MRT4577_177093C.1.pep
RDDFCDVASLPVDMHHPSVDPYSAGALDLPGRSTARVTEYSPSRSIRPRFGYCMRNS

SEQ ID NO: 269184 - protein, 403 aa, Zea mays
  unsure (1)..(403): unsure at all Xaa locations
  Clone ID: MRT4577_177094C.1.pep
MLRVRNRLLPLLGAASPLPSPIHIHLRVCRLLSTSTSTSTATVPAPFSLENYLVAACGFAPAQARLVSKKAFNELSRESKRSSEEHSCRRLISASNPDAILALLSGAGLSRADIAAVVFADPLILRASVSKIAXPALSLSATASACLLPRSLASXPGRLTRSPPXDVVPKVEFFLSFLGSFDRVLAVAKANLGIFNANLEKVIKPNIDLFRQRGVRDVPKICLHRPRTLSFNLERVKEFLLRAEELGVPAASPLFMQAVGVVTSFPPEKVAAKLDFFKRTLGCSESEVSNAVSKMPQILALSEATLLRKIEFLVNEGAIEPQYIMQRPILLAFSLEKRLVPRYRVIKVLQGKGLLNSNMSLSSLASLAEETFKSKFVDCHKDCVPGLADAYAAACASIVPSTV

SEQ ID NO: 269185 - protein, 125 aa, Zea mays
  unsure (1)..(125): unsure at all Xaa locations
  Clone ID: MRT4577_177095C.1.pep
VDLAPTLALLFGVPXIPKNSFGVVLPKLLNSLTDDQKLRMLELNSWQILRLLQAQVSAFCLEDCINVESSIELDILPESIEQKLCFLLSKAISSHQSSRLHRGSDFKSVEAGYYGTAADNYHAFL

SEQ ID NO: 269186 - protein, 47 aa, Zea mays
  Clone ID: MRT4577_177096C.1.pep
RLHYERKARLPPGRVPRYRQLISPGFRRSFTSSSGPGPLFFFFFQYT

SEQ ID NO: 269187 - protein, 639 aa, Zea mays
  Clone ID: MRT4577_177097C.1.pep
FQKICAICLSAMRSGRGQALFTAECSHKFHFNCISSNVQHGNKICPICRAVWKQLPFQGPLAASAAHGSARVNPAIWPQMSMLSVNPLDELPVFGNPEPAVFNDDEQILLQPETAVGGEEGDEVPPLLEITTYNEFPATQESVAQEEFAILIHLKAPHVPSWVSTRAPLDLVTVLDVSGSMSGHKLALLKRAMRFVIENLDPSDRLSVVAFSSSAWRLFPLQRMTASGQQQSLQAVNSLAADGGTNIAEGLRKAARVVEDRQARNPVCSIMLLSDGVDSHNLPPRDGSAPDYGPLVPRSILPGSEHHVPIHAFGFGMDHDSRAMHAVAQMSGGTFSFIDVVGSIQDAFAQCIGGLLSVVAQETTLSVECADQGVLLTSIKSGGYASGADGDGRGGFVDVGRLYADEERDFLVTVRVPQSRGTIALVRPSCTYRDAATTEMVRVGGDPVTLLRAASPVSAGMSLQVEREWHRVHATEDIAAAQTAAEEYDYARAASILEARRLLLESCASLSSDQQTQALVAELREMQERVLNAELYEGSGRAYLLSGLSSHSWQRATARGDSTELTGLVHSYQTPFMVDMLNRSQALQPEVAEALSRSPTIASSRSSAPTPAPASSGSPWTRRGLRSFRPAKSFTGLSL

SEQ ID NO: 269188 - protein, 54 aa, Zea mays
  unsure (1)..(54): unsure at all Xaa locations
  Clone ID: MRT4577_177098C.1.pep
ISLXPRLESKCPLLHLALQVHVLSVHSSCELRNWDAGVPIEIWPPLRCDHLRPA

SEQ ID NO: 269189 - protein, 93 aa, Zea mays
  Clone ID: MRT4577_177099C.1.pep
HILNTVSYLYIFLICNCTIHRSSPCQAWPILLCYTAMNDATSLFTIKFFVKNEVYKVDADNYTYMNMDYIQVHLLMTTTRTYYGSTVALSSRS

SEQ ID NO: 269190 - protein, 125 aa, Zea mays
  Clone ID: MRT4577_17709C.1.pep
TASPFIRFRSDRSSLMGAGHDYYERGNLDIFSGRGPCMSQAPCAMNLTSDGTGAHHGWYCNYLEATVTGPHLGCAQQLFTVEQWLATDASPYRLYAVVDKCKTKRQEPRRSPPAAGEAEATVTAL

SEQ ID NO: 269191 - protein, 38 aa, Zea mays
  Clone ID: MRT4577_1770C.1.pep
WELRAPGGINRRVGTYPAPPQFREPRQLSVPHRHGILL

SEQ ID NO: 269192 - protein, 110 aa, Zea mays
  unsure (1)..(110): unsure at all Xaa locations
  Clone ID: MRT4577_177100C.1.pep
GPGPFVPRTPGGSFLCXPRLAADGAAPLLVPPGSLLPGXLAPAPAPSSSPSATAASGWPAMGLSPAVLQLAGTCFFSLGPCRSFFXVARPPRVSVLSCRCVXVPRCSVLL

SEQ ID NO: 269193 - protein, 29 aa, Zea mays
  Clone ID: MRT4577_177101C.1.pep
CYRDFFIVLHVPPRVVASTVCSCSLLHAT

SEQ ID NO: 269194 - protein, 200 aa, Zea mays
  unsure (1)..(200): unsure at all Xaa locations
  Clone ID: MRT4577_177102C.1.pep
MLCPPLHVLLLLLLLSLRAAPCPCFAATTDTLSPGNGLAGTAASARLVSNNSKFALGFFKTDSKSPNTYLGIWFNKVPKLTPLWSANGESPVVDPATPELAISGDGNLVIRDQATGSVVWSTRANITSNTTTTVAVLLSSGNLVLRSSSNASDVFWQSFDYPTDTLFAGAKIGWNKRTXLNRRLXVSGKNALDQAPGLYS

SEQ ID NO: 269195 - protein, 89 aa, Zea mays
  unsure (1)..(89): unsure at all Xaa locations
  Clone ID: MRT4577_177103C.1.pep
MLSGACEEDMKLAVGGAHMNLKVKGQDGHEVFFRVKRSTHLKKLVNAYXETXSVDMCAIALLFDGRTLCIEQTLDELEMEDCDXIDAML

SEQ ID NO: 269196 - protein, 98 aa, Zea mays
  Clone ID: MRT4577_177104C.1.pep
MAADSGARRQPSFTKVDQLRPGTHGHNLMLKVVDSKMVVQRGREGGPQGRQMRIAECLVGDETGIIVFTARNDQVDVIRPGTTVELRNAKIDMFKGFD

SEQ ID NO: 269197 - protein, 226 aa, Zea mays
  Clone ID: MRT4577_177105C.1.pep
MRRVVEARRPNHLPSRTLRFSLFLFFPYYPKYNATQRPYTQQPFCSPRERSLSLSTGDDSATAAALRETPRSSPTTSIRVREEEIATETMAADSGARRQPSFTKVDQLRPGTHGHNLILKVVDSKMVVQRGREGGPQGRQMRIAECLVGDETGIIVFTARNDQVDVIRPGTTVELRNAKIDMFKGSMRLAVDKWGIVKAAESSAEWTVKEDNNLSLIEFELVTVTE

SEQ ID NO: 269198 - protein, 55 aa, Zea mays
  Clone ID: MRT4577_177106C.1.pep
HLPPRTIALLENWEDYMDTLSGGLDDVCPSMSGGVNTNDRDDLHETCIDVAEDKL

SEQ ID NO: 269199 - protein, 39 aa, Zea mays
  Clone ID: MRT4577_177107C.1.pep
IDRLVGTEFCQVIITMQVMSTCVLLDRQSKLRLRGTPVC

SEQ ID NO: 269200 - protein, 55 aa, Zea mays
  Clone ID: MRT4577_177108C.1.pep
VFTSLYLCLTTQWGRSTSMAPICDALRRCEAILLTLTTSTKVAMQHSDNRVCRLR

SEQ ID NO: 269201 - protein, 189 aa, Zea mays
  Clone ID: MRT4577_177109C.1.pep
FGTRQGYGMTEAGPVLATVPGLRQEPYPVKSGSCGTVVRNAELKIVDPDTGAALGRNQPGEICIRGEQIMKGAPHTAPAVDLSSHFFAVAAVGCIALVFAKYGHLSFEFEASLSHAISATSQPSCGHATPLTPSWRLRQATSAHCHVGQCGARARVHRHAGPRVAWVQVGDMDKISCWSEYFGCKESVW

SEQ ID NO: 269202 - protein, 525 aa, Zea mays
  Clone ID: MRT4577_17710C.1.pep
MERVLKDDAVEEKGERARMASFVGAMAISDLVKTTLGPKGMDKILQSTGRGRNVTVTNDGATILKSLHIDNPAAKVLVDISKVQDDEVGDGTTSVVVLAGELLKEAEKLINMKIHPMTIIAGYRMALECARDSLLKKTMDNKENTDKFRSDLMNIAMTTLSSKILSQDKEYFAELAVDAVLRLKGSTNLESIQILKKPGGSLKDSFLDEGFILDKKIGIGQPKRIENAKILVANTAMDTDKVKIYGARVRVDSMSKVADIEAAEKQKMREKVQKIIAHGINCFVNRQLIYNFPEELFADAGILAIEHADFEGIERLALVTGGEIASTFDNPESVKLGQCKVIEEIMIGEDRLIHFSGVAMGQACTIVLRGASEHVLDEAERSLHDALCVLSQTVNDTRVLFGGGWPEMVMAKEVDELARKTPGKKSHAIDAFSHALQAIPTIIADNAGLDSADLISQLRAEHHKENSTAGIDVITGTVGDMQKLGIQESFKVKQAILLSATEAAEMILRVDEIITCAPRRREDRM

SEQ ID NO: 269203 - protein, 90 aa, Zea mays
  Clone ID: MRT4577_177110C.1.pep
ATSPPSPGAPARSGPPPGGAPPSSFHGGPPRAGGFLLGFHFGRQGGCFILGFKRPGVVNNWNFCFSLGPIRSQGGFPPGNLQILGEKMFQ

SEQ ID NO: 269204 - protein, 157 aa, Zea mays
  Clone ID: MRT4577_177111C.1.pep
NALDRFKEINPTVFGVSTDSHFTHLAWVEKPRKQGGLGPDLELPLIADKSTKISRNYGVLIEDEGIALRGLFIIDPKGVLRQITVNDLPVGRDVEETIRLVKAFQFTDEYGEVCPAGWQEGGKTMKADPKGSLEYFSAQGENDTSNETRIPINTRSQ

SEQ ID NO: 269205 - protein, 52 aa, Zea mays
  Clone ID: MRT4577_177112C.1.pep
RDRSASNTVSRRPQRARARVRTSTGGTPASSAEPRGLENAVIRALPAFTHAS

SEQ ID NO: 269206 - protein, 58 aa, Zea mays
  Clone ID: MRT4577_177113C.1.pep
PSSGGTTTEEVQNYALPSTSLPMRSVTLTTEAIVGATGLLIANMEGLLQTHHNLNRDH

SEQ ID NO: 269207 - protein, 257 aa, Zea mays
  unsure (1)..(257): unsure at all Xaa locations
  Clone ID: MRT4577_177114C.1.pep
MRAPVHPMGRHRPSYSSGRAMAWPAPPFLYAPSPLEAWASAAGAVAMAFLAVSEFRGDHLAYSKFSRGGGGGQQGTKQRQRQRVRVPSRVGMVLLYFPALAAALASFAVPGAVDGARAHVLSAAVAVHFLKRVLEALFLHRYSGSMPLATSLLIAGHYLFAGVGMIYAQRLRRRGLPEPRVDLLLPGVLAFAVGLAGNFYHHYLLSRLRARDGGDAGGEGAYRIPSGGLFGLVACPHYLFETLXFFXLXMVSQTLVA

SEQ ID NO: 269208 - protein, 58 aa, Zea mays
  Clone ID: MRT4577_177115C.1.pep
SHVISTCFHKKSKGHRRQLHRRQEVLHQSKTTVGYRMIYKDLSVALVTFILRFLNGGH

SEQ ID NO: 269209 - protein, 114 aa, Zea mays
  Clone ID: MRT4577_177116C.1.pep
PGSICSTPSDEKRGSICSSTGDEAGTRSQTPEARAQGVNGRENAGMKEAVHCGVSHPAHRAGIFVKKNAPPPHPAWRGLKKKKNSVFFVIRFARLSSDVTVLSVRRGPRRPTLR

SEQ ID NO: 269210 - protein, 243 aa, Zea mays
  unsure (1)..(243): unsure at all Xaa locations
  Clone ID: MRT4577_177117C.1.pep
RRRRWGRGVSSSSSSVGGSGLTTRLRTWRGGRGRFPPGGLGSASVPSPSASESASTFSPRTSAALSPSVTAASSSSSPPVPAASSPLSPSARAACSSFSPSVSSASASGSAFPASASRSESLSAAASSSTLASAASTLVSASAPLASGSATVPSALVSAASSXDAPXSISSALVSAASSLESSPSVSSAPLSADSSLELSSSASSSDMASTAVSTGSASVASGSGLPPPPPLERRGGMVAARG

SEQ ID NO: 269211 - protein, 59 aa, Zea mays
  Clone ID: MRT4577_177118C.1.pep
QSPIEERSQVLYSEKEHTARVIILPLCTMNSIPFYWAPNSFYGGPMVGSPGTNLLKPSS

SEQ ID NO: 269212 - protein, 123 aa, Zea mays
  unsure (1)..(123): unsure at all Xaa locations
  Clone ID: MRT4577_177119C.1.pep
MAASTMAISSTAMAGTPIKGGSFGEGRINMRKNVGKPKGGGSRSPWYGPHRVKDLGPFFGEPPSYLTGEVPGDYGWDTXAGLSRDPETFAKNRELEGIHSRWGMLGALGCVFPELLSRNGVKF

SEQ ID NO: 269213 - protein, 106 aa, Zea mays
  Clone ID: MRT4577_17711C.1.pep
NGRPFFFFFFFWTAGMPLLFFPYALAEPPRAKTRRRNETNRAITQRLHKTNVIRSLTYSNYTQQRQELASVDLDLLLVPRARSRWPRPRRLQVASVAAPAASPTRP

SEQ ID NO: 269214 - protein, 72 aa, Zea mays
  Clone ID: MRT4577_177120C.1.pep
ISRLMMSYHVQSRDTTESNQHVVHTDIHHAGVINVISEYEWRIGQHASACLGTAQDRPAYPLNLLRKAARHL

SEQ ID NO: 269215 - protein, 71 aa, Zea mays
  Clone ID: MRT4577_177121C.1.pep
HYSCLKNITTAPPLATTSHKRLNKLNTKSPQTDTDLIVKQTPPNETDPTLQPTRPRTRGRTRGRTRGRTRG

SEQ ID NO: 269216 - protein, 257 aa, Zea mays
  Clone ID: MRT4577_177122C.1.pep
SLAEVNDLLNQEVLKLQSQVEDLKQKCEAQHEQLQKSDKKAKSVASMATEESSKRNAAVEFVKFLDNELKGIADKLPVDVADSLKALQMRTQSLLREQSGHPLELVNPMERDHLHLSSGGSGRYDLVTHKSGGVGYLTMSQDGSSASGSAMSITSESPSHRFMENSSKAHGDFAPKQGTHGEVQLIEQFEPGVYVTLIQLKDGTKVFKRVRFSKRRFAENQAEEWWRENQERVFKKYSHPTHAPHGNTTSHEEEHHS

SEQ ID NO: 269217 - protein, 49 aa, Zea mays
  Clone ID: MRT4577_177123C.1.pep
TEYSYLYLHAPTGYATHQNAYNVQPHYSYGTMLHRLIQLTLNHVTGRTN

SEQ ID NO: 269218 - protein, 61 aa, Zea mays
  Clone ID: MRT4577_177124C.1.pep
IRLEADRNFYFTNVPHVKWMVSMNTSMGSERIEQTEVRLKKKNGVILIVLPEKFFGKDRSP

SEQ ID NO: 269219 - protein, 76 aa, Zea mays
  Clone ID: MRT4577_177125C.1.pep
LQRPLGSVFHATCLASGNQIVNSYSGSVEPTQSQERDRYLEFQSQQKGQAKTWEHHGRSCLPVALPVCLVLLGQSR

SEQ ID NO: 269220 - protein, 78 aa, Zea mays
  Clone ID: MRT4577_177126C.1.pep
RQNCVTFLQWVSSWRDGPSWVGVPLCQGSKGSVWKQALQKAIHGGFGQYPKFGVKTNQSGGLWPYYEGALFPARQDNM

SEQ ID NO: 269221 - protein, 220 aa, Zea mays
  Clone ID: MRT4577_177127C.1.pep
RLCLGELSSHGAGKRTKVLCLHGFRTSGAFLKKQISKWHPSILQQFEMVFPDGVFPAGGKSEIEGIFPPPYFEWYQFNMGATLLALLVGYQAQGKVLSDHPPIKFVVSISGCKFKDPSICDVTYKDPIKVKSVHFIGEKDWLKVPSEELASAFDEPLIIRHPHGHTVPRLDDVSVKQLSEWSSCILEDLETAIVPEALDSGNPSDKEATSAEFAENLVTA

SEQ ID NO: 269222 - protein, 161 aa, Zea mays
  Clone ID: MRT4577_177128C.1.pep
MEQDKRTKVLCLHGFRTSGAFLKKQISKWHPSILQQFEMVFPDGVFPAGGKSEIEGIFPPPYFEWYQFNMGATLLALLVGYQAQFKDPSIWDVTYKDPIKGKSGHFIGEKDWLKVPSEELASAFDEPLIIRHPHGHTVPRLGSHSSQIFLFDLPPWNQHMI

SEQ ID NO: 269223 - protein, 125 aa, Zea mays
  Clone ID: MRT4577_177129C.1.pep
MGHLFLLLVALLLLTSTRAAAAVHARASVIEEASFAGIRGVIGSRPPTCEGRCRSCGHCEAVQVPVSPQQLQRRKKEGLGLGSSRAAAAAATGGRARAMPASYYDHSNYKPLSWRCKCGRHILDP

SEQ ID NO: 269224 - protein, 181 aa, Zea mays
  Clone ID: MRT4577_17712C.1.pep
AHHRSSAVCCYCAVAPTKSPLESIIRSVSARAFICLIIHQAYAASASRAAAVVRGAGALSQSELESDPENQCVYTVYVRTGSIWKGGTDSTIGVTLLGADGTGIRIRDLAGWGGLMGAGHDYYERGNLDIFSGRGPCMSQAPCAMNLTSDGTGAHHGWYCNYLEATVTGPPLGCAQQLFTV

SEQ ID NO: 269225 - protein, 66 aa, Zea mays
  Clone ID: MRT4577_177130C.1.pep
MAKGKDVRIRVILECISCVRKGSNKESTGISRYSTQKNRHNTPGQLELRKFCRYCRKHTTHNEIKK

SEQ ID NO: 269226 - protein, 19 aa, Zea mays
  Clone ID: MRT4577_177131C.1.pep
MMCCVLLMHVPLLLVLCCS

SEQ ID NO: 269227 - protein, 99 aa, Zea mays
  Clone ID: MRT4577_177132C.1.pep
MVTEASFAGIRGVIGSRPPTCEGRCRSCGHCEAVQVPVSPQQLQRRKKEGLGLGRAAAAAAAAATGGGRARAMPASYYDHSNYKPLSWRCKCGRHILDP

SEQ ID NO: 269228 - protein, 598 aa, Zea mays
  Clone ID: MRT4577_177133C.1.pep
MRMEAPRSQKKVQRLTGCMGALSRFISRIGERGLPFYKLLKKVDKFQWNMEAQEALEALKKFLTTPPVLKPPSRATPGQPTRRSAPIYLLHDSHGFPIGDILHNKEAIGRIAKWARELGAHDIEFWPRTAIKTQALVDFISEWTEHQVLDSLEVVEVWRMYFDRSLKLQGAGAGILFIAPGGEQLKYALQLLFPASNNAAEYEALVHGLSITVSLGIKKLMVYDDSLVVISQINKDWDCLTDLMGKYCAAVRKLEDKFEGLEFHHVERDRNATVDALSKLGSSRAQAPPGIFVQEISQPSIITDQMEECNALSQPETDPNDWREHIIRRGAGGVFMKCIHSATGRQFLDEIHAGHCGVQAASRTLEGKAFRSGFYWPTAKIDAADLVQKCEACQFLSKQQHLFAQQLQTIPVTCLEFFDFCEQRSIHIKYASEAHPRANDQPSRALHGNIPFFMVYGSEAVLPVDLIFGAPRLTFESIAEAEAIRLEDIDVLEEERLNMVIQSARYQQTLRRYHDKVVQHRSFVVGDLVLRRVITGEGRHKLSPPWKGPFIVAEVTRPGSYRLTQMDGTEVGNSWNIEHLRKFYPYDASKVSKENCTL

SEQ ID NO: 269229 - protein, 48 aa, Zea mays
  Clone ID: MRT4577_177134C.1.pep
NSLLVESNRALYCELFAYFVHYFVVYLSRLIFVFKTLYAQFMRASLLN

SEQ ID NO: 269230 - protein, 90 aa, Zea mays
  unsure (1)..(90): unsure at all Xaa locations
  Clone ID: MRT4577_177135C.1.pep
SRGGLLAPPACVVXAXXFPXXKKKHIASPHPPXLPSKKDSKSENPALQPYRLQQAIAASNIPLSPLFQQTPALSLVQSLGPRPPRSKEIP

SEQ ID NO: 269231 - protein, 169 aa, Zea mays
  Clone ID: MRT4577_177136C.1.pep
MSLSRFSQWIWPGSRARNRRGRDREPPAWSSTAVTKGLFPDSPSGFREPDAGVGRTGMISRRGGRAEDRVDSEHGMVIVQSDGDGCLSDSDSDASDWSIGWLEPLAPDLHRDVDSEGSFAVLVPCYRRGRVDRPARPDGRFPGPGGVPAHGGPADNRTSVEQWVSSLQN

SEQ ID NO: 269232 - protein, 373 aa, Zea mays
  unsure (1)..(373): unsure at all Xaa locations
  Clone ID: MRT4577_177137C.1.pep
VDSLENCVEKPAGFKCECPSCDEARDLNEQRRHENWQIKVCKRISAETNFPNEEIIKLYLSDXIWLKVTKRSMVQHIREQHYAYLXLLSXVFFFGQGSKLAFVYSKNLNFXLFAEKGVPLLSWSKPDVEALVDLLSYKQNWEPSYIRQSMLPMLSTIYLREVASSSSTPLLLCDQYEFDSIERTKIRHGHPYYLVKWKRATRGMNSNMSSKKPVTEGETSSEVVVLDDDDNEDTVVCESPELLDEPDVPQVLMDDGCCFLLTDEDIQLVGAAFPKETARFQEEQRLKEARSRSRKSKSSLADSACKTPEGPRPSGVQLSITEFYRSKKAQNVESGKKPAGEGHAAREGSRKSSDRDLDKSLPKSVRRRLLFDC

SEQ ID NO: 269233 - protein, 241 aa, Zea mays
  Clone ID: MRT4577_177138C.1.pep
CLTARELKEQRRHENWQIKVCKRIAAETKFPNDEIIKLYLSDNNLVEEKGVPLLTWNKPDVEALVDLLSYKQNWEPSYIRQSMLPMLSTIYLREVASSPSTPLLLCDQYEFDSIQRIKIKHGHPYYLVKWKRATRGMNSIMSSNKPVMEGETSSEVVVLDEDDDLDAVVCESLELLDEPDVPQVLVDDGCCFVLTDEDIQLVGAAYPKETARFQEEQRLKEARSRSRKSKSSFSRQCVQDT

SEQ ID NO: 269234 - protein, 92 aa, Zea mays
  Clone ID: MRT4577_177139C.1.pep
TGCCSSWRIGRAPRWSLWAKKALVSTPSDLPAAASAEAAVRSMLAMPKQAVSSTAPRKLAEHVHRSKPQTGERKHGSFESSIRCVHRSLLEP

SEQ ID NO: 269235 - protein, 53 aa, Zea mays
  Clone ID: MRT4577_177140C.1.pep
VLMPLLIIILLALVHDQAFVKPVLTSLQCGSVRLQGPQAITSHLTKTTTVTTR

SEQ ID NO: 269236 - protein, 84 aa, Zea mays
  Clone ID: MRT4577_177141C.1.pep
FFFLLSLFPLLLHPSFLGSKTPLPKITTSPPSLLPPLFYSSISSLPPSSLCTTLSSIILPSKTFTSSPTISYLLLILNPSSHIP

SEQ ID NO: 269237 - protein, 99 aa, Zea mays
  Clone ID: MRT4577_177142C.1.pep
ARFFTRAASCSPPPTLPHLSSTSARLLATEVGRSSTLPGPPPPATVLVFPCSGSMATRSAQLSSSDLWSLPPHAPWLLEAPSAIPPNVRPLQLAGAPSA

SEQ ID NO: 269238 - protein, 122 aa, Zea mays
  Clone ID: MRT4577_177143C.1.pep
VRLMAQQRLFRADAMNAVGDQAGGALAASHPCYEEDHEVVARLGAAGVFRAVGTAIVSGRSTRRRWPRWSPCPPSAGSPRPASTSSYLDHYFWAVGMSLSFCYGCRRRTVVISIVIASAIIC

SEQ ID NO: 269239 - protein, 410 aa, Zea mays
  Clone ID: MRT4577_177144C.1.pep
MAIILVRAASPGLSAADSISHQGTLQCSTLLKTKRPAARRWMPCSLLGLHPWEAGRPSPAVYSSLAVNPAGEAVVSSEQKVYDVVLKQAALLKRQLRTPVLDARPQDMDMPRNGLKEAYDRCGEICEEYAKTFYLGTMLMTEERRRAIWAIYVWCRRTDELVDGPNANYITPTALDRWEKRLEDLFTGRPYDMLDAALSDTISRFPIDIQPFRDMIEGMRSDLRKTRYNNFDELYMYCYYVAGTVGLMSVPVMGIATESKATTESVYSAALALGIANQLTNILRDVGEDARRGRIYLPQDELAQAGLSDEDIFKGVVTNRWRNFMKRQIKRARMFFEEAERGVNELSQASRWPVWASLLLYRQILDEIEANDYNNFTKRAYVGKGKKLLALPVAYGKSLLLPCSLRNGQT

SEQ ID NO: 269240 - protein, 59 aa, Zea mays
  Clone ID: MRT4577_177145C.1.pep
PGSCIPYSRRPFFFFFFIRNRAKIYKSISNHPITHTTHWVYFAVDLNNPETNIKNPIPG

SEQ ID NO: 269241 - protein, 138 aa, Zea mays
  unsure (1)..(138): unsure at all Xaa locations
  Clone ID: MRT4577_177146C.1.pep
AVQAYRLQLALAASALTRPNAPIERPSLAPFNLPTNGTQPPPPPVLALINQLTLVNPCNXFQQQLVAFNPIALANLTVYQQQQQLQQFMPVLSQLSMVNPAVYLQLLSSSPLAVGNAPTYLQQQLLQQIVPALTQLAV

SEQ ID NO: 269242 - protein, 70 aa, Zea mays
  Clone ID: MRT4577_177147C.1.pep
FMPTQPKSTKRSATSMQLRTKLFFDYNLAYLDHSLPPLGLFLQIKFIFLSLSQTRLFGHKEKYSKRKIDQ

SEQ ID NO: 269243 - protein, 128 aa, Zea mays
  unsure (1)..(128): unsure at all Xaa locations
  Clone ID: MRT4577_177148C.1.pep
PPTPKSSPSPMFPXFWLQAPPPLTPMFCXYPPQTWPWGPAGVFPPFKPCIXAPLPGPXLVKFFPAPGGLSLSWVAPIPPFNVPLRIPILFPPPFFFFFCNPGPPPPILNSPPPFGFSEKTPPPPAWFP

SEQ ID NO: 269244 - protein, 42 aa, Zea mays
  Clone ID: MRT4577_177149C.1.pep
GPRFCPVYKTRKKIWAQDRKNGVVFKRGEGTLETGLHLKKGI

SEQ ID NO: 269245 - protein, 68 aa, Zea mays
  Clone ID: MRT4577_17714C.1.pep
IRLERHLLPFAPAAVIAVYRIEHTQAQFQPHAWPQNRLEVSLHWRGPLPAVHILFFATMHIRMSTQGL

SEQ ID NO: 269246 - protein, 228 aa, Zea mays
  Clone ID: MRT4577_177150C.1.pep
MARALHSPCFVAPLLWLTLLLVAVSPGGAFYLPGSYMHTYSQGEVIHAKVNSLTSIETEMPFNYYSLPYCRPQGGIKKSAENLGELLMGDQIDNSPYRFHVNVNESVFLCTTKGLNENDAKLLKQRTRDLYQVNMMLDNLPVMRFTKQNDVTVQWTGFPVGHSPPGASDDYIINHLKFKVLVHEYEGRNVEIIGTGEEGSAVISETDKNGMSGYQIVGFQVVPCSVKR

SEQ ID NO: 269247 - protein, 80 aa, Zea mays
  Clone ID: MRT4577_177151C.1.pep
FPFGPGCCLVKWTDPTSSTVVGKEKETQFSKGSKDPIGVFLGFFFGNLRVFLNSLKTVVEFQFPSRFCNGALELRFPWGF

SEQ ID NO: 269248 - protein, 57 aa, Zea mays
  Clone ID: MRT4577_177152C.1.pep
NLQQHLLRCQGCLRVHLLGGGATVRFSRSEPSSCSPVYSESPQTHLRGFALATVRYV

SEQ ID NO: 269249 - protein, 159 aa, Zea mays
  unsure (1)..(159): unsure at all Xaa locations
  Clone ID: MRT4577_177153C.1.pep
KGGFVASNSKDDPAKEDANFTSQVIIMNPPGQIGNGYAPVLDCHTSHIAVKFVXLITKIHRRFGKELXKEPKFLKNGEAGMVKIKPTKPMVVEKFSGYPPLGRFSVRDIKQTVAVGVIKSVEKKDPTGAKVTKAAAKKKLWDPGPALTKPSFYHHKFCL

SEQ ID NO: 269250 - protein, 85 aa, Zea mays
  Clone ID: MRT4577_177154C.1.pep
TTKAYIWLQYVIRHRHAEDGSKGLVGSNRPLSLKNTGTRLPGLLASGDRPQLVSRAYRNLTTEDMSMHIYGCSFQHLCMMKIIGF

SEQ ID NO: 269251 - protein, 375 aa, Zea mays
  unsure (1)..(375): unsure at all Xaa locations
  Clone ID: MRT4577_177155C.1.pep
MAAVASPALRLRPRAASTSATSSSAPPRCRFGSXSLLFQVWEVISSSESQWKHDAAFRYSKSXQVFSSTGDHDGRFHIKRTICFAATDKQEPVVSRSSDMPVLHEAESGTKVTPASENSYFAGRGAGKPGFISFQESSFRKTTVESVPHPGKEASRLVWFIGPTILVSFLVLPSLYLRKVLSAVFEDSLLTDFLILFFTEALFYGGVAIFVFLIDKVWRPLQQVAPKSYIWSKSRFFRISSVTTMVLSLIIPLLTMGMVWPWTGPAASATLAPYLVGLVVQFAFEQYARHRKSPSWPVIPIIFKVYRLHQLNRAAQLVTALTFSVRGTETTNQTLAIMNSLGALLTVLQILGVICVWSLSSFLMRFLPSSDIPDP

SEQ ID NO: 269252 - protein, 87 aa, Zea mays
  Clone ID: MRT4577_177156C.1.pep
LPTAMCSIHAAGSIGLSCLSAAAPCSMPFSQLGWCEACYYLRPPAVVNFPLAPCAWPGHHLTRARVAYSSFTPLEFQSSVVTTVPQG

SEQ ID NO: 269253 - protein, 48 aa, Zea mays
  Clone ID: MRT4577_177157C.1.pep
VERKCFILYCILENNVCIHTITPCKPCDGRNRENPNGSSATLNFSHSY

SEQ ID NO: 269254 - protein, 130 aa, Zea mays
  Clone ID: MRT4577_177158C.1.pep
MAAHSSSQQLLPPQDQAAALLLMKPGAGTITANVSCIEVITSEMPRLKDSKAILLSPSSTCCNIELSIHSRASAKTYQNYTCHCLNSMTVRLYYHNNMDNAANIPRQGHLLPRRAHPSHRRLHQDATAYR

SEQ ID NO: 269255 - protein, 71 aa, Zea mays
  Clone ID: MRT4577_177159C.1.pep
WDSFERGGPFFFFFLRKSRRGRINSHTWRAFCKLQGHRPRSSKGQTLVLGQNYKAYRATRSRPEAWRFHRP

SEQ ID NO: 269256 - protein, 64 aa, Zea mays
  unsure (1)..(64): unsure at all Xaa locations
  Clone ID: MRT4577_17715C.1.pep
TTKKQPARNASGSSCDQFRXDYQHTGLGTRRPDLEQALEKTKANIKWVKENKEVVLQWFTENSK

SEQ ID NO: 269257 - protein, 153 aa, Zea mays
  Clone ID: MRT4577_177160C.1.pep
PSFIEYNVRFGDPECQVLMMRLESDLAQVLLSACKGELSNVSLTWSPEMAMVVVMASQGYPGSYKKGTVIKNVDKAERVSPAVKIFHAGTAVDGDGNLVAVGGRVLGFTAKGKDIEEARARAYGAVDAIEWAEGFCRRDIGWRALRQKQVANQ

SEQ ID NO: 269258 - protein, 117 aa, Zea mays
  Clone ID: MRT4577_177161C.1.pep
MAAHAATFASALKKSLSSLPPQRREKEEEQGSLAAIKAMDADVAVQEEEEGRTMVVGVRANAESRALVTGVLVNVATTIDGQTGRHGPTRHDPPGPATKRVVPRWAGVPLPRPRHGS

SEQ ID NO: 269259 - protein, 53 aa, Zea mays
  Clone ID: MRT4577_177162C.1.pep
GNGLWHSFEQNSLAFSRTEALMSSSGTTTGYRCVLKQDIPSYYWHFTVRNRKP

SEQ ID NO: 269260 - protein, 136 aa, Zea mays
  unsure (1)..(136): unsure at all Xaa locations
  Clone ID: MRT4577_177163C.1.pep
MMRLESDLAQVLLSACKGELSNVSLTWSPEMAMVVVMASQGYPGXSYKKGTVIKNVDKAERVSPAVKIFHAGTAVDGDGNLVAAGGRVLGFTAKGKDIEEARARAHGAVDAIEWVEGFCRRDIGWRALRQKQVANQ

SEQ ID NO: 269261 - protein, 72 aa, Zea mays
  Clone ID: MRT4577_177164C.1.pep
KIKNPDILKKNCITSINLQSNTRRSVHNIYIPNLKHLCQKRFLRQWLPCLVHKISSAFILRQIGLLQYAVIL

SEQ ID NO: 269262 - protein, 212 aa, Zea mays
  Clone ID: MRT4577_177165C.1.pep
QRRVRGASENEDHAVNGSTVLEGLKSLRLTSDRQPKAESIVNSERPPYRSTSDSPAKSRDCPDNNSAGHYDELESYIAAFAERSLSQARQMVDQAMQANSGGSEDEKVCTSNQVAGCAGPGSEPARGAQLPSDLISNGIATVLSIKSLSDSRHPFANVAGVLDHACSMLRPSCPQNLALYDQIKRDIGIIKTQIFALMPTALGNCSPPVPPM

SEQ ID NO: 269263 - protein, 122 aa, Zea mays
  unsure (1)..(122): unsure at all Xaa locations
  Clone ID: MRT4577_177166C.1.pep
KQMCWWYGLKRDVATRVAMCEVCQKXVKAEHQRPAGLLYPLKIPDWXWKEISMDFITGLPRTSKGXDSIWVIVDRLTKVAHLISVKTTYKGSQLVEXYMARIVSLHSIPKWIILDRGSQSTS

SEQ ID NO: 269264 - protein, 66 aa, Zea mays
  Clone ID: MRT4577_177167C.1.pep
HLYLIPDTHPCLPKMCHTQRAMNVLTHRLMFVYTNPTMYCAACTIDFKPYILYLLATALAPATNYE

SEQ ID NO: 269265 - protein, 108 aa, Zea mays
  Clone ID: MRT4577_177168C.1.pep
IFSPFIFFFGWGFFKLVRSAAGHLFLNVFCESNPNQGTTYMTNHRGQTNFGGNLNAGIYMERSYPQPQEGKQFFSFLLGGGNVKMCIYTLAEGHPLFHRPTARGGRDN

SEQ ID NO: 269266 - protein, 99 aa, Zea mays
  Clone ID: MRT4577_177169C.1.pep
MADDDYNEIDMGYEDEPPEPEIEEGAEEELENNEDAPDDVIGGEGEDKEQEKTKRERKTTKYMTKYERARILGTRALQISMNAPVMVELEGETDPLEVP

SEQ ID NO: 269267 - protein, 125 aa, Zea mays
  Clone ID: MRT4577_17716C.1.pep
PLKVRLHNLLCTRNPHMNLKSRKVRLEKEILEIEAINCGLEQRLKFLDMCIMGMEEEKYQEMKGSLDIQKTENCSLISKLQVYLCQVEESLKYAEADFCSIATAPWQPHAVPSIAYPCSAIGGTV

SEQ ID NO: 269268 - protein, 174 aa, Zea mays
  Clone ID: MRT4577_177170C.1.pep
MADDDYNEIDMGYEDEPPEPEIEEGAEEEPENNEDAPDDVIGGEGEDKEQEKTKRERKTTKYMTKYERARILGTRALQISMNAPVMVELEGETDPLEIAMKELRARKIPFTIRRYPTTSPASFLTQQQLLPFYQQFVANPATLLQLQQLLPFVQLALTNPAAFYQQHIIGGALF

SEQ ID NO: 269269 - protein, 226 aa, Zea mays
  Clone ID: MRT4577_177171C.1.pep
MALPPPPHSLPRASSFTSSAVTPESPRRGSHRPNNTFVPNASTTAAAAAQLSLLRAHARAGRMQPAREVFDAMPDRGRSLVAWTTLMSGYATHGPASEALELLLCMLGLLVRPDAFVFSVALRACAAVGSLRLGRQLHGAVAKLGYVGVDLFVANGLVTMYSSCQSLPCAEKVFGSIASPDLVSWTSMLSAYTENGRDAEALVLFMEMARGGVACDAFTLSVALRA

SEQ ID NO: 269270 - protein, 110 aa, Zea mays
  unsure (1)..(110): unsure at all Xaa locations
  Clone ID: MRT4577_177172C.1.pep
RIRWAPQGPEKKPXAAKKPGXEEPPRPRKAPAGKKLEXGEKRVPAGKSRCQRKGGEGQEGHRRRASKSXVRTYKIYIFKVLKQVHPDIGIXXKAMSIMNSFINDIFEKLA

SEQ ID NO: 269271 - protein, 74 aa, Zea mays
  unsure (1)..(74): unsure at all Xaa locations
  Clone ID: MRT4577_177173C.1.pep
PPPXPHRGAPPQTGKARXXXPLVACRVVIWMRCQVSKDRVIASLVARYIDARVSDKWXGFRIFXRKXXXLSLFF

SEQ ID NO: 269272 - protein, 115 aa, Zea mays
  unsure (1)..(115): unsure at all Xaa locations
  Clone ID: MRT4577_177174C.1.pep
GEGTTTANDFNRDSSKYMLEDPSGLGXXXXXXXXXLSNREYMPSIWQXDKLTLRFNLYXSTHSFVTHRINLQVEAEVPSVLESEVLPLHTSEWVQPCLKMKEKFSIMDDGVNLIH

SEQ ID NO: 269273 - protein, 38 aa, Zea mays
  Clone ID: MRT4577_177175C.1.pep
CYACQVPSHMRVRVLGRRISSTHLPQCHCRTPGLSYVV

SEQ ID NO: 269274 - protein, 69 aa, Zea mays
  Clone ID: MRT4577_177176C.1.pep
HLIPCYSFFFLFPQTGNEGHFLGADLTSPYPIKGGEKVGYNPTFLALLGLFTMHSLEKKNLENPLPRAI

SEQ ID NO: 269275 - protein, 69 aa, Zea mays
  Clone ID: MRT4577_177177C.1.pep
LPVYNIIVQFEIATSKYSQVSTSQRGRWIATCTCQPHIESDTVTLTHTRPHSTPLHQSLADGSLGRTRG

SEQ ID NO: 269276 - protein, 81 aa, Zea mays
  Clone ID: MRT4577_177178C.1.pep
VLLAATPGPVWVLGWPALVVVEQAVCSFLSATLVIAEVPGTVCPLGSAPGPVEASRLAWALETLASLSVGVVAPYSLNDPR

SEQ ID NO: 269277 - protein, 58 aa, Zea mays
  Clone ID: MRT4577_177179C.1.pep
MAAVAAAAPPLGGGPAPRGLVTNGMHRSVGTSKLYIFNEWARFRILIVLIDAHYNLTN

SEQ ID NO: 269278 - protein, 60 aa, Zea mays
  Clone ID: MRT4577_17717C.1.pep
KKKIYLPGAVLAFWFPRGNLKYLVLLQPLQLSGEQIIYNGNVCLVKKNYYFRLNRDAIKT

SEQ ID NO: 269279 - protein, 57 aa, Zea mays
  Clone ID: MRT4577_177180C.1.pep
FLCYVKRVRLSLGFVHNIMRVRFRFTWIMRAGSKHSLSEGVSQIRFQDFIEFPSEEI

SEQ ID NO: 269280 - protein, 330 aa, Zea mays
  Clone ID: MRT4577_177181C.1.pep
MALARVSPSSLANLIPPLLQSFFRPFSSDFPIRNSRRRSSPVAAAFSLTSQSAHAAREGLVMEAPRPSSRYPWKPTCLYYTQGKCTMMNDAMHLEKFSHNLKMDLPVNASATDKSKPQKLEYLLILDLEGRVEILEFPVMMIDAQNREFVDSFHRFVRPTAMSEQRTTEYIEGKYGKFGVDRVWHDTATPFKQVLQEFEDWLGNHNLWKKEQGGSLNRGAFVTCGNWDLKTKVPEQCKVSKINLPTYFMEWINLKDIYLNFYNRRATGMMTMMRELQLPIVGNHHLGIDDSKNIARVVQRMLADGAVIQITAKRQSATGDVRFLFKDRIR

SEQ ID NO: 269281 - protein, 42 aa, Zea mays
  Clone ID: MRT4577_177182C.1.pep
TRRRSPVQIQVLTLWTAFMRRHTSNLAGSKRNIETYILQLRI

SEQ ID NO: 269282 - protein, 41 aa, Zea mays
  Clone ID: MRT4577_177183C.1.pep
LIIIITTTSSLILPYCNEHSTSTRSLLNAPTGLTGVPVIHD

SEQ ID NO: 269283 - protein, 102 aa, Zea mays
  Clone ID: MRT4577_177184C.1.pep
CSRSGRADRPSQLAVSDMARCSLPCVGRRCGPSMTGVVGHHLKRVCHRGPAFEKVCLLAYEHSGAYDLYGNSDQVGFVCVQAGCQHGVRSLLFAYHLIALCA

SEQ ID NO: 269284 - protein, 38 aa, Zea mays
  Clone ID: MRT4577_177185C.1.pep
LVFNFAVDQLYGKYPSVHVYAYGPLPCVDFVIADACSH

SEQ ID NO: 269285 - protein, 156 aa, Zea mays
  unsure (1)..(156): unsure at all Xaa locations
  Clone ID: MRT4577_177186C.1.pep
KTTRPKKNNRPEKNTRRGGPTPTGGAHNNKPPPPTKPPPPQNPPPPPPPTGAGQPTGXAPPTEPGPQPGPAEARTKPEPGPKGNPVPNPNPHPARPKKRKGGGTERESGPPKRGEPTXPGPATNPDPPGKTRRPPPPRKGPTPXGAAPLPGALTPP

SEQ ID NO: 269286 - protein, 112 aa, Zea mays
  unsure (1)..(112): unsure at all Xaa locations
  Clone ID: MRT4577_177187C.1.pep
MYFAKLDDSPMFRTQIQSLEESAELLRERCLKFHKGCRKYTEGLGEAYDGDIAFASSLETFGGGHNDPMSVAFGGPVMTKFTIALRENGAYKEVLRSQVEHMLXDRLLKFGD

SEQ ID NO: 269287 - protein, 161 aa, Zea mays
  Clone ID: MRT4577_177188C.1.pep
LQSTKSETTDYGNLVVDQQELITPNNNTTSLKEVNEDGSCSLASPKADASTPVQALEKYDISVGSSLNKEEHTKASCGASIQAEGARQIKYTFNRRKRKGMSIDSTPQRAVPEESSDLCSPTNKQKLHPDCVEQDHLIDSPQGHSQLGQVAEQLILLSEHM

SEQ ID NO: 269288 - protein, 68 aa, Zea mays
  Clone ID: MRT4577_177189C.1.pep
SAVPVAEVVENPIMDARSWPALPGLSSPPPPPQHAGPTAKVSPKAASPAPTGAATSPVSLGNPGPPDA

SEQ ID NO: 269289 - protein, 117 aa, Zea mays
  Clone ID: MRT4577_17718C.1.pep
LGIGAGVGGGVSFSGSGFYPRSPSGSWSGSGSGSGAPGSSAGSYAESGSGSNAGPGGAGAGSYAGSRAGSYAGSSSGGAGSDAGSDAGSYAGPHGGSGAGSYAGSHAGSYAGSGHGK

SEQ ID NO: 269290 - protein, 138 aa, Zea mays
  Clone ID: MRT4577_177190C.1.pep
DWFRYLQELYIIRELVLHQKILFFSEDYRVIDHQVGRHSKMIRQLTQISAQADVVVVLLILGHPVVQASVGGMSPAGSKRLTLFIGIVIIVPLGCDRSSETRWRAPDDSTRDVLEEFRIGGHVIGARSFMCRSMLFRS

SEQ ID NO: 269291 - protein, 91 aa, Zea mays
  Clone ID: MRT4577_177191C.1.pep
IFPLPVTPPYRTFSRERQDTHPKFTSMITDISLHFPISTSLQTISPSSSLLSTHFIYSNRSYLPIFYLNYTFLLSLSLYINSLHLFTFFLI

SEQ ID NO: 269292 - protein, 79 aa, Zea mays
  unsure (1)..(79): unsure at all Xaa locations
  Clone ID: MRT4577_177192C.1.pep
WIRPXVYPMFVPMDVALSICXYQLERNITTYLKVRLTKQMMAVVVHDIHNXGRXYSMHGLRNFVXARSPEIMYCINCFF

SEQ ID NO: 269293 - protein, 145 aa, Zea mays
  Clone ID: MRT4577_177193C.1.pep
PRGPTPRRPGQGKTPSSVRVINDAWRVFLLERWGAMFVALIINICIISVSGTVCNSSNVSPDDSAKCSDITLDSSSFLLRNVLGNSSAVVYGVALLACGISSSITGTYAGQYIMQGFLDIKMRQWLRNLMTRSIAIIPSLIVAII

SEQ ID NO: 269294 - protein, 80 aa, Zea mays
  unsure (1)..(80): unsure at all Xaa locations
  Clone ID: MRT4577_177194C.1.pep
MPKQIHEMKDCLLTARRKDARSGRIKRSKDVVKLKVRCSXKYLYTLCVIDAEKANNVKQSLPQFDRERLIDTWHAELTTQ

SEQ ID NO: 269295 - protein, 85 aa, Zea mays
  Clone ID: MRT4577_177195C.1.pep
ENRNRKRRTYDIRQRNVRRHDATPMTLRFWFIHDMDTCHHTGLKLGRSETGREKRVTPEFGERKEEKIPPSNSGRYRAGPGEASP

SEQ ID NO: 269296 - protein, 139 aa, Zea mays
  Clone ID: MRT4577_177196C.1.pep
MAAVEVQVPTAAPVEEAAQLAAASAVETPNEETAAPAVETEVVVAKEPEPVEAETETETKEAEAVAEPTEAEPKEAADLARCVSLSPGDWRAPRWCHCHGNSTAWRRHRSLGKTCFCVRVHVVSYVARRAPPSKGASFC

SEQ ID NO: 269297 - protein, 136 aa, Zea mays
  Clone ID: MRT4577_177197C.1.pep
CTHSTDFSTAASGAGAAASSSVAATSGVAATAGVASSSSLASTVAASLVSAAISGSAASTGAAAASVSAAGAAASVSASLASVSAAGAAASGSASLGSASVGSATASASLVSVSASTGSGSLATTPSVSTAGAAVS

SEQ ID NO: 269298 - protein, 230 aa, Zea mays
  Clone ID: MRT4577_177198C.1.pep
HSTGSGAGLTRRTARRRSGAGAAASSSVAATSGVAATAGAASSSSLASTAAASLVSAAISGSAASTGAAAASVSAPGAAASVSASLASVSAAGAAASGSASLASVPAAGAVAPGSASLGSASVGSATASASLVSVSASTGTGSLATTTSVSTAGAAVSSFGVSTAAASWAASTPAAAAAAVSSTGAAVGTWTSTAAIGAVQLDVCVELWTVELTTKALSSELSRVQSSPV

SEQ ID NO: 269299 - protein, 56 aa, Zea mays
  Clone ID: MRT4577_177199C.1.pep
KRGFFCGGRGHGFFIHMGENIGWTQTGTTSLHYIYSRFYRGKFFFFTGRRLNPREG

SEQ ID NO: 269300 - protein, 123 aa, Zea mays
  unsure (1)..(123): unsure at all Xaa locations
  Clone ID: MRT4577_17719C.1.pep
TPFQDLRPLGRQLXSKSWEPQKFFFQIVGPRDIFEGNPFLKQGLVLPNPYITTLNGFQASTLNRLRDPNLKGTPNPPLSKGFAAKTKPAGLVKLNPAGKSPPGLKNTLILTMKGMAAGLQNTG

SEQ ID NO: 269301 - protein, 246 aa, Zea mays
  unsure (1)..(246): unsure at all Xaa locations
  Clone ID: MRT4577_1771C.1.pep
PTLRFTRIQFCFTNVDTLMSFLFCXGIPEQMDVPTSPPSIQPANPVQAAQAAQTAAPSGPNANPLDLFPQVAPLCACRLTFLQLVDFGSHIRHCLNCXLPNASANAGTGNLDVLRNNVQFQNLLGLVQANPQILQPLLQELGKQNPQVMQLIQENQAEFMRMINEPLEGDEENEMMLDQMADAAETIAVTPEENEAILRLEGMGFDRALVLEVFFACNKNEQLTANYLLDHMHEFDNDDGLGGPPL

SEQ ID NO: 269302 - protein, 358 aa, Zea mays
  Clone ID: MRT4577_177200C.1.pep
MDETPTSSGQSEDSSCEPNWWPPDLLEKIESASISRKHDVLGNLRSSSWKASQLLWSTGSYSGLIPNGFYSIIPDKKLKETFPTIPSVDDLQTLEADGLKADIIIVDTERDKKVFMLKQLSAALVKGLSSSPALVIKKIAGLVFDCFKRQNPDASPAKGSIEDTHFFGYKGPQLLGQIRHGSCRPRAILFKVLADAVGLESKLVVGLPDGGAVGFVDSYKHMSVVVSLNSMELLVDLMRFPGQLIPFSAKAIFISHISAAGESDSAENDSCDSPLEPNSPLYGLSDKVETEGIESSSNLSGRSLRNMMLRSRTFSEGKLSTSCSEPNIANAFWRHSQRRGVAEEPRGASSSPEHPLMR

SEQ ID NO: 269303 - protein, 49 aa, Zea mays
  Clone ID: MRT4577_177201C.1.pep
APPAGHTGSGAPLAPVRVSGTGSTVRATARCAPIRATKTAPPPRISGRM

SEQ ID NO: 269304 - protein, 631 aa, Zea mays
  unsure (1)..(631): unsure at all Xaa locations
  Clone ID: MRT4577_177202C.1.pep
NRTLQNRRKNLMEDELEKLMLLKKFPNDEVQRRKADLGIDVSLDTISEHTNKSTDNSYHQAGISTPSTPSMDYGVLNYTEEYNLESVLVNFLGEIYSCHNECPHSDCKNKNELCPSLKSLIHKKVNELNNLPHNIGRGQSQEGSDAKPSDQNNLYNTMAAQSKQFKDALEILGSNSELFVKLLQKPNQHIADSIQQHENSKVSAGLEPDKIHGQTXLLEEEEAQNXHPLATKEQAKERKYMFFWRKSKSNRRQMLDATDGAQTVSKIVILKPNPERGINQKAATARTLHQQPCTSNAPGCSGRENSKFSIKEVKKRFRFVTGERSERNLSPAEDLQGDPRKIKDSVVAINKYFRHLPEGSLANXSASDIENGIKPFISSKQKXQNGSITGRSSDIVAXQLFEDIDNPDCINKKECELHGLQRTLYFPDNEPDVSLLGEDRSVRVDYIKLVLELSELCAEQNLEVWYLEDELISPCLFEELQSQGDQTDDLKLLFDCICEALTEIQERYFRLSWLTFLKQDIRTPPIGENLITEVDRYVYGYIQHSLPITLEQIIKRDLXEVQTWMNIRSKTEGIXMRMWEFVLDELIDETVTASQHTPASHRHTGELCTLLSSELRALRCLLHSPHTHTSS

SEQ ID NO: 269305 - protein, 69 aa, Zea mays
  Clone ID: MRT4577_177203C.1.pep
DIVVHITAPMCSLVDVVDPDHYALPGHEHLFGIAIAIPCPTLIRMHVSSVMSWGLSWSIVALNVNVALT

SEQ ID NO: 269306 - protein, 607 aa, Zea mays
  unsure (1)..(607): unsure at all Xaa locations
  Clone ID: MRT4577_177204C.1.pep
RSELDRPPSGAGWTHSTAASGAGAAASSSVAATSGVAATAGAASSSSSLASTAATSLVSAAISGSAASTGAAAASVSAAGKAASGSASLASVSAAGKAASGSASVGSASATASASASASTSTSLDSVSASAGTGSLATTTSVSTAGAAVSSFGISTAEAAASWATSSTGAAVGTWTSTAAXCSAAGRTGVCVWTAXQTTKALKLGAKQSAELTSVTMAGXACGVMPASNTEGKLTQRARSAAVRRWTHSTDFSTAATAASGAGTAASSSVAATSGVAATAGDASPSSSLASTAAASLVSAAISGSAASTGAAAASVSAAGAAASGSASLGSASVGSASATASASTSTSLDSVSASADTGSLAATTSVSAAGAAVSSFGVSTAASWAASTPAAAAAAASSTGAAVGTWTSTAAXCSAAGRVCGTVDCGANSXTTKALKLGAKQSADCRAHQCDDGWLACGVGRTXAARPASVSSSASVGSAATASASTSTPXSVSASADXAAATTSVSAAGAAXSSFGVSTAASWAASTPAAAAAAASSTGAAVGTWTCTYVRTHAWDLGHNGDWCVQMDEENRVSEEALCTYDYLDGGHWCSAAGRVCGTVDCGANS

SEQ ID NO: 269307 - protein, 205 aa, Zea mays
  unsure (1)..(205): unsure at all Xaa locations
  Clone ID: MRT4577_177205C.1.pep
RSELDRPPSGAGWTHSTDRPASGAGAAASSSVAATSGVAATAGAASSSSSLASTAATSLVSAAISGSAASTGAAAASVSAAGAAASVSASLTSVSAAGAAASGSASLGSASVGSATASASLXVSVSVSASTGSGSLATTTSVSTAGAAVSSFGVSTAEAAASWAASSTGAAVGTWTSTAAIGAVQLAVCVCVDCGANNEGTEARS

SEQ ID NO: 269308 - protein, 97 aa, Zea mays
  Clone ID: MRT4577_177206C.1.pep
GYVHKIATFEKAARFQALIQLTDADTGLAAKESLDRRSIPSYLLPEHVTFCCLRIFFYAHKDLNINFHSNRIKHYNNSYLSINYSIMDSSLQPSFGA

SEQ ID NO: 269309 - protein, 37 aa, Zea mays
  Clone ID: MRT4577_177207C.1.pep
LRLLQHAAHSCDARIRALQAAYVICSHQSRSNKPSLR

SEQ ID NO: 269310 - protein, 45 aa, Zea mays
  Clone ID: MRT4577_177208C.1.pep
PGGRCCSRTASAPPGPSPWLLTIPASTSFSYPPHTHTHTHQQSCC

SEQ ID NO: 269311 - protein, 63 aa, Zea mays
  Clone ID: MRT4577_177209C.1.pep
NWGYFENQSQPDAGYKLENEYPSPLLHRYNMLYMMTNERQILVTYAGVLKKMNSLNTCLYKPD

SEQ ID NO: 269312 - protein, 129 aa, Zea mays
  unsure (1)..(129): unsure at all Xaa locations
  Clone ID: MRT4577_17720C.1.pep
RAPSTRSGCSPSLTGAMTVTPSYIKGVGVAMNTILGLPVSXMMLLPYKHLGYVTTHDVAYSSLNSLLLFEXRPSWHYFTMKSLRIGHXLLLRVMLHDLTFKKLYSENLLMKETLVTTPTLLLDYNGTLI

SEQ ID NO: 269313 - protein, 72 aa, Zea mays
  unsure (1)..(72): unsure at all Xaa locations
  Clone ID: MRT4577_177210C.1.pep
VLLGLACFASAVRLCLSCAGSSLLSPVAPCAVSLGSFLPPCSFLSCPVFSFPCRRXNPRCSVSSSRRSGAWV

SEQ ID NO: 269314 - protein, 116 aa, Zea mays
  unsure (1)..(116): unsure at all Xaa locations
  Clone ID: MRT4577_177211C.1.pep
FKGIAPPSKGFFYFFNPVGVTGAPPNFNFRVEPLLWEIKKVSPQPVTFGFGVSTPKHFKQIFGLGTARFFFSRPIFSXLFLGSPPXKGFERPQEYPPSIKAFIPLTDLPPPPRPGN

SEQ ID NO: 269315 - protein, 218 aa, Zea mays
  Clone ID: MRT4577_177212C.1.pep
MASSWVSRLPLAVLLLVACSSSRAAATSYTVGDGSGWTTGVDYTSWAASKNFKVGDNLVFNYAKGLHTVVEVSAAEYMACTAANPLGSDSSGATTVALKTPGTHYFVCSITGHCGAGMKLAVTVGGSNSPATTPTPTTPRTSPTTPYTTPTTPTTTTPYTTPTTPYTTPTCSGGGGGTTATPGMTPFMSYPSAAGLGSAALAGFGLVWCVIVQVALLY

SEQ ID NO: 269316 - protein, 65 aa, Zea mays
  Clone ID: MRT4577_177213C.1.pep
KTGVDIHSFLECFHDICPTYCPQFFLVSQCLFFVNPSPAFTIYGVFSVTTGRFNCSHPSFICLHF

SEQ ID NO: 269317 - protein, 49 aa, Zea mays
  Clone ID: MRT4577_177214C.1.pep
RNSQTIEYLNQSLSREKDTNHPVSSIKRLVFDADEGNLDIRAGNPKSSM

SEQ ID NO: 269318 - protein, 567 aa, Zea mays
  Clone ID: MRT4577_177215C.1.pep
MASAALICGTEQWKALQAHVGAIQKTHLRDLMADADRCKAMTAEYEGIFLDYSRQQATGETMEKLLKLADAAKLKEKIEKMFKGEKINSTENRSVLHVALRAPRDAVINSDGVNVVPEVWSVKDKIKQFSETFRSGSWVGATGKPLTNVVSVGIGGSFLGPLFVHTALQTDPEAAECAKGRQLRFLANVDPVDVARSIKDLDPETTLVVVVSKTFTTAETMLNARTLKEWIVSSLGPQAVAKHMIAVSTNLKLVKEFGIDPNNAFAFWDWVGGRYSVCSAVGVLPLSLQYGFPIVQKFLEGASSIDNHFYSSSFEKNIPVLLGLLSVWNVSFLGYPARAILPYSQALEKLAPHIQQLSMESNGKGVSIDGAQLSFETGEIDFGEPGTNGQHSFYQLIHQGRVIPCDFIGVVKSQQPVYLKGETVSNHDELMSNFFAQPDALAYGKTPEQLHSEKVPENLIPHKTFKGNRPSLSLLLPTLSAYEVGQLLSIYEHRIAVQGFIWGINSFDQWGVELGKSLASQVRKQLHGTRMEGKPVEGFNHSTSSLLARYLAVKPSTPYDTTVLPKV

SEQ ID NO: 269319 - protein, 50 aa, Zea mays
  Clone ID: MRT4577_177216C.1.pep
ILHTCAFDTKVKCTQHHLYKTCKKIFYKNVVVTRSINNHLYMFGYNVPSL

SEQ ID NO: 269320 - protein, 85 aa, Zea mays
  Clone ID: MRT4577_177217C.1.pep
TARGSTLTHVVNRAVKFEAYWSTHSCALALDDHNLLLNGHLKYFHFRMVLAPKKLEIKVLDTRNMCKSLSCRVQYTAYTLRRLAH

SEQ ID NO: 269321 - protein, 86 aa, Zea mays
  Clone ID: MRT4577_177218C.1.pep
GGGGRWPPKPTRFGFPSRDKLAGQTKATFFTFFLKEGGIPLSQPFKCPWGQKGYSSPFSPSSGRGGLQQHPPQSGFSWGPPFSWGR

SEQ ID NO: 269322 - protein, 79 aa, Zea mays
  Clone ID: MRT4577_177219C.1.pep
QPFSPREAEEASPPVATPPRPWPFLASPPLRPLLGRSQKEPPLSASPPPASQPPQMRFLPLPPRNQNPHCSQDGLIYEP

SEQ ID NO: 269323 - protein, 91 aa, Zea mays
  unsure (1)..(91): unsure at all Xaa locations
  Clone ID: MRT4577_17721C.1.pep
KKXFYPQTSPRKNHVCQAPPPLYSIRRLITTQSNLGIITERSKFYLXLMFFLSYCKXVPPPPPKDLFVVRPTHPIPVCECTFKLWSIGFLP

SEQ ID NO: 269324 - protein, 89 aa, Zea mays
  Clone ID: MRT4577_177220C.1.pep
HPHHRASQHHASFPQNTSWPSLLTQCPQVSYSVPNHQVSPTQRWITLSLLHGIKVNFIPYWSLAFYNSSILTAPSPCVCARSTRIIQCL

SEQ ID NO: 269325 - protein, 184 aa, Zea mays
  unsure (1)..(184): unsure at all Xaa locations
  Clone ID: MRT4577_177221C.1.pep
VDFDMPAGRLDGRASNASRTLDFLPPPTSSLPELVQSFAAKGLSAEDMVALSGAHTVGRSHCSSFVSDRLAVPSDIIASFAASLRGQCPASPSSSDDPTVVQDVVTPDRLDNQYYKNVLAHRVLFXTSDATLLTSPATAKLVDDNANVPGWWEDSFKVAMVKMASVEVKTGNSGEIRRNCRLVN

SEQ ID NO: 269326 - protein, 46 aa, Zea mays
  Clone ID: MRT4577_177222C.1.pep
LPIIHHSLYNKVISQKDHLHIKHKELSNAYLIRMPNIMVAHKINYQ

SEQ ID NO: 269327 - protein, 42 aa, Zea mays
  Clone ID: MRT4577_177223C.1.pep
PEEFRSHFLWIQDRHNSITDNSSSYMNIYASLFKAISNWNSP

SEQ ID NO: 269328 - protein, 110 aa, Zea mays
  Clone ID: MRT4577_177224C.1.pep
ESSNNTFVYQTDCKVYYFNNSKCKTAYRTDYPKYTIYKTISDSHRHDKCADYGDNQCTFFFDKKPESYVLLIIFVVTMVIIVGAYALSFLINCIRTMHKHNKYDTIQEYT

SEQ ID NO: 269329 - protein, 43 aa, Zea mays
  Clone ID: MRT4577_177225C.1.pep
TLLQRGAQYRVKTFIALFTFDKDFDQILETSPLQWLHLSPGHS

SEQ ID NO: 269330 - protein, 151 aa, Zea mays
  unsure (1)..(151): unsure at all Xaa locations
  Clone ID: MRT4577_177226C.1.pep
LDSGLRQFSDLPGGIDKHAEHLYGKSNVMHVPGRKRCXKAXPYLHSKGESIENEFYQFAXIDRHLAQGLDGGYFDGKNFXIRPHKMICXSLMENLLRACVICEDKFDDYYDTLTXTHCRMFVLACPPCQDAAEEYXCQLSQKDGNEPCQRI

SEQ ID NO: 269331 - protein, 230 aa, Zea mays
  Clone ID: MRT4577_177227C.1.pep
LEAGRDGNKLATSLLATAVLLMALAAPSLAGDPDMLQDICVADYKSLKGPLRLNGFPCKRPENVTACDFFSGALASAGNTANALGSAVTAASADTLPGLNTLGVSLSRIDYAPWGVNPPHVHPRATEVIFVLQGSLDVGFVAAASNRLYARTVSAGDVFVFPRGLVHYQRNRGGDPAVALSAFDSQLPGTQPVAEALFGSSPPVPTDVLARSFHVDGGLVEAIRSKFPPK

SEQ ID NO: 269332 - protein, 57 aa, Zea mays
  unsure (1)..(57): unsure at all Xaa locations
  Clone ID: MRT4577_177228C.1.pep
PNTGNQKTFLXRSPEKKTQVPRIQITNPKARFFGIKRGQVLKIPKPSKTVEKKIPHR

SEQ ID NO: 269333 - protein, 36 aa, Zea mays
  Clone ID: MRT4577_177229C.1.pep
LPCVIFTPAVPQKLSESNVAIYSFGCKTFSFVSWPS

SEQ ID NO: 269334 - protein, 109 aa, Zea mays
  Clone ID: MRT4577_17722C.1.pep
MLDKIVGLAMLVAASVVFTYYTIWTLLMPFVDDDHPLQNFFPPRVWAIRIPVIIILLGSAVVGSFLSMVMIRSNQKKAAKAKAAAKKANYTINMPIHIPFNCLLALKVT

SEQ ID NO: 269335 - protein, 133 aa, Zea mays
  Clone ID: MRT4577_177230C.1.pep
LGAVPAAGAPPPGAAAGDQQAAPRVERLSAGVQQQLNLEGMRARAVGLYKAISRILEDFDVIIRTNPSASPKWQDVLGQFSMVSMELFNIVEDIKNVSKVFVVYPRNVNAENATILPVMLSSKLLPEMEVEET

SEQ ID NO: 269336 - protein, 49 aa, Zea mays
  Clone ID: MRT4577_177231C.1.pep
PARDFVLRALKRGPGTLDKPRAPGPRPLIRITTFTAPQELHPCNHMVGL

SEQ ID NO: 269337 - protein, 99 aa, Zea mays
  Clone ID: MRT4577_177232C.1.pep
LFIIDACSQVYEASGYYGAAGALTHLTRHARAGSSAGTDHTSMYVDPAHVPLAPTFMVPGPASHLTPHRRGARMGPRTSACTYHVRIKLTPGESRWPWL

SEQ ID NO: 269338 - protein, 71 aa, Zea mays
  unsure (1)..(71): unsure at all Xaa locations
  Clone ID: MRT4577_177233C.1.pep
MDNDRRQLGQSDTRRARCPCCSVWTPIPCIAXVVPSIGHMGLCMEDGVKEVVSGPHTVXLDNFESGAGGGY

SEQ ID NO: 269339 - protein, 94 aa, Zea mays
  Clone ID: MRT4577_177234C.1.pep
RLSSHVGGDGDEAGDAVAAPVGSRPLLPVPSSLLAASNEASSNNQGSTPIVFSPLSNLQLLPSSTGTISQQEKQTGMYSSIDAHAYTLFSLQIR

SEQ ID NO: 269340 - protein, 80 aa, Zea mays
  Clone ID: MRT4577_177235C.1.pep
LRALASRESICPQPDDERMNDAHYGLAAFPRDARRVVRIKHDAGRNRLSPPGGGLSICSPVRWSCYKELAACQPGRPGDT

SEQ ID NO: 269341 - protein, 42 aa, Zea mays
  unsure (1)..(42): unsure at all Xaa locations
  Clone ID: MRT4577_177236C.1.pep
GAGAPLXVXRIACDAHXLVFRFGTHDVNYCSNXTRNNWCSIA

SEQ ID NO: 269342 - protein, 40 aa, Zea mays
  Clone ID: MRT4577_177237C.1.pep
SFIQCKTSLCQCLIPHHHQSSTHTQSCHLVILYITLLLLC

SEQ ID NO: 269343 - protein, 253 aa, Zea mays
  unsure (1)..(253): unsure at all Xaa locations
  Clone ID: MRT4577_177238C.1.pep
MASNLLSAAADGHKPGPVPFFAAGISSVLHPKNPFAPTLHFNYRYFETDAPKDAPGAPRQWWFGGGTDLTPSYIIEEDVKHFHSVQKQACDKFDPSLHPRFKKWCDDYFYIKHRNERXGLGGIFFDDLNDYDQEMLLNFATXKPFARVIGWNYLYSECADSVLPAYIPIIERRKDTPFNEEHKEWQQLRRGRYVEFNLVYDRGTTFGLKTGGRIESILVSLPLTARWRYDHKPEEGTEEWKLLEACINPKDWI

SEQ ID NO: 269344 - protein, 120 aa, Zea mays
  unsure (1)..(120): unsure at all Xaa locations
  Clone ID: MRT4577_177239C.1.pep
DSVLPAYIPIIERRKDTPFNEEHKEWQQLRRGRYVEFNLVSGFRRLQPVSCLDAYLLALTCSSLEXYDRGTTFGLKTGGRIESILVSLPLTARWQYDHKPEEGTEEWKLLEACINPKDWI

SEQ ID NO: 269345 - protein, 70 aa, Zea mays
  Clone ID: MRT4577_17723C.1.pep
MSTVRRASIDQKLALVKRCSREATIAGAKAVAVATIASEISTITSMRMLPWAKANINPTVQALIVFTVAG

SEQ ID NO: 269346 - protein, 160 aa, Zea mays
  Clone ID: MRT4577_177240C.1.pep
MDHQSTTRRTKPPTPNPMASNLLSAVAIEKETPESELPPTFLREDGRGAGSVRARFESMIRRVQGEVCAALEEADGGGARFVEDVWSRPGGGGGISRVLQDGRVFEKAGVNVSVVYGVMPPDAYRAAKGEAGKNEAAADGHKPGPVPFFAAGISSVLHPK

SEQ ID NO: 269347 - protein, 397 aa, Zea mays
  Clone ID: MRT4577_177241C.1.pep
MASNLLSAPSRTLAPSPAPAPAGLRGRVPVQAHLPRGGLGLAPRRSSRALRVRASVAIEKETPESEPPPTFLREDGHGSGSVRARFEAMIRRVQGEVCAALEEADGGGARFVEDVWSRPGGGGGISRVLQDGRVFEKAGVNVSVVYGVMPPDAYRAAKGEAAKNGAAAADGHKPGPVPFFAAGISSVLHPKNPFAPTLHFNYRYFETDAPKDAPGAPRQWWFGGGTDLTPSYIIEEDVKHFHSVQKQACDKFDPSFHPRFKKWCDDYFYIKHRNERRGLGGIFFDDLNDYDQEMLLNFATECADSVLPAYIPIIERRKNTPFNEEHRAWQQLRRGRYVEFNLVYDRGTTFGLKTGGRIESILVSLPLTARWQYDHKPEEGTEEWKLLEACINPKDWI

SEQ ID NO: 269348 - protein, 341 aa, Zea mays
  unsure (1)..(341): unsure at all Xaa locations
  Clone ID: MRT4577_177242C.1.pep
MADEGEEAVPPAAMVGEAPTEDFGLPAELMAVLPSDPFAQLDVARKITSIALSHRLGRLEAEAARLRSQLAERDAEAEELRERVEKLDSALAVATGRLRRAEEEKETLLRDNSALSNTVRKLNRDVAKLEVFKKTLVQSLQEDDSSDNTAPRPSVAATSNFSAPSDEDSAFPTSKSSQISETASSVSEXKEENNQVDPDAPRRPPRPHVFLPSYNSTPRMTPPDSPPRRFASVSPPRRHSISVTSMNMFNDRSSGFSGQHSSPFDAPSQTGRTRVDGKEFFRQVRNRLSYEQFGAFLANVKELNAHRQTREDTLRQAYEIFGPENKDLFTIFEGLISRNIR

SEQ ID NO: 269349 - protein, 58 aa, Zea mays
  unsure (1)..(58): unsure at all Xaa locations
  Clone ID: MRT4577_177243C.1.pep
PDXNIITKLNQPLEXPHKXLGXEGNHHPHQPKVSSLHSTAPLNKKILXSLFSTSPQHX

SEQ ID NO: 269350 - protein, 40 aa, Zea mays
  Clone ID: MRT4577_177244C.1.pep
ALYVHNEIVMQVVKFSTFFIHPRCYPLLLSLTNGYDPDND

SEQ ID NO: 269351 - protein, 61 aa, Zea mays
  Clone ID: MRT4577_177245C.1.pep
VTVKVRINIRDSLSKVLCVSLRSFRPPVAAIKCSCYCSPSLSRSSSDFEEFPSSESLVVGE

SEQ ID NO: 269352 - protein, 89 aa, Zea mays
  Clone ID: MRT4577_177246C.1.pep
KKTFQGQSPRFLVPPPCSRLGGPPPNKPPLVGPPPGGFWKEYNFGERCVPSPGICRNVFLGPYSPLKKNKITPRKVILRFRGNSKPWSF

SEQ ID NO: 269353 - protein, 102 aa, Zea mays
  unsure (1)..(102): unsure at all Xaa locations
  Clone ID: MRT4577_177247C.1.pep
YSTRSQALLLVLLPSPSTTLCSDSTAPMAALSAADASTGSGIAFEGYEKRLEITFSEAPVFVDPHGRGXACPLRAHIDSVMDLAQSTIVSELYNNDYDSYVL

SEQ ID NO: 269354 - protein, 114 aa, Zea mays
  Clone ID: MRT4577_177248C.1.pep
MARIRSTARITNKGEETEATEIAPISEVMRRSELVAQEEEGSVPEKHDVIAEAEQTVVEAASDDEEDDHILSPSNPNHIEFGKSTLKAKDLILMKKLGYFGKNDDELIRFAGTK

SEQ ID NO: 269355 - protein, 240 aa, Zea mays
  unsure (1)..(240): unsure at all Xaa locations
  Clone ID: MRT4577_177249C.1.pep
XXXXXXXXXXXXXXXXXXXXXXXXXXXXXXXXXXXXXXXXXXXXXXXXXXXXXXXXXXXXXXXXXXXXXXXXXXXXXXXXXXXXXXXXXXXXXXXXXXXXXXXXXXXXXXXXXXXXXXXXXXXXXXXXXXXXXXXXXXXXREVTCTEGSRRPRAETRGGCAEPLVVDPAAVATCPNCTLHVQFKASAPNSGPLSNCSFSPFGFQLVMSLHSSVCLQLMQHWCWLASFRGQDKATVPSALA

SEQ ID NO: 269356 - protein, 195 aa, Zea mays
  Clone ID: MRT4577_17724C.1.pep
VTSSLVDEQPNPVLDGDEVEKHSLNCEADTGRILGTGSVTSNTTLVPKDGHTICCQELELPNGLSSFLFPEESGICQYASVSGSGPCLQHVNESTSTQATYNIETLNQHHEEYDQNNEDRTARGILASSFPEAVGIEQSGLTPAAEAPVLPVPDGQPNSKLEGNEVDEHSCSYDAEFLNREASNLHKDVCVDPCS

SEQ ID NO: 269357 - protein, 73 aa, Zea mays
  Clone ID: MRT4577_177250C.1.pep
MESSRRFQPAVILLLLLIVSTDMAQARECEKYSERFVGACMIADNCANVCRGEGFLAGRCSTFRRRCICTRQC

SEQ ID NO: 269358 - protein, 134 aa, Zea mays
  Clone ID: MRT4577_177251C.1.pep
AKTQTGLCFSKFPNKKFWAELWKRKGQKIPFLNYKKTPGFRTTKNLKKGGGKKPLFLLKKKLFLGGLGGTQTNFFFHPRAEGGAHLLGLAFWGGGGQRVQFIPGLDPGDHGVPDLEKEGEMGPSFSFICPKRER

SEQ ID NO: 269359 - protein, 46 aa, Zea mays
  Clone ID: MRT4577_177252C.1.pep
KAIDFIRENYIHFTCELFYNAIKWVKPSRDPTELPGLHHLNRIPYT

SEQ ID NO: 269360 - protein, 110 aa, Zea mays
  Clone ID: MRT4577_177253C.1.pep
MDRLAESTRIMRKDSSDAWRLRAARQGPHGRSLTARTAHIMSTTALRTKSKSAASLLRMVPFAPLRPVLANQHDVLLGTKLAELLPAEPVDIARPVRDTYTCVGVYAQPT

SEQ ID NO: 269361 - protein, 100 aa, Zea mays
  Clone ID: MRT4577_177254C.1.pep
FLHSVVVPVPTSPSSSSASSSSPRQLHSSSSGEWHAVVRRNVKSSLLLVVVLSTVFVFSVLQSSHGFGATTPDQQALTQTQTQTQTQTQSTDHGAVGRFV

SEQ ID NO: 269362 - protein, 63 aa, Zea mays
  Clone ID: MRT4577_177255C.1.pep
QSKLGRPSRSGVEHSQRILTCNPWKPSNARFYCRLDGPNSKMVSSGITDMYALMDRMPTVYLS

SEQ ID NO: 269363 - protein, 183 aa, Zea mays
  Clone ID: MRT4577_177256C.1.pep
DILLDCNMLRAILWPPEGRKKRYPSKLRIQTKKESSTPSYMWWYISVYDERLLWSLLPLKQYFNYYIVHVEISSPGRLPDGLACTSDEMILEVTTPEGNNTSIYVDVAKGHLLHVKGDEGDSPISFTRVWPCPRAPDLVQQNCYLHIQDWPQGRKPQRTSQKNCYHYYSRYYMQQYWHHTCAR

SEQ ID NO: 269364 - protein, 565 aa, Zea mays
  unsure (1)..(565): unsure at all Xaa locations
  Clone ID: MRT4577_177257C.1.pep
LGVAKSTIECGTTLWNGDLLAGSKHLRFLDLSGNEIISSGKSCISATEKSCSLETIVIHQGCAGLEKISLAGCAQLENVLLTGSFNELVSLDISGSAVKRLDLSAMIMLKLNELILLDCNMLRAILWPXRKRERISWQAAHSNXKETTIGSATAPSGLTMMFGSLVPAEYLWWYISVYDERLLWSLLPLKQYFSYHFVHFEISSPGRRPDGLACTSDEMILEVTTPEGYNTSIYVDVAKGQLLHVKGDEGDSPISFTRVWPCPRAPDLVPSNCYLHIQDWPQGRKPQRTSQKTATITIPDTICNRTGSIHVHDSLYITRMPDPAPSGAIWANLFWCRVERCPKMDCVFTSSSMVGAENRDDRIFWRLATLWVSQLPKARFIWSSRKHEISGYSFLDLDFVHVDFCPRLTHVLPLSMAXSEEVAWXSLTTLEIVWCGDLRAVFPLDTDAQSYQDHRRNQAITVEFPSLQRIHLHESPKLHGLCGRGRMYAPKLESMVIRGCWNLTRIPSVGDGGDRITKKVKCDCEKEWWDRLEWDWLEERHHPSLYEPTHPKYYKKTLLRTSVLR

SEQ ID NO: 269365 - protein, 148 aa, Zea mays
  unsure (1)..(148): unsure at all Xaa locations
  Clone ID: MRT4577_177258C.1.pep
HSYARRKANRDEKSNCVVNYMKNESGPAVSKTDLKHKQLLKQLXRSSSTSLSKVLYKQYVKVDMVLNTVLVVEALIADHKKAIESALEIVRVEMNVLQEVDHTDSFIDNFMFQLSFMVSRXACVLVSFQARLERFKEHLMVQEIIRRK

SEQ ID NO: 269366 - protein, 232 aa, Zea mays
  unsure (1)..(232): unsure at all Xaa locations
  Clone ID: MRT4577_177259C.1.pep
MRRHGEVRVILAMAAAAAAALLASAAVAGRDGRQTYIVHMSHSAMPDEFAEHEEWYAASLQAVSDAATVLYTYSTLLHGYSARLTRAEAAALESQPGVIVVNPEVRYELHTTRTPEFLGLDGTDALFPQSGTGTDVVVGVLDTGVWPERPSYDDTGFGPVPAGWKGKCEDGNDFNASACNKKLIGARFFLTGYEAAKGPVDTSKESRSPRDNDGHGTHTXSTAAGXAVQGAD

SEQ ID NO: 269367 - protein, 266 aa, Zea mays
  Clone ID: MRT4577_17725C.1.pep
MPITVPQATELKDLFSLKGKVVIVTGASGPTGIGTEAARGCAEYGADLAITYNSRAEGAEKNAKEMSEKYGVKVKAYKCQVNEYAQCEKLVQDVIKDFGKVDVFIANAGKTADNGILDATVEQWNEVIQTDLTGTFNCARAVGLHFRERKTGSLVITSSMSGHIANFPQEQASYNVAKAGCIHLAKSLANEWRDFARVNSISPGYIDTGLSDFVPQDIQKLWHSMIPMGRDAKATELKGAYVYFASDASSYCTGSDLLIDGGYCVR

SEQ ID NO: 269368 - protein, 67 aa, Zea mays
  Clone ID: MRT4577_177260C.1.pep
FHPRLPSHQLRVHLSNHFASDLNTHPLSYPQGGRATNLQHQRPLLVMISNAFSSSDSSLKSHCLTII

SEQ ID NO: 269369 - protein, 87 aa, Zea mays
  Clone ID: MRT4577_177261C.1.pep
MAMRALYNEIRAMKVREVPAYLKPRLTWSNVKKSTDQAVDRYIEKYIETSSVDPLFHVCFGGMAFSYLVGLPQERRHLEHLEKHGGH

SEQ ID NO: 269370 - protein, 62 aa, Zea mays
  Clone ID: MRT4577_177262C.1.pep
MGKVSGFLSPPGKGGGQTPKVGKQDKKKKPPGRGFKGIQYNPPFFPPVVGFGKKTGPHSLEK

SEQ ID NO: 269371 - protein, 53 aa, Zea mays
  Clone ID: MRT4577_177263C.1.pep
GKLGAAMIGSASFYVSRAPDRHQEVQDGLGLLSRVNPANEELLVPVFMLYSVL

SEQ ID NO: 269372 - protein, 517 aa, Zea mays
  unsure (1)..(517): unsure at all Xaa locations
  Clone ID: MRT4577_177264C.1.pep
MAPPRISFLELCLSFLCFVVFYYLHIRSKRKNPFVPLDWPLVGMLPALLGNLHHLHDWITSLLVASQLSFLFTGPPRSGMQFFVTADPANVRHVFTSNFANYPKGPEFEEIFDVLGGGIFNADGESWRRQRAKAQLLMSSAPFRALVSRYSRAKVDTALLPLLSHMAATGEAFDLQDVFLRLTFDTTTTLVFGVDPGCLSVGLPEVPFARAMDDAMGVLLLRHVVPMTWWKLARRLRIGHERKMAEAWRTIDQFVADTIAKRRAEKARHGNGQVSADLLSSYINDDEDEEGGVDAFLRDTTINLMLAGRDTTGSALSWFFYLLTRNPRVVGKIRQELECVKSKSSGSGGGMASFDPDELSRLTYLHAALCESLRLYPPVPQELKEAAAADVLPCGHEVRAGDKILVSLYAMGRMEEVWGSDCREFRPERWIXSWRTGAGXQVRYVPSYKFMSFNSGPRTCLGKDMAFVQLKAAAAAVVSNFDVEAVPGHVVEPKLSIILHMKNGFMATVKRRRQTFA

SEQ ID NO: 269373 - protein, 48 aa, Zea mays
  Clone ID: MRT4577_177265C.1.pep
RAIAKGTYALSPLFFEQSAGLSLGERLVQTMRAQQLWQLGATSDQGGG

SEQ ID NO: 269374 - protein, 71 aa, Zea mays
  Clone ID: MRT4577_177266C.1.pep
PPAKGRHKKNPWGLLVKTVIDACQKKKGGAGIKEPPFTCRGPPPPPFAPKLKNFNHHKEGGSKGPRRTSYG

SEQ ID NO: 269375 - protein, 70 aa, Zea mays
  Clone ID: MRT4577_177267C.1.pep
PPQDAAGEAADVHVSNRLSIWGRPVNLSRLVDHARSAAVGAVGALGRGLGVPGIFPDPPWGWLRSLGSPS

SEQ ID NO: 269376 - protein, 186 aa, Zea mays
  unsure (1)..(186): unsure at all Xaa locations
  Clone ID: MRT4577_177268C.1.pep
GAPAPPPQKEKRGGGGPPKKNRGPPPGPFPPRGPKNPPLCPQGGPQIPPPGKKFPRKNYGRTREPRAPKKGPGGPPXRGGNFXWGPPRTRLIKGGPPGARDPGNAPQGGGPPRGPPLGGGTQAPLPKSREKPPGPLFEHPPGGGGGGIWGRSNPRPQKGGXRGEPQRGGGPPXRGLTPPGGGRPPP

SEQ ID NO: 269377 - protein, 122 aa, Zea mays
  Clone ID: MRT4577_177269C.1.pep
SLNQLEQSTKKTNERKLELRAAQEKANSAQYGKLTMENELRKRRANHEQQSKANESDVPDIPNFKSTSLSFDASSSTSNPHMVGTLSRADTIATTRVKEPKPRKSIFPRSLVALFVSRKKTH

SEQ ID NO: 269378 - protein, 81 aa, Zea mays
  unsure (1)..(81): unsure at all Xaa locations
  Clone ID: MRT4577_17726C.1.pep
MPCGTRNQGLPRAAHGVRIPKEXDHFNPLYYQKIFRNRQKXAFVFDGRTVVAPEKLREIGFIVCSIGKPRDAWLKDMPTLA

SEQ ID NO: 269379 - protein, 45 aa, Zea mays
  Clone ID: MRT4577_177270C.1.pep
GFCQNSKLRPCLGLFPYSKMNLNWGPIIKVSPPNLRPFLESGFFR

SEQ ID NO: 269380 - protein, 40 aa, Zea mays
  Clone ID: MRT4577_177271C.1.pep
SSRKNHKLAQRKPRYLLEAYHLSHFKAISSRPLACRLCQT

SEQ ID NO: 269381 - protein, 75 aa, Zea mays
  Clone ID: MRT4577_177272C.1.pep
SYKKKLKNHCLFLYHIQAVAQKNATKPLIKQCNNKATSGLFQRPRSTPKNLDNKKKDAFLKRRAEPQHKSMVRVI

SEQ ID NO: 269382 - protein, 59 aa, Zea mays
  Clone ID: MRT4577_177273C.1.pep
PLLTSVFGICKSKGFENKGTLNVCGMLRNNAHLEYKVCSITVLNNIVGPFFFHVTPVVC

SEQ ID NO: 269383 - protein, 82 aa, Zea mays
  Clone ID: MRT4577_177274C.1.pep
NRGANQDQTILRFGRSRRPNCCLERRSLGLTGPKLCGKVRLRRLVPRPARTLSLHDAPSTSQVVCECTLNHAGNSVHGLIHA

SEQ ID NO: 269384 - protein, 126 aa, Zea mays
  Clone ID: MRT4577_177275C.1.pep
FSHGIPSSPPTPSSVSSLVSIQDSQVKHSDSDPVTNVLVRRRRWLPLASKPSLEAGGGPLPPCLPIDLSAPVAFAPVPTDVKEGGMDAVLVSSSMGMLRLPFLTRLPGFTNTKALPCFYFFISVSY

SEQ ID NO: 269385 - protein, 98 aa, Zea mays
  unsure (1)..(98): unsure at all Xaa locations
  Clone ID: MRT4577_177276C.1.pep
MVANGPAPAXGGVGAASSLRKLWAPSAFFSGGGGAXMLPFFTDGAAGPKMSPTPVLFLGLGFIPVVALPPVFGKLFPPPPLVGSPLPQKTGAPQRGAF

SEQ ID NO: 269386 - protein, 124 aa, Zea mays
  Clone ID: MRT4577_177277C.1.pep
MDRLGLVDFLKGLLEFDPNKRWSPLQALYHPFITGKSFTGPYEPVPETTRIPVVRAAAIDHNPGGGHWLHSGLSPQSRSIISCVFSRIECPFQCSRQLRWLQPSKLSSAKSPSSSWTTNSSSAI

SEQ ID NO: 269387 - protein, 62 aa, Zea mays
  unsure (1)..(62): unsure at all Xaa locations
  Clone ID: MRT4577_177278C.1.pep
VLAGHLMIVSKHRNILFTPNSAMWCVTLHSFLLRTITSPEAPEPIYPFHILQWXXXXXEKKE

SEQ ID NO: 269388 - protein, 495 aa, Zea mays
  Clone ID: MRT4577_177279C.1.pep
NLFQALHHPFITGESFTGPYEPIPETARIPVARAAAIDHNPGGGHWLHSGLSPQVIDALSFPVSVSSFRNNNHMESFLNHYAPYLKLVTSGSVNRYLPLNNVYPPKVPFSYGSSYGSFGSHGSYTGNAGFGNSYGSIGDANAINMYYSPLGSSGLTQIGPSPDVRLRMRLSHDRGIRLSPGSLGPMSLGASPSQFTPPNYQMQIPANSVGKHGSGSPASGGIHGSPLGKSAGVGPYNMRRNLPMPPHDYVSQHGHGRCGDGVSFSHFDACARGHTGHSHSAAGPSSYHSGWRPQIGSRSGISLEASSSHVLSQAPSQSFDFSPSSALDPANWDPNYSDESLLQDNSLSAELSSNLHFGDATGQGSGSIRSANFQGHVFATSNPVPTNQRADQLFHVSSQGLSAHSSVPVNYGGYNPPNYPPQNLRPRRGQPILHQRYNQATSSPMRPMGSHHSGQPAWPSFGMGDGVPWGGTGGHSFTTSGLSSSLARKDYGSIF

SEQ ID NO: 269389 - protein, 47 aa, Zea mays
  Clone ID: MRT4577_17727C.1.pep
MVSDLLHQILSWTIGRHRTLSLSLSERIMSQIGVSVVTSVRTSMAPY

SEQ ID NO: 269390 - protein, 157 aa, Zea mays
  Clone ID: MRT4577_177280C.1.pep
HDRSSARRRSVGVLDYLVNALGGSSMRLGVSFIAPRQLGVVGGQQGRQFLPLFGVGAPDSPVHHRTTTVHVWCVISFLLWHSRPLQLRAGWRTVGAGHASPADCAVDCCAGGRWLIGQSGAPPDSPVNYSRTPPNFPESGLFTGVQPSTPDTISVHH

SEQ ID NO: 269391 - protein, 92 aa, Zea mays
  Clone ID: MRT4577_177281C.1.pep
DPLLQVAVGPPPLQVAGAARHRGRSAAPPRLPHRNAGSPRLQVSLLNTLVTCYGGRGTFVTCNYDPLGIRRRAPVLTGAGQGHLPLSVDFGA

SEQ ID NO: 269392 - protein, 83 aa, Zea mays
  Clone ID: MRT4577_177282C.1.pep
CTQNGTKPRPGMFSVVAILKGKADVDTETISKPNVIRDFGDLKFRSRATWSTLLTSIMGGLSPLLFKKKRGTSITFTEILEGD

SEQ ID NO: 269393 - protein, 271 aa, Zea mays
  Clone ID: MRT4577_177283C.1.pep
MLRTHLLPEAWRRPLPQEAGARHQSPRISFHRAAPRSGIQGGQVRCGGPELRWLSSSRNSSSDSQPWTTMCVNADYTTPADSVATSEQTGGEAEATLETGGEAEATLETGGEAAATLEQTGGETEEPTIVAPANEYTEQEAAPQQKCAKIHDFCLGIPFGGLLLSMGLIGFLFWRSPASLTFGVAPGLAILALAVLSLNVWRSGKSSLPFILAQAGIAAAVAWKHGQAYTTTRKLLPWGFYVALSAAMICFYSYVLLAGGNPPPKKAKAAA

SEQ ID NO: 269394 - protein, 50 aa, Zea mays
  Clone ID: MRT4577_177284C.1.pep
VRHQVVLCVASIDGLWHRRSSFLAGLHVHLDLSGGGGVSGLRNNWRRVLA

SEQ ID NO: 269395 - protein, 264 aa, Zea mays
  Clone ID: MRT4577_177285C.1.pep
MLRTHLLPEAWRRPLPQEAGARHQSPRISFHRAAPRSGIQGGQVRCGGPELRWLSSSRNSSSDSQPWTTMCVNADYTTPADSVATSEQAGGEAEATLETGGEAAATLEQTGGETEEPTIVAPANEYTEQEAAPQQKCAKIHDFCLGIPFGGLLLSMGLIGFLFWRSPASLTFGVAPGLAILALAVLSLNVWRSGKSSLPFILAQAGIAAAVAWKHGQAYTTTRKLLPWGFYVALSAAMICFYSYVLLAGGNPPPKKAKAKASAA

SEQ ID NO: 269396 - protein, 261 aa, Zea mays
  unsure (1)..(261): unsure at all Xaa locations
  Clone ID: MRT4577_177286C.1.pep
MLRTHLLPEAWRRPLPQEAGARHQSPRISFHRAAPRSGIQGGQVRCGGPELRWLSSSRNSSSDSQPWTTMCVNADYTTPADSVATSEQAGGEAEATLETGGEAAATLEQTGGETEEPTIVAPANEYTVQEAAPQQKCAKIHDFCLGIPFGGPLLSMGLIGFLFWRSPASLTFGVAPGLAILALXVLSLNVWRSGKSSLPFILAQAGIAAAVAWKHGQGYTTTRKLLPWGFYVALSAAMICFYSYVFLAGGNPPPKKAKAAA

SEQ ID NO: 269397 - protein, 140 aa, Zea mays
  Clone ID: MRT4577_177287C.1.pep
PGGAAGFSFIFPPGFFLLIGGGAPPFSRPGYWAVCPPLFIFFPLEKGGAPPGGRGIISGGPPPLFWAPPFTQETVFSLFFPPPASPPRFFFLPPAHFWASPFSRPNCRSLGYPYEQPELFPFSFSAQLIKPENVSCMTAN

SEQ ID NO: 269398 - protein, 85 aa, Zea mays
  unsure (1)..(85): unsure at all Xaa locations
  Clone ID: MRT4577_177288C.1.pep
ELFWVRTVQSVLNLSTNHESADAAAADFRASAYASSRDRARRAMVYVVVRTLQPRALPRPFWVSVGGVKNKKCKXRGSKGNXESG

SEQ ID NO: 269399 - protein, 169 aa, Zea mays
  Clone ID: MRT4577_177289C.1.pep
MVSKYTVLHEITQERVAIESIAYNMVIDGLCKEMKLEEAEKVLDIKTRHGSTPDLYGYSYLIRSYCKMGNLEKVWHYIEAMVSHGIEINCYIVGYLLQCLKKLGMISEVIVHFQKFRDLGLHLDGVLYNIAMDAYCKLGNMNEAVKLLTEMMAGGLVPDKIHYTCLING

SEQ ID NO: 269400 - protein, 97 aa, Zea mays
  Clone ID: MRT4577_17728C.1.pep
IPSSVRTTFIIIRSGGAGLPLAALSIAPHESKTMNLMSTEIPMNQLATSAPPQAPLRSTGALRQPHNDRPMTCVLTQIRKHQKNAPILIRKLCFPRV

SEQ ID NO: 269401 - protein, 79 aa, Zea mays
  Clone ID: MRT4577_177290C.1.pep
RSTFVRKHNREGVSFCVRFTKGYAKNLTATDTDDEYKETIGKYETIPRAEDMRHSEGNSRSQEIVSRGNPETGGQTSKD

SEQ ID NO: 269402 - protein, 121 aa, Zea mays
  unsure (1)..(121): unsure at all Xaa locations
  Clone ID: MRT4577_177291C.1.pep
MKVEAGAPRMKRKRRRWRSTTELPISAKRNDKWXNSDFHNVTDVDGADALALPYNMSQLGLDVPVITIMLLTRTITLYTLRQMAKMHDMKAMNRIDRYHELPQHAIIKRVFHVDQRDEADG

SEQ ID NO: 269403 - protein, 218 aa, Zea mays
  Clone ID: MRT4577_177292C.1.pep
GYLEAGREAETGDALPSPHPPLVSWRRLGGCRCRPTSGGQVVLGHFAGDEYHKNDKIPDTSSADARKGRDIQGIPWEQINITRKKYRQSRLEQYKNYENVPNSGEEAMKDCKPTEKGGIYYEFRRNTRPVKSTILHFQLRNLVWATSKHDIYLVSHYSIRHWSALSGVDTELINVQGHVAPREKHAGSLLEGFYQTQVSTLTVKDNLLVAGGFQGELI

SEQ ID NO: 269404 - protein, 68 aa, Zea mays
  Clone ID: MRT4577_177293C.1.pep
DLLYRSECKFFTTLRIYTDIKCFCVVRQYTLTNGRVGMVKTKDHSHIADWIVPISLLRDKIGGDHRGR

SEQ ID NO: 269405 - protein, 354 aa, Zea mays
  Clone ID: MRT4577_177294C.1.pep
MRGSMSNYYDDYDDIDEIEDDYDMDDPADDMVDEQRGVRDSDAEDNDYGQPNDKIPDTSSADARNGRDIQGIPWEQLNITRKKYRQSRLEQYKNYENVPNSGEEAMKDCKPTEKGGMYYEFRRNTRSIKSTILHFQLRNLVWATSKHDIYLVSHYSIRHWSALSGVDTELINVQGHVAPREKHAGSLSEGFYQTQVSTLAVKDNLLVAGGFQGELICKHLDREGISFCCRTTYDDNAITNAVEIFNTSSGAVHFMASNNDSGVRYYDMERFQLFKHLQFEWPVNVGFFGFLAISVTFMFYIWIFLLVLSLQGTSFYTCCLQMKFRIDFIAYFICPIVVLVLSTYSSSLGMFLTY

SEQ ID NO: 269406 - protein, 69 aa, Zea mays
  Clone ID: MRT4577_177295C.1.pep
MSEEMADQREEAGEKEACRDQIKESDKEEEPPAASSHGQEWRPGGKAPKNPKPEPGARPPALPVMVNDP

SEQ ID NO: 269407 - protein, 399 aa, Zea mays
  Clone ID: MRT4577_177296C.1.pep
NDKIPDTSSADARKGRDIQGIPWEQINITRKKYRQSRLEQYKNYENVPNSGEEAMKDCKPTEKGGIYYEFRRNTRSVKSTILHFQLRNLVWATSKHDIYLVSHYSIRHWSALSGVDTELINVQGHVAPREKHAGSLLEGFYQTQVSTLAVKDNLLVAGGFQGELICKHLDQEGISFCCRTTYDDNAITNAVEIFNTSSGAVHFMASNNDSGVRYYDMERFQLFKHFQFEWPVNHASLSPDRKVVVIVGDDPDGLLIDANSGKTVHSIKGHRDYSFASAWSPDGRTFATGNQDKTCRIWDVRNLSKSVHVLRGNLGAIRSIRFTSDGQFMSMAEPADFVHIYDVKSDYNKRQELDFFGEISGTSFSPDTDTLFVGVWDRMYGSLLQFGRLYNYSYLDSLF

SEQ ID NO: 269408 - protein, 67 aa, Zea mays
  Clone ID: MRT4577_177297C.1.pep
CYLAAMGWVSDRPLSCCNACTMLFARFGSFVLQKKKMLSATIGMDYGTISIYAILFCCLPLKKKKKK

SEQ ID NO: 269409 - protein, 70 aa, Zea mays
  Clone ID: MRT4577_177298C.1.pep
AHPHHEHLHCIIQTPEDPKGSGRGCCSCPSSERITTPTQTYTDYWLTTAMIAHIYRLIYICQLRINSRVS

SEQ ID NO: 269410 - protein, 76 aa, Zea mays
  Clone ID: MRT4577_177299C.1.pep
DIGHSLNMGQGQHAGHLSKKKKTKGHHPYIPKPLSLGVPLYQTFTQGKRNRMPRFFWTKKGNKKSQRGKPTRGGTL

SEQ ID NO: 269411 - protein, 46 aa, Zea mays
  Clone ID: MRT4577_17729C.1.pep
DATSCDLRDSQVDYQLCPSLSCSSVRYNTSRFMSSRTVVTRPASSS

SEQ ID NO: 269412 - protein, 90 aa, Zea mays
  Clone ID: MRT4577_1772C.1.pep
SPGVRGLVGRFVGRLVAVEALQLRGSSSLPGRSLARVWSHACPAELMRPSPAVPGFVESRLQSWPRPVTHTSPPQSSSCYGWSAEVSPLP

SEQ ID NO: 269413 - protein, 41 aa, Zea mays
  Clone ID: MRT4577_177300C.1.pep
CEKKKKKKKKKKKKKKKKKKKKKKKKKKLKNKKKKKKKKKV

SEQ ID NO: 269414 - protein, 128 aa, Zea mays
  Clone ID: MRT4577_177301C.1.pep
MQAACNRTEGAHPFGFDASNMEAQAQMSCNRRAAGRYVQETAPPLAPLPRLLDCGTSTATRGNPAHDPTVPTRHIGHGPVSRGRRRNGRCGQKWADSNGGGRRAKAAVKSPAKLTSPPGTAGEPSPTA

SEQ ID NO: 269415 - protein, 60 aa, Zea mays
  Clone ID: MRT4577_177302C.1.pep
TSSAQQQAKHIARLRHRIRREQKASISALRQVSFREEPQAAVLTVLPTPGLFLPTIFYFT

SEQ ID NO: 269416 - protein, 66 aa, Zea mays
  Clone ID: MRT4577_177303C.1.pep
VAFLQGIFTALTPTEFTSHFHSLLPVLAPRNPPWLTKETAHPQKIQSRHCLLSGTQNKLASGIPRI

SEQ ID NO: 269417 - protein, 92 aa, Zea mays
  Clone ID: MRT4577_177304C.1.pep
LQVPVLYSRFYPRESTPLSLLHPWGAVTPPPPSNPSRPLLKPFSPRCHSFPARIYVALVHVSNWILVEGRRREERGRIHGGGLPDSLSGICP

SEQ ID NO: 269418 - protein, 79 aa, Zea mays
  Clone ID: MRT4577_177305C.1.pep
VIECFSAWRATYALCSRRLLKAVSWLSHGCCRTCRLGRRRSIRCGLGEHGESRRRFRWAGRRCRRSSKYTTAHASAHAS

SEQ ID NO: 269419 - protein, 119 aa, Zea mays
  Clone ID: MRT4577_177306C.1.pep
TPPAPWAGTRRTAPRRRARSTTRSSSGAPRCSSSAPGAPRSTGRRRRARAGSRAPATPASRPGPRRRSPAVCWDSCSSCPSCRRRRRRACPRQPPPRRPASPAQGSPSSSPGPARLCQP

SEQ ID NO: 269420 - protein, 90 aa, Zea mays
  Clone ID: MRT4577_177307C.1.pep
IAVFFLLRPRGGSFVLPATKRKRLTGRAQMVQPVCKFFPRDGGFLGPPIPGNQHPFGAHQNRCLHDRGKRKFTPSPFFFPNLDGRGDPKK

SEQ ID NO: 269421 - protein, 76 aa, Zea mays
  Clone ID: MRT4577_177308C.1.pep
HTSFLLFYFFFFFFFFFFFLKKKKKILKLKKKKKKRFIFGGAQAKGRILGIFFKRGVLSDMDLGGQFWPFGGSLPG

SEQ ID NO: 269422 - protein, 77 aa, Zea mays
  Clone ID: MRT4577_177309C.1.pep
LCTWGGLLVVLLYVEPMVVVFVSGPVHQWAQGAVMDLLCSAWVTLGPVNHSSMPRVRFLKKKKKKKKKKYSALLPLL

SEQ ID NO: 269423 - protein, 66 aa, Zea mays
  unsure (1)..(66): unsure at all Xaa locations
  Clone ID: MRT4577_17730C.1.pep
LXXQESHILELVSVACSSVSLSRIMNFCHVHLLCGVVLSCYEIFVPLCKKKKKKKKKKYSALLPLL

SEQ ID NO: 269424 - protein, 111 aa, Zea mays
  unsure (1)..(111): unsure at all Xaa locations
  Clone ID: MRT4577_177310C.1.pep
APPHEWESLAWKRSGGRARLSEIVVPAFYLWMADRSPLTVYDSVDDVPLELVPCAFVPVYLRRPNPNGLEFDNLFLDMNGIFHPFLHLXGLPVPTIYNLVFMSLFDFINHF

SEQ ID NO: 269425 - protein, 54 aa, Zea mays
  unsure (1)..(54): unsure at all Xaa locations
  Clone ID: MRT4577_177311C.1.pep
GILGLVLQSILQKNPXNGQVPGLLGAQIGQPPPAMWGFQKKTPCPXVVAGGVPP

SEQ ID NO: 269426 - protein, 95 aa, Zea mays
  Clone ID: MRT4577_177312C.1.pep
RVSPATAAKNVQQADRSGRCREHERTRRRRICRRRFAAAASAAALASSRVSDSRLGKSGSGAGAAGREVGAGLGAELSQPRWRMCKRERELSSSR

SEQ ID NO: 269427 - protein, 64 aa, Zea mays
  Clone ID: MRT4577_177313C.1.pep
IIGGAPPFRFTYECIVSINRRFVISSVWWRSHQIRKWRLLEEKKKKRRPARDHRTGRRGSDPAN

SEQ ID NO: 269428 - protein, 357 aa, Zea mays
  Clone ID: MRT4577_177314C.1.pep
SRPAGILFVEDLPNELPWEFDVIVDAMFGFSFHGTPRPPFDHLIQMLVSLSDIQNPDKRPAIVPIDIPSGWHVEEGDVDGGIKPDMLVSLTAPKLCAKKFTGPHHFLGGRFVPPPILNKYGLQLPPYPGTSMCVRIGKAPSVEISSLRENYISPELLESQVMSDPFDQFLKWFDEAVTAGLREPNAMALTTANKEGKPSSRMVLLKGVDKQGFVWYINYGSRKAHDLCENPNAALLFYWNEMNRQVRVEGSVEKVPEAESDKYFHSRPRGSQLGAIVSKQSTVIAGREVLQQDYKKLEQKYSDGSLIPKPEYWGGYKLTPTLFEFWQGQQSRLHDRLQYSQREVDGSTVWHIERLSP

SEQ ID NO: 269429 - protein, 372 aa, Zea mays
  Clone ID: MRT4577_177315C.1.pep
LPSVAGQWQKGKLLGSGTFGCVYEATNRHTGALCAMKEVNIIPDDAKSAESLKQLEQEVKFLSQFKHENIVQYYGSDIIEDRFYIYLEYVHPGSINKYVKQHYGAMTESVIRNFTRHILRGLAFLHGQKIMHRDIKGANLLVDVQGVVKLADFGMAKHLSTAAPNLSLKGTPYWMAPEMVQATLMKDVGYDLAVDIWSLGCTIIEMFDGKPPWSDLEGPAAMFTMLHKDPPIPENLSNEGKEFLQCCFKRTPAERPTASELLDHPFIRNSSHYNKHGSIHSFAGIKVNDTTYSSRDNWPASKSDSNMKGKNTNVEPSRAARSSESTFRLAPLTIQEATPNFSPRPFVNSMQFTSVNPQPSPLPRPNGKEVLF

SEQ ID NO: 269430 - protein, 65 aa, Zea mays
  Clone ID: MRT4577_177316C.1.pep
GKRASRMIAGAHLSPLNILKCNEAVKRRAVNIYFSGFFSNGKVCTFFSHENFQTDDEDIKPNHFC

SEQ ID NO: 269431 - protein, 300 aa, Zea mays
  Clone ID: MRT4577_177317C.1.pep
MDLWERARAFAGEAAKRSQELSAEAAKRSSALVSETAKKSKEIFSETASKSREIAAEATKQADLLAGQIKHLASDIPVPSIPPIPAIPPIAATASSEPDAAELERYGITDDLREFVKDMTISTFRDFPLQDEPEMSDVPTVSNVRQDLSEWQARHATLVLSAVKEISKFRYELCPRYMKERKFWRVYFLLVNSYIAPFEKKSLEELKVKAEEEKRDSQKQASQASTTFEPKDTKAPIKTSSTNPEHDLDVFLLGDLGSDDEASVGDDDGLDDDFDKIDATSGLESDDDDKKAATGKAEGV

SEQ ID NO: 269432 - protein, 43 aa, Zea mays
  Clone ID: MRT4577_177318C.1.pep
ANSTSTSESPPLPAPRIGNYRKRSRRQDPWSSVRWRLFLPCGA

SEQ ID NO: 269433 - protein, 239 aa, Zea mays
  Clone ID: MRT4577_177319C.1.pep
GTLGPADKHLASDIPVPSIPPIPAIPPIAATASSEPDAAELERYGITDDLREFVKDMTISTFRDFPLQDEPEMSDVPTVSNVRQDLSEWQARHATLVLSAVKEISKFRYELCPRYMKERKFWRVYFLLVNSYIAPFEKKSLEELKVKAEEEKRDSQKQASQASTTFEPKDTKAPIKTSSTNPEHDLDVFLLGDLGSDDEGPVDDDDDLDEDFDKIDVTTGLESDDDDKKIATGKAEDAK

SEQ ID NO: 269434 - protein, 260 aa, Zea mays
  unsure (1)..(260): unsure at all Xaa locations
  Clone ID: MRT4577_17731C.1.pep
GPVKARPPNAIAAVVPAAAAALQLESLLPHLSTLSHYKQFHARLHALGTLHSYPSLRARFLDRLALLPHADALPHALLLLRSLPSPATNDFNATLRGLAASPHPARSLLLLAGRLLPAPAPPRPRLDALSLSFALKATARCSDAFATLQLHATLVRLGVAADVRLMTTLLDSYAKCGDVASARKVFDEMPVRDVATWNALLAGLAQGTEPNLALLLFRRLXELSGVAXREEPNAVTVVAALSACAQLGTLRMDWLCMSLL

SEQ ID NO: 269435 - protein, 111 aa, Zea mays
  unsure (1)..(111): unsure at all Xaa locations
  Clone ID: MRT4577_177320C.1.pep
VLLLKQPVFLLMKLNPVVFFLFLYDIAGTPGVAGDVFHINFPGLVKGFMGDDQLGEALEGSDVVIIPAGVPRKAGMTWDDLFNINAGIXVKXLWTGIGKHLPNAFGHIIRN

SEQ ID NO: 269436 - protein, 66 aa, Zea mays
  Clone ID: MRT4577_177321C.1.pep
GCTDISMKSDQERTRGHEHNCWRCRHGWPHPIHLFPVKGALYHTKHRTSFSNGVYLNRTKRIDVGL

SEQ ID NO: 269437 - protein, 53 aa, Zea mays
  Clone ID: MRT4577_177322C.1.pep
QEGWRQPLFPSSTALCFLVNARPLIHFALITFLRSSRPYLFPICQGVVPFFSP

SEQ ID NO: 269438 - protein, 84 aa, Zea mays
  Clone ID: MRT4577_177323C.1.pep
TDMSAGAQMISVEGSCVRCPRKLLLSRPRTSCDHLLNCHNEQGAGIRQCNWVPCMCASTCNSVSGVWYANTLLLLLISRAMYDH

SEQ ID NO: 269439 - protein, 57 aa, Zea mays
  Clone ID: MRT4577_177324C.1.pep
GITSMPLIKVYNIDSSPYGLKGHSIFKSVSYVVIPKLHEEGPSAILYKQLQPKAASS

SEQ ID NO: 269440 - protein, 77 aa, Zea mays
  Clone ID: MRT4577_177325C.1.pep
KSLCPSVPLGYLLWLKFRITTKNDTNWVHWGSIPTQFFCKSSIQWLLRPGNFPLDRPWSRPVRKPKIKNPHGEKPRK

SEQ ID NO: 269441 - protein, 442 aa, Zea mays
  Clone ID: MRT4577_177326C.1.pep
FISVLLTIGSETAEKELRRQSAIKRSIDLFFEYPYNNFLHHHVENIIVACLEGKRPEVVEHVLHECDIVGKILVSEGFSSLSTESNGPTVPSEGKTPPRIGNVGHMTRIANKLIQLGNSNNTIQAHLQENNDWVEWQTNVLVKRNEVENVYHWACGRPTSLHDRGRDSDDDDFRDRDYDVAALANNLSQAFRYGIYSNDDIEEAQGSLERDDEDVYFDDESAEVVISSLRLGDDQDSSLFTNSNWFTFDGERGIDDRLSASVPSSSPNSLETSLEAEEADDGKVIGTEDEMETVYLGNGSAEEVKDVAECNEQPNCCTEDERLKNTEGIERHPDVSNHYTDICTNEAASAAAESSAPSVEIVAKKTVDEPSEAERTVDEPAESSLDSSVSIPLPAPVNGSEPANSEASSEQVAHDTDVQQPVKEAPDEDVNAKKTDVAKASE

SEQ ID NO: 269442 - protein, 207 aa, Zea mays
  Clone ID: MRT4577_177327C.1.pep
TLPVNQKGSFFTNSNWFTFDGERGIDDRSSASVPSSSPNSEETSLKTEEADDGKVIGTEDEMAGSNHASGSVEEVKDVAECTEQPNCCTEEERLKNEEGMEWHPNASNNDTEAEATAESSAPSVEIVAEKTVDEPLGVGRKLDEPAESSLDSSVSVALPAPVNGSEPANSEVSSEQVAHATDVQQPVKEAPAEDDDAKKTDAAKTNE

SEQ ID NO: 269443 - protein, 111 aa, Zea mays
  Clone ID: MRT4577_177328C.1.pep
LLVSYVFSRIFWFQLLRTFDLQRLAPQLGLSSFMSWWEEASSSVRGLVRKGLNSLIALEAYIIWNHRNRCVFDNWIPNVSLAIRMALEERWMWEMARAKGLSYQSAPLLEV

SEQ ID NO: 269444 - protein, 113 aa, Zea mays
  unsure (1)..(113): unsure at all Xaa locations
  Clone ID: MRT4577_177329C.1.pep
VGRPVGXRCGGSPLPWAARGLLGPXCLXRRGWPAVRWXCRCRVXVCVRWXXPSRPLLWFPSLWGSRVXWVSPLLLXXFGSFRLLVXGFPXCCLAPPVPQLFLPXXXXXXEXEG

SEQ ID NO: 269445 - protein, 171 aa, Zea mays
  unsure (1)..(171): unsure at all Xaa locations
  Clone ID: MRT4577_17732C.1.pep
GQLNRLGFHHTRELKHHLDELHKKCPKTKIRCGDYVTATLGFGVYPGEHGWSTDLRACCASXGXGTYNFTLXXKKCGEQGSSVCSNPLEAFEXTAFHMTDAAIRMEHDGSLNGPYPQPPNSQVIIEITKMSSNTAESACLMASRHISRVYKTIYILRDRGTYLTLSIGRSV

SEQ ID NO: 269446 - protein, 112 aa, Zea mays
  Clone ID: MRT4577_177330C.1.pep
LIHDFSLLLCALQTDDNVLGSSVGNSTKCKMQLIMSSSPRASDFGPNFECYVQEDGKYITQESYHHRCRDHELCLLSEEVLIKVVSCTTNNTSYLDHHIMYHPTMSTNQLRL

SEQ ID NO: 269447 - protein, 336 aa, Zea mays
  Clone ID: MRT4577_177331C.1.pep
MNLNVNETDIIDTTELADQIQQSGATKSLRHHKDSGGAENHVMLESHDGLAAQPPFIFTDTQTIPEDTSALAPITSAQARQQVLSIGTSPVLDGTPQLQPGKENDECLNNSGQIGVETQNTILFSLLEMEELQDKELEDAQEHRQKCESEAYRKAQRALLEANGRCAILRRKREICSSQDHGLIAENSSLVQSLSIRNPEDGLAMPSLLNSQIHVVSQIPENQGGRHRLCPEEPSQQQIDKHEDEARPHYCDKLAASTTDPSSVSVVNADSILSDYMEDDLLFPTRQARSECALDVENQMEETIHVYAEENRQVSGDGGQDYELLEASLRSRCRRL

SEQ ID NO: 269448 - protein, 85 aa, Zea mays
  Clone ID: MRT4577_177332C.1.pep
PAPWRLDCFTGPQERDEGALTAPPCVSTPPFFLLDHMLAASASFCHYDPRRRWPRFQGPGNRPTGSSTAALEARFAGTGTILLQT

SEQ ID NO: 269449 - protein, 465 aa, Zea mays
  Clone ID: MRT4577_177333C.1.pep
MYSIFSTVGVHSKDHRLEILRHKIAAKENELKGQKRPLFAVATKNADFSSNQPRLPSEKIRLEASSSGEYSRFNSLSEHSGGPNKWLKLNQQYNQFCSDLTPLAPIGSISEKINVQSSEVTNRSENGITMNLNVNETDIIDTTELADQIQQSGATKSLRHHKDSGGAENHVMLESHDGLAAQPPFIFTDTQTIPEDTSALAPITSAQARQQVLSIGTSPVLDGTPQLQPGKENDECLNNSGQIGVETQNTILFSLLEMEELQDKELEDAQEHRQKCESEAYRKAQRALLEANGRCAILRRKREICSSQDHGLIAENSSLVQSLSIRNPEDGLAMPSLLNSQIHVVSQIPENQGGRHRLCPEEPSQQQIDKHEDEARPHYCDKLAASTTDPSSVSVVNADSILSDYMEDDLLFPTRQARSECALDVENQMEETIHVYAEENRQVSGDGGQDYELLEASLRSRCRRL

SEQ ID NO: 269450 - protein, 85 aa, Zea mays
  Clone ID: MRT4577_177334C.1.pep
MTMAIARVLGLSLSSASTSAMHMPSHCAGLHGSYGAGPCLTTILDAGGLYPYAHDLRHPHCSQLAAWLYYARSVHTSTIYHPLQQ

SEQ ID NO: 269451 - protein, 191 aa, Zea mays
  Clone ID: MRT4577_177335C.1.pep
NKICDGVEARAEQGKYHGVLVIPEGLIESIPEMYALIQEINNLHSSNVTEADIPSQLSPWAAALFKFLPSFIRRELILHQESDNSAQLSQIDTEQLLAHLVEAEMNKRTKEGKYKGRKFSSVCHFFGSQARGSLPSNFDCNYAYVLGHICVQIMAAGLNGYMATVTNLKDSTNKWRCAAVPLTAMMSVRRH

SEQ ID NO: 269452 - protein, 34 aa, Zea mays
  unsure (1)..(34): unsure at all Xaa locations
  Clone ID: MRT4577_177336C.1.pep
LSQPNHSNGRSSHYFALLHSXPHMTLKHDTSCSL

SEQ ID NO: 269453 - protein, 85 aa, Zea mays
  Clone ID: MRT4577_177337C.1.pep
IMNARSCSWRTRPRTRSASSWLRMVNARLMAAGAAAAVDDALPSQASHASTLGLAFCSWSGLGMSSPPPPIRLNEPSKSVSARWD

SEQ ID NO: 269454 - protein, 86 aa, Zea mays
  Clone ID: MRT4577_177338C.1.pep
EPLNSIIKCVGSSRAPCYVPGGLAYKSPRIFCWLLCVTGCCLDNGFCFFARQCMGFCQSKFLLKDVGCSLLKMCNGRGKAGWLLLP

SEQ ID NO: 269455 - protein, 41 aa, Zea mays
  Clone ID: MRT4577_177339C.1.pep
HFLLGSAGRLVRTLTKRNREHFKFMELAARDYVPVSDFPYM

SEQ ID NO: 269456 - protein, 88 aa, Zea mays
  Clone ID: MRT4577_17733C.1.pep
LFFFWFKQHSFFYIFLICTTTTIMNQTRKKAGNSGTNIRTPAQFANRPRDIHHTCNDTVGGLTRTTGRKPKFQTTWCNPENKPCLPHI

SEQ ID NO: 269457 - protein, 139 aa, Zea mays
  Clone ID: MRT4577_177340C.1.pep
PAQPTHLNTLYSVHPTGSSQHPWACACRSAGHAAARPRGRRRPAASAERRWCSCPAATCGSTLSRRRRLVRVLEDAYGFVADDPDDCWILCDADGMGLEGLDPAAVPYVEPLFEDTNFCAIHGERRNIMPKDMQVARRI

SEQ ID NO: 269458 - protein, 103 aa, Zea mays
  Clone ID: MRT4577_177341C.1.pep
MASGLSTGRMRYVTRPIAFAVKAPWKMLTVVPGFSAMKQPVEAFFMSGAADGSTHAHDPNGAGYLTRPPLIEEIMMPSVSELANIGVQFCPHAGVLSIIAFDA

SEQ ID NO: 269459 - protein, 42 aa, Zea mays
  Clone ID: MRT4577_177342C.1.pep
TFRVQRPPLFEINCLLCALQSNFCFFLDSPAPESLFQPSSFQ

SEQ ID NO: 269460 - protein, 39 aa, Zea mays
  Clone ID: MRT4577_177343C.1.pep
AIIRVLFYLTFLCLQCNKSGRSIKFIFPLIWVDRISISM

SEQ ID NO: 269461 - protein, 85 aa, Zea mays
  Clone ID: MRT4577_177344C.1.pep
VGEHGSMGVFPPPPFFAQIKKYGGGCYFPSYPGLFGGGAFCAGDIFFGVASLWRERFRKLLGGRTPKAWGKGLFIEEGPFPLPKE

SEQ ID NO: 269462 - protein, 150 aa, Zea mays
  Clone ID: MRT4577_177345C.1.pep
PAGTSLLSVPTEQQRPSTQVFRVRHFGFGIPDLVQPPPQRCLCRDSSASPLNGGRRGDEKRRPSSRTCRSSPAGPQSTVRPLPSALGSVVPSASASALPSASASALPSKASRCITLAHGRSPCLDGLTSDGEEARQLKKRIDLFMGEVSC

SEQ ID NO: 269463 - protein, 89 aa, Zea mays
  Clone ID: MRT4577_177346C.1.pep
SLMASAVFVSFARVSASVPAIQRKQEKNQPIMNEIEALVYLFMFYPLHRRITRCDLYGIVARFCPCHIQWASNPNIKKKKKGGHRIVSS

SEQ ID NO: 269464 - protein, 195 aa, Zea mays
  Clone ID: MRT4577_177347C.1.pep
MMDSAADSSSPRCHHGQYRQKDAGELEDQNSTSKMPSSASELPCSLKREVQVLEKRLDDQFVMRRALGKALGYKPCAVHASSVNCIPEPTEELIKEIAVLELEVICLEKHLLTLYRKAFEQQLSPVNSACDAENNKQPARSLSGILSEASVLSFSTPRKHQPVQSSRMVLARKFTPTASTSEASSESPASSAGIP

SEQ ID NO: 269465 - protein, 91 aa, Zea mays
  Clone ID: MRT4577_177348C.1.pep
GKPAQQLGLDYLEYRVAPEESSLAAEYGLNSTVVRTPWVISSRGWWEMKKVYMDRQNVTVNVKRFADLLRAARARLRNTTACAAKPAAPLR

SEQ ID NO: 269466 - protein, 103 aa, Zea mays
  Clone ID: MRT4577_177349C.1.pep
ARVRARERNTPGARTGLGGGQEHRRRAEETKKRTDATVKHENRKEESAHEPQVEEQTDRGRQLACMSSRPGQCGRADEYILEDKELEFYMKKLQRKNGKSAAA

SEQ ID NO: 269467 - protein, 95 aa, Zea mays
  Clone ID: MRT4577_17734C.1.pep
MLGRSYYSGGYTHYRWHHPYGAKTSEQILAHMHRTQTRKPASTTATITPPGRGIAKPCEDMRLLLIAGVAMRPFWYDTILRYTHTSDPCIIHHST

SEQ ID NO: 269468 - protein, 215 aa, Zea mays
  unsure (1)..(215): unsure at all Xaa locations
  Clone ID: MRT4577_177350C.1.pep
GRGRWKTSLGFGKVSADEVMAKNARADGLVVNSFTELEPLFVDVYEAAIGKKTWAVGPLFLQHNMPLSATSGSDDXDGRLLRELXEQKKPRSMELVSFGSLARSSQPQLVEIAPGLEASNRPFIWVVKPANLAEFERWLSDSDDGFEPGVGDKGLVVTGWAPXKAILSHPATGAFVTHCGWNSLLECVAVGYGFFFFFFFFFFFFFPARRPRGTQ

SEQ ID NO: 269469 - protein, 71 aa, Zea mays
  Clone ID: MRT4577_177351C.1.pep
MSFCVNPNCPHPKNPNNVQVCQACGNSLRLNGRYQTLGLLGKGGFGATFAAADVALPGTPICVVKQLRPQT

SEQ ID NO: 269470 - protein, 50 aa, Zea mays
  Clone ID: MRT4577_177352C.1.pep
QPWKAKVSAASQRRRTTTGAAPPGRLMATPRRPGESWGAASHRRTRQLAS

SEQ ID NO: 269471 - protein, 140 aa, Zea mays
  Clone ID: MRT4577_177353C.1.pep
GGAHQASSSRSSIHHLRRMVTRAPRGEHHTGRGPESPTADATQSLPAAAAGEPARSQGPSRQRHAATEATTTAHEGDAGPMPTLIDGADMAVVRPDRQPITWRRPRPLERMSKTMCGGSGPPAPTYASVSVGWKLGPSRR

SEQ ID NO: 269472 - protein, 161 aa, Zea mays
  unsure (1)..(161): unsure at all Xaa locations
  Clone ID: MRT4577_177354C.1.pep
MGRPSPGWSSCLRHGPVLLLPLLLSALCSSWRAAAQAQAPPPPPQTEPTEAAAVNAILGKLGLSAPASWNISGNPCSGAATDDTPLDDNPNFNPAIKCDCTDQNGTLCHVTRLXEDEPFCSWLDGXKINSLDAAGPIPEELRNLTHLIKLYVLSTSSLKSV

SEQ ID NO: 269473 - protein, 140 aa, Zea mays
  unsure (1)..(140): unsure at all Xaa locations
  Clone ID: MRT4577_177355C.1.pep
ARCALLGHYAYGMNGILGCMRSPELLDKLGLIGXSPRXLNDHNDQGGLELSEHQWAIDAMEANYSVWATGYAMLAGGADRPTAVHGVSRTXFNMRSDMSLHGGRSGRNTDLRRALGMVRCPCVAGQTRRDVYGLDFVTVY

SEQ ID NO: 269474 - protein, 58 aa, Zea mays
  Clone ID: MRT4577_177356C.1.pep
LAPIRRGKILFVLKGGHCVKRFCDDIKFSGPVVQGLKKSFAQWPILSINKKRPVFCPV

SEQ ID NO: 269475 - protein, 96 aa, Zea mays
  Clone ID: MRT4577_177357C.1.pep
LGGFLNIFGVIQAPLLFVLHAFFYTRKKSPTGPRLVKRRSRTLPGPPNKSQNDPWQKRGPGVYQVMKKGPSPAIKPSMAPCGAKQKSRPLKTAGAI

SEQ ID NO: 269476 - protein, 52 aa, Zea mays
  Clone ID: MRT4577_177358C.1.pep
EIKVRWEVIDKCHMYRMWYINCVGGCHMQVVIVCVYVAIENIESRIRKTNPW

SEQ ID NO: 269477 - protein, 101 aa, Zea mays
  Clone ID: MRT4577_177359C.1.pep
MKSAFLNGPIKEEVYVEQPPGFKDDMYHDHVYKLSKALCGLKQAPRAWIGMKDAKPAKKPMGTDGHLDLDKGAFMSLLIVVLKLYMSSSNLTSPYANDAHV

SEQ ID NO: 269478 - protein, 49 aa, Zea mays
  Clone ID: MRT4577_17735C.1.pep
SAAVAHVSRGYSSHTCERTVNEIKVPKALFCCSSNYAMALFLTTAKSNA

SEQ ID NO: 269479 - protein, 228 aa, Zea mays
  unsure (1)..(228): unsure at all Xaa locations
  Clone ID: MRT4577_177360C.1.pep
DPRGRPGPPRRQSDSPPAPLTTASALHHHRSSRRRGDGDHGHGEISTAAAAVSSATVAVLLLVLRLRGHRPRPARRGGGRRRPRPAPSLIRGSARTPPPPRGREAPSTGESPVYLGAYDSEEAAARAYDLAALKYWGPETLLNFPVEDYSSEMPEMEAVSREEYLASLRRRSSGFSRGVSKYRGVXASHNGRWEARIGRVFGNKYLYLGTFDTQEEAAKANDLAAIEY

SEQ ID NO: 269480 - protein, 204 aa, Zea mays
  unsure (1)..(204): unsure at all Xaa locations
  Clone ID: MRT4577_177361C.1.pep
STAGCITSIVYLGAYDSEEAAARAYDLAALKYWGPETLLNFPVEDYSSEMPEMEAVSREEYLASLRRRSSGFSRGVSKYRGVARHXQEEAAKAYDLAAIEYRGVNAVTNFDISCYLDHPLFLAQLQQEPQVVPALNQEPQPDQSETGTTEQEPESSEAKTPDGSAESPLFASIFGDGGPLGAGDLHVPVIYCWLHHLNSLPGGV

SEQ ID NO: 269481 - protein, 265 aa, Zea mays
  unsure (1)..(265): unsure at all Xaa locations
  Clone ID: MRT4577_177362C.1.pep
STAGCITSIVYLGAYDSEEAAARAYDLAALKYWGPETLLNFPXHHHNGRWEARIGRVFGNKYLYLGTFDTQEEAAKAYDLAAIEYRGVNAVTNFDISCYLDHPLFLAQLQQEPQVVPALNQEPQPDQSETGTTEQEPESSEAKTPDGSAEPDENAVPDDTAEPLTTVDDSIEEGLWSPCMDYELDTMSRPNFGSSINLSEWFADADFDCNIGCLFDGCSAADEGSKDGVGLADFSLFEAGDVQLKDVLSDMEEGIQPPAMISVCN

SEQ ID NO: 269482 - protein, 57 aa, Zea mays
  Clone ID: MRT4577_177363C.1.pep
IYDTRRKEWGAHVLHAFIPHIFICPEQHLVTLFLTTGKPLRGFFLNLKARGYSKTLP

SEQ ID NO: 269483 - protein, 306 aa, Zea mays
  Clone ID: MRT4577_177364C.1.pep
STAGCITSIVYLGAYDSEEAAARAYDLAALKYWGPETLLNFPVEDYSSEMPEMEAVSREEYLASLRRRSSGFSRGVSKYRGVARHHHNGRWEARIGRVFGNKYLYLGTFDTQEEAAKAYDLAAIEYRGVNAVTNFDISCYLDHPLFLAQLQQEPQVVPALNQEPQPDQSETGTTEQEPESSEAKTPDGSAEPDENAVPDDTAEPLTTVDDSIEEGLWSPCMDYELDTMSRPNFGSSINLSEWFADADFDCNIGCLFDGCSAADEGSKDGVGLADFSLFEAGDVQLKDVLSDMEEGIQPPAMISVCN

SEQ ID NO: 269484 - protein, 92 aa, Zea mays
  Clone ID: MRT4577_177365C.1.pep
AFRAPSLQATWRPGVLNYRLTHKFFIEISAAFPLLDIPYKRIYMGLQGDLFHINLQPHATQILATTESNVPTSSKSRRPAREPSLGEEPFRP

SEQ ID NO: 269485 - protein, 395 aa, Zea mays
  Clone ID: MRT4577_177366C.1.pep
MERSQRQSPPPPSPSSSSSSVSADTVLVPPGKRRRAATAKAGAEPNKRIRKDPAAAAAGKRSSVYRGVTRHRWTGRFEAHLWDKHCLAALHNKKKGRQVYLGAYDSEEAAARAYDLAALKYWGPETLLNFPVEDYSSEMPEMEAVSREEYLASLRRRSSGFSRGVSKYRGVARHHHNGRWEARIGRVFGNKYLYLGTFDTQEEAAKAYDLAAIEYRGVNAVTNFDISCYLDHPLFLAQLQQEPQVVPALNQEPQPDQSETGTTEQEPESSEAKTPDGSAEPDENAVPDDTAEPLTTVDDSIEEGLWSPCMDYELDTMSRPNFGSSINLSEWFADADFDCNIGCLFDGCSAADEGSKDGVGLADFSLFEAGDVQLKDVLSDMEEGIQPPAMISVCN

SEQ ID NO: 269486 - protein, 393 aa, Zea mays
  Clone ID: MRT4577_177367C.1.pep
MTMERSQPQHQQSPPSPSSSSSCVSADTVLVPPGKRRRRAATAKANKRARKDPSDPPPAAGERSSVYRGVTRHRWTGRFEAHLWDKHYLAALHNKKKGRQVYLGAYDGEEAAARAYDLAALKYWGPEALLNFPVEDYSSEMPEMEAASREEYLASLRRRSSGFSRGVSKYRGVARHHHDGRWEARIGRVLGNKYLYLGTFDTQEEAAKAYDLAAIEYRGANAVTNFDISCYLDHPLFLAQLQQEQPQVVPALDQEPQADQREPETTAQEPVSSQAKTPADDNAEPDDIAEPLITVDNSVEESLWSPCMDYELDTMSRSNFGSSINLSEWFTDADFDSDLGCLFDGRSAVDGGSKGGVGVADFSLFEAGDGQLKDVLSDMEEGIQPPTIISVCN

SEQ ID NO: 269487 - protein, 133 aa, Zea mays
  Clone ID: MRT4577_177368C.1.pep
GFLSWRAARLLAPLAQRLLWLACPDAPVAVGIPVAPRFLRIVRGAGGFHAGPLPVFHMDPAGVGFCFAPPCFPLVFSPPPPPCSLGLVPLCLLRESCLVLFFFRWPLLEKKKKKKRKKKKKKRKKKKLCSTSA

SEQ ID NO: 269488 - protein, 54 aa, Zea mays
  Clone ID: MRT4577_177369C.1.pep
AQMSENDRAQVGKANKILRVPLLWYSLMFLCFVPYSYDHANTYIYQTRFYNTVI

SEQ ID NO: 269489 - protein, 103 aa, Zea mays
  unsure (1)..(103): unsure at all Xaa locations
  Clone ID: MRT4577_17736C.1.pep
TGRAGKSGLATAFFNESNTTLARPLSDLYYKGFLALQAHRXAHGLWCEDRSAPAFLLQSRASEVFGVDIHPGARIGSGILFDHATGIVIGETAVVGNDVSILH

SEQ ID NO: 269490 - protein, 72 aa, Zea mays
  Clone ID: MRT4577_177370C.1.pep
CMWTSSRTRVVQQMVLGEAPLLLLYPLHHTIMSPRTLLLPHCHVLRALSLTPLDTYHSATPLYYTWILSLHL

SEQ ID NO: 269491 - protein, 70 aa, Zea mays
  Clone ID: MRT4577_177371C.1.pep
MSVMVTGAGALLAQAIEKVVDLDADGSSKRLFSTDHKKRGGDAHVCREWDSDESSSDSSDEDAANIAGRG

SEQ ID NO: 269492 - protein, 58 aa, Zea mays
  Clone ID: MRT4577_177372C.1.pep
DVGSHESMTCQLRGIYVKFGSFNDIDPVVAVSEPAGSLPHPPCLADGQGRAREGHENK

SEQ ID NO: 269493 - protein, 92 aa, Zea mays
  Clone ID: MRT4577_177373C.1.pep
KPRLARSPCDRWRRSPPPASTSVRCISVRRPDSAAPRALPQENRLHSPSLRQQRRRRTGRHPSPLCLKASITSGDDDGQEVTLLSPRRCIMS

SEQ ID NO: 269494 - protein, 97 aa, Zea mays
  Clone ID: MRT4577_177374C.1.pep
NRHFTETSSINFFEHFYLLSLGNLILWRELESFTLSDQPDAITWKWSGRSTDAHTLLAHDTAPGSSSTKVYRQMQFVSLVFLIMQGLLMSYTCRIKY

SEQ ID NO: 269495 - protein, 89 aa, Zea mays
  unsure (1)..(89): unsure at all Xaa locations
  Clone ID: MRT4577_177375C.1.pep
GKDRRQQLGTNAGTXTAPTTHASAKKLHRYQPGTVVLLQILKDQNNMELLMLKLPLQLAXREIAHDYKTELRLQRRALLYLXEARNKIL

SEQ ID NO: 269496 - protein, 59 aa, Zea mays
  Clone ID: MRT4577_177376C.1.pep
LVMDLYVNYSQIRSIIYNRLVDLAPVTGEKNKIRIMLDASLCSGPVLLVREEYLLRYER

SEQ ID NO: 269497 - protein, 82 aa, Zea mays
  Clone ID: MRT4577_177377C.1.pep
WIPIWPAPKNGLCQLVTWLRLPYLETWPRLEGCQQGIVPALSLLQYLLLRLSKTNISVGTSAGIHLPHIHSSTSRRRPSQAH

SEQ ID NO: 269498 - protein, 98 aa, Zea mays
  Clone ID: MRT4577_177378C.1.pep
IAQKFSQKTPFKKNTPQPPTGKNPRTLHLLGGATKKNTPDQYSHHQKKLKRKRPLTKGGPPTRSILQPPGQTLKKHPTLHSFYQKKPPNLKSLPIPPP

SEQ ID NO: 269499 - protein, 31 aa, Zea mays
  Clone ID: MRT4577_177379C.1.pep
KTADRGEKFSALLDTTCELHSQAHEFKKQGV

SEQ ID NO: 269500 - protein, 69 aa, Zea mays
  Clone ID: MRT4577_17737C.1.pep
FWCPRRSQNQSPRVQCIWYFSSGDCVCHPSNVRPVSQHSLSRLADGTLASDSRAVHGHRTCHDPFRTMS

SEQ ID NO: 269501 - protein, 76 aa, Zea mays
  unsure (1)..(76): unsure at all Xaa locations
  Clone ID: MRT4577_177380C.1.pep
FRVXXXPCGLVLVAWLFPWXGVSVXAPGLCVLCRGFPLLVVGGSFLLFRGAGPLLVPLXRPWPXXPSCXLXKXXXX

SEQ ID NO: 269502 - protein, 333 aa, Zea mays
  Clone ID: MRT4577_177381C.1.pep
MNNHISILVILIVDVSVVLLLNSHVGLCSCYNRIFSFGDDTMDTGNFIHLIGKAPSKYKEAPYGKTFFRHATGRISDGRVLIDFYAEALKLPMIPPILPEKNSGCFPHGANFAVFGATARGKVFFSGSPWCIGTQMYWFDQLVDRIAPGDGKPPKDGNIISDVIADISHFIEELIVVNGAKAFVVANNFPVGCLASYLSRFHSDDHEDYDEHGCLKSFNEFSQKHNEQLYSAIGQIRYSYPNVKVIYADYYNATMEFIKKPSRFGIGDPLVACCGGNGPYHTSMECNGTAKLWGDPHHFANWDGMHMTEKAYNIIMEGVLNGPFADPPFPLSC

SEQ ID NO: 269503 - protein, 117 aa, Zea mays
  Clone ID: MRT4577_177382C.1.pep
MNNHISILVILIVDVSVVLLLNSHVGLCSCYNRIFSFGDDTMDTGNFIHLIGKAPSKYKEAPYGKTFFRHATGRISDGRVLIDFYGKPPKDGNIISDVIADISHFIEELIVVNGAKA

SEQ ID NO: 269504 - protein, 98 aa, Zea mays
  Clone ID: MRT4577_177383C.1.pep
ALAATPSHSSTHLQPPPTSPPSNPSRPSSSPSLQGAIPFPLGSTSRWCKSPGGFWWREEERRKGGGFKISAGGRTAAVVAVSGDFSWEIRGGGLPDRT

SEQ ID NO: 269505 - protein, 177 aa, Zea mays
  Clone ID: MRT4577_177384C.1.pep
LATPPSCSCSAYGLLTCTAASSTVTDIDDDSVMNSAGADVNRGQRTMHRKKKAAHYTRHHIRQHDPSYSHDSKEQHHPCKLRDEHIYGQSHNPVLEPQSDSFHLSNTHASATASTQTTKLHYCLSLGSYPIGPDYMDNIKTIDKEMLTAVRLLPGQQHRSTKTTMTIFQRLVLDTLL

SEQ ID NO: 269506 - protein, 361 aa, Zea mays
  Clone ID: MRT4577_177385C.1.pep
MNNHISILVILIVDVSVVLLLNSHVGLCSCYNRIFSFGDDTMDTGNFIHLIGKAPSKYKEAPYGKTFFRHATGRISDGRVLIDFYAEALKLPMIPPILPEKNSGCFPHGANFAVFGATARGKVFFSGSPWCIGTQMYWFDQLVDRIAPGDAAKKQFLSDSLVIMGGIGQNDYYSYFIKGKPPKDGNIISDVIADISHFIEELIVVNGAKAFVVANNFPVGCLASYLSRFHSDDHEDYDEHGCLKSFNEFSQKHNEQLYSAIGQIRYSYPNVKVIYADYYNATMEFIKKPSRFGIGDPLVACCGGNGPYHTSMECNGTAKLWGDPHHFANWDGMHMTEKAYNIIMEGVLNGPFADPPFPLSC

SEQ ID NO: 269507 - protein, 61 aa, Zea mays
  Clone ID: MRT4577_177386C.1.pep
DSGCSSSNRLAAQGCHHAAHVLGCWICVRGLVPQCCSAFRDGALVPAFAMSVLRGWAVCYQ

SEQ ID NO: 269508 - protein, 33 aa, Zea mays
  Clone ID: MRT4577_177387C.1.pep
ASSCIQAQKTFLLMLLISCAWREDLYDSNDVHR

SEQ ID NO: 269509 - protein, 220 aa, Zea mays
  unsure (1)..(220): unsure at all Xaa locations
  Clone ID: MRT4577_177388C.1.pep
LREKNHVSGVSTCVVSPLQGVPSSLWFSLILTAKTVGEALNKPVLEAFGNAKTIRNNSSRFGXFVEIQFDANGKISGAAIRAYLVERSRVCQISDPERNYHCFCMLCSAPSEGRELEEEGSWRARQRWRRARGRAVTAAGGAPGQSRRGASAWTRRPAGATRPAGTASNPASTPTRRCSSAWTVSPASASAAAPPPPRTNQPRGAVEPADDWFLIAAWYY

SEQ ID NO: 269510 - protein, 45 aa, Zea mays
  Clone ID: MRT4577_177389C.1.pep
HLDPVVCNPHLRPRPCEGTTQTSLLTPIATAGDPAKTQATVSLVG

SEQ ID NO: 269511 - protein, 181 aa, Zea mays
  Clone ID: MRT4577_17738C.1.pep
HILGGSSDGSVYLWQVDQPESAPIVLKGHEGEATSVDWCASEVGKIATSSDDSTVRVWSTMKMDCTNVSSPTVIRKRITAPSTEYRRSITHEPATTSRDGVVCTSGDGELQSGCHSPLQPRALHFGTPESSKKRALALFEEEALDSRKSPEAQTNSPSSVLSPPPSLKRRTIRDYFASAAS

SEQ ID NO: 269512 - protein, 95 aa, Zea mays
  Clone ID: MRT4577_177390C.1.pep
PSALCITERNGPVPRAHGEPASSVKAHKSGNENPSRHRPDLLHGDAPQVPEDPDVILGRATKPVGQVEAEESEGKHVFLSSVFHAHPEVRTLRFC

SEQ ID NO: 269513 - protein, 49 aa, Zea mays
  Clone ID: MRT4577_177391C.1.pep
LTKEGKIIDPTLNKGIMYIHTLNHKALALAELSSMPRGRGVEQYFTKQN

SEQ ID NO: 269514 - protein, 79 aa, Zea mays
  Clone ID: MRT4577_177392C.1.pep
FFWQKRVRIYFDLQGKSNALSTFNCYVSANWTTYLQSLFWGLGFTMFLLALHWNSRVATFLGFVSQVVDPFAKLFFFST

SEQ ID NO: 269515 - protein, 91 aa, Zea mays
  unsure (1)..(91): unsure at all Xaa locations
  Clone ID: MRT4577_177393C.1.pep
LPPLVTRWXIPRDPALWPDSPDGVHPERFLGASAAVDMRCAHFELLSFGSGRLICPAYDLAMNLVAAGVANLVHGFSWRLPDRVAADDLSI

SEQ ID NO: 269516 - protein, 64 aa, Zea mays
  Clone ID: MRT4577_177394C.1.pep
TDPVSEKREKYLVSCLRVLYVSGDSYPVIFLNGVSMWSFMNVCLVFSILLLSTFLYLLLKLCLL

SEQ ID NO: 269517 - protein, 191 aa, Zea mays
  unsure (1)..(191): unsure at all Xaa locations
  Clone ID: MRT4577_177395C.1.pep
MPHSLFLLVVLLAAAQASAATPRQLFLVSRPPITLTNHHGQLLTGNYSVNLLWYGRFTPAQRAVVADFILSLSGTGQGSGSVAAWWATTSRYHPGAARLSLGRQVLDPSRSLGRRLSESSLASLATRLAPHRGSVAVVVTAPDVLVDGFCLSRCGLHASSPTXRHPRXRAAGGTXYAWVGNPAEQCPGECA

SEQ ID NO: 269518 - protein, 61 aa, Zea mays
  Clone ID: MRT4577_177396C.1.pep
SSSACGFFSSLYIISPPSSIIPSISISTFSIQTTYLLYPYSTKLSYLYIHFSLHSDASSHL

SEQ ID NO: 269519 - protein, 95 aa, Zea mays
  Clone ID: MRT4577_177397C.1.pep
LCHIYLGKNCQKQALVMISKVQMHMKKKVLTIHCSWAYCLPSLRPCLYLLISRLLVKLSHKSTQTPCLILKPLSPPSKIQRPSRFSSTRPGKRLY

SEQ ID NO: 269520 - protein, 66 aa, Zea mays
  Clone ID: MRT4577_177398C.1.pep
FSFLSWCYPFWRASLESAPAAKNKDGGRLRHKAEGNETHTGFLLLRMRGARPQDSQALQRRSALMH

SEQ ID NO: 269521 - protein, 63 aa, Zea mays
  Clone ID: MRT4577_177399C.1.pep
SARGNAPCERRSHCSGLSVFLPYEAMCCQQATVDRALLPLQLRLERYDCRHWDPADNDRDQPR

SEQ ID NO: 269522 - protein, 75 aa, Zea mays
  Clone ID: MRT4577_17739C.1.pep
LSVSQCHAYSYNLPLATPVRKGTRIRQRSVMTLQQCLLQHCHSCSYISPRMVRRNPFLFPRLAAAFQSSTRALFR

SEQ ID NO: 269523 - protein, 84 aa, Zea mays
  Clone ID: MRT4577_1773C.1.pep
QKILTSFFNLFQFHGVLDMVHRAQPKTFPWGGLGRTTPPLGRAPAQCLLIPRTTRSDMGPFFEQRGTKFPPIPVCPTEQGAYPT

SEQ ID NO: 269524 - protein, 76 aa, Zea mays
  Clone ID: MRT4577_177400C.1.pep
ENAIIYQINLGTGGWQGSPYFVSKTIAMGEGVKFGLGSLPLKCNQVVSLSKVKSASLLWPLFSFFKKNPPTFSTPT

SEQ ID NO: 269525 - protein, 148 aa, Zea mays
  Clone ID: MRT4577_177401C.1.pep
HPGRYAGHKKKHHLPQRMNGARSYEIGVDSPYEPLYLESKSGNQQLLSNGKQTDFLSIPIKRIRTAARQRVVSPFPAGVSGTPQFTNKTDASSGDTNSCQDDQSSLHGGSFSRKNADIGSTVDFDRQLLYDGSEVSTKSKKKKKKKKN

SEQ ID NO: 269526 - protein, 120 aa, Zea mays
  unsure (1)..(120): unsure at all Xaa locations
  Clone ID: MRT4577_177402C.1.pep
SSLEAVIGIDSVSQRSSHRPIKMNHPRLPAANLNVKPEPAPCTSQILMRVSXERVSASVACDWNPHQPSTSQQQGAAPTNRAIVHALRAVVSHGPPVPARTVSDPEPNQVNKSRKGEGKR

SEQ ID NO: 269527 - protein, 89 aa, Zea mays
  Clone ID: MRT4577_177403C.1.pep
IRLERRQLGRLLHMYKQSLAEEAFLAGGRFTLGDLSHLGNANRLGGYRRRARIMEPRRTVSRRGDTVSRRDSRVRVKESQRPPAAEAPF

SEQ ID NO: 269528 - protein, 99 aa, Zea mays
  Clone ID: MRT4577_177404C.1.pep
GVDGRAGGGEHVPRGAAVPVRVRRRVPYGYVAAYQQQPPPPAGYYPYPSYYGNGDGVGLANPAHHYQQLQLAYPPYPYRFDVAPPQLFSDENPNACSVM

SEQ ID NO: 269529 - protein, 147 aa, Zea mays
  Clone ID: MRT4577_177405C.1.pep
HQNRSKRQADFKPPTRFGGAGGRTSLRSTQQSILNCSYRSHARRHTLSCCPRPASDRTPHSITHRAIAAVVKGPAIFFTCHLKRMSPLHPHNYILMNAVAAAILLHTLLYMPAPVFPENTVRTTLDCDVHYHPIPGAMTVHNPHAYE

SEQ ID NO: 269530 - protein, 88 aa, Zea mays
  Clone ID: MRT4577_177406C.1.pep
STIAYSSSLLRTPISSAPASSPSPSSLALLLAPLRPLILRFIVVPLLLLLAPAVALCSLSCRPPCSSCPDAWADAWADAWADAWADAW

SEQ ID NO: 269531 - protein, 72 aa, Zea mays
  Clone ID: MRT4577_177408C.1.pep
LALPSYNEVAAGDINWAAATASFRTSSNCITDNRRDLRTDMMNAKECTSNIVLARDAQTNKRVPAVVFYMIE

SEQ ID NO: 269532 - protein, 93 aa, Zea mays
  Clone ID: MRT4577_177409C.1.pep
LHPLVRSHYVHPFSLRHPSYLPPTTSNTQVTIHINVYTTNAPQQPLLLDRQSSLQQDLDFCRYPIRATAPPCSCLHLNPLYLLLPTLLLHFHP

SEQ ID NO: 269533 - protein, 53 aa, Zea mays
  Clone ID: MRT4577_17740C.1.pep
TGFKNPKFLNREPPKPQILQRFKISRQPFNKVPLLVPYLKKLNWQPLAFGSVG

SEQ ID NO: 269534 - protein, 531 aa, Zea mays
  unsure (1)..(531): unsure at all Xaa locations
  Clone ID: MRT4577_177410C.1.pep
MAAESCGSRXLAPAASLRWRRGREXRRKAEAYAEVLRRIRAGAGGYGAARPGLEDELWAHFQGLPARYALDVNVERVEDVLLHKKLLEQAHKPMNGLVFDVRPAQGFTLEESTGFESTTSFKQEEQDPQSSVFTSRDQRPLHEVIFACDDKPKLLSQLTSLLGELGLNIQEAHAYSTSDGYSLDIFVVDGWEYEADILQSALREGVDKIKYRAWPLVPSMSARMDHQPLEVSPSSDFVQIPADAADVWEVDLRLLKFEQKLASGSFGDLYHGTYCSQDVAIKVLKPERVSVDMLREFAQEVYIMKKVRHKNVVQFIGACTRPPVLCIITEFMHGGSIFDFLYNRRGNFQLPDVIRIASDVSKGMNYLHQINIVHRDLKTANLLMDDQVVKVADFGVARVKDQSGVMTAETGTYRWMAPEVIEHLPYDHRADVFSFGIVLWELLTGKLPYEDMTPLQAAVAVVQKDLRPTIAVDTHPMLAELLQRCWQKDPALRPTFAEIVDILNSIKEAVRSSVHHKRHSCRSHSGRRRGC

SEQ ID NO: 269535 - protein, 58 aa, Zea mays
  Clone ID: MRT4577_177411C.1.pep
LWLYRSAHMLVVHLSLMQQLTVLALSRPPGALLLPLACQDTDMTVAVCPSDYPRRFLP

SEQ ID NO: 269536 - protein, 174 aa, Zea mays
  unsure (1)..(174): unsure at all Xaa locations
  Clone ID: MRT4577_177412C.1.pep
MAAESCGSRGASPPPPPSAGGAGGRRRKAEAYAEVLRRIRAGAGGYGAARPGLEDELWXHALDVNVERVEDVLLHKKLLEQAHKPMNGLVFDVRPAQFXFYSGGXSTGFESTTSFNQEEQDPQSSVFTSRDQRPLHEVIFACDDKPKLLSQLTSLLXELGLNIQEAHAYSTSDG

SEQ ID NO: 269537 - protein, 125 aa, Zea mays
  unsure (1)..(125): unsure at all Xaa locations
  Clone ID: MRT4577_177413C.1.pep
NWDGIPKSTQYPELWSFSACKDITVLQARIVDSQELFHAPLSIEAFVQLXELNDCLDNLPHNNHKDKWSCSTSSSLFFSQKIYAHLMGNQWTHPIFSWLWKSKCQPKHKVFFWLLLKDRLNTRAF

SEQ ID NO: 269538 - protein, 212 aa, Zea mays
  unsure (1)..(212): unsure at all Xaa locations
  Clone ID: MRT4577_177414C.1.pep
PADAADVWEVDLRLLKFEQKLASGSFGDLYXRSNLKXNSYLYVTDLFDVPSDXGTYCSQDVAIKVLKPERVSVDMLREFAQEVYIMKKVRHKNVVQFIGACTRPPVLCIITEFMHGGSIFDFLYNRRGNFQLPDVIRIASDVSKGMNYLHQINIVHRDLKTANLLMDDQVVKVADFGVARVKDQSGVMTAETGTYRWMAPEVDFAKLLVIKH

SEQ ID NO: 269539 - protein, 90 aa, Zea mays
  Clone ID: MRT4577_177415C.1.pep
VWVGLLGWEGFLGGGGFIGVLWRAVFFWRWLLLCGGRLPAWGRLVYRLQGGPWFPGRPWFPDVCSDVSVLFGLSAWNALAPMFPLGRRCP

SEQ ID NO: 269540 - protein, 87 aa, Zea mays
  Clone ID: MRT4577_177416C.1.pep
KPLLFMWGWQDFYCAPTRRVVQFWSRGVICWEIMAGSAFSLGNSRGPSFLHLGTSVGSCGKDRQGGWNSPFNGPTGKGQAIFCFCLV

SEQ ID NO: 269541 - protein, 87 aa, Zea mays
  unsure (1)..(87): unsure at all Xaa locations
  Clone ID: MRT4577_177417C.1.pep
MTGVSVRFFRDARWVFGMWNITKLKKGNSIVWHNVMPIGSRRSAWVKQYPKXTITDEAVVADPSXVIPWWAWMKRFHLPEAEKLSVA

SEQ ID NO: 269542 - protein, 37 aa, Zea mays
  Clone ID: MRT4577_177418C.1.pep
FLWGTERVLCELPNYARGSKNSNKVFFRGALLVPIMG

SEQ ID NO: 269543 - protein, 65 aa, Zea mays
  Clone ID: MRT4577_177419C.1.pep
QSSRLLISTETVVNSRSARYLSSRIHSGDSHDALLERELRLCWFSANLSVLLPGHRARVPSRLLG

SEQ ID NO: 269544 - protein, 51 aa, Zea mays
  Clone ID: MRT4577_17741C.1.pep
YHNTRGGCLFLPLTTNRGPEVLYSKCGLINHNQQLLLPLSFSDTLLVYITQ

SEQ ID NO: 269545 - protein, 285 aa, Zea mays
  unsure (1)..(285): unsure at all Xaa locations
  Clone ID: MRT4577_177420C.1.pep
GPFFFFFLGNSDDXTAVATANRRTHAYWEELTTTRMSCDIRTWRQQRAGALASLKIQWRNRRRTEKPATRRVQRTARAELGPGARDWSKRTPGAEPGSGRSSAGHQSWQLGAAWRAGRRARAGQEGAPTGCHGLRGREEDAAPRRSELRPGRAPGSSAERHRGEPREKERQGRAEDLAGTRRWELPWTSSRPASRRSVRENPAGLEDERASWTGHRNGWVHGEEEEEGGAANCASEQRGRDKAERQGRTVAESSPAVSGGQKISRSQVRWLDFPLEAGRMSCGRR

SEQ ID NO: 269546 - protein, 74 aa, Zea mays
  Clone ID: MRT4577_177421C.1.pep
MFTRMPLTILDQTMFHALHIASNWRMAWANPQTEGDAPKTDREGLLDVYTSLAFGSSLFAFMRSPLVPTIGLPL

SEQ ID NO: 269547 - protein, 104 aa, Zea mays
  Clone ID: MRT4577_177422C.1.pep
RAKSGLWLVIAAVFRLDSLLSCAPHMSQMYFFRGAGCSRLATVLYSVVDTATASTYYSIVVNATVSSGSCRTLQVISITWWSCMQYAVLFSLGKLYTHSLTTGY

SEQ ID NO: 269548 - protein, 85 aa, Zea mays
  unsure (1)..(85): unsure at all Xaa locations
  Clone ID: MRT4577_177423C.1.pep
MECADEKALDAGLDNRGGVHGGHYYALIRPTLSDQWYKFDDERVTKEDTXRPLAELYQGDEEGPHINPGFNTTPFKFTNDSSSFR

SEQ ID NO: 269549 - protein, 127 aa, Zea mays
  Clone ID: MRT4577_177424C.1.pep
VPWCPQLEVLAHRAVGCFLTHCGWNSTAEALVTGVPMVAVPQWTDQPMNARYVEAVWRVGVRARPAAPDDSLGLVRRGQVVMRVEEVMDGDKSAEFRRSADVWMAKAKAASKEGGSLDRNIAEVVAK

SEQ ID NO: 269550 - protein, 42 aa, Zea mays
  Clone ID: MRT4577_177425C.1.pep
VVGLPIWGPFSLKKKKKKKKKKKKKKKKKKKKKKKKKKKKKK

SEQ ID NO: 269551 - protein, 156 aa, Zea mays
  unsure (1)..(156): unsure at all Xaa locations
  Clone ID: MRT4577_177426C.1.pep
MTDAGAGSGLQTPDQVPRGAGAGAVVVVALRAAAREISKTAAVWALTHVVQHGDSILLLVLIPPPSSGRKFWGFPFFAGSCASGHKAVLNQRSDVAELCSQMVRKLRDVYDPNNKIDVKVKILSGSPPGAVAKESKRVQAAWVVLDXELKHEEKRC

SEQ ID NO: 269552 - protein, 54 aa, Zea mays
  unsure (1)..(54): unsure at all Xaa locations
  Clone ID: MRT4577_177427C.1.pep
MCIKARGQMFLWDWFYRVLASLSLWQEEAMIFFLXLDFTSNTILLHMLNDKRLV

SEQ ID NO: 269553 - protein, 22 aa, Zea mays
  Clone ID: MRT4577_177428C.1.pep
LNEAINTNDLHYNMAYILPCQY

SEQ ID NO: 269554 - protein, 167 aa, Zea mays
  unsure (1)..(167): unsure at all Xaa locations
  Clone ID: MRT4577_177429C.1.pep
MAADGERWVGLAVDFSEGSRAALQWAADNLLRSGDNLLLLHVLKDPDYEQGETLLWEASGSPLIPLSEFSHPSTAKKYGVKPDAETLDMLNTIAKQKEVSVVSKVLFGDPREKLCQAIHDMPISSLVIGSRGLGKLKRVLLGSVSDYVVNNAACXXVTVVKPASNHA

SEQ ID NO: 269555 - protein, 119 aa, Zea mays
  Clone ID: MRT4577_17742C.1.pep
TKACKKTRPRQGILRARSRRSSSWRTRRMMLLTKSEPFCFQLVEFAGRRSLSSFRPAVHSSSWHGDCNEAVQPGKKANATRMLEPVLARQRVVFFFFLLLMGVSCRAQYPTLAKCFTLF

SEQ ID NO: 269556 - protein, 116 aa, Zea mays
  Clone ID: MRT4577_177430C.1.pep
RRTSCCTTSRRLPGSIPAGSYTIYIEDRQGQRRGAELGAERDQHRVQRVQLNAHEPAHERQPDNGCNHGKHTLNHMTYKRIGTCMRSGEVCVQLRRQHTQLNITVKIRHWYHVREL

SEQ ID NO: 269557 - protein, 90 aa, Zea mays
  unsure (1)..(90): unsure at all Xaa locations
  Clone ID: MRT4577_177431C.1.pep
KVKAGPDDFCVLQASRGPAIAFMKIGCRHGKFFNSPNFGFSPRVLFDFPSLARSIXNQFFTPILTXKGGQSLAGYKARSPLKPDAEPENQ

SEQ ID NO: 269558 - protein, 139 aa, Zea mays
  Clone ID: MRT4577_177432C.1.pep
FYFFFFFFFFFVFRFFGFLFYLFSFFCRRAQRVFFAFGTKMGALFTFAPPPSLKLPPSPSARGARPGFCFIIFIQVEEGLFPSSGGGPLFFCTLTIKRRLGCGRWVHQALCFRGGTSGGTPLVCWVQPPRLLPPPSFFG

SEQ ID NO: 269559 - protein, 36 aa, Zea mays
  Clone ID: MRT4577_177433C.1.pep
MPVVTVDYDHSIADGPNSAWEEYRVSLPSLKYLGES

SEQ ID NO: 269560 - protein, 59 aa, Zea mays
  Clone ID: MRT4577_177434C.1.pep
NQYRANWALKKNARTGPQGGGDPQKTPLRVVSAYGTNFFFFFFFFFSFFFFFFFFFFFF

SEQ ID NO: 269561 - protein, 78 aa, Zea mays
  Clone ID: MRT4577_177435C.1.pep
IIESLASEGNMTSLQPKTPPVATFRPPGGSAFGGFRLTAHRQQLESNRVRTNESPPVCGIESKKKNACEERARKCPGR

SEQ ID NO: 269562 - protein, 166 aa, Zea mays
  unsure (1)..(166): unsure at all Xaa locations
  Clone ID: MRT4577_177436C.1.pep
QHLQAPILCINNCGFFQSAAXTMNMCSKCHKEMITKHXQAKLAASYIDSIGNGSDAVMESVVAGSNTVVAAAQIESHTMNVHQPADGAGPXGSGXISKGGKVGPNRRSACMKRDGLTAFNWRXANLYCALHRYSDMHHCKLYYRTGASDAIGKANPVVNADKLDKI

SEQ ID NO: 269563 - protein, 124 aa, Zea mays
  unsure (1)..(124): unsure at all Xaa locations
  Clone ID: MRT4577_177437C.1.pep
AFXPSGXXXXAXGRPSXPGFXXRXSXFLCXRXXXFLSCXXPWXXXLVXAXXCCAPLFXXXXXFAXFLFXFPLXPPPGXXPXFXSPFFCLXXFXFXAXXGFPXLRXXGLCLAFVLVSXXCXGCLV

SEQ ID NO: 269564 - protein, 130 aa, Zea mays
  Clone ID: MRT4577_177438C.1.pep
FAGATGVTVGAGVVGAGGGFAGASGVAAGVVGAAAVVGAIGVVGAAGVVGADFSFCSSACGVFAAVSCCCSPPARAFCSVRPLRRPGRRPPCGCGGWSSSSQQKLVAVVEELVWVGPAGPARSVPAGRLS

SEQ ID NO: 269565 - protein, 152 aa, Zea mays
  unsure (1)..(152): unsure at all Xaa locations
  Clone ID: MRT4577_177439C.1.pep
MGDHKEEPVANSVMNKITEKVHGGDSSSSSSDSDDNYKESSXXEGQDMNDKIYRLFGRKRADHSVLGGAETADLILWRNRKISXGGILGGATTIXLLFDVMKXHLVSLLGHCMIVSLYILLLWTNACTFISKSLWIIAEVXIPEDVAANAAL

SEQ ID NO: 269566 - protein, 324 aa, Zea mays
  unsure (1)..(324): unsure at all Xaa locations
  Clone ID: MRT4577_17743C.1.pep
MVRGKTQMKRIENPASRQVTFSKRRNGLLKKAFELSVLCDAEVALVVFSPRGKLYEFASGSAQKTIERYRTYTKDNVSNKTAHQDIEQVKADAEGLAKKLEALEAYKRKLLGERLEECSFEELHSLEVKLEKSLHCIRGRKTQLLEEQLHKLKEKEMNLRKSNEDLREKXGGENILQTLHCGKRHANNPRKQCKKQPPPPPPMLMAPPPPPAPAAIDHTGPKDVGMDVETELYIGLPGRDYRSNNKDMTAXVAVRSGQVRPASSAENNLRSVVRRTGDASQAQANQHDKDHECRVVFYKPVHRPSKAHAPERPSENTYPLISLY

SEQ ID NO: 269567 - protein, 209 aa, Zea mays
  Clone ID: MRT4577_177440C.1.pep
MEPSPTSSSPAVARRLSPETAAASPEAEDRKDDVGVDGDGMATSSVASDSDYETTQMCDLLKSKVGSLEFLQKLNGIQKSVDQNCAVEPDTSWDIIKSDLWEDGDSDDGYVLVKQEDVVDGITSFMAACLLSLKRTKDLPPDQLQKALRKMFSAEKKKSKIRKAWDGTKLIYNVTSWGATAVGFYNNRALLTVASTTFRTSCRVISKFL

SEQ ID NO: 269568 - protein, 70 aa, Zea mays
  Clone ID: MRT4577_177441C.1.pep
STIEGKLSTIPSARTRGWAIGVYLHMTAGGDRVDRSGIELLDNQGQENADNFHALLTGEKGVGKYEKPLH

SEQ ID NO: 269569 - protein, 246 aa, Zea mays
  Clone ID: MRT4577_177442C.1.pep
MEPSPTSSSPAVARRLSPEVRRVPKRALEELLEQVQRAVEMLRDADADLAISLSEETAAASPEAEDRKDDVGVDGDGMATSSVASDSDYETTQMCDLLKSKVGSLEFLQKLNGIQKSVDQNCAVEPDTSWDIIKSDLWEDGDSDDGYVLVKQEDVVDGMTSFMAACLVSIKKTKDLPPDQLQKALRKTFSAEKKKSKIRKAWDGTKVIYNVASWGATAVGVYNNRALLTVATTAFQTSCRVISKFL

SEQ ID NO: 269570 - protein, 88 aa, Zea mays
  Clone ID: MRT4577_177443C.1.pep
QMCDLLKSKVGSLEFLQKLNGIQKSVDQNCAVEPDTSWDIIKSDLWEDGDPDDGYVLVKQEDVVDGITSFMAACLLSLKRTKVAIFFT

SEQ ID NO: 269571 - protein, 60 aa, Zea mays
  Clone ID: MRT4577_177444C.1.pep
SCKGLMGAIKSGISPFEGLDHASPEPSLGQGQPTPEDLRLARDPPPAANMFPARPRPYLR

SEQ ID NO: 269572 - protein, 72 aa, Zea mays
  Clone ID: MRT4577_177445C.1.pep
PWLRPAGSWLAFPVSDDVHTPPGSSLDRAPSVLARMWKRTHPPMRTPGYGRASDSACVARPGNHAGPRACLL

SEQ ID NO: 269573 - protein, 315 aa, Zea mays
  unsure (1)..(315): unsure at all Xaa locations
  Clone ID: MRT4577_177446C.1.pep
MASEGEALPPRKHMLTGLPSEHQSKNLTSPPHANTSQPFGVSAYRQHLLQHLMNKVQILEGINLDEDDPSKLKQAKKSTSNVWQYFEKYEVVVEENDQSVKQVWAKCKYLGCKNKTSKASAESSRGTTAFWSHLKNYHKIVKGQQELKAEKDHGTSICIVQPYKYDEETSLRKFYTTIIMHEYPFNIAEHEYFVEFIKSLKPTFPMKSRVTIRKEILELYLHEKDVLYKYFKTLNCRMSATMDMWTSNQNKGYMCVTVHWEDDDXEIQKRIINFLHVSGRHSGENMSLILSSCLLKWFIEKKMFSLTLXNASAXE

SEQ ID NO: 269574 - protein, 76 aa, Zea mays
  Clone ID: MRT4577_177447C.1.pep
PISNSHQSTIGPVPDQLQKRLGRRFQLKRRKVKSGRHGMELKSFIMLLHGAPLLLGSTIIEHYLRSQLQRFRLPAV

SEQ ID NO: 269575 - protein, 208 aa, Zea mays
  unsure (1)..(208): unsure at all Xaa locations
  Clone ID: MRT4577_177448C.1.pep
VPPRGAGRVELDKFNGVMKKMYQCYVSTTPSTSSVAPYPTSTGDMIKSSIDEELDSYIFDGQGPXDSIDTSDLEKYLIDPNIKXGKNNQHTFDILAWWKAHKEEYPILGQLARDVLAMQVSTVASESAFSAGGRVLDPFRTRLDPTMVEALVCTKDWIAGARKGSKAKSVAIPNMVCEMEELEALDRNLSLEDEDLDDDHDDGPEASL

SEQ ID NO: 269576 - protein, 197 aa, Zea mays
  Clone ID: MRT4577_177449C.1.pep
MEPSSTSSSPAVERRLSPEVRRVRKRELKEALEQVQRAVEMLRDADADLGVSLSEETTAAPPEGEDREADVGANGYGAETSSVASDSDYETAQMCDLLKSKVGSLEFLQKLNGIQKSVGQNGAVEPDTSWDIITSVDLWEDGGSDDGYVLVKQEDVVDGMTSFMAACLVSIKKTKDLPPDQLQKGFFFFPQLRGTVK

SEQ ID NO: 269577 - protein, 200 aa, Zea mays
  Clone ID: MRT4577_17744C.1.pep
MSTLAAARADNFYYPPEWSPKKGGLNKFHGQHALRERARKLDQGILIIRFEMPFNVWCGGCSSMIGKGVRFNAEKKQVGNYYSTKIWSFSMKSPCCQHEIVIHTDPKNTEYVIISGAQRKTEDFDVEDAETLLLPADEERDKLADPMYKLEHQGEDIRKKKEEEPVLVRLQRLSDSRHSDDYSLNRTLRYRLRSQKKRVA

SEQ ID NO: 269578 - protein, 174 aa, Zea mays
  Clone ID: MRT4577_177450C.1.pep
MASEGEASPPRKRMLLELPSEHQSQNLTSSPHANTTQPFGVSASSSTPAATSHEQGANPEEGINLDEDDPSKLKQAKKSTSNVWQYFEKYEVVVEENGKSVKQVWAKCKYPGCKNKTSKARAESSRGTTAFWSHLKNYHKIVKGQQELKAEKDHGTVRVVVYLIHFVLALTLPW

SEQ ID NO: 269579 - protein, 166 aa, Zea mays
  Clone ID: MRT4577_177451C.1.pep
PSPHLLTFDILKKYHAPTSHLHTTTPTPVPVQLDRSQSAQATMSPLSVPKIFMAGGAVGFGYYLYMRQYWFPNPYKTRACRTSRTASLPAAPRPHILPLLRASAVAPWPTTEDMVVPAKALTRSTSRQTLAVSRASPSGQTSSTSSSTTTPRANKRFLIGLSREYI

SEQ ID NO: 269580 - protein, 45 aa, Zea mays
  Clone ID: MRT4577_177452C.1.pep
ALVQGFMFRRSMPACAIEVLLIRTHYLAYLTVSTRNICTGVFQFN

SEQ ID NO: 269581 - protein, 132 aa, Zea mays
  unsure (1)..(132): unsure at all Xaa locations
  Clone ID: MRT4577_177453C.1.pep
MANAASSASSPGAGSSSSXSRPVETGEGTRTRRGSGRAGPRAPAPTRSSSSAAASASSRSPPRSSASPSTSSPPSSPSAPASTYSGAYSGATRSSSRYSSPSSRPSGGSSSVSGRYLNTGLHGECSRSLLLS

SEQ ID NO: 269582 - protein, 53 aa, Zea mays
  Clone ID: MRT4577_177454C.1.pep
SPTSPDGIGQLYNFISPQCIYLQSVKEPTARPLKNQGYPVLPCRMKTPCQRPS

SEQ ID NO: 269583 - protein, 71 aa, Zea mays
  unsure (1)..(71): unsure at all Xaa locations
  Clone ID: MRT4577_177455C.1.pep
CHTRRWCVQILGLYMCVDIIVANELMRDISGGQKKHLTTWEMLVGPTKVLFMDEISTGLDSSTTFXIVKCI

SEQ ID NO: 269584 - protein, 89 aa, Zea mays
  Clone ID: MRT4577_177456C.1.pep
GHAFYNHGGLWICPPACIVSFIHRKGLTELFWSSGDELVVHVDGGHLGFLGAGGDFFEQPLGVQVQAAGGGLVHHPCHDGSPPRTGFYP

SEQ ID NO: 269585 - protein, 63 aa, Zea mays
  Clone ID: MRT4577_177457C.1.pep
KKEEGVTPFCGSCGTKDGKGEFWICCEKCDRWFHGKCVKIPPARVEPLKPSKCPDCSPKRARA

SEQ ID NO: 269586 - protein, 73 aa, Zea mays
  Clone ID: MRT4577_177458C.1.pep
WKKGLFPFGGAGSFFLFLQKQTLLQISQPFHLKNTKSYQLLFHFDPWPSNFLVYKHKPKTLLALWANLYLAKA

SEQ ID NO: 269587 - protein, 42 aa, Zea mays
  unsure (1)..(42): unsure at all Xaa locations
  Clone ID: MRT4577_177459C.1.pep
ARVRRRSIYCGTSLAHSQEHMGYNRGLPYXLAKCALGPWVER

SEQ ID NO: 269588 - protein, 133 aa, Zea mays
  Clone ID: MRT4577_177460C.1.pep
KLEQLYIDSAGLSGPVPSSFSRLTRMKTLWASDNDFTGEIPDYIGSWTNLTELRFQGNSFQGPLPATLSNLVQLTSLRIGDIVNGSSSMIFISNMTSLNTLILRNCRISDSLASVNFSQFAKLNLLDLSFNNI

SEQ ID NO: 269589 - protein, 190 aa, Zea mays
  Clone ID: MRT4577_177461C.1.pep
MAGKKRKSTEKQPKGSRLPLGADADAVADAGKRRRSGAAKRHQAEEEESVPSSISAKILREALRQQQEEGLADSRHAAAAATPAAPAVSAAPSTSFPVPAADGGDDDDEDVDEFDGFDALSEYDGGVPEIDEEDEKALAAFMSKDTSSKQSLGDIILQKIREKDAPVSTEARPAVKLDSRIIELYKEVGQ

SEQ ID NO: 269590 - protein, 49 aa, Zea mays
  Clone ID: MRT4577_177462C.1.pep
ITLDWSFEQTKCLTISLTLQTVKSSLMPGYQISCNSSKFCNEACQEYLT

SEQ ID NO: 269591 - protein, 30 aa, Zea mays
  Clone ID: MRT4577_177463C.1.pep
THSLYDIISQLIYFHPSFISNGGGFYATSA

SEQ ID NO: 269592 - protein, 140 aa, Zea mays
  unsure (1)..(140): unsure at all Xaa locations
  Clone ID: MRT4577_177464C.1.pep
GRVGLNNAYWDSSNKXWTTAANYEYYGRGQLKIYWNYLYXGPAGGTSSFNGPRQPQQLVHDARIALNTELXCLNEQLHPVMPDXFSPTIMCIIRPLESNXNNPDHMNARIGYYKHTXQQLQXVDPRPILNSYVNYCTLDP

SEQ ID NO: 269593 - protein, 50 aa, Zea mays
  Clone ID: MRT4577_177465C.1.pep
EVWSQYIAGLWVELSQRGNKVSVLICFFSIHVLGGLVRIGAFHVKQVLLA

SEQ ID NO: 269594 - protein, 83 aa, Zea mays
  unsure (1)..(83): unsure at all Xaa locations
  Clone ID: MRT4577_177466C.1.pep
AVKLCFFLLSTSKCIYYPSSYLLRRGRRGVAGVALVCRRRTNSHTXSLXGLPLAFAWKCSTSLWRESVPRPRPREMARQQRNS

SEQ ID NO: 269595 - protein, 61 aa, Zea mays
  unsure (1)..(61): unsure at all Xaa locations
  Clone ID: MRT4577_177467C.1.pep
ENKEPPLHSKMWNERENTPTKSKNPVPILXXLDTLNALVLCVVXILRTKSADNHHTXGRSS

SEQ ID NO: 269596 - protein, 89 aa, Zea mays
  Clone ID: MRT4577_177468C.1.pep
QGFHSPIFCLVHWILVLVNRAQYISPAFALDSFVLSENFIRHIPCGQYNSAFAKASVYEVLSKISGSRSKIAACCSRAHVLAPRSLTSG

SEQ ID NO: 269597 - protein, 76 aa, Zea mays
  Clone ID: MRT4577_177469C.1.pep
TEILPFSTANTFSNIKYLNSMFLPCLYYNLFFYHSTMSKLYAIYFSAIDRLNVKHNYKLICNLLPKRYANASTQII

SEQ ID NO: 269598 - protein, 182 aa, Zea mays
  unsure (1)..(182): unsure at all Xaa locations
  Clone ID: MRT4577_17746C.1.pep
MVRGKTQMKRIENPASRQVTFSKRRNGLLKKAFELSVLCDAEVALVVFSPRGKLYEFASGSAQKTIERYRTYTKDNVSNKTAHQDIEQVKADAEGLAKKLEALEAYKRKLLGERLEECSFEELHSLEVKLEKSLHCIRGRKCKKQPPPPPPMLMGPPPPPAPAAIDHXRGPEDVGMDVETEL

SEQ ID NO: 269599 - protein, 194 aa, Zea mays
  unsure (1)..(194): unsure at all Xaa locations
  Clone ID: MRT4577_177470C.1.pep
NLPRCRGFPCSFPGQKNDGIHLSQTKYVSDLLNRVGTMNCXPTTTQLGTSXKLKIGEGELLEPEDATRYRSIVGVLQHLTLTQPDLSFAVNKACQFLHAPNTHQXERCQEILRYAKFTLQHGLKXVKSPMHVSVFSDAXWTRDIDDRRSTRDFAVYLGKXLVSWCAHKQPTVSRSSTKRAYPVPYIGERMNSSR

SEQ ID NO: 269600 - protein, 130 aa, Zea mays
  Clone ID: MRT4577_177471C.1.pep
FGPEWCSLLLCSGGLGPPGAGVGSISGPAGSSFLPPAFVLPRVAGGACPSLSRLLCSAGGRPLPLARFLCCVFVLGLFSPPLCLLGLWSSPVGGRLGSCCSAPFPGWCCRPSPPLALPGGVCVRLDLLGG

SEQ ID NO: 269601 - protein, 103 aa, Zea mays
  Clone ID: MRT4577_177472C.1.pep
AVAVNVTEGAFAVLAEPLGGVNPDVAAVEVYATHRRVVLASYNAGRVVSPSRELTSAPTQPAVVVIGVGAHVAGTRLGAQGSLGAGARRSMWRSSVMSLLVFF

SEQ ID NO: 269602 - protein, 166 aa, Zea mays
  Clone ID: MRT4577_177473C.1.pep
KKKKKKKKKKKKKKKKKKKKKKKKKKKKKKFKKKKKKKKKKVLSLPGGPPGGVQQNFFFLNGPPTKGWLKNLGGIRLGLGVNHDGNRVWHIILENGVQGPLGLFFWELFAGKALGGLFAGIFNGGLFFGGFFWGLFPWLGLRGKGQHFLRGGRPPLKVGRPLLFFA

SEQ ID NO: 269603 - protein, 117 aa, Zea mays
  unsure (1)..(117): unsure at all Xaa locations
  Clone ID: MRT4577_177474C.1.pep
RLGAFPSLLLLRLAMVFSLHLSIQQMDRGSIHRCLWSWATDGAFSLVVVDLVGPRACILFRLIAAVGLFVLVVGSXHCAPDVGXLTLXVSVGRFNASVWGLGASSFINPPLFFWGRG

SEQ ID NO: 269604 - protein, 87 aa, Zea mays
  Clone ID: MRT4577_177475C.1.pep
SPRGTTSTCLKPAPPNWDCLPPSPARSMAPPRPRTPGGVNCKYTKGWPRTACCRWLPLPMGRYICIPYDQFVFPPPFACFNFPPQQV

SEQ ID NO: 269605 - protein, 52 aa, Zea mays
  Clone ID: MRT4577_177476C.1.pep
GTYKHNSDSQWPPKYSRRVLLALSAIAATVTFFPQCYTSSYSSLSFIIPLTS

SEQ ID NO: 269606 - protein, 95 aa, Zea mays
  Clone ID: MRT4577_177477C.1.pep
SHPGGPSMAQLVLASCLHLTIPLYNVDSQATFMYVYAFWSRFTFASDLQSYARYIIVDHTLVSSVTIFDHECTSIPSTDYRLDVVQHHGFQCAHH

SEQ ID NO: 269607 - protein, 61 aa, Zea mays
  Clone ID: MRT4577_177478C.1.pep
KCMDTGQDSSLTQKGAVSVEKLLQILVGLDKQMFSEYYVQHRKLIKIPCKFYSKAYLYQQH

SEQ ID NO: 269608 - protein, 85 aa, Zea mays
  Clone ID: MRT4577_177479C.1.pep
ACRASPAVDSSVPLPAQQERWVQSSDMAENIEGLLSAGAFQDLEKHEQTMRLGPRLPPPLRIGGWVHPETPPKRTLCPCGRPRVQ

SEQ ID NO: 269609 - protein, 68 aa, Zea mays
  Clone ID: MRT4577_17747C.1.pep
RLYYILVPMSFGNYVKTFVKLMKLNRLTLSLIHPTYPQKSELLTINGDLTILFLRNLINLFYNPYTLN

SEQ ID NO: 269610 - protein, 55 aa, Zea mays
  Clone ID: MRT4577_177480C.1.pep
HQSTLGNLTPGAGPSLRVPAKQASLVSILSLSPECGPPRGLRRKPGRRGNVSLRP

SEQ ID NO: 269611 - protein, 126 aa, Zea mays
  Clone ID: MRT4577_177481C.1.pep
ARSGGCHLLSCTSFVGMGDVADQEAFEWVRGVPKIVKALCIILRLSDDLKSYEREKMNSHVASTMESCMKEHQVPLEVARVKIQETIDETWKDFNEEWLNLNTNSHLPRELLERIFNLTRTMVYIY

SEQ ID NO: 269612 - protein, 53 aa, Zea mays
  Clone ID: MRT4577_177482C.1.pep
KPSRHQVNDSIVHTTTHDVIAVPTSRTHTKRWLHNGTEMYTCGLARPTRPPDK

SEQ ID NO: 269613 - protein, 59 aa, Zea mays
  Clone ID: MRT4577_177483C.1.pep
HRNHSELNSISYLQALQHCRKHQESMLKFIYVFIFKNYMMDVRVSGLAHELLLNGNAIH

SEQ ID NO: 269614 - protein, 182 aa, Zea mays
  Clone ID: MRT4577_177484C.1.pep
MEGGSSLPPFLSKTYEMVDDPATDAVVAWTPLGTSFVVANQAEFCRDLLPKYFKHNNFSSFVRQLNTYGFKKIDPEQWEFANDDFIRGQQHRLKNIHRRKPIFSHSSHTQGSGPLPDTERRDYEEEIERLKCDNAALTSELEKNAQKKLVTEKRMQELEDKLIFLEDRQKNLMAYVRDIGQA

SEQ ID NO: 269615 - protein, 365 aa, Zea mays
  unsure (1)..(365): unsure at all Xaa locations
  Clone ID: MRT4577_177485C.1.pep
GFKKIDPEQWEFANDDFIRGQQHRLKNIHRRKPIFSHSSHTQGSGPLPDTERRDYEEEIERLKCDNAALTSELEKNAQKKLVTEKRMQDLEDKLIFLEDRQKNLMAYVRDIVQAPGSFSSFVQQPDHHGKKRRLPVPISLYQDSNAKGNQVVHGGFITNPPACRESFDKTESSLNSLENFLREASEAFNISYDDGLPXPSSAVVITELHSSGESDPHVPSPVSRMHTSSAGAGDSLSSRDLTESTSCAESPRLPQIQPCTDSRTKVSEIDVNREPAVTETGPTRDQPAEEPPHVAAGVNDGFWQQFLTEQPGPDVHQEAQSERRDGDDDKGDQTRIGDRENFWWGKKNVEQMREKLGRLTSVEKT

SEQ ID NO: 269616 - protein, 166 aa, Zea mays
  Clone ID: MRT4577_177486C.1.pep
MVQVRRSLSMSRLRSCHDADDRGWNPLHVAARKGDLKEVRRLLDEGGMDVNAPAWGPKCPGATPLHLAAQGGHVKIMDELLERGANIDARTKGACGWTPLHIAAKERNKKAVRFLIENGAFLPPEMNDHRFNPPLHYCSGLEWAYEMKRMQDESDSPGETSLSSDN

SEQ ID NO: 269617 - protein, 90 aa, Zea mays
  unsure (1)..(90): unsure at all Xaa locations
  Clone ID: MRT4577_177487C.1.pep
RIDRNPGGLPDCFGSVVVLVXLVLWFVPRTVYTDLXYIHISGDERILTALLSVCFGVSIVMAXSGIAPAFTEEVARAVNIVHGVHTTGIH

SEQ ID NO: 269618 - protein, 72 aa, Zea mays
  Clone ID: MRT4577_177488C.1.pep
SISQYHSCRRCSYLCSMPFHFLYCPCTVDNVHVIFFIWINIGRHLFLNVDCYGFSFSLINNKLIIVIVFILT

SEQ ID NO: 269619 - protein, 90 aa, Zea mays
  Clone ID: MRT4577_177489C.1.pep
MATATRRLLPALLKTLAPAGARGLSTEKAVGAAAVVGSHTAKWMQDTSKKSPMELIWRHLMCANTVVSVMFKFTITKLGRYCRLPLQKLS

SEQ ID NO: 269620 - protein, 301 aa, Zea mays
  unsure (1)..(301): unsure at all Xaa locations
  Clone ID: MRT4577_17748C.1.pep
MVRGKTQMKRIENPASRQVTFSKRRNGLLKKAFELSVLCDAEVALVVFSPRGKLYEFASGSAQKTIERYRTYTKDNVSNKTAHQDIEQVKADAEGLAKKLEALEAYKRKLLGERLEECSFEELHSLEVKLEKSLHCIRGRKTQLLEEQLHKLKEKEMNLRKSNEDLREKCKKQPPPPPPMLMAPPPPPAPAAIDHTGPKDVGMDVETELYIGLPGRDYRSNNKDMTAXVAVRSGQVRLASSAENNLRSVVRRTGDASQAQANQHDKDHECRVVFYKPVHRPSKAHAPERPSENTYPLISLY

SEQ ID NO: 269621 - protein, 128 aa, Zea mays
  unsure (1)..(128): unsure at all Xaa locations
  Clone ID: MRT4577_177490C.1.pep
PQPHPCPCLQLHPSPCQLQGTCGVGSTPILGQCVEFLRHQCSPTWYAXCSPQCQSLRQQCCHQLRXVEPQPRXQAMFGLVLQSVLQHQPQSGQFSGLLSAQIAQLSSWMCGLKQLIPCPDAKAGGVPQ

SEQ ID NO: 269622 - protein, 96 aa, Zea mays
  unsure (1)..(96): unsure at all Xaa locations
  Clone ID: MRT4577_177491C.1.pep
AEDPFPEEVFPAVQGKTKRPXDLKIKNLAPGSVLPRALVLKAFSSSSLDASSDSSPVASPSSPKRNFFSRHQSFTTXTEKGKPSREIKKHSMSFTF

SEQ ID NO: 269623 - protein, 110 aa, Zea mays
  Clone ID: MRT4577_177492C.1.pep
MATATRRLLPALLKTLAPAGARGLSTEKAVGAAAVVGSHTAKWMQDTSKKSPMELINEVPPIKVDGRIAVCEGASEGVGLGHPIEYICLDLEAPNVCKYCGLRYVQVHHH

SEQ ID NO: 269624 - protein, 110 aa, Zea mays; identical to SEQ ID NO: 269623
  Clone ID: MRT4577_177493C.1.pep

SEQ ID NO: 269625 - protein, 65 aa, Zea mays
  Clone ID: MRT4577_177494C.1.pep
DTSKKSPMELINEVPPIKVDGRIAVCEGASEGVGLGHPIEYICLDLEAPNVCKYCGLRYVQVHHH

SEQ ID NO: 269626 - protein, 117 aa, Zea mays
  unsure (1)..(117): unsure at all Xaa locations
  Clone ID: MRT4577_177495C.1.pep
MYIIYMSMHAMHLVVYRMLLLLLLFFDDPVSVINIIIITXKTKKKKKKKKKKKKKKKKKKKKKKKVFSPGAPNPNRRRGNLGRQKIPPPAKKARNRLITERGNHGTLREHLAVAIAK

SEQ ID NO: 269627 - protein, 89 aa, Zea mays
  unsure (1)..(89): unsure at all Xaa locations
  Clone ID: MRT4577_177496C.1.pep
PDVGGLHDRXLTTPKKGSIXAVQAFYXVPADDXTDPADATLLAPVDATTEPTREISKLGVYAAGTPLGYTLRLLSPHLLEEDHVNTARG

SEQ ID NO: 269628 - protein, 87 aa, Zea mays
  unsure (1)..(87): unsure at all Xaa locations
  Clone ID: MRT4577_177497C.1.pep
CFGKWKNATLIPGTFVXKMVYILRFCTNEIYQPPLHMVVKNSQHSRVFVAFFXSPGYXSPVKLVDFCREKTGGVHKXKKVVYGEHLV

SEQ ID NO: 269629 - protein, 45 aa, Zea mays
  unsure (1)..(45): unsure at all Xaa locations
  Clone ID: MRT4577_177498C.1.pep
KKNXEKTKXXRSLPNSVLLLASSCLLVLARQSAQKPXDLSSRVQC

SEQ ID NO: 269630 - protein, 124 aa, Zea mays
  Clone ID: MRT4577_177499C.1.pep
NVTACFSCVGMVSTDFMTSLPSCAVRSAIPSSCMFTTHRLSMTGYLGRVPPGGERALLRYRGVISDAVDLRVDGATVSPASRTFPQRLREETDGQQRRAGEAGRAVSLAPSFLLFCEIIIARCR

SEQ ID NO: 269631 - protein, 129 aa, Zea mays
  Clone ID: MRT4577_1774C.1.pep
TPPKKKIWFFAKPKNSKCMWTLKGGGPENNQGGSGGVPKQGLGPCPCLKVHLLTKGIFIGPPTPRFGKKKGPGGGVLTFTNPPPRVQKRAKGRCPPGGGGGGPKNKNMVFFPPGGFTPTPAKVNVVWFP

SEQ ID NO: 269632 - protein, 151 aa, Zea mays
  unsure (1)..(151): unsure at all Xaa locations
  Clone ID: MRT4577_177500C.1.pep
MGXICGVGAGYVGGPTMGVIALKCPXIEVWVVDISXPRVEAWDRDTLPIYEPGLXDVVKQCRGRNLFFSTEVEXHGAEADIIFGSGNTPTXTRGLXXGKAADLTYXESAARMIADVSKADKIGGEKATGPGKTRGAIEKILTHNRRGINYQ

SEQ ID NO: 269633 - protein, 64 aa, Zea mays
  Clone ID: MRT4577_177501C.1.pep
NSCMCLVQNLGKYRNVMEKGRRKTTIHYFLSLPPQSPGGLQLTTVFPLFFRVGILQYEYFCSDF

SEQ ID NO: 269634 - protein, 133 aa, Zea mays
  Clone ID: MRT4577_177502C.1.pep
MRGSNRHATLVESVACQHSYFTVQSNPIHPPVRSGGDRQPAAVMSGRGKGGKGGGGGGAKRHRKVLRDNIQGITKPGIRRLARRGGVKRISGLIYEETRGVLKIFLKNGMRDSVTYMEDDRCKNVSDMDEVWG

SEQ ID NO: 269635 - protein, 131 aa, Zea mays
  unsure (1)..(131): unsure at all Xaa locations
  Clone ID: MRT4577_177503C.1.pep
LAIGANFVLLRKRXKLPAKVIAXEYFLEYETARIEMHVGSEQRTDRAIVIDGLIATGXTLCAVVKLIKSVGAKVVKWACVIALQELKGRXDKVGVRPVFVXLVQAHGVSGSWNFSQSLAPSRLLCVERFTV

SEQ ID NO: 269636 - protein, 137 aa, Zea mays
  Clone ID: MRT4577_177504C.1.pep
AYSPAYACNKKLAKRLNEGGGARHRKGALNDLLDGTSSSKANKNDDEEHSASTAGLFIFNLSVGTSSPQSMPGILDIASQLVWWQLVRALQQRRRLPSGAHLPAQQLGHLRAPFPGVTRSASCSARPCPATRTPAIT

SEQ ID NO: 269637 - protein, 56 aa, Zea mays
  Clone ID: MRT4577_177505C.1.pep
IVITLDILPKPLAPHNTCWYHYNLVVLLVGLDFLLFINTIPRSLYVVSNIVFTKIS

SEQ ID NO: 269638 - protein, 36 aa, Zea mays
  Clone ID: MRT4577_177506C.1.pep
TMPVPNLINLLDIHLSSASLINNKQAPIDLPYKQAP

SEQ ID NO: 269639 - protein, 64 aa, Zea mays
  Clone ID: MRT4577_177507C.1.pep
LGQTGKIFNRQNKVFFRGGETHVATVTPQSLKIPWPQGIKKKWITPGKYKRAVINTVTGKKKLK

SEQ ID NO: 269640 - protein, 110 aa, Zea mays
  Clone ID: MRT4577_177508C.1.pep
LLPLLWSQRPFFYRRPLFFCFLSSRLLGESSPPRSSADLAGCVSLSPGDWRVTRWCLCPDISSAWPRHRSLGLLFFCERVLVVSSVARRAPPSGGVVFFCRVQIPPVSVC

SEQ ID NO: 269641 - protein, 55 aa, Zea mays
  Clone ID: MRT4577_177509C.1.pep
LANTAPLMKPKKNWVIFKGSYPEAYFSHQLQTKISSGTNLKVEICHVEPSLTKSG

SEQ ID NO: 269642 - protein, 74 aa, Zea mays
  unsure (1)..(74): unsure at all Xaa locations
  Clone ID: MRT4577_17750C.1.pep
SPCHPYVSSDFGSSNCRXFFTYEELFQITNGFSXQNLLGKGGFESLYKGCLADETEVPVKKQKDCGGLGDRDSH

SEQ ID NO: 269643 - protein, 87 aa, Zea mays
  unsure (1)..(87): unsure at all Xaa locations
  Clone ID: MRT4577_177510C.1.pep
MASGELACTYAALILSDDCISITDEKIATIVKAANIKVESYXPALIAKLLEKRSAVDLILSAASGSGAAADAHTRGIGLTSASQYGD

SEQ ID NO: 269644 - protein, 82 aa, Zea mays
  unsure (1)..(82): unsure at all Xaa locations
  Clone ID: MRT4577_177511C.1.pep
VIFDFPKPGIMFQDITTLLLDPKASRDTMDLFVERYMHQRXTVVAGVEAXRGXIFGSPIALAIGAKYVPLREPRWLPGEVIY

SEQ ID NO: 269645 - protein, 181 aa, Zea mays
  unsure (1)..(181): unsure at all Xaa locations
  Clone ID: MRT4577_177512C.1.pep
MATIPTTXLASSSVXALLRRTRRAASSVTARLPAVARRRPQLLVRASAKEIAFDQGSRAALQAGVEKLAAAVGVTLGPRGLFFPLHLLSCPCRAALFYFFFKKKRISLLCSLSERRISLLLRRPIHLRGRHTHGFHSCSQFRTKDWAQLKPLCIVYIMSEQGSFTGSFLLIHSIKWTLCFR

SEQ ID NO: 269646 - protein, 112 aa, Zea mays
  unsure (1)..(112): unsure at all Xaa locations
  Clone ID: MRT4577_177513C.1.pep
NKGLLDPRIKKTLKTEKKRPFNKKHKWATTNQTNQNKPFELGKKSREQKKKIGPPGPTLKFLQFPWKLPKPPPPLPPPKPPPPPPXPPPPPKPPPPPPKPPPPLRAPPPPKP

SEQ ID NO: 269647 - protein, 723 aa, Zea mays
  Clone ID: MRT4577_177514C.1.pep
MAGEKKTVDPMLSEFYEAMERTNAEKIAHETLAGISEGSSDSEDFDVESDNEGAEDRRWRPSHVVFKKSTIKQGQIDAMRGRYFRDISIVRAGGENNVPLPEADEVVVYRSFMKAGLRFPLDKMLVEVLKTFEIYLHQLTPEAIIKMGIFIWAMRSQGLEPNAKCFCNMHELSYDTKATGKEQYHNNFGCYGFVTRSEVSNPVPTFRKRWSGTWMQEWFYLKNDLVEREDIKGIIQRPIWSHFGIRRPSLALGNDIQACQAAFNTPLGSGWEMPKEAAAGSSQGRLIYLKYTFKYMNQFDEPNDDWLDAIEATSDELLGAYSRAEDDAMTVAFEGRDKKRLNRFFDVFGTSRRARTKEIGRATEGFESVARDGATEVSRIATITSKRRRMASVLDAVIESVKVSTPASAPDAEGEALKKSSEASMVQATVEAGPSVPAEARSSGAAEEGTKTRPSEATEAPLMLEKEGAAEESESLAPGAPTEELEFIGLILSKALKGQKNTEDERCQLALGNLRSEIITLRNEALEKDKILFSLVDKLKTCKAKLSAHDEAHRVEVEDLKKKLSDMNEDFKVEKAKQEISEMERARKLKDSFVKVGAYSSEQKIIYGDPEGVIQWIGEEAEAFEEILGDRGDFCAFAGARGLAAILEKAGCEHVKAVAQAEAIFSAGDTKDPSAEASVLGGKFYFDVWMKGDREMSYEAIRKNEKESHDAQEEAKHAKEVAE

SEQ ID NO: 269648 - protein, 70 aa, Zea mays
  Clone ID: MRT4577_177515C.1.pep
MQDWAPVFISLVLFILLSPGLLFQMPGKCRIIEFGNFQTSAISILVHAILFFALAAIFLIAVGVHMYLGS

SEQ ID NO: 269649 - protein, 137 aa, Zea mays
  Clone ID: MRT4577_177516C.1.pep
KEQSQQVKSEPSENEAVNVSGLSHSSTNPCKGLFSYSLKFSMDLNYTPSLQYSIFCLIAGGEPIEEDVDICGNSSPIMLDKDAQIRNSKCGSPSSSSSDSESSSSGLCLMVFICISLYHYRQFLCKESDAFLPSFVL

SEQ ID NO: 269650 - protein, 143 aa, Zea mays
  Clone ID: MRT4577_177517C.1.pep
MTGREAVAAEAELDQDSAAAAAAPVLLSPLSETLWRDRAAAAAGGVLVGDVSARLAWRDLTVTVALGSGDTQAVLQGLTGHAEPGTITALMGPSGSGKSTLLDALAGRLAANAFLSGTVLLNGRKANLSFRGAAYVTQDDTLI

SEQ ID NO: 269651 - protein, 71 aa, Zea mays
  Clone ID: MRT4577_177518C.1.pep
IDDCEIKELSLVGRKSTCSNERDDPTLVRLDRVFCCSEWEDIFPKVMLKSAASGISDHCPLILGFRVCNWG

SEQ ID NO: 269652 - protein, 84 aa, Zea mays
  Clone ID: MRT4577_177519C.1.pep
GNIFFPYILFLSISMVHSGHCSHCHPWRWRTPRAPSLYVACGKCCHSTNLLRHPSQGDPCTSSSHWPSVTPASRGPCFPYTDSS

SEQ ID NO: 269653 - protein, 199 aa, Zea mays
  unsure (1)..(199): unsure at all Xaa locations
  Clone ID: MRT4577_17751C.1.pep
RATPCARGAALYTLARHAAGVTLAFLPDLLAETLVYSVCTYXYIVGLCXSGRPGASFVLLVWAVVLRGAMTVLXKRSFAPTYIAGMSLVSVSLAGFFLFSGYFLSRGSMPSYWVFMLYGQPYKYPLDALLANEYTCAGNRCFGVGGGSECSQTGLDVLVEKGLTAEERWTGVQVLFGFFLLYRVLYWVVLSRRASRAKR

SEQ ID NO: 269654 - protein, 339 aa, Zea mays
  Clone ID: MRT4577_177520C.1.pep
MPTMKVSVLALWSAAAALLLVLGYYKKTCPGVENVVKYHVAKAIKANRGAGAALVRLIFHDCFVRGCDASVLLDPTPANPETEKTAPINIGLAAFEVIDEIKAALEERCPGTVSCADIVVYAARDASSLLSNGHVHFAAPAGRLDGVVSRAADAQRDLPDSTFTVSELIRNFRRKNFTVEELVILSGAHAVGVGHCSSFRARLSAPPAQIVPAYRNLLSGKCAAAEGGADDPVVANNVRDEDPRAVAAAFPSFLGKLRKARDFLDNSYYHNNLARIVTFNSDWQLLTEKEALGHVKEYAENGTLWDEDFSDALLKLSRLPMPPHSKGEIRKTCRWVNHH

SEQ ID NO: 269655 - protein, 79 aa, Zea mays
  Clone ID: MRT4577_177521C.1.pep
RDFLDNSYYHNNLARIVTFNSDWQLLTEKEALGHVKEYAENGTLWDEDFSDALLKLSRLPMPPHSKGEIRKTCRWVNRH

SEQ ID NO: 269656 - protein, 81 aa, Zea mays
  Clone ID: MRT4577_177522C.1.pep
MTGEQGCGEDSPYLQSGFNSLVILGAWSLWRHRNDCVFNGRSPCLASALTLAGDELRMWCSAGARGFNLLSTLMFMLDPGG

SEQ ID NO: 269657 - protein, 75 aa, Zea mays
  Clone ID: MRT4577_177523C.1.pep
LQNQNCQPLTGSSHGCSVCSNRTLHQRAVDTIEPHLHSWSLRPPTPRFSGGHGCWSDLAVHLGAGLDSRVGPYLS

SEQ ID NO: 269658 - protein, 355 aa, Zea mays
  Clone ID: MRT4577_177524C.1.pep
MKVSELALWSAAALLLVLVAQAPSAAEGSHHGGAGLKLGYYKKTCPGVENVVKYHVAKAIKANRGAGAALVRLIFHDCFVRGCDASVLLDPTPANPETEKTAPINIGLAAFEVIDEIKAALEERCPGTVSCADIVVYAARDASSLLSNGHVHFAAPAGRLDGVVSRAADAQRDLPDSTFTVSELIRNFRRKNFTVEELVILSGAHAVGVGHCSSFRARLSAPPAQIVPAYRNLLSGKCAAAAGGADDPVVANNVRDEDPRAVAAAFPSFLGKLRKARDFLDNSYYHNNLARIVTFNSDWQLLTEKEALGHVKEYAENGTLWDEDFSDALLKLSRLPMPPHSKGEIRKTCRWVNHH

SEQ ID NO: 269659 - protein, 123 aa, Zea mays
  Clone ID: MRT4577_177525C.1.pep
KWVINSINKIRGRFIRKGRKDVNGGNCLVSWDIVTRPLDLGGLGISNLLYQSWALQAKWLWLEKTDPTKPWSGLDLPIQQIVKRFFTASIVSLIGNGHNTLFYTDRWLDGSCIQDFAPAVRAN

SEQ ID NO: 269660 - protein, 354 aa, Zea mays
  Clone ID: MRT4577_177526C.1.pep
MKVSVLALWSAAAALLLVAQAPSAAEASHHGGAGLKLGYYKKTCPGVENVVKYHVAKAIKANRGAGAALVRLIFHDCFVRGCDASVLLDPTPANPETEKTAPINIGLAAFEVIDEIKAALEERCPGTVSCADIVVYAARDASSLLSNGHVHFAAPAGRLDGVVSRAADAQRDLPDSTFTVSELIRNFRRKNFTVEELVILSGAHAVGVGHCSSFRARLSAPPAQIVPAYRNLLSGKCAAAAGGADDPVVANNVRDEDPRAVAAAFPSFLGKLRKARDFLDNSYYHNNLARIVTFNSDWQLLTEKEALGHVKEYAENGTLWDEDFSDALLKLSRLPMPPHSKGEIRKTCRWVNHH

SEQ ID NO: 269661 - protein, 67 aa, Zea mays
  Clone ID: MRT4577_177527C.1.pep
INTWTLGPPFVTSKKNVMKQIKKIKLTKYVAQYCDIFANFLMLHQLGHKLGYILGTPVPICFYITDS

SEQ ID NO: 269662 - protein, 465 aa, Zea mays
  Clone ID: MRT4577_177528C.1.pep
MAPTGRLLAVAALSFLCLQGPWGDSGSAFAQSQPPLHRTVGAEANDGGGLMPELPPSGLMPMPELSPSGSPTPFVPFLAPAPLAPFFNNSTPKLSGKCTLNFTAVDKLMTTTAVDCFTSFAPFLANVICCPQLQATLTILIGQSSKQTGSLALDPTVANYCLSDVQELLLSQGASDNLHSLCSVHLSNVTEGSCPVSTVDAFESAVDSSKLLEACRKIDSVNECCSQTCQNAINEAAQKISSKDAGLTSYTGSPKTDSCRNVVLRWLSSRLDPRSAKEMLRQISNCNVNGVCPLSFPDTSKVAKECGGTMTNSTACCKAMLTYVAHLQKQSFITNLQALNCASFLGAKLQKMNVSMNVYSSCQITLKDFSLQVGSQESGCLLPSMPSDASFDSTSGISFTCDLNDNIAAPWPSSMQAPSSSCNKSVNIPERPAATSAQSGVNHKNLKLRLLASLVSLLLVLLVQV

SEQ ID NO: 269663 - protein, 58 aa, Zea mays
  Clone ID: MRT4577_177529C.1.pep
PVGAMGCLRRPAAVDGGKAEGGEERAAALSAAVRELSSRGSRKWRKWAAKHELRLTTT

SEQ ID NO: 269664 - protein, 63 aa, Zea mays
  unsure (1)..(63): unsure at all Xaa locations
  Clone ID: MRT4577_17752C.1.pep
GMWVWRSILNYSVSTRMTSTVSYSTRPPGVISRLPASSPHMRWSAPPPPRKTTVGKAXMXRNG

SEQ ID NO: 269665 - protein, 515 aa, Zea mays
  unsure (1)..(515): unsure at all Xaa locations
  Clone ID: MRT4577_177530C.1.pep
MAPTGRLLAVAALSFLCLQGPWGDSGSAFAQSQPPLHRTVGAEANDGGGLMPELPPSGLMPMPELSPSGSPTPFVPFLAPAPLAPFFNNSTPKLSGKCTLNFTAVDKLMTTTAVDCFTSFAPFLANVICCPQLQATLTILIGQSSKQTGSLALDPTVANYCLSDVQELLLSQGASDNLHSLCSVHLSNVTEGSCPVSTVDAFESAVDSSKLLEACRKIDSVNECCSQTCQNAINEAAQKISSKDAGLTSYTGSPKTDSCRNVVLRWLSSRLDPRSAKEMLRQISNCNVNGVCPLSFPDTSKVAKECGGTMTNSTACCKAMLTYVAHLQKQSFITNLQALNCASFLGAKLQKMNVSMNVYSSCQITLKDFSLQGKLFKTYQLITHKGHIYLLALHFVATELMKYLFTFSTGVFEXWPLLDLQTVGSQESGCLLPSMPSDASFDSTSGISFTCDLNDNIAAPWPSSMQAPSSSCNKSVNIPERPAATSAQSGVNHKNLKLRLLASLVSLLLVLLVQV

SEQ ID NO: 269666 - protein, 62 aa, Zea mays
  Clone ID: MRT4577_177531C.1.pep
LDANHIWTSMKNLKSTFIRFCTHKSLSDLTTEQTSQIRIPFNDLFIKFLMERADITQENIHI

SEQ ID NO: 269667 - protein, 38 aa, Zea mays
  Clone ID: MRT4577_177532C.1.pep
NAPQSAAIALSIVTTHPQPGLALGAQPRSTPFDAYTKL

SEQ ID NO: 269668 - protein, 65 aa, Zea mays
  unsure (1)..(65): unsure at all Xaa locations
  Clone ID: MRT4577_177533C.1.pep
VASKRKRERGRVEKCKGVMGRGIGREDGKRRRLVKQQLPPPDEXXWALRMLLARAAAYCCSLARF

SEQ ID NO: 269669 - protein, 121 aa, Zea mays
  unsure (1)..(121): unsure at all Xaa locations
  Clone ID: MRT4577_177534C.1.pep
GKSCRLRWVNYLRPDLKRCKITPQEESVIVQLHALWGNXCTVRRTTCISRWSTIARSLPGRTDNEIKNYWRTHFKKGKPSKNVERARARFLKQRREMMMQQQSLGGSTCTSTRAVTSAAAR

SEQ ID NO: 269670 - protein, 101 aa, Zea mays
  unsure (1)..(101): unsure at all Xaa locations
  Clone ID: MRT4577_177535C.1.pep
SHASAPPSKTCFLPIPLSSPVLQSPHSDPGXTPISFILTISIPSIPSIPNISTPSTLFIHLSLSLLRLIIHLFFTFTLPPLLLFQRTNSTHLFLQHTFSIP

SEQ ID NO: 269671 - protein, 66 aa, Zea mays
  unsure (1)..(66): unsure at all Xaa locations
  Clone ID: MRT4577_177536C.1.pep
QSPLYPQAVLNINSFMHHQRWFSFYRQNVANIDAFIHQHHXLPFIQHAFTNPTTLFQPYTIDDPIF

SEQ ID NO: 269672 - protein, 80 aa, Zea mays
  Clone ID: MRT4577_177537C.1.pep
GGKFTLYVQLKQTTQQKKPDTEFMAPPRSSPRFLVSFAVSTLSWWPPGYPTRLLCFAGSLDMSLVLGGSRLLVRFGSSSV

SEQ ID NO: 269673 - protein, 58 aa, Zea mays
  Clone ID: MRT4577_177538C.1.pep
LGSSLNHRQGQGPTGSCINLIKAVVLVGQLCSLGPPCQAYSQSVTIKCRLVLHRKIKP

SEQ ID NO: 269674 - protein, 64 aa, Zea mays
  unsure (1)..(64): unsure at all Xaa locations
  Clone ID: MRT4577_177539C.1.pep
PXQNAGPTSPPHXLPPLPFFFFLKNNKSVCLYISCLIKNHXTLLIKKSLNSMQTLKKKITHFYT

SEQ ID NO: 269675 - protein, 102 aa, Zea mays
  Clone ID: MRT4577_177540C.1.pep
ITINPKCKSVILPPTKEISLFFPFFLLGIIVGFFPNFNSLFPLFMLELPCLHACVCRTGCVLGLGSRWKHAFPCYCWKNSNLQALGVAILSSHQLYFCTGIN

SEQ ID NO: 269676 - protein, 84 aa, Zea mays
  unsure (1)..(84): unsure at all Xaa locations
  Clone ID: MRT4577_177541C.1.pep
ARSIFLPAPXTTTQKPTKTIYALQNSMSLPTSSTTYWCTSTVSADIKNYSNNINNSHENPYNNNTTLIDYTATQSAIIDFTHSL

SEQ ID NO: 269677 - protein, 47 aa, Zea mays
  Clone ID: MRT4577_177542C.1.pep
SSSSSVACPTSSPPSPSCWPSPYFSLSWFCCLTLTLLLTGRGIPCTQ

SEQ ID NO: 269678 - protein, 101 aa, Zea mays
  unsure (1)..(101): unsure at all Xaa locations
  Clone ID: MRT4577_177543C.1.pep
QAISVXDSFTYNELYNGFLLYVKGNXFTQCPLDVDILSNPSSXGFYDXNFYDTSVNVAYIFHTFPLQKQPPSYNKSFVXYIKKYINNLTSIFEPQKTDYFK

SEQ ID NO: 269679 - protein, 123 aa, Zea mays
  unsure (1)..(123): unsure at all Xaa locations
  Clone ID: MRT4577_177544C.1.pep
MALVDGGAFGASTSTVAAAPTVEHLLFLVVLDGVXTPIHEGTLYGSAGGTVTVTGPGQLSVDGLXSVLVRGGWTGTGAVRFTLCADAAAEGVCAACFERCGAARVDGAREVSVYSCRSVEVEL

SEQ ID NO: 269680 - protein, 37 aa, Zea mays
  Clone ID: MRT4577_177545C.1.pep
TPGGFPLYNTTVGNAYTLLPSPLFMAHARAHLAFWPS

SEQ ID NO: 269681 - protein, 70 aa, Zea mays
  Clone ID: MRT4577_177546C.1.pep
VWFPQPPPKDHPCPYIPNHPITPQISGTTINAHLRYSDGLKNILNRYFKGKNFPVQNYIVKKGHLPSQYQ

SEQ ID NO: 269682 - protein, 92 aa, Zea mays
  Clone ID: MRT4577_177547C.1.pep
FWINRIIMMEGGSGHVLSLLLWPCEQGNKRSCPRRFKPSYENVIDIGVNVSIYQNLFSCSNTYGVPLSSAEPMSNKTEAGLDFNCENCVLSI

SEQ ID NO: 269683 - protein, 96 aa, Zea mays
  Clone ID: MRT4577_177548C.1.pep
TTINDAVCVKECRRRRTRASPSLQPSWQDWMEGRFSGKVCVGSRGLKGGQISDDCSSWFKRRCGVAWIRGPRNPSLRRINPRYYVIPLVHARFHIV

SEQ ID NO: 269684 - protein, 64 aa, Zea mays
  Clone ID: MRT4577_177549C.1.pep
SKAVMRAEMGETLAGMQALPEAEQRNPNHARLPGVQEAKNRRVHDSLKRMEEKAHSLDEVTRKL

SEQ ID NO: 269685 - protein, 159 aa, Zea mays
  unsure (1)..(159): unsure at all Xaa locations
  Clone ID: MRT4577_17754C.1.pep
FXXICLFLRPPKKKIIIGXAPPLGVVGEPKKKEGGPPLVPKGGVLXYWKKKHLGALGGGLGAFKSQRKIXFVVQESHQKXTFSLTPLRRERQKKFLWVKLVGGTNKLGGRGWGVWVGAAAXGGINYLVQRMNIYSFKGGERVEIXRLVWGGVFESPQFW

SEQ ID NO: 269686 - protein, 289 aa, Zea mays
  Clone ID: MRT4577_177550C.1.pep
MEALTATDKCFSPARAMFPMPIVRPPASPDHASQYLEDLLQEQQKLGPFVQVLPICGRLLNQEIMRTSNLLSNFGVRGNERLPPIASPNHMHPLPRGPDFCGNGFGPWNEMHPERSGFPRGAMGWQGAVQNHSSYIVKKIVRLEVPTDAYPNFNFIGRLLGPRGHSLKRIEATTGCRVFIRGKGSIKDPVKEEQLKGRPGYEHLDDPTHILIEAELPADVIDARLAQAQEILEESLKPVDESQDNIKRQQLRELAMLNSVYREGSLHQNGSASPFSNGAQNSDREEIQL

SEQ ID NO: 269687 - protein, 50 aa, Zea mays
  Clone ID: MRT4577_177551C.1.pep
VRILIDLRRQYLSVGGQVGGEEVLVDGTFKQATAMTVINARCNHLFHMAR

SEQ ID NO: 269688 - protein, 70 aa, Zea mays
  Clone ID: MRT4577_177552C.1.pep
KTQPGTHTIILPHPIVKAGSMNKRHFYLSGAGGFIKLPCPGRKSIKKIGSGSQNLGPHKNHFFLSHLCGG

SEQ ID NO: 269689 - protein, 82 aa, Zea mays
  Clone ID: MRT4577_177553C.1.pep
AGLTNQCNGEHYHGPLLHSLQACKVIERATGSHLLKGPRDHAAGTARSRHNPQCYAPCSLQWSRLHDPSPASLVSLLLALLF

SEQ ID NO: 269690 - protein, 54 aa, Zea mays
  unsure (1)..(54): unsure at all Xaa locations
  Clone ID: MRT4577_177554C.1.pep
ITVNQXQSRGGGGGGSGYGGGRGGRRRYGGGRRDSAYGRGRDYECRPHSRVGGS

SEQ ID NO: 269691 - protein, 144 aa, Zea mays
  Clone ID: MRT4577_177555C.1.pep
FCFFFFFFFFFFFFFFYAGGMHGLYIFGRQGQFIGGLVHTCMGAHWAAVSLQLDFGVSKKEGLLLNWDDLGWILPAGKYNILQKLGTLGDFLLTLGVVWGRRQQRHMHMRAHFFWVSPCPQVLEVPFFYPSANKGPRVKGPIYK

SEQ ID NO: 269692 - protein, 106 aa, Zea mays
  unsure (1)..(106): unsure at all Xaa locations
  Clone ID: MRT4577_177556C.1.pep
HACGLAALLRAAGNLLTAGDDLLLMHAINAPDYNQSQAILWESNCSPLISLLELSDPIIGKKYGANPDIXTLDILNTTATQKDIMMVDKVLWTDPRKKLCQVMHDT

SEQ ID NO: 269693 - protein, 87 aa, Zea mays
  unsure (1)..(87): unsure at all Xaa locations
  Clone ID: MRT4577_177557C.1.pep
NNQFEISRALGTLQFXLFSLPFFIFNSFHPPFLNITFSLITPKSIIFPPFHNIPLLKPSVFPNLIFSISLPFFPSFLISIIPPPFPL

SEQ ID NO: 269694 - protein, 64 aa, Zea mays
  Clone ID: MRT4577_177558C.1.pep
NILYRSIKRLYSNIRDFTGQNDSFALNRCTNLVGTALLLTINHAIPLNHAMTTSVHAGIELVKK

SEQ ID NO: 269695 - protein, 145 aa, Zea mays
  unsure (1)..(145): unsure at all Xaa locations
  Clone ID: MRT4577_177559C.1.pep
VVXMVISGVFATNDKHDWSLTQSEVAAVVYAGVMASALNYVLLTWSNGILGPAMVALYSPLQPVVSALLSMIFLGSPIYLGSIFGGLLIISGLYLVTWARHREKLASIGVPYVTCVSESLDGPSHVAKTVPFISLSRLWDVPHES

SEQ ID NO: 269696 - protein, 163 aa, Zea mays
  unsure (1)..(163): unsure at all Xaa locations
  Clone ID: MRT4577_17755C.1.pep
MKIQCDACEGAAATVVCCADEAALCARCDVEIHAANKLAXASKHQRLPLEALSASLPRCDVCQEKAAFIFCVEDRALFCRDCDEPIHVPGTLSGNHQRYLATGIRVGGASASSACSFPCDAHDPSEYFARPREDPFSPPIGLRAWLKSQWREAPVCRIMIEPL

SEQ ID NO: 269697 - protein, 63 aa, Zea mays
  Clone ID: MRT4577_177560C.1.pep
MAATILCLLMLLDVFVCVANATIAPKCLQAPLDALISPYLPSKIASTRENPAIKPYRLQQAVA

SEQ ID NO: 269698 - protein, 216 aa, Zea mays
  Clone ID: MRT4577_177561C.1.pep
GYLEAGRALIDAYAKCGFTELGYWVFRQVPNKNSVMYNTVISNLGSHGFATKAIEVLDEMVNDKLRPDSATFSSLLAACCHVGHLEEGWKLFRRMRDEFKIVVEMEHYVYMVRLLATFGQLKEAYDLIQTMQIQPDCGVWGALLWGCCVHRDSSFGRIVAEKLCELNSDKAAYRVMLSNMYASQEMWWDAEEVRDELSKENMYKNTGTSWVGEVKK

SEQ ID NO: 269699 - protein, 77 aa, Zea mays
  Clone ID: MRT4577_177562C.1.pep
TNLGSVRPSLKKKHGFIFKKGNQRTGERPEKFQPTALAPGGPFGAGSSKPANPEGASEDPPFLGFPWNAAGPGGAPL

SEQ ID NO: 269700 - protein, 423 aa, Zea mays
  Clone ID: MRT4577_177563C.1.pep
MESPRSPEAEIGHRVEDLWEVAEPQLSPSEKLNSCFEDIPVASFPRTHPSQVIEIPSDASLAETVEILSKNKILSAPIRNVEAPEDASWMDKYIGIVEFAGIAMWLLSQSDAAVNGTVGSGPGSPVSSLVSRLGSFTFRRTSSGRLETATDSESDEAASVGGSFFETLTSSEFYKNTKVGDISGSFRWAPFLALQTSDTFLTMLLLLSKYRMKSLPVVEVGGDKIENIITQSSVVHMLAECVGLSWFENWGTKKLSELGLPVMKPSKLVKVSEDQPVLKAFQLMREKGVGGLPVMDTSGANAIGNISIRDVQYLLTAPKIYKEHRSITTKDFLSAVRHHLQEQREASPLLHDVITCKKDDTIKDIILKLDSEKIHRIYVVDDKGNTEGVITLRDIISKLVHEPRHYFGDFFDGVVPLPANSTV

SEQ ID NO: 269701 - protein, 205 aa, Zea mays
  unsure (1)..(205): unsure at all Xaa locations
  Clone ID: MRT4577_177564C.1.pep
MSTRYTGADHGPRVXGAHNSIVTARAGKDLVSSLVSGLLTIGPRFGGAIDDAARYFKDACDRGLTPYEFVEGMKKKGIRVPGIGHRIKSRDNRDKRVQLLQKYAHTHFPSVKYMEYAVQVETYTLSKANNLVMNVDGAIGSLFLDLLSGSGMFTKQEIDEIVEIGYLNGLFVLARSIGLIGHTFDQKRLKQPLYRHPWEDVLYTK

SEQ ID NO: 269702 - protein, 65 aa, Zea mays
  Clone ID: MRT4577_177565C.1.pep
KRWTEACSLCDSINCHALMIDQMLELGYNTWRLTMNAKKHVKKSILISLNLYGSICVNKLVYYEA

SEQ ID NO: 269703 - protein, 343 aa, Zea mays
  Clone ID: MRT4577_177566C.1.pep
GRATRPTARAAKSGGELESAQAKNQALREAGAVVPTSYEALESAIKEVFDKLVEEGKISPVTEITPPPIPEDLKTAIKSGKVRAPTHIISTISDDRGDEPCYAGVPMSTIIEQGYGVGDVISLLWFKRSLPRYCTQFIEICVMLCADHGPCVSGAHNSIVTARAGKDLVSSLVSGLLTIGPRFGGAIDDAARYFKDACDRSLTPYEFVEGMKKKGIRVPGIGHRIKSRDNRDKRVQLLQKYAHTHFPSVKYMEYAVQVETYTLSKANNLVMNVDGAIGSLFLDLLSGSGMFTKQEIDEIVEIGYLNGLFVLARSIGLIGHTFDQKRLKQPLYRHPWEDVLYTK

SEQ ID NO: 269704 - protein, 149 aa, Zea mays
  unsure (1)..(149): unsure at all Xaa locations
  Clone ID: MRT4577_177567C.1.pep
PPLLVFLAVAPLVGELAELPLPWMLWSFPAASMVLLGVRPGPRFRHRAQPCLLPSPRALGSVSASLVSRAELHPWPELPTQFSSLRVVAFPQAPARLRSLLARILPKPFLGGTPSXLRVRALCFLRASHSLEIPAHLLPWPRARHLCLL

SEQ ID NO: 269705 - protein, 67 aa, Zea mays
  Clone ID: MRT4577_177568C.1.pep
IGSLFLDRPSGSGMFTKQEIDEIVEIGYLNGLFVLARSIGLIGHTFDQKRLKQPLYRHPWEDVLYTK

SEQ ID NO: 269706 - protein, 50 aa, Zea mays
  Clone ID: MRT4577_177569C.1.pep
LGSSRRCVTLSETRHSLAVILVSYSSHALPWSVSNECNVSYVTPVHLIYV

SEQ ID NO: 269707 - protein, 253 aa, Zea mays
  Clone ID: MRT4577_17756C.1.pep
MKIQCDACEGAAATVVCCADEAALCARCDVEIHAANKLASKHQRLPLEALSASLPRCDVCQEKAAFIFCVEDRALFCRDCDEPIHVPGTLSGNHQRYLATGIRVGFASASSACSDACDAHDDSDHHAPPKAAVSSAAQQVPSPPQFLPQGWAVDELLQFSDCESSDKLHKESPLGFKELEWFTDIDLFHEQTPKAGRRLAEVPELSGTQAANDAAYYRPAKATATAVAGVRQSKKGRTEVTDDEDHLIVPDLV

SEQ ID NO: 269708 - protein, 163 aa, Zea mays
  Clone ID: MRT4577_177570C.1.pep
MAGAQEAGDAPGHQQPCARRVLVFPLPFQGHIDPMLHLAGVLHARGLAVTVLHTRFNALDPARHPEFQFVAVPDGTPADVAATGRIIDIILAMNAAMEASPAVGEALRASAVAGQEGRPRASCLFVDANLLRRAQGGQGARTATLVLRTGSAACLAASFLPML

SEQ ID NO: 269709 - protein, 55 aa, Zea mays
  Clone ID: MRT4577_177571C.1.pep
KRLLVLEYRCEFGWWLNRVSLFFRMLRIYNKEKLLVNGCYLVYSNWIFLGILLIS

SEQ ID NO: 269710 - protein, 180 aa, Zea mays
  Clone ID: MRT4577_177572C.1.pep
MAAPPDSKSDKSPEELLCAAAEAGNDDAIAEIISSGADPTYFDASGMTPLMRAASGGHAAAARLLLDAGAPWNALSPEGLSAGDLTSDPATYDLLLDHALRSELILGTVARRQAASANSSDGVPAETYLDSRISFSEDRVMDAESKAVMMEWERPLMEAHARAVCAAGGGKVLNVGFGMG

SEQ ID NO: 269711 - protein, 344 aa, Zea mays
  unsure (1)..(344): unsure at all Xaa locations
  Clone ID: MRT4577_177573C.1.pep
KDSTSCPRSTRPNPQHTTRDGWADPQAKPHTVSSCRCSSPDAKREKHGITSKASSEIITTNCEKKMTSNGDLSLSAAMVQSSDIPEQEFICKDGMLSSQVGQCSETVTVPSDEDKFTVRELLSSVPDLSSFVPTTMMNTEPGRGPTLTQSXEKPSGPHLNPPPVEDIIHVISHSSFHVNGEQAVKETGSESIDVDKRLNMVTEEIGVRSTEPNHIPSGPIDSDTVKPNVVEANITFQKPSSTDAIKLPTIPEGNFSTLETNNGFKQEAAPAKEILDVTSFRQRAEALEGLLELSAELLEHSRLEELAIVLKPFGKAKVSPRETAIWLAKSFKGLMNDEASRSST

SEQ ID NO: 269712 - protein, 50 aa, Zea mays
  Clone ID: MRT4577_177574C.1.pep
ECHSSIMQRISYSASRVHLLILAPVYSPFCSIRPCVYRPAQPSKHFYSCS

SEQ ID NO: 269713 - protein, 40 aa, Zea mays
  Clone ID: MRT4577_177575C.1.pep
FWVEFMDAMNDSVEPRHSLRYVGLGLYVGALSLVHSLEQI

SEQ ID NO: 269714 - protein, 77 aa, Zea mays
  Clone ID: MRT4577_177576C.1.pep
NLYHLFYLCPPGAAPATHLHPLPLPLPAPLEGVLASSSILSSSSASSTPVVFAGASTLDPTLRFFEGGGFTGVFFFA

SEQ ID NO: 269715 - protein, 92 aa, Zea mays
  Clone ID: MRT4577_177577C.1.pep
GFSAAGTYIQQVIYYHIVSRSKVCSPSHRPYRIYSNHFSVCNPSLAECMRLPPKEKHKKTGVHGADDTVISGSPASGLQIGLNARTQHWLTI

SEQ ID NO: 269716 - protein, 72 aa, Zea mays
  Clone ID: MRT4577_177578C.1.pep
GPEWSRSLNSKFLLYNFKLLKQADSALQPQCGVRLPCGASFRRPLCLLLGEELAAVRALHSELRQQFLNEFL

SEQ ID NO: 269717 - protein, 128 aa, Zea mays
  Clone ID: MRT4577_177579C.1.pep
DAWADAWARWGTDMFTYGSYSYVAIGASGDDYDILAESVHDRVFFAGEATNRRYPATMHGALLSGYREAANILRAARRRAKNVYSPEKMDINVDVEVGVNGEVEDTVRDSCIDLDDLFRSPDAAFGGV

SEQ ID NO: 269718 - protein, 201 aa, Zea mays
  unsure (1)..(201): unsure at all Xaa locations
  Clone ID: MRT4577_17757C.1.pep
TVFVFAFIWFFFLSSSSRVPSANRGNVYGDRKKIHRDNGLYPSXLRSTGANVYFXDLYNGKQHLXTELTGLHSNSAIQMDATATTKAVGMPPPXRMPDAFTKIHVTLDMELDKKFRGKDGAIVATKRIEGLPNNGSSGLGPQTSTVTADHDANLEDVDQPADIVYKRVIHRLHDYNIIQIFMDPNDSNNTEYELETCAADY

SEQ ID NO: 269719 - protein, 148 aa, Zea mays
  Clone ID: MRT4577_177580C.1.pep
AKPFFNEPGYAMHANTAHGEKKSLAYNEDTFLLSCRTMLYSLRNPPKNFEDFVAGHFRQHGRNILVACRAYLDGAQVGCLSGDGVQDVDEGDTSCSVRFKQSLKKLVEELLTEFTVKGADCGKFLTEEKAKRSSGACSTWTADTTLRL

SEQ ID NO: 269720 - protein, 83 aa, Zea mays
  Clone ID: MRT4577_177581C.1.pep
TREGAPPSGARSQVRPGHKKGPGPVKKGRAWEQTREGDPKSRPRPRPTPKTPPAIRKELGPPPPRGLGVFRPLKARFPLLGFV

SEQ ID NO: 269721 - protein, 494 aa, Zea mays
  Clone ID: MRT4577_177582C.1.pep
MAPGSSSSRKAKALKASYRLVADNFLAVLAMVSVVAVLFAAWPISIEDLACRLHAVRPLHVLTAAILTAALAKLRRMSRPSDVYLVEYGCFWPKPCFRAPFATCLEHVRLLPYLVNEDDISWGWRLLQRSGIGEETCVPYAYHYLPPDRSFRASLDETELVIFSAVDDVFARTTAVTPADIGVVIVNCSIFTPTPVFTDMVVNRYKLRADVRSVNLSGMGCSAALISIGLARNMLQTAPPGTHALIVSTEILSSQYYVGTERAMLLPNCLFRMGAAAMILSNTAARGARFRLARVVRTVASARDAAYRCVFQVEDEEGNTGIRLSKDLVPTAAQTLKSNIVAFGPLVLPASEKLLVALSILRRRLVRSGRGRVYRPDFRTAFEHFCIHAGGRGVIDEVQRGLGLSDEDVEASRMTLHRFGNTSSSSVVYELAYIEAKGSMRKGDRVWMISFGAGFDCSSVAWECIEPAADAAGPWADCIHRYPVQLPKLMEALD

SEQ ID NO: 269722 - protein, 71 aa, Zea mays
  Clone ID: MRT4577_177583C.1.pep
GKKTTSKSNSSMHVCSTAPERYFGLYYVRHQLFTQDKEAIYKKPTKWLKTNITSLGCCHPQFLDLLRNYSC

SEQ ID NO: 269723 - protein, 131 aa, Zea mays
  unsure (1)..(131): unsure at all Xaa locations
  Clone ID: MRT4577_177584C.1.pep
NPTPRRAENLAHRHHATHALVFVALTTPFQRRGRYRNAAHALRIFTGRRPNCALPTMRSLPKRRASSSHLRRPCAAPKSSPTAPFHRRPWRTTHASCTPRPPCLSSGASALPFSSPDSXXAGLVAHLNSEE

SEQ ID NO: 269724 - protein, 149 aa, Zea mays
  Clone ID: MRT4577_177585C.1.pep
NKNGGDFLGNKILTMKKLKQTPFWVGEKNFLGGGCAGPKNQCEIAFLSLGGGILWGVGPMPPPQKREGPPFFTLGFHPPTMANRSLFVFYQQILLVKEGGKGGGGPLLNFKLHFFRYESLYIPAFKNRAVSGVEFFEGGNRSFHIKRHF

SEQ ID NO: 269725 - protein, 36 aa, Zea mays
  Clone ID: MRT4577_177586C.1.pep
NLEQVDFRTEHITQWAQYQAGNGGLNYLFTMLETVV

SEQ ID NO: 269726 - protein, 58 aa, Zea mays
  Clone ID: MRT4577_177587C.1.pep
RVQRQNFGLQLGVGATIGPGTPETLCNKLCLFFTSKDYKFFSLYNLRPNQNIRGPYKF

SEQ ID NO: 269727 - protein, 41 aa, Zea mays
  Clone ID: MRT4577_177588C.1.pep
VFPRGFQKGASGPVQVRLKTGRRLVIFCSKQTLGVKKRNPR

SEQ ID NO: 269728 - protein, 177 aa, Zea mays
  unsure (1)..(177): unsure at all Xaa locations
  Clone ID: MRT4577_177589C.1.pep
AVPASHRNRSAPAPPPPPPPQRPPQGRKRPTERQRPTPGTAQRRGRKKTAEAAADTKPGRGPTKANGXPRETTRTETHHPKAAEPTRPAGSARXKDXDKRNRARGGGIFVXIPPTRQAVVKGLVAYYHKHDDEAAKKEDQDIFTRYKRTLLDTDHQRCEPKKCGGRGARARIQKSYR

SEQ ID NO: 269729 - protein, 87 aa, Zea mays
  unsure (1)..(87): unsure at all Xaa locations
  Clone ID: MRT4577_177590C.1.pep
SESQIQTTAQEVHSLLVSGRRKEALHQAQEGHLWGPALILAFQLGDKFYADPVKNXARCHFVSGSPLRTLCLLIPGHPADVYSFENP

SEQ ID NO: 269730 - protein, 255 aa, Zea mays
  unsure (1)..(255): unsure at all Xaa locations
  Clone ID: MRT4577_177591C.1.pep
IARAGIELFTAMRRAGATPDAFTFTFVLKSCSRCHSPGRLPSDLHAQAFKHGCLGAGSEHGHVHNALLHAYASRSAVDDASRVFDEMPVRDVVSFSGLLTAHLKNNHLDSARMVFDQMPHRXXVVSWTAMISAYARAWRPQEALALFDAMTVQPDEVTMASVVSACTALGDLETGERLRQYVDSNGFGWXMVSLRNALMDMYAKXXGCLTEAXRVLFDGMAIRSLASWNTLISAYASHGXDWENTLAXLFHMMXG

SEQ ID NO: 269731 - protein, 232 aa, Zea mays
  Clone ID: MRT4577_177592C.1.pep
MASATGIPPNSAAARGQSEEEPLLGRRGDASQMQGQPLYHNLWIGTAPIAQAGIWILAAIVWGAIFSNKLIFFSAHPLLNSAGFLLAIQAALILQPTHTPDQKRTGTLAHFLFHVVGASALTAGLIIIEINKQGPGHEHFASAHARLGLAFYVLVYLQALVGFTQYYVPQLYGSVENAKSIYKYHRLSGYFIAVLGLATICAATWTTYNIYVGHMQHWAVITASVLLGWCGA

SEQ ID NO: 269732 - protein, 50 aa, Zea mays
  Clone ID: MRT4577_177593C.1.pep
RRGLLSPAGLFLLGPLGAHRVRDSGLSGSRGMGWTGCGWLETREWRLFPG

SEQ ID NO: 269733 - protein, 74 aa, Zea mays
  Clone ID: MRT4577_177594C.1.pep
WEDRWRTPPQEERRPRHGNSDELWMGVKAEIGDLVIERPHSRGWCPDEFLCGGCYRLFMRCLDQHEQPRAHAWT

SEQ ID NO: 269734 - protein, 94 aa, Zea mays
  Clone ID: MRT4577_177595C.1.pep
SISPKGQRSPARLWASTAQARVITAHLTIGSMETISEATIGDFISCLMNNIAMVYGEVSSVLLLNGVNQVPSEKLTTACDPTLLSSPPRTTTAR

SEQ ID NO: 269735 - protein, 443 aa, Zea mays
  Clone ID: MRT4577_177596C.1.pep
MGKSKRNKGGRGGGGADDKLDGGGDADSVTSMSSGLSDLQFAQATEHISSQEFVLDKYVDALYEKRGSTREEALGSLTDAFESFVLLGLVENKYVTLLSQFINSIKRGSVKEVCLACRCIGLLAITLGAGSSSHEIMDESHPHLLRVLQTWPDAQKMISALDCLAVVTFVGATDLAETQLSLKAIWDVIHPKSGSNVGVVRKPKPPLLAAAVSAWAFLLTTIGSSRRNTDSWKEPITFLCSLLEAEDRAVRIAAGEALALCFELRLFDVSSSDEADVDSYTREAGGSKHQLFLNMQALKAKLSGLVYSLSMEAGGRGADKKNLNDQRDLFQRISDFIKSGECPEESLRISGKNGILRVTSWRESIQLNYMRRFLGRGFLKHSQDNDLLHEVFDIKIDRTENMSATEKKMFRSGEEKGRALKLNKERRLAQERKQLNILNEQYG

SEQ ID NO: 269736 - protein, 133 aa, Zea mays
  unsure (1)..(133): unsure at all Xaa locations
  Clone ID: MRT4577_177597C.1.pep
LXRSLRGSRLLSAMTGWXERKLLACGWSRLTREDCDEFLSFLHHFLGGGXXFFFFXNAXTYHLKXSSDTFACAHSCPAPSSVWCWGCHPXPRCLFRRRTVCLPCVRSRASAFRGAAVPAELNSSCVVCSSVES

SEQ ID NO: 269737 - protein, 173 aa, Zea mays
  Clone ID: MRT4577_177598C.1.pep
LVTKLDVDSYTRESGGSNHQLFLNMQALKAQLSGLVYSLSMEAGGRGADKKNLNDQRDLFQRISDFIKSGECPEESLRISGKNGILRVTSWRESIQLNYMRRFLGRGFLKHSQDNDLLHEVFDIKIDRTENMSATEKKMFRSGEEKGRALKLNKERRLAQERKQQNILNEQYG

SEQ ID NO: 269738 - protein, 32 aa, Zea mays
  Clone ID: MRT4577_177599C.1.pep
TSSKLEKETCKKSHPILYVSSKSTPETQCPQQ

SEQ ID NO: 269739 - protein, 46 aa, Zea mays
  Clone ID: MRT4577_17759C.1.pep
RLILDLLNTIKINLGNVFLVFTILVLFDFYIRIILFGLTNIKFVGL

SEQ ID NO: 269740 - protein, 74 aa, Zea mays
  Clone ID: MRT4577_1775C.1.pep
APCSGRPPRGRRRRGGTPRAPAAPAARARPRASGTPPPAPRRAPSRPARAPRPRSPAAARRPPPPLPPRRSPSC

SEQ ID NO: 269741 - protein, 104 aa, Zea mays
  Clone ID: MRT4577_177600C.1.pep
PERRHNPTSAKATAPPPPSGSGGKKILILFNQCAEFWGFGVVRSPPRAGIGICCLWKTDFPPPSQYVSSFVHLLFGSPENVLPLCPCPCVAKSYVVGAPSSIFA

SEQ ID NO: 269742 - protein, 66 aa, Zea mays
  Clone ID: MRT4577_177601C.1.pep
PKETLHFKLSMRHIKLNIVQNQSKKSHSKSIYQLLQVFKMYTHILLYLPSIFIQRISAIRLILSIA

SEQ ID NO: 269743 - protein, 106 aa, Zea mays
  Clone ID: MRT4577_177602C.1.pep
ILHMPTPEFLLCSVNRICAQINENQKLCTSYRDPCDMREHNCEIGSVLLFVFCNSSKKFILPLGKKSGDFLWQKVHCKNWESVCTNRVCLVSDREIVFSEHSSVKL

SEQ ID NO: 269744 - protein, 39 aa, Zea mays
  Clone ID: MRT4577_177603C.1.pep
VHAIHSRSQDPNSWNCYYLVVVVLQNLKIKLARRTSYLL

SEQ ID NO: 269745 - protein, 405 aa, Zea mays
  Clone ID: MRT4577_177604C.1.pep
PRAGASRVGPETRLRAISPSQSPPTPASPVEPFGFDALKGTFSVDVAAADARALDVPLAAPFTIASSRLVAVSNVAVRVELRTGAVGWGEAPVLPSVTAEDQPAALDAAGRACAALVDAPAAPLGAVLQDLASVLPGHAFASARAGVEMALIDAVANSIGIPLWRLFGGASDSVTTDITIPIVTPNEAAQLAAKYRGQGFQTLKLKVGKNLNSDIEVLKAIRLVHPDCSFILDANEGYTANQAIEVLDRLNEMGVTPVLFEQPVHRDDWEGLRDVSAVAMEKYKVAVAADESCRSLLDAQKIIQGNIAHVINIKLAKLGVLGALEIINAARKSNTALMIGGMVETRIAMGFAGHLAAGLGCFSFVDLDTPLLLSEDPVYGGYEAFGPLYKFTNARGHGGFLHLEQ

SEQ ID NO: 269746 - protein, 55 aa, Zea mays
  Clone ID: MRT4577_177605C.1.pep
LSGCLIGTVQRWMSQLYYAQSTYYSGQENAVILSAAVLVSHLWYTISASVAGRVG

SEQ ID NO: 269747 - protein, 53 aa, Zea mays
  unsure (1)..(53): unsure at all Xaa locations
  Clone ID: MRT4577_177606C.1.pep
FVCSCSSCHGDPXSSXRWLVLPNLLLDHLYVFNTATDPSAPSLHKVSKSEDIT

SEQ ID NO: 269748 - protein, 106 aa, Zea mays
  unsure (1)..(106): unsure at all Xaa locations
  Clone ID: MRT4577_177607C.1.pep
PRNSAREMVEGSTLICFFGTHDYMAGERAYSLNATDNSHVYNFCVALLELLTGHIPSXQHFGGEKYIXTWVSLHSADKDPALVLDPKVSNDASDHNYMIKALHIAI

SEQ ID NO: 269749 - protein, 74 aa, Zea mays
  Clone ID: MRT4577_177608C.1.pep
VERRIRVWKTDQVQEPPYRGRKHKNIKGLRRNLETTISRQGQGEKTRIQGAGQPKRTYPWPQPSPISFSPPLLT

SEQ ID NO: 269750 - protein, 52 aa, Zea mays
  Clone ID: MRT4577_177609C.1.pep
ALLIAPCSYVYVLANSTVVSHCSQTTNWSTTSHIPTINDLHYNMITHLYTHI

SEQ ID NO: 269751 - protein, 90 aa, Zea mays
  Clone ID: MRT4577_17760C.1.pep
KLHNINPSSRKISVAVATPVLVLLAFAVFSLYDINFADSYQYILRASSASSSSSTRDRSLATTPSSSTVPDTSSSSSSPINSSSSSTSPA

SEQ ID NO: 269752 - protein, 104 aa, Zea mays
  Clone ID: MRT4577_177610C.1.pep
IGRSDNDQRSCSSCRYMMQPNGVARALCCVVDTQSGSRMHILCTWWRRGASPRACIVRKGALLSCRVMKAYSTVVWGLSSCVLVRSHVHEASSRITPMSGVVMF

SEQ ID NO: 269753 - protein, 36 aa, Zea mays
  Clone ID: MRT4577_177611C.1.pep
GWFLWAKAALLCHLWHREDPYQAQPLLLTAINDGQL

SEQ ID NO: 269754 - protein, 129 aa, Zea mays
  Clone ID: MRT4577_177612C.1.pep
MLAGFLVRLWRTVFLFFLLALWVARASGCSASGCPARFPAVATGVGPAPLVGCAPALAVPRVAAGSCVWVALVAPRSPVVVPASGPLLAGPFWARVASPAVFLYAPLLFLVSLGSELWAIHALEPNSEL

SEQ ID NO: 269755 - protein, 109 aa, Zea mays
  unsure (1)..(109): unsure at all Xaa locations
  Clone ID: MRT4577_177613C.1.pep
AQEGQLIRAHFTGRLEYGSVFDSNYKRGKPLPFLVGVGKVIKGWVQGIVCAEGIPPMLPGGKRSLKLPPXLAYGEKGAGSKGWEPPSWVIPPNSTFLFDXVKYVGKTPG

SEQ ID NO: 269756 - protein, 47 aa, Zea mays
  unsure (1)..(47): unsure at all Xaa locations
  Clone ID: MRT4577_177614C.1.pep
LTAKHPNQLASIXFSRRREKRREKPGSLKCSXICNSYENHLGVVKRG

SEQ ID NO: 269757 - protein, 217 aa, Zea mays
  unsure (1)..(217): unsure at all Xaa locations
  Clone ID: MRT4577_177615C.1.pep
MPMNPPPPPPPGSASSAPAGPSXPAPFPPAAAXPQPQVPPPMAASSYQQYQQQLHQAHQLFQRDAQTITPEALQSVKAALATSDVLDPAAAANARPSDPSTSKKPIPRRAAGQSWEDPTLTEWPEXANXPINSVSFVFNASPLFHLLVSQLLTICXDYRLFCGDLGNEVNDDVLSKAFSRFPSFNMGKXVXRDKRTGKTKGXYGFVSFSNPTDLAAA

SEQ ID NO: 269758 - protein, 237 aa, Zea mays
  Clone ID: MRT4577_177616C.1.pep
MPVNPPPPPPGSSSLAPAGASYFPLPFHLQQHQPPPPQVPPPMAASSYQQYQQQLHQAHQLFQRDAQTITPEALQSVKAALATSDVLDPVAAANARLSDPSTSKKPIPRRAAGQSWEDPTLTEWPENDYRLFCGDLGNEVNDDVLSKAFSRFPSFNMARVVRDKRTGKTKGYGFVSFSNPTDLAAAIKEMNGKYVGNRPIKLRKSNWKERTDVEALERQKNHVKRKPKIPKKTILHK

SEQ ID NO: 269759 - protein, 236 aa, Zea mays
  unsure (1)..(236): unsure at all Xaa locations
  Clone ID: MRT4577_177617C.1.pep
MPMNPPPPPPPGSASSAPAXPATSLSLSTCSXQPQPQMPPPMAASSYQQYQQQLHQAHQLFQRDAQTITPEALQSVKAALATSDVLDPAAAANARPSDPSTSKKPIPRRAAGQSWEDPTLTDWPENDYRLFCGDLGNEVNDDVLSKAFSRFPSFNMARVVRDKRTGKTKGYGFVSFSNPTDLAAAIKEMNGKYVGNRPIKLRKSNWKERTDVEALQRQKNHVQRKPKIPKKSVLHK

SEQ ID NO: 269760 - protein, 148 aa, Zea mays
  unsure (1)..(148): unsure at all Xaa locations
  Clone ID: MRT4577_177618C.1.pep
LVKKKKKDKRKKGGGKRKEKKKKEKQRRKKKXKKKKKKKKRKKKEKKKKKKKKKKKKKKKKKKKAKQKPGKPNPKENKVNEVGVLTPGLGREGTGKSGDGKGGGGAGPEPPLDQEGFDQKHREPRHRGGKGRRGKTNEGRTGKGKRAR

SEQ ID NO: 269761 - protein, 70 aa, Zea mays
  Clone ID: MRT4577_177619C.1.pep
IIPEIYQGYIIVHKLLEQCTIYGNWEGTQARATASAFRVGVGVGHGVRARTRRRPRRKGKGRGRPRRTEP

SEQ ID NO: 269762 - protein, 357 aa, Zea mays
  unsure (1)..(357): unsure at all Xaa locations
  Clone ID: MRT4577_17761C.1.pep
MKIQCDACEGAAATVVCCADEAALCARCDVEIHAANKLASKHQRLPLEALSASLPRCDVCQXVHHQRIAHAPHAAQGRQARANNEATTPPRARSQEKAAFIFCVEDRALFCRDCDEPIHVPGTLSGNHQRYLATDIRVGFASASSACSDACDAHDDSDHHAPPKAAVSSAAQQVPSPPQFLPQGWAVDELLQFSDCESSDKARRXASSGPXNNLPACTHRLMHGLVCVCVLQLHKESPLGFKELEWFTDIDLFHEQTPKAGRRLAEEPELSGTQAANDAAYYRPAKATATAGAGVRQRSFLRWRRCRFFSDFSRLIFSAYYSSAIIFFFGGIRVRQGKISRIRGSKATEPLTTPEWG

SEQ ID NO: 269763 - protein, 90 aa, Zea mays
  unsure (1)..(90): unsure at all Xaa locations
  Clone ID: MRT4577_177620C.1.pep
VALRHIRKYHKSTQLLIRKLPSXRLVGEIAQDFKTDMRFQGHSVLAIQXAAEAYLVGLREVTNLCAIPAKRVPIMPKHIQLVRRIRGERA

SEQ ID NO: 269764 - protein, 118 aa, Zea mays
  Clone ID: MRT4577_177621C.1.pep
HASGKTIGCYYKNKSSRVGTIKRETVTLRLQAEINQMVSLMINTFYSNMEILLHQLICNYYDALDNIRFESLTDKSKLHAHPELQMHLVPDKDTNTLCIIDCGIGMTMYDLVNNLCTI

SEQ ID NO: 269765 - protein, 61 aa, Zea mays
  Clone ID: MRT4577_177622C.1.pep
TERIEYMDWHSMLNSLKLNQPRRLTHLSVFSELFPRVPHDKLCCEQLLTLLTALFVKSEHC

SEQ ID NO: 269766 - protein, 137 aa, Zea mays
  Clone ID: MRT4577_177623C.1.pep
DELEGLQQGEVIPRVVTRRAVIQLIFASYGSTGAGKWCRVPVTIMVHLELQHLGGHHSFRCGCGPRGPRSARARWPRGRSLRRTGERQVGCSEPASLHLSSNHACHSWFQHDMWRRQRGGKGEERRAHTSGAGAHRT

SEQ ID NO: 269767 - protein, 40 aa, Zea mays
  Clone ID: MRT4577_177624C.1.pep
VFCVNIVIGCTLLCGEFRRSFLKKPQSEGRPPASYSSTQE

SEQ ID NO: 269768 - protein, 146 aa, Zea mays
  unsure (1)..(146): unsure at all Xaa locations
  Clone ID: MRT4577_177625C.1.pep
RWGAPLNIXHRPYLQKVXFSTFGLLLWEVINGKPPFXKINXMQTAFFLVNKGVRPNIPQECLPPPGEIITRGWGPNPYVRPPFPKILRILEHSXVEILSPVPKAPFWFCFSPPMAPPLIQQKKVEKNPPPAKLSKFFLCPNFAHLK

SEQ ID NO: 269769 - protein, 79 aa, Zea mays
  Clone ID: MRT4577_177626C.1.pep
CPRTGEQFGLHRESSPRSSATDVIYVPQRVAQTMRLKPERRMRRVATAAAKSSPLFALSLFSCLRLILYCGRGPSRSRP

SEQ ID NO: 269770 - protein, 93 aa, Zea mays
  Clone ID: MRT4577_177627C.1.pep
LITNFVTRGERTNATGSQQHYQPAETFFKHSSFKCHTANLQSKTLMAINRGSNEQKPQGGGPNPGCQKKKIPRIPQCSGARDYPRIGAPRFPG

SEQ ID NO: 269771 - protein, 163 aa, Zea mays
  Clone ID: MRT4577_177628C.1.pep
GACTVMTLQMMEKMPSETFRQYAQRWRDVSAQVEPPLTKTEITVLFINTYKAPFYDKLVGSATKEFADIGISGEPIENTGKSGRMEGSEGSRKVAPLRKKELEAHMVGTGRRYILNSYPNQPRPGNIHPRIILFRLKPLLPRTTSGLPRIRHEQPKRGEHFTT

SEQ ID NO: 269772 - protein, 142 aa, Zea mays
  unsure (1)..(142): unsure at all Xaa locations
  Clone ID: MRT4577_177629C.1.pep
PRVQYNIHCKIECPALWDVLYNFKQRGRKQGGRIDLLVNLKAMVDLIIPTLPVMFHGDQEPWNVQIFRCIDGGSCFGLHSTPEAGVECGLDSGKNNVLDRSFHDAYIHAIHCAKHLIYIXTRAYLGAXFAWKADGIKAEEIE

SEQ ID NO: 269773 - protein, 73 aa, Zea mays
  Clone ID: MRT4577_17762C.1.pep
LVNYRPCLIADGTMSSRSPLSPAAGAALLLAVAGGNDDDDVIDTEAAGAVVGGGNNDVVGTEASGIDIAACSS

SEQ ID NO: 269774 - protein, 55 aa, Zea mays
  unsure (1)..(55): unsure at all Xaa locations
  Clone ID: MRT4577_177630C.1.pep
SVICQEVAHLPPRVTVFPVYDMFPGFCSNHPSFQFLRCGYGMPSQKKKQQKXQGR

SEQ ID NO: 269775 - protein, 122 aa, Zea mays
  unsure (1)..(122): unsure at all Xaa locations
  Clone ID: MRT4577_177631C.1.pep
ACFLLRFSTGGHAMGSFGLTGVSVWEALVLEIVMTFWLVYIVYATAVXAKRGSLGNIAPIAIGFIVRANVXMGRTLDGASXNTAVSFGLALVSWQCGYQWVXXVGRLIGCGHSGVIYELLFI

SEQ ID NO: 269776 - protein, 115 aa, Zea mays
  Clone ID: MRT4577_177632C.1.pep
QGRAVRNNFNLIHGIPCQNTGKKLRTPAQRSPHTPNPLSNTFSSTNTRYFALNKPKVLQGKNKHGNATGRQKKDSSFGTEQRTVISHLRTPVAGYLKRPFLPSALPRPSIHLQRI

SEQ ID NO: 269777 - protein, 406 aa, Zea mays
  Clone ID: MRT4577_177633C.1.pep
MLRQSSSRNQRSRGLKLKKALQISLLLLVSVWLLYQVKHSYEKKAAYSEGEVNDLHKDDKGQGEAVRLGRKDVPPKMEADSSTLDERVEDEENDEVEQEMKHDENDEDPIDEQDLEKDEDLPEPGEHSSEKDEDVGVFDDEERKERSQEDQEKSFHGDNVSSAVTHDPPSSEQDELFHHGQDKVLFVDDASTAVPNENHEAGNEEEEVRRARERSFRGDDVSSSVDHDAKVAKPLPEEQLNSMDKIFEGTTNLSNGISFRAPGINGSYAGMDNVATVPTNSPSQKNAGTPSNDIESKTHPSPANLTGPEQSNSTLKDHPDQQVNSTAVLGNQVQPLTNQTPWPELDSPNGTLALVTDVQKSTSGAGDDGSSTVDKRTDGRDGPKEDVDVSTKIMNRAISEDEVVPE

SEQ ID NO: 269778 - protein, 388 aa, Zea mays
  unsure (1)..(388): unsure at all Xaa locations
  Clone ID: MRT4577_177634C.1.pep
GDAASRPWSPEMCLQRKQDVLQGTIKSRARAHDIIRKMLASLGDPYTRFLSPSEFSKMSKYDMTGIGLNLREIPDENGSFKLMVLGLLLDGPAYSAGVRQGDELLSVNGIDVKGKSAFDASSMLPGPKETFVTIKVKHGDCGPVESMKVQRQLVTRTPVFYRLEKRENNDSSVGYIHITEFNAVAKKDLXLKRLQKSGASYFVLDLRDNLGGLVQAGIETAKLFLNKGDTVIYTAGRDRLVQKAIVAESGPMIATPLMLLVNNRTASASEIVASALHDNCKAVLVGERTFGKXNHPKEDTVTFFFPCDQQDYIMPFLCLVTHVXVMQGLIQSVFELHDGSGIVVTVGKYVTPNHKDINGNGIEPDYNRLPDFNEAKDFLSRCGIKELS

SEQ ID NO: 269779 - protein, 135 aa, Zea mays
  unsure (1)..(135): unsure at all Xaa locations
  Clone ID: MRT4577_177635C.1.pep
LGTSRPAGVLYGYEPSRTEKRAKMTCDCWPARRCCCCCFRGGKRGKARKDKKGXDGVEEARRGLLGFYRKRSKKDKLGRWTRRTAAXVGGMDYKTSRAFXLEEIQEGLWGYYWLERSSLMSHDSYXKRCGQAPEY

SEQ ID NO: 269780 - protein, 67 aa, Zea mays
  unsure (1)..(67): unsure at all Xaa locations
  Clone ID: MRT4577_177636C.1.pep
LFPVEQAPPKSLLWGVSIPECPGIAAKGLHSFVPSLARCLDTVQCVPGLEAPRGEYLKKENHGXXLP

SEQ ID NO: 269781 - protein, 341 aa, Zea mays
  Clone ID: MRT4577_177637C.1.pep
LDSSTENGKERVRLKLETPIGIADRLLTSCQRLVKLEYEKAVEDLASIKDLVYGANNYAIKLKSDSSSWQNQISSLIERAKGRAVTLMESTLQLSNIDLIFAYTIKGKTGSSMRATSFVQNDILSPTLDDAVNLLGDYSTWLSSSNTREANVYLECFCERWDALVAPEERALLDPNGLVNEGEKLTIKALEGFNASAAAKDFEEEIRELAFGTFGGLGIAGLSASLLTSVLSTTLEDLLALALCSAGGFFVLSSFPGRRKHAIDKINKAADELSRKVDEAIQKDISQSANNLIRFVEVISKPYQEACQRKIDWLQGVQGELSAVERKLQTLKVEIQNLNGS

SEQ ID NO: 269782 - protein, 98 aa, Zea mays
  Clone ID: MRT4577_177638C.1.pep
AMPFVLLFFFRRISDCSDEIAVSQIVLSIPLAYLEQSVRWIIRILMTVFLCIRACTKETELPHHIKIFAKTLQYYVTRMFKRVLISTPALPTRPPTRP

SEQ ID NO: 269783 - protein, 29 aa, Zea mays
  unsure (1)..(29): unsure at all Xaa locations
  Clone ID: MRT4577_17763C.1.pep
ALIVCVFLGCEIRVYIXLVCKKKNISKKR

SEQ ID NO: 269784 - protein, 42 aa, Zea mays
  Clone ID: MRT4577_177640C.1.pep
KKKKKKKKKKKKKKKKKKKKKKKKPKKKKKKKKGFVPGPHPP

SEQ ID NO: 269785 - protein, 114 aa, Zea mays
  unsure (1)..(114): unsure at all Xaa locations
  Clone ID: MRT4577_177641C.1.pep
MAASDAEYXRCFVGGLNWATDYHFLHYALITYVQVLEYKIILNRETHRFTSLCCRNFYTDEAMRNAIXGMNCXELDCRNITVYEATSLCRRGCASSSRYGGGRGRCSYSCGWRR

SEQ ID NO: 269786 - protein, 175 aa, Zea mays
  Clone ID: MRT4577_177642C.1.pep
LTPLPLPGLLLRRRLRRLRYQPKTCPLYNSTARDHWSAHTTDYMHEPPQKISDTLTLHRRKTLRYKTRLVGLSVPSRRRLRSFLTPAHPVRQSEIKYYGILTSVTAYHFHANNAYLANCLWKYFTPLMPQHYVILGDTRYHPDYTVLHQHTKKPLLLREADLTAFDMMTWETAFT

SEQ ID NO: 269787 - protein, 84 aa, Zea mays
  Clone ID: MRT4577_177643C.1.pep
GARGGPRASKLVLKLLEAGPKTGNRMNGGTIRGGAKAFKLSPLGKLADIRGAGGKTTPLHFGVPEMGRPQGSKGSPGPLGWYHR

SEQ ID NO: 269788 - protein, 89 aa, Zea mays
  Clone ID: MRT4577_177644C.1.pep
VAVGFVYRDFNIASVLFVASATFFLFYLSGLFLNFRDVRNIVVPKIGASGDYLKFIARANTNLGNSVRSSDFISNKFILNSTTKILGVK

SEQ ID NO: 269789 - protein, 109 aa, Zea mays
  Clone ID: MRT4577_177645C.1.pep
EAAGQAARPQTLAGSDLARRRAGDDVVVVGRGSGAGAQESGWEELRREARKLEGDLDVKLSSYARLAARSSSSASPAPSPAGRSPCHPLRRDVRPLLPAVDDAHDPLSH

SEQ ID NO: 269790 - protein, 206 aa, Zea mays
  Clone ID: MRT4577_177646C.1.pep
MVSGSGVGAKRFGGDAPHHMLGRLSSIIAKELLNGKKGAAARCKEICLSGGLVRQKIKNLRFLRKGMNTKPSQGPIHFRAPAKILGRTIRGMIPHKTKRGEGVLARFKTYKGVPPPYNKTKRMAIPDALKVLRLQPEHKYCLLGEFSKEVGGNYLDTFRELEEKRKEKAKVAYKRKKQLAKLRVKAKKAPKEKLGSQLKILAPIKY

SEQ ID NO: 269791 - protein, 48 aa, Zea mays
  Clone ID: MRT4577_177647C.1.pep
GSLTQMMALQYLVFVPKHDLVDLYAELKPAWINNRSEIWPIIHHGACY

SEQ ID NO: 269792 - protein, 83 aa, Zea mays
  unsure (1)..(83): unsure at all Xaa locations
  Clone ID: MRT4577_177648C.1.pep
VEERHPGGTTPGKPCTRGSRADRAPSDGCSSVRSPLSSLRSWSSPPAVSGLTXSRAHPQLHALALPVARDRAGRTAIHPDASH

SEQ ID NO: 269793 - protein, 46 aa, Zea mays
  Clone ID: MRT4577_177649C.1.pep
RHEAVLSWFPFVSEFQTRLLFNQAFSRGLQISRILAGQNGSGTKSD

SEQ ID NO: 269794 - protein, 118 aa, Zea mays
  unsure (1)..(118): unsure at all Xaa locations
  Clone ID: MRT4577_17764C.1.pep
SARVKRTPEEGSSPLSALADDVLLQILGRFFSVLFDXARXFCGGGXLAXLLLXVFLGGGVSLPLGGELLPVPSLVWAPSFFSVLHMLSXXCPGLLRAGVLLELSDDFCLDLYFGPVFP

SEQ ID NO: 269795 - protein, 223 aa, Zea mays
  Clone ID: MRT4577_177650C.1.pep
GVSRPAVFRIPWASRPGDRRHRRPTPGPSSAAPFAGDERPPRQRRSTDARRAPPAGAGQILSAVIHLARRIARASVGRSTAARPSPSAPGDPDRTRLLGLTTGSCPAAAEAPSVLLQAELKVQRAGGVRRRNSVTSYLSASRLQSGLPASRRRGAARHGGCGEEGSCPIPTQLAAAQGGGDPIGVRASAVHPSIQFQSAARRSATFLLRRAPRGRRRGDGRAA

SEQ ID NO: 269796 - protein, 47 aa, Zea mays
  Clone ID: MRT4577_177651C.1.pep
IHKHPVLCTEHFCGIHVILHKKKKNYTFKPCSIACGLSRIRYLSIQF

SEQ ID NO: 269797 - protein, 168 aa, Zea mays
  Clone ID: MRT4577_177652C.1.pep
LSSPPLRSILDPPLGGRREAIERELKKLRAEREELDGRIRLLESQLEAGPAGFNGAAAGKGVGDDACGGSGACQSRVGNGFAPDGSLPADMIYRYSRHLLLPDFGVEGQRKLSQSSILVVGAGGLGSPLALYLATCGVGCLGIVDGGYVELKYLHRQIIHKEAYVGQS

SEQ ID NO: 269798 - protein, 307 aa, Zea mays
  unsure (1)..(307): unsure at all Xaa locations
  Clone ID: MRT4577_177653C.1.pep
VSRPAVFRIHVGQPARRPPPPPPXPGPSPAAPFAGDERPPRQVHPPPSLLPLQPKAPASQTGRRSLLYPXSPPPKPTVTSXPPPVHGALPPPXRSTDARRAPPAGAXSDPLGSHPPGTSGSSXPPLAVPPPPGPPPAPPVIRTAPAXRPXPAPAPXRSRSSQRPPAGRXRFSAPVEFDDETPSRHTSPPPVFQTSLIGVPASRRRGAARHGSCGEEGSCPIPTQLAAAQGGGDPIGVRASAVHPSIQFQSAGISSAPSAAPAGSIPTPPFPSRQQQVAVVPQQAATGRQLAPAFASGQLMSHAFRQR

SEQ ID NO: 269799 - protein, 147 aa, Zea mays
  Clone ID: MRT4577_177654C.1.pep
SRAISRYVLCKGASDLLREGSLAESAAVDAWLEAESHNFDKAMSAITFQCFVVPMFMGGTTDHKIVEENLEKLKVALRVYEERLSRSRYLAGDFISLADLSHCPMAHYLLASPCASVLDAYPRVKAWIDGMMDRPSVKKVMELMDAS

SEQ ID NO: 269800 - protein, 573 aa, Zea mays
  Clone ID: MRT4577_177655C.1.pep
AGQATACTAALLLVPALLHPARATSVHRGRRSFQRPRATQVAAAPRGWSSIGVRASAVHPSIQFQSAGTPFPPGCAKQLHPNLFCRKGIGPPLVTETGTGVCNFEVTKDLEPSPLFSTTASKMPQVMVVARNFMDMVAALPAGKLDMLYDSAFICEAVLRSLPPLAKKYALQMLYVLAPVTAAAMEEWVLDEYAAKHKVAIDKLLQLRVFVEVRDRRRDVSYKMNQKFQGNMQKYLVDGGSLPREPLPLSVTGRLPTPADLEAYALDQWECFLLQLINSSQVEKGSSFSSSMMKTFQRGLLSSRDGEASKLTENGFQFLLMETNAQLWYIMREYISSAEERGVDPTELISFLLELSFHKLGAAYSLNTLTDVQRIAIRDLAELGLVKQQQGRKDSWFIPTQLATNLSASLSDSSSNKEGFVVVETNFRMYAYSTSKLHCEILRLFARVEYQLPNLIVGAVTKESIYGAFENGITAEQIISFLRQNAHPRVADKIPAVPENVTDQIRLWETDLNRVEMIPSHLYEDFPSKEWFEQCCDYARDNGYLLWEDPKRMRLIVRGEFHPEMREFLRRQR

SEQ ID NO: 269801 - protein, 164 aa, Zea mays
  Clone ID: MRT4577_177656C.1.pep
PAGLFSILCPLHQNRRRRRSPPPVLGALPHQRRSTDARRAPPAGAGQIRLAVIHLAHRVAHASVGSPTAAWPSPSAPGDPDRTRLLGLTTGSCPAAAEAPSVLLQAELKVQRAGGVRRRNSVTSYLSASRLPDVSNRGSQRLGEEEQHGTAAVARKAPVPSQPS

SEQ ID NO: 269802 - protein, 153 aa, Zea mays
  Clone ID: MRT4577_177657C.1.pep
MDAQPNWRGGPAATRISYKNATIVMCAFNLFVAALLLHNYYSSWTRIAGGNKLDSAQLRYIWESEELRRAMEPVDLIRRVKEIEQEAYGEHGMATDEDPKQTAAVDLSKRLKDLRAGNDGSSQKALEEWRKRKMERARQRAIEKNGTSSVKTK

SEQ ID NO: 269803 - protein, 73 aa, Zea mays
  Clone ID: MRT4577_177658C.1.pep
LNLKRLLQFVQNCSFIFSFSSYLELFIYFWDVDYMRRISRISPSLIQLVPQLALSADSASFRDEDAMKVLSAS

SEQ ID NO: 269804 - protein, 210 aa, Zea mays
  Clone ID: MRT4577_177659C.1.pep
PDTFALRTKSACISNPTALSSLSSVSPPPKPTTTSLSSTGARRSPSTSGGPQTLGELHRRALAAGQIRSAVIHLAHRVARASVGSPTAARPSPSAPGDPDRTRLLGLTTGSCPDAAEAPSVLLQAELKVQRAGGVRRRNSVTSYLSASRLPDVSNRGPSVSEKRSSTARQLWRGRLLSHPNPVSSRPRRRRSNRRAGVRGPSIDPIPICR

SEQ ID NO: 269805 - protein, 37 aa, Zea mays
  Clone ID: MRT4577_17765C.1.pep
SPGPPCSKNLSTARATASAGTTSLSSYRVSGLVQTRR

SEQ ID NO: 269806 - protein, 94 aa, Zea mays
  Clone ID: MRT4577_177660C.1.pep
YSPSARQQLEQVVNHHLHLRQAPSREDTLMLATRHQLDKKESHGCWGLVLKCYELRTRQHRMLNVNVSSSFEALFPLGYNGLQTKVIEDTPSLM

SEQ ID NO: 269807 - protein, 305 aa, Zea mays
  Clone ID: MRT4577_177661C.1.pep
RPGITSPRGAGSRPAAQGLGHCQRRPPPSPPRAAAPRPPPACSPGVEPRPGSRASSLCPAPAATHSLSQTWLVTYCNFSADYRFSVSLITASNRTHLDTYAPRTKSAGISNPTALSSLSSVSSPPKPTTTSLSTGARRSPSTSSGPQTLGELHRRALAAGQIRSAVIHLAHRVARASVGSPTAARPSPSAPGDPDRTRLLGLTTGSCPAAAEAPSVLLQAELKVQRAGGVRRRNSVTSYLSASRLPDVSNRGSQHLVEEEQHGTAAVAMKAHVLSNPVSSRPRRRRSNRRAGVRGPSIDPIPICR

SEQ ID NO: 269808 - protein, 112 aa, Zea mays
  unsure (1)..(112): unsure at all Xaa locations
  Clone ID: MRT4577_177662C.1.pep
SYTLTPLGRSVLGLCFAFLTHHCSPSATPYGSSKCQTLQLHCCHQITHFEPLTSFHASYSVALKYILQHQPEHELTVLMTTQVSQHLTAMCRLHLIXPPPCACNAPDASAYY

SEQ ID NO: 269809 - protein, 138 aa, Zea mays
  Clone ID: MRT4577_177663C.1.pep
HWVPRGRPGQPPFVVASAFLPRHSRSSQRPPAGRAEGSARRWSSTMKLRHVIPLHLPSSRRLQSRLPASRRRGAARHGGCGEEGSCPIPTQLAAVQGGGDPIGVRASAVHPSIQFQSAGEQLVEIPNQQLESPALPSY

SEQ ID NO: 269810 - protein, 96 aa, Zea mays
  unsure (1)..(96): unsure at all Xaa locations
  Clone ID: MRT4577_177664C.1.pep
MARIVFIMDFADNLILRLMEDPDKRNQVREELVYMMKELGERTKAASSLPMRPYGLWTFYRFNSQLSXDPQISQATXRPDPYIDLIARHSGSTASA

SEQ ID NO: 269811 - protein, 75 aa, Zea mays
  Clone ID: MRT4577_177665C.1.pep
YYFYIFLTNINFFFFYYGGAAGINPTSIACFNHLRNNHRMNLSFPQHFLSTQISKSSLETDNFASNPILYKPVRT

SEQ ID NO: 269812 - protein, 56 aa, Zea mays
  Clone ID: MRT4577_177666C.1.pep
VIVHESEYRCDLMEKIQAGNALRRAFSDYHFNSKYEMILHQRSVTTVTFPHVWTNT

SEQ ID NO: 269813 - protein, 88 aa, Zea mays
  Clone ID: MRT4577_177667C.1.pep
IEHHFFHTTLPTIKICREESGPRPFRAVERLSAPPEDSGVKVYFLGHEGHTLGVDGPNVGVLEQADKVKPWWSFSLRGRGRTGTGGWF

SEQ ID NO: 269814 - protein, 88 aa, Zea mays
  unsure (1)..(88): unsure at all Xaa locations
  Clone ID: MRT4577_177668C.1.pep
SLRAGGGVSGXRMKADSSGLVKLPXCLGFVFMSVFRQEYHVHHSCNNSVAAFSKGAGEKSLFMSEHEKQPYVDQSGQYKHDYXKTTAN

SEQ ID NO: 269815 - protein, 126 aa, Zea mays
  unsure (1)..(126): unsure at all Xaa locations
  Clone ID: MRT4577_177669C.1.pep
MASEVNPKAYPLAXDLQVTMGFLHFIXQAARYXEIKKELLRAIPDWGIWEFAVMAAXRSPIEILLHLPLLGEDKNVPYGFDPSKQALGRGGGVTRPVIACSGTRTEGSHLKQHIQGLKDSIEKLLM

SEQ ID NO: 269816 - protein, 54 aa, Zea mays
  Clone ID: MRT4577_17766C.1.pep
GIPGSTPRPRHLVGWMGNICLLLRLLIMYSQRKGYDQGVSDSYCIVLCKMSLWP

SEQ ID NO: 269817 - protein, 110 aa, Zea mays
  Clone ID: MRT4577_177670C.1.pep
QTYANRFPPADRGRTLSTGQLRSTDRSRPWTHTHCGALFRLCTWLGPFPGWRADRRPAVSAHTPACRPSGIPYAATLHVTRSCQRDVLSAETQLSSSHGSKNFEGAFIHS

SEQ ID NO: 269818 - protein, 170 aa, Zea mays
  unsure (1)..(170): unsure at all Xaa locations
  Clone ID: MRT4577_177671C.1.pep
MELWSKLRSLDAYPKVNEDFYSRTLSGGLITIVSSLAILLLFFSEIRLYLYAATESKLTVDTSRGERLHINFDVTFPALPCSLVAIDTMDVSGEQHYDIRHDIMKKRIDHLGNVIESRKDGVGSPKIERPLQNHGGRLDHNEVYCGSCYGSEESXDQCCNSCEEXRDSYR

SEQ ID NO: 269819 - protein, 129 aa, Zea mays
  unsure (1)..(129): unsure at all Xaa locations
  Clone ID: MRT4577_177672C.1.pep
RGGDTCSLELLSHQAVAENEEFGVLSFQVPRPVAVGRTNTSFCLPFGVFCSLLWPLFGFVAVVRGSSAGFVSFFPGLPFPRCCXGVCGCRVRVLWPSWVVLSLVCCVAALLWVLLCCGVCECSVAARVR

SEQ ID NO: 269820 - protein, 80 aa, Zea mays
  Clone ID: MRT4577_177673C.1.pep
AMRTSIRALPVTPTPLLPIAVPEARATASHVTSQHLAASCRVCWPQLGSLHAPIARVYQRPRAPPESRMIHPPLLHKSKR

SEQ ID NO: 269821 - protein, 36 aa, Zea mays
  Clone ID: MRT4577_177674C.1.pep
KGAALGTWAPERKKRDHITNKPGVLKARRTPEEPRP

SEQ ID NO: 269822 - protein, 70 aa, Zea mays
  Clone ID: MRT4577_177675C.1.pep
SHLRGAKRGLWGGHRLPGSLGCLVFSRVLLRSSLGRHLVFPGGYLVKNQVLSLSVWWYQQGCWAMGCIFP

SEQ ID NO: 269823 - protein, 53 aa, Zea mays
  Clone ID: MRT4577_177676C.1.pep
RFHPLWSRSSVRACMVFSLYVGLVRPAEGLPGAGCALAATISSGRRDCSSSLL

SEQ ID NO: 269824 - protein, 79 aa, Zea mays
  Clone ID: MRT4577_177677C.1.pep
LGKKVRVKSNEDDPIGALKKLVAAQTGTPPQKIPLQKWFNISKGPFPLKGYGVPPGMGLKLYSNLTPPPFSLLSGWFEF

SEQ ID NO: 269825 - protein, 186 aa, Zea mays
  Clone ID: MRT4577_177678C.1.pep
MSESGPAADGGAGGGPADAGGVTVRSMVQRWKMDGAPARARLLLRALAWLFSLLALVVMASNQHGGSQDFGEYPEYNYCLGISIVAWLYATAQVLRDVHRLGSGRDLIAAREASAVVDFAGDQVVAYFLISGMSAAAPVTDYMRQAADNLFTDSAAAAISMAFFAFVAIGLSALVSGYNLSMEALV

SEQ ID NO: 269826 - protein, 72 aa, Zea mays
  Clone ID: MRT4577_177679C.1.pep
MENLETLVQVVAYFLISGMSAAAPVTDYMRQAADNLFTDSAAAAISMAFFAFVAIGLSALVSGYNLSMEALV

SEQ ID NO: 269827 - protein, 34 aa, Zea mays
  Clone ID: MRT4577_17767C.1.pep
LELHAPELRVFYTTTINKFLYARSIPFKTLAEWA

SEQ ID NO: 269828 - protein, 159 aa, Zea mays
  Clone ID: MRT4577_177680C.1.pep
MAAFPSASPSPAISASTWSMASLQNSSFEHRLFGIDARGRIVAMRHGRRVPKLNRPPDQRKALLRGLTTQLLKHGRIKTTKPRAKAMRKYVEKMITLAKDGSLHKRRQALAFIYEKHIVHALFAEVADRYGDREGGYTRIIPTFPRRGDNAPMAYIELV

SEQ ID NO: 269829 - protein, 50 aa, Zea mays
  Clone ID: MRT4577_177681C.1.pep
FLKKSAKLEASREKIIIFGKKVSTISSVQKYKSATSPKPLTQITVDCITS

SEQ ID NO: 269830 - protein, 209 aa, Zea mays
  Clone ID: MRT4577_177682C.1.pep
MAAFPSASPSPAISASTWSMASLRTSLPALRPSPAGRLRSSFSPAAAATAASVGCLGSFSGLAPVSNLLSLGAENSSFEHRLFGIDARGRIVAMRHGRRVPKLNRPPDQRKALLRGLTTQLLKHGRIKTTKPRAKAMRKYVEKMITLAKDGSLHKRRQALAFIYEKHIVHALFAEVADRYGDREGGYTRIIPTFPRRGDNAPMAYIELV

SEQ ID NO: 269831 - protein, 164 aa, Zea mays
  Clone ID: MRT4577_177683C.1.pep
NQQQQQVQQFKPGVSQLTMVNPAVYLKLILFNPPPVGKGPKDLQQQVVQQIGPGFNQLTVANPGAYLQQLVPINQLGGAKFGGDLQQRQQLLKPLAVANPLGGTFLQQQQQMVPNNQFFFKNPALQQPNVGGANFRLQIKWTRQRGPQTDMVSQKKTKNDLNYT

SEQ ID NO: 269832 - protein, 141 aa, Zea mays
  Clone ID: MRT4577_177684C.1.pep
RGVGLSSLATPHPRFCTPLVSQSPPALSCNSLEIPHPVHCLRVGPPAARQPSAPQASRGSPSGVVPRRSPPPITHRDLPHLGRGGRSMSIVSLPPTPTERGPGALGFRSRPLPLTSWRRRSPLPPLVELKLDGRVDTPLLC

SEQ ID NO: 269833 - protein, 31 aa, Zea mays
  unsure (1)..(31): unsure at all Xaa locations
  Clone ID: MRT4577_177685C.1.pep
PKLKGIFQIKCTFPVSYELFNPPQFSLXXXX

SEQ ID NO: 269834 - protein, 48 aa, Zea mays
  Clone ID: MRT4577_177686C.1.pep
RLRSYSIGISFYTNTFRCIYIPECSAIRTALGPRIHRVQSRRVTQKME

SEQ ID NO: 269835 - protein, 256 aa, Zea mays
  unsure (1)..(256): unsure at all Xaa locations
  Clone ID: MRT4577_177687C.1.pep
MLTRSALCPARAFANRFPPAILAPSSLGATASFSTCTRPSPLPQQRNRPATTATATAKTTPCTQFPRSKWPARYASTTPAQSMANNSPGSTQPQLTWDAFFALRRTRRRIGQACSGIGAXGCHVLWAHDXSTMXDATLSAQLGGFDPFMLMGLSTLGMMGVGWLIGPIFGNQVFNLAYRGVITEFTRKDSAFFNRIXRHRVDPTASSLANPPPDYYGEKIGSVXXIGRWLKDQRAFNLTGRYRAKDVVVICVLHCT

SEQ ID NO: 269836 - protein, 113 aa, Zea mays
  unsure (1)..(113): unsure at all Xaa locations
  Clone ID: MRT4577_177688C.1.pep
PPFLFFFPRAFGLFFWSPPCPLGFGVFGPPVGPXVFFSGCPFCPPWGSFGVPSPLXXGSXXLGWFWCPFGFFGCGCLGLLLGFPSXPAWLGPFSGGXPLPSGPVCPSPPFFSS

SEQ ID NO: 269837 - protein, 62 aa, Zea mays
  Clone ID: MRT4577_177689C.1.pep
PRVRPHNNTLMGRYLRGADGAFRRLLSSTQWSWNVRYTYESRNADFCQLQRSFKSVGPSTYF

SEQ ID NO: 269838 - protein, 64 aa, Zea mays
  unsure (1)..(64): unsure at all Xaa locations
  Clone ID: MRT4577_17768C.1.pep
PATAATATVMMWLATFAMASYKLKAAAWTPVWHHRXVAASLAQAADAWLRLLRANHPDQFYFGA

SEQ ID NO: 269839 - protein, 73 aa, Zea mays
  Clone ID: MRT4577_177690C.1.pep
WRFPFRSPSPLAFLNRASSGPAFSFGFASPSFPRLLLALCFFLSAAGLLARMALLVRAFLPCSVFFGSRCPFA

SEQ ID NO: 269840 - protein, 71 aa, Zea mays
  Clone ID: MRT4577_177691C.1.pep
SFIVKKSQGSISMNSGQSHRYYFFSKTPAGPKNFLVKPRGAPKLLRESPGSPPPKRPTDLFWEGKLVGLPV

SEQ ID NO: 269841 - protein, 126 aa, Zea mays
  Clone ID: MRT4577_177692C.1.pep
NPGTELCLNGGPKKKREGNKPKFWGFTSHGPLDSPQGISSGKNFGGKKFGGNPGTWGGTTLGGNYRKGGGVTRGRKLGTNLGEKREIRDSGGKRLWVKNGQKKRAEKKRGKGGGVKGGEKKKKGGG

SEQ ID NO: 269842 - protein, 168 aa, Zea mays
  Clone ID: MRT4577_177693C.1.pep
EVLKEFGHSSDPDERGRLSWLVVHQYGRVGHIIKLGREGDYLQCTRHLGCPWRLRPPRTTSSLFVYDGTRAARSIMEAGGEWRVDGVPHGERMSSILIYAEGRTRTTARAFFFYFYVFLSLTFCYNWVVPLVRRSEPTNSSLAWWRSMEFLAFTTHIWCIYSCVRVRK

SEQ ID NO: 269843 - protein, 137 aa, Zea mays
  Clone ID: MRT4577_177694C.1.pep
AHHSMYVYVISLHYDLTIIQVVHQYGRVGHIIKLGREGDDLQCTRHLGWPWRLRPPRTTSSLFVYDGTRAARSIMEAGGEWRVDGVPHGERMSSILIYAEGRTRTTARASFFYFYVFLSLTFCYNWVVPLVRRTEPT

SEQ ID NO: 269844 - protein, 41 aa, Zea mays
  Clone ID: MRT4577_177695C.1.pep
GFWFLQVCVALVLARAITPFLTGQVPFTILLKWKFGLALST

SEQ ID NO: 269845 - protein, 105 aa, Zea mays
  unsure (1)..(105): unsure at all Xaa locations
  Clone ID: MRT4577_177696C.1.pep
MSPLITAAMNHVVAHPDIRSHLARPNDASFSRHHLPSSSPQTSKRRRNXITFTTRTARVSSQNGVHMLSPSEIPQSDWSPSDFTFGGDTSTYLFFLSSHDDGHGE

SEQ ID NO: 269846 - protein, 136 aa, Zea mays
  Clone ID: MRT4577_177697C.1.pep
PQGAAGNYGGDPGGRKTQRSQRGATKSALAKKTRANKFQTGPWAERRGNHGLARAPPGFGLKTRVQTPAFPLICFPARLSTGGQERPRFSWSKTPGPPACSQPPFREAAPPPLPPALPLVWTHPSICLGRCPPMGY

SEQ ID NO: 269847 - protein, 97 aa, Zea mays
  unsure (1)..(97): unsure at all Xaa locations
  Clone ID: MRT4577_177698C.1.pep
VXXPRGLQPGGLPFGQLQFLKLRCHNSQGSXGTNCTVYYKPPADKKWHFKGRLPPKKTQXLQRSTSXPKSASXGPQRPRGVQRDPQHFKGSPPKGTW

SEQ ID NO: 269848 - protein, 95 aa, Zea mays
  unsure (1)..(95): unsure at all Xaa locations
  Clone ID: MRT4577_177699C.1.pep
ENIGCVMTGMTADSRSQVQRARYEAANWKYKYGYEIPVDMLCKRIADIXQVYTQNAEMRPLGCCMILIGIDEEQGPQVYKCDPAGYYCGFKATAA

SEQ ID NO: 269849 - protein, 141 aa, Zea mays
  Clone ID: MRT4577_17769C.1.pep
QSDRKFLGASRAGGSVDEIRCSSGDEFGFGNYYGGPSPEDEDLHRDESDNSGVISRAADIVETAKVIVGALWNVGSRSIWGAADSENSPTEFGNGADGKSRAQLRRASTGGFDNRSDDGQSTSFQQHSTILDKQPSHDHQT

SEQ ID NO: 269850 - protein, 58 aa, Zea mays
  Clone ID: MRT4577_1776C.1.pep
LHSTHESYEDCCFSFYCRNLKGQNGLYLDIVLLNHLTTVPSVFCTIWAPFSLVFFLFV

SEQ ID NO: 269851 - protein, 114 aa, Zea mays
  unsure (1)..(114): unsure at all Xaa locations
  Clone ID: MRT4577_177700C.1.pep
RLTIQTIATQQEHSVXPXLSQXDEENPDANWQQQERASNQRALAHLFAYQQQQQXQQVAXALGQRAQDNRAADLQQQQLTASIPLXVQRKAPTNQQQQWKQQDAPAMTQLPRAN

SEQ ID NO: 269852 - protein, 179 aa, Zea mays
  Clone ID: MRT4577_177701C.1.pep
LGTSRPAGSPSTVTSLPPSGGDFAPSLMPRSPLPRCAPLLAASTSSWRWGSSDACSASCSNSPVCHSQRSAPQTQASSQPYEVPTHGPTTQKTLGTILRSLRYDINLKFFCMLTTPPSKAQKLCSTRSCTSATKTWMLPIKTSTTPKISCMTTYCLMEQTHILSTLVYAKLFTPFATDT

SEQ ID NO: 269853 - protein, 87 aa, Zea mays
  Clone ID: MRT4577_177702C.1.pep
IPEFSLGQIINRSGVLCKKDVAAPKKISGKRKKFALTGLFVFLAKHSKTKKKRESFLTGPSRPPKISAVLYSIVICKCSSPLSLVAG

SEQ ID NO: 269854 - protein, 182 aa, Zea mays
  unsure (1)..(182): unsure at all Xaa locations
  Clone ID: MRT4577_177703C.1.pep
XGXXQAPRXNAXVPLXVLXRSSFPPXAGFCGSVGRQAXXGAPDACVDGGGVRLXXGXTRRXNQXXLXLQQPSMQRXXTXXPRITXAGXLXXQXTXSPXREGVLCNXXKLWRXPTSXRXTPAWXVQLTLPXXRVPSKPTGXSGQKPXPHRAPNXXASGGVLGYLPTHTGTLCNHRESPLSPAA

SEQ ID NO: 269855 - protein, 91 aa, Zea mays
  Clone ID: MRT4577_177704C.1.pep
LSQISLRGGGPHKLEIPISFLKLCNLYCAYRSIDSCMDYHSTGSGFHAFQATSLFSFFLLSQTQPLELYGAKRRQLNDVIRLTTMRIISAI

SEQ ID NO: 269856 - protein, 62 aa, Zea mays
  Clone ID: MRT4577_177705C.1.pep
MGCIVFQKNAPNLWSNCHVCFPTQKGSFVNRPKKKKKKKKKKKKKKKKKKKKKKKTREGRRY

SEQ ID NO: 269857 - protein, 226 aa, Zea mays
  unsure (1)..(226): unsure at all Xaa locations
  Clone ID: MRT4577_177706C.1.pep
MAAAVTRRVGLHVEATNGADDESRRNSSAAADDSPLAKRINDAAAKGNDVWVAAQEGDMPAAAXGNSSQPPLLFRTMKVKGSILHPYRFVILLRLVAIVAFFVWRIRNRNRDGVWLWAMSMVGDVWFGFSWVLNQLPKLNPIKRVPDLAAIRDQYEQPSASGGESNNKLPGIDVFLTTVDPVDEPILYTVNSVLSILATDYPVDKYACYLSDDGGALVHYEAMLEV

SEQ ID NO: 269858 - protein, 93 aa, Zea mays
  Clone ID: MRT4577_177707C.1.pep
WLDSLPQHGPSRDHRHKLAIGTVVGSVTPTPAGRCVPGLPVAAVRHRYRKVQGMLVRDHWRALRHYRSFTVIHAVPVRRARHICSSSWCPMKS

SEQ ID NO: 269859 - protein, 96 aa, Zea mays
  Clone ID: MRT4577_177708C.1.pep
SFCCMLSVGAVVCAYLGGCYKGSNEALCSALLRERGRVSVPRGAKAFPTGRRKPPGSWITTDPPRSGHDPTEKGLGGRGRRLGSPHTPVKAPRRGP

SEQ ID NO: 269860 - protein, 423 aa, Zea mays
  Clone ID: MRT4577_177709C.1.pep
YQFTAWVEAVDVDTNSPRVEEEEAKEDDDGKEDEDAGVAALGVKERLGLLRSQISGKLDSIQQRAAAVAAKRRLLAGRRRKVAEEATSVASRHKDLERELEEACEAEDFERAESISDSLAALEKEKDRLSTALRGAELDYDSVDSELQEVLESRIAAEEEAAALMEQFAKDATEHANSASEHAQELSSKEIEEWQTSLELLETKKLEMEVETRLVLEARSGLEGSIEHLVEEDKLEKDMLSKKGEILTKELAELLELVRLKEAEIAENNARIHEVQERISAVVSRFHGSQSDIDLKLSSLKEAQCKLDLETEALVLKKNEIDNFISLTEQKDSELREIIGACFSEAKTCQQSVEIRRKLASSILKSREDRIGLLKMEEEILQDIQMLRQKITDARTTLQEVSSRRTSIQQEMDSFKQKLSFID

SEQ ID NO: 269861 - protein, 104 aa, Zea mays
  Clone ID: MRT4577_17770C.1.pep
PTPLVRGGRSTKRCFGPQPGRGRMRTSTSSTGSGLRRSRTGAHHRPPMPTTRKTQRGGGLLYGVRDPSGRREGGAECTQPEGRGTKATGARPHRTRLAAEDRSA

SEQ ID NO: 269862 - protein, 71 aa, Zea mays
  Clone ID: MRT4577_177710C.1.pep
IIERNICSMLNKKKPLQPIKLITPYRNIWIQKNGKHCDHPVSLEEYPPSIHHWPKPTRPRTRGRTRGRTRG

SEQ ID NO: 269863 - protein, 42 aa, Zea mays
  Clone ID: MRT4577_177711C.1.pep
GLFGHLGNDPSLPLGAHHQAPMDQLNNEGLVGPNEHGRSGWI

SEQ ID NO: 269864 - protein, 116 aa, Zea mays
  unsure (1)..(116): unsure at all Xaa locations
  Clone ID: MRT4577_177712C.1.pep
MWVFYLISLPLTLGMVVVTLRYFAGPAVPRYVVVTVGYAWFCSLSIIILVPADIWQXAVVPTIQGYEDAGDFTVKERLKTSIHMNLLFYSIVGAIGLIGLILLLIMHKAWYVQSLL

SEQ ID NO: 269865 - protein, 440 aa, Zea mays
  unsure (1)..(440): unsure at all Xaa locations
  Clone ID: MRT4577_177713C.1.pep
MWVFYLISLPLTLGMVVVTLRYFAGPAVPRYVVATVGYAWFCSLSIIILVPADIWQTLTASAKGGIGFFWSWSYWSTFILTWAVVPTIQGYEDAGDFTVKERLKTSIHMNLLFYSIVGAIGLIGVILLLIMHRAWDGGIVGFAMACSNTFGLVTGAFLLGFGLSEIPRNIWKNAYWSHRQKVLSHRVAKMAVKLDNAHQEYSNAIVVAQATSNQMSKRDILRPYMDIIDNMLSQMLREDPSFKPSGGRFGENDMDYDTDDKSMATLRRQLRRAHEEYYRGKSEYMTCVMEALKLEDTIKNYERRDASGWKYVSSFRDRRSGTLGPILDTXYSSYLPCIGFHNSLKPASQLXRFLLFLVLLILRCGXFDGADSGILCCIXEFIWQCILRKQLQKAFAVILGCMSAAILLAEATLLPSVDLSLFSILIKVVGKQEVLVQVRN

SEQ ID NO: 269866 - protein, 129 aa, Zea mays
  Clone ID: MRT4577_177714C.1.pep
MSHEHNGDLEDGEVALLLLLFERSGCAAAGACSLSDLAVTQTAVPSKANVYAVTVENRCICTQANVKLACDGFSSSVAVDPGVLSVDGKLCTLNGGRPIGMGPEYAVKFSYASPSQFAFKPVSSSIACS

SEQ ID NO: 269867 - protein, 55 aa, Zea mays
  Clone ID: MRT4577_177715C.1.pep
IFMYVCTSVSRVQVFCGSSSELFYVQYHNRADQPSERCIEVAPHGESIHRRNRGH

SEQ ID NO: 269868 - protein, 49 aa, Zea mays
  Clone ID: MRT4577_177716C.1.pep
SARGTAACYPMGPMFYCLGPFNELILLNDTIGYSENACCEGRLLTSSCG

SEQ ID NO: 269869 - protein, 76 aa, Zea mays
  Clone ID: MRT4577_177717C.1.pep
EWVNNINLNMYVGMCLFMRMYPLSHLSPVQMHMRIMQPSDVIRDLTVGEKFYNWVQMARVWRINCETSFAVCYVLL

SEQ ID NO: 269870 - protein, 92 aa, Zea mays
  Clone ID: MRT4577_177718C.1.pep
SSHHWHRLLLRFKVLTTQDPTMGNELRICTRITCIIDIAVIDSKVLKKRKEALCYRTSTIGQEHQLQPNYATETYTSNQLIIIPGEEAHKRE

SEQ ID NO: 269871 - protein, 147 aa, Zea mays
  Clone ID: MRT4577_177719C.1.pep
VPSSSGPGHQVRLPGLVFFLARTLRVPTPSLISVRPPHRRRAPLRAGDVLFFCRLRALSLLSFRGSAPTSASESPTKLSRRWQRPAAFQLTISRSCRQRTSPATSSPSTTVQTYFDSWTRISIEGVFGGLMSFVLFWTFAYDIVHIF

SEQ ID NO: 269872 - protein, 158 aa, Zea mays
  Clone ID: MRT4577_17771C.1.pep
PVRAFLIPTPYYPGFDRDLKWRTGAEIVPVHCTSGNGFRLTRAALDDAYRRAQKLRLRVKGVLITNPSNPLGTTSPRADLEMLVDFVAAKGIHLVSDEIYSGTVFADPGFVSVLEVVAARAATDDGVCVGPLSDRVHVAYSLSKDLGLPAFRVGAIYS

SEQ ID NO: 269873 - protein, 133 aa, Zea mays
  Clone ID: MRT4577_177720C.1.pep
APVVAQDEGRLVVACRGHADAVDPAALNGQLQELMRLPVPGDAGRVRRRRPGKAPAVGVRRRAAGPREQAEGMYLRWRRRVLSRSGAWREREGAVLVADAEAVGVRGEAVGGVVGVGRGGGQQVVVLADGDVS

SEQ ID NO: 269874 - protein, 184 aa, Zea mays
  Clone ID: MRT4577_177721C.1.pep
NLASSDSLTHLRPSAAPSPSAAPRRRRPVFLPPTSAVPLFFPRLCPNFCIRISHEVVTAMAATGGVSTDDIPILQAENLTSNVKSVHYSRTFLSIIGGVVAGIWGFTGLTGFVFYFLIMMVASIGLLAKSKFSVQTYFDSWTRISIEGVFGGLMSFVLFWTYPFSSIIYKQSCSYSISVLHVLV

SEQ ID NO: 269875 - protein, 211 aa, Zea mays
  Clone ID: MRT4577_177722C.1.pep
LARTLRVPTPSCHRFVSDCNQNRSTNQSLYKLEKQIVPTNQSDGNEQGLTHLRPSAAPSPSAAPRRRRPVFLPPTSAVPLFFPRFCPNFCIRISHEVVTAMAATGGVSTDDIPILQAENLTSNVKSVHYSRTFLSIIGGVVAGIWGFTGLTGFVFYFLIMMVASIGLLAKSKFSVQTYFDSWTRISIEGVFGGLMSFVLFWTFAYDIVHIF

SEQ ID NO: 269876 - protein, 108 aa, Zea mays
  unsure (1)..(108): unsure at all Xaa locations
  Clone ID: MRT4577_177723C.1.pep
SGGXSXXLHLXXGRQXGGXVMMXXAXXAAGAPXXPRLXAPRFLAXXPAXSFPPXPVTXPARGVXTRXXARXXSSCVRHSXGIYVLAXPAXXPFSSLSTLPFAIHFPFP

SEQ ID NO: 269877 - protein, 124 aa, Zea mays
  Clone ID: MRT4577_177724C.1.pep
IAGVSIKLPGPRPKATCMRRRLRSTHAGQIGRLSRGGSLLPRDYRRGRRGVINWTPRSDRSVSPRKTSARRSSKADRARDWQVHSCVTVQRSPVDEPRRPRTPSYPPPWRSSSRRLIGTLLGTR

SEQ ID NO: 269878 - protein, 83 aa, Zea mays
  Clone ID: MRT4577_177725C.1.pep
TGQAEGQDNHKRGPAQGPERGAPQAPPPPPPGPRQGRQSDRRGEDKRRKTPSQATARAGTSKTRSRKRWHFESRNVPARAAAR

SEQ ID NO: 269879 - protein, 39 aa, Zea mays
  Clone ID: MRT4577_177726C.1.pep
LHSVRKTQELRTTRTTLEDTMETLARLQDRNSCPVRRLP

SEQ ID NO: 269880 - protein, 72 aa, Zea mays
  Clone ID: MRT4577_177727C.1.pep
HSCQSIVVAHHAVIDLMPVEVGVPSVGGGLQEPAFRGDGRSQPCRLARRHADGGPGALSLSASIAILVSYYS

SEQ ID NO: 269881 - protein, 73 aa, Zea mays
  Clone ID: MRT4577_177728C.1.pep
RGYPLKSHAQIGLKKNRFPNVKSQQHTLNKQGMCNNHKNTLKKWLEAFRTGQSQKALNNNSRHSQKDGDYFFC

SEQ ID NO: 269882 - protein, 107 aa, Zea mays
  Clone ID: MRT4577_177729C.1.pep
QNMAHSMAVASTMPMDGPIYPMDPSGNPMLPAALLAQYPALAQLNWSAPDVNAGMDDEVSGRSSFDASDYDENEDGGYVSGPRTGFGEGGLGQSFGEMGYASDFWGR

SEQ ID NO: 269883 - protein, 141 aa, Zea mays
  unsure (1)..(141): unsure at all Xaa locations
  Clone ID: MRT4577_17772C.1.pep
GETKGEAKADTDXHQRKAETEKHADASTAPPGGDGTTEEQPETTARAQPGTHSKPEGTRNADDNHNSRHPQPDKAAEDGPNDTKARNSXPHADTAADPTTTRTTTARRPADDDDTTTPRGDGDGDGHEHKGATSAAGAKRK

SEQ ID NO: 269884 - protein, 65 aa, Zea mays
  unsure (1)..(65): unsure at all Xaa locations
  Clone ID: MRT4577_177730C.1.pep
VVGKCIVDEELWLWVALLFLLFWRKLPPIKKNPPKGKKKKRKKKKRNKKKKKKKKKGRTIWESXX

SEQ ID NO: 269885 - protein, 354 aa, Zea mays
  Clone ID: MRT4577_177731C.1.pep
MGSLRDGKTNSSSGRRWCAVTGGRGFMARHLVAALLRSGEWLVRVTDLAPDVVLGLGDTEDVLDDALRDGRAVYASADVCNLDQLIQAFEGVEVVFHTAAADPSKNDQQLHYKVNVEGTKNVVDACMICKVKRLIHTSSIAVVFDGVNGLLDANESLPYPDKFPDAYGQTKAEAEKIVMKANGISGLLTCCIRPGSIFGPGDIVILPTLDQCGKTHFVFGDGKNCDDFVYVENVVHGHICAEKTLSTMEGAKTSGGKAYFITNTEPMNMWDFLYLLQEELGYKRLFKIRIPLIVIQAVSYLVEWGYKVLHHYGMCQPQVLTPARIKYLTVHRTFSCNKAAEELGYKPIVTLMVS

SEQ ID NO: 269886 - protein, 134 aa, Zea mays
  unsure (1)..(134): unsure at all Xaa locations
  Clone ID: MRT4577_177732C.1.pep
QNRKGVLRFVNQTTLKRAIVFVGCLVLXVATAFAMPMPCPCPGLQGLYGAGAGLTTMXMGAGGAVLPTREYSXRQPQXCTPAGGGPPYLRPGGGHDEAXVTSRVRQQXCQQQXMTMMDVQSVAQQLQMMMQLER

SEQ ID NO: 269887 - protein, 61 aa, Zea mays
  Clone ID: MRT4577_177733C.1.pep
GRCSRRCRRCRGHVMSVTYMFKRKDRQTSRGSQESQHGNSVGSSCAIVGGLWVRSASGELW

SEQ ID NO: 269888 - protein, 73 aa, Zea mays
  Clone ID: MRT4577_177734C.1.pep
KKKKGTCFAIILFEFFLPLGGCAPLGQGRWRHGFFYLRRLAQWGKWGKGRNISFPPKFFSPPPPLKFSHSKKT

SEQ ID NO: 269889 - protein, 151 aa, Zea mays
  Clone ID: MRT4577_177735C.1.pep
GRVGGRVGGRVGGRAGGWVGVFVAVSSHLSSLPMHANSPLLLQPKRWPWRCAATRTPEYGNSGKWWWWPQRWAWTGSTSWTEASAVRYQVRQLSGVLLSPLLVTMFWVENRALVGGRVDPMATPSRHVAPSSGSRRWRRTGRSRAAAFSRR

SEQ ID NO: 269890 - protein, 46 aa, Zea mays
  Clone ID: MRT4577_177736C.1.pep
GECLKLVVQDNELGSGRGYWETSEENLDRLRELYSEVEDKIEGIDR

SEQ ID NO: 269891 - protein, 74 aa, Zea mays
  Clone ID: MRT4577_177737C.1.pep
RRRVWVWGAARVTPAVPMTTLHMDGPGPSARERSNTSCDLHPAEAPTAFWDSYLHELIHNLEHCSLSTVAVQPM

SEQ ID NO: 269892 - protein, 54 aa, Zea mays
  Clone ID: MRT4577_177738C.1.pep
ISPLTNGARKSVFRNIKPISECLSNELFTATKGFSTSYALKKKPQIESVSKANR

SEQ ID NO: 269893 - protein, 100 aa, Zea mays
  unsure (1)..(100): unsure at all Xaa locations
  Clone ID: MRT4577_177739C.1.pep
HSKRRHQEAYYQEVDYCSEEEWSVAPAGLSRHGGGXQQHVALEKFEEVVSGSRAGANHHHHHGHHGGHGFVEREIRVEEDINTCTGEVLERMVSFLARAN

SEQ ID NO: 269894 - protein, 72 aa, Zea mays
  Clone ID: MRT4577_17773C.1.pep
TFFWAPPKTFFLWGRGGSFKFGGKKAPLLLNLGEVGPPNGKSTPPFFFSTNYPVIRVMYRQNPFYFLGWGGP

SEQ ID NO: 269895 - protein, 42 aa, Zea mays
  Clone ID: MRT4577_177740C.1.pep
PPPPPALWLKSWKSYGHWPILILFTWLDIIFHLLPLIERLMS

SEQ ID NO: 269896 - protein, 80 aa, Zea mays
  Clone ID: MRT4577_177741C.1.pep
SDMNPFNGLHQFKQPTQQAFLYENYHHYVLEHLEENYHDLIFQGIQPSVFASKKMSIFSVHREGEADPLPSNWYMAENFI

SEQ ID NO: 269897 - protein, 36 aa, Zea mays
  Clone ID: MRT4577_177742C.1.pep
NSSNPYFNSTWRRNFVGGFILDMGVHFIAGLRMVTS

SEQ ID NO: 269898 - protein, 63 aa, Zea mays
  Clone ID: MRT4577_177743C.1.pep
MKGSRGAKQENINDKKETGDGTDMGEEEKRRMIRHTHQYKKDKKAKEKDGSQPKGDKDEDGKK

SEQ ID NO: 269899 - protein, 81 aa, Zea mays
  Clone ID: MRT4577_177744C.1.pep
CIQNVCKPQYVQKPQISRRLLPSSWLVSVFHLDGQWRSSISLCAASQVVALLAGPSVATSGDALEAAFSGISPAARLERLE

SEQ ID NO: 269900 - protein, 86 aa, Zea mays
  Clone ID: MRT4577_177745C.1.pep
SRGGACCLLGARPLGGGAGLRLWRPAGVWSGSAVRGLQASGGFGAVPVCGRLAPGLFVARWGKLNLCLSVAGSAPVSGRVGCVPHS

SEQ ID NO: 269901 - protein, 57 aa, Zea mays
  Clone ID: MRT4577_177746C.1.pep
LDLYYNGPNVATYKRSTWLFAQYRTGKNHTSLNGTEKRKQLERRPHVSHVTQNLKGS

SEQ ID NO: 269902 - protein, 92 aa, Zea mays
  Clone ID: MRT4577_177747C.1.pep
KCRILPPARATSSSFAVLLPSKLLLRTDAGGQRVDPLAGQQPLRRNRLQDDRSCRYYQVLLPCMREGHRGGHGPSRSSARFASWNIHQRDGL

SEQ ID NO: 269903 - protein, 163 aa, Zea mays
  unsure (1)..(163): unsure at all Xaa locations
  Clone ID: MRT4577_177748C.1.pep
ALEQRFLFLTCXTPVMAIVTAIISIVMDPWHDFRASHFFDSSAHIIRSXLLLLLGGALAFFMVLTEYVLVSVTSAVTVTVAGIVKEAVTILVAVLFFNDPFTWLKALGLAIIIFGVSLFNIYKYKRFKKGHYNENAGTNTQSSNWTSKYVILDEDTEAQDDTG

SEQ ID NO: 269904 - protein, 98 aa, Zea mays
  Clone ID: MRT4577_17774C.1.pep
MQAACNRAKWAHLSDFQRAQHGSPRPRVMQPARRSLRASNCTATHTTATPPRLRNQHRDSRQPSVRPSSASQARWDRERGIPRKGPFFVKETGFEPPY

SEQ ID NO: 269905 - protein, 263 aa, Zea mays
  Clone ID: MRT4577_177751C.1.pep
IIPALSHSLSSSLAGYLPSLFLSTEGFSWHLPSPLWFCAEAPRKQPLSSLNWPWRSAPRSLRRSSSRPLPPPPGWGALLWPMAARIRGAEQHPCSSFLPPMSTDAMEPNPSSPSLIQRSRLCSLSPPSGWRLPCSSMAPLLAGILLAYVLGAPGAAPLSIFSPGGCRFSLWLPPCRSPDSLDASHGRLPLPPCARHPSLHLSSAPHGARAPCPRRSPAPFGGPVLMAAVAMSAMSSSLCWALYSTGPEFSMGRAPGLQGVGLL

SEQ ID NO: 269906 - protein, 142 aa, Zea mays
  unsure (1)..(142): unsure at all Xaa locations
  Clone ID: MRT4577_177752C.1.pep
HWALHSNIKVLHSQALGQSMRPTGTSSCEEWPQQQENCGGVDDYLMEEIRMRSHEILENEEMQQMLRLLSTGGAGTNLXRWLQFPFVHACXPSPKLSYEDDRTRAPGKAVVGWLKIKAAMRWGIFVRKKAAERRAQLVELDD

SEQ ID NO: 269907 - protein, 151 aa, Zea mays; identical to SEQ ID NO: 195972
  Clone ID: MRT4577_177753C.1.pep

SEQ ID NO: 269908 - protein, 181 aa, Zea mays
  Clone ID: MRT4577_177754C.1.pep
MGLTFTKLFSRLFAKKEMRILMVGLDAAGKTTILYKLKLGEIVTTIPTIGFNVETVEYKNISFTVWDVGGQDKIRPLWRHYFQNTQGLIFVVDSNDRERVVEARDELHRMLNEDELRDAVLLVFANKQDLPNAMNAAEITDKLGLHSLRQRHWYIQSTCATSGEGLYEGLDWLSNNIANKA

SEQ ID NO: 269909 - protein, 216 aa, Zea mays
  Clone ID: MRT4577_177755C.1.pep
LPHFSSPAIRARTRREEKGSPDHQGAASRSRGGAEMGLTFTKLFSRLFAKKEMRILMVGLDAAGKTTILYKLKLGEIVTTIPTIGFNVETVEYKNISFTVWDVGGQDKIRPLWRHYFQNTQGLIFVVDSNDRERVVEARDELHRMLNEDELRDAVLLVFANKQDLPNAMNAAEITDKLGLHSLRQRHWYIQSTCATSGEGLYEGLDWLSNNIANKA

SEQ ID NO: 269910 - protein, 51 aa, Zea mays
  Clone ID: MRT4577_177756C.1.pep
SPLLTFRQFIITAKTPNTRRDFKNGVRSLYYTSLVRKGQLLFLKLLMPSES

SEQ ID NO: 269911 - protein, 305 aa, Zea mays
  Clone ID: MRT4577_177757C.1.pep
MKFGKSLSGQIVETLPEWRDKFLSYKDLKKRLKLIGAGNGAERQPKRARRDDSGEADAAAAAAAMTPEEAEFMQLLEAELDKFNSFFVEKEEEYIIRQKELQDRVARAAGRESKEELMRVRKEIVDFHGEMVLLENYSALNYTGLVKILKKYDKRTGALIRLPFIQKVLQQPFFTTDLLYKLVKQCEAMLEQLLPVSEASVSSEDGKGDSNDEEKLAKPSSSLVNGGGMPELDEIEYMESMYMKSTVAALRSLKEIRGKSSTVSMFSLPPLQGNNAQDSYQIRAEQLDEEPERWSKVTVIEQAAK

SEQ ID NO: 269912 - protein, 108 aa, Zea mays
  Clone ID: MRT4577_177758C.1.pep
LPSFWKGDFSPAGNLFLVFPRFYCFFLILGSLVLLRGFPFSFSISLKHQGCPFFETSLFLAPFLSFLGVGFFPLPLLPFFQVRAVSRGAQRGQIFGFSFFQRKFFTPF

SEQ ID NO: 269913 - protein, 258 aa, Zea mays
  unsure (1)..(258): unsure at all Xaa locations
  Clone ID: MRT4577_177759C.1.pep
KTSSTFASRRPSTSFRSSSPAQPQGRGLAGRQGGGGGLGQSISGIVRMAVFWYFAAKFFGPKRPPADPGILMSNLFQKGEPMDMWMYLSESDKFNDFANEDALIWHEANIPYAVWGPTSTRTRSLTYYPSEALKHNGSLYAHVYFARSGYPVDPTDPEYEQKSAFGRTHPVVAFLPKSKAGKKKSLLXDSEEPEEQAPPKGNKEFEDKDEGPTEYLSYWKPNVTVNLVEDFTRYTQHNVPAIGAPYLNVDPATGDNYP

SEQ ID NO: 269914 - protein, 50 aa, Zea mays
  Clone ID: MRT4577_17775C.1.pep
PLTHGGRPKSEDSQNLHKGYIIPFKPSRYIRMGTYATIRVGKNLTSLTYL

SEQ ID NO: 269915 - protein, 45 aa, Zea mays
  unsure (1)..(45): unsure at all Xaa locations
  Clone ID: MRT4577_177760C.1.pep
MRLMLVALALLVLDASGTYTHTSGVXGCNPPPSIYLPATAHLSSP

SEQ ID NO: 269916 - protein, 62 aa, Zea mays
  Clone ID: MRT4577_177761C.1.pep
QLQLTCITSLSPAVQLLYPHPWNTPRCTPQIHLTKPHLLLEQTLRKILLGLTLAWVYMGCTH

SEQ ID NO: 269917 - protein, 353 aa, Zea mays
  Clone ID: MRT4577_177762C.1.pep
KELALNLEVGPISMTKWQLFLQIEQSFQVHRSYGSMLEGEADELKRVFLEGNPYLLGLTMIVSLLHSLFDFLAFKNDIQFWNKNKSMEGLSAKSVVLNFVCQLIVFLYLLDNDTSWMILASSGIGVCIEFWKIGKAMHIEVDRSGKIPMLRFRDRESYAQNKTKEYDAIAMKYLTYVLFLLVIGFSIYSLKYEKHKSWYSWILSSMTSCVYMFGFIMMCPQLFINYKLKSVAHMPWRQMTYKFLNTIIDDLFAFVIKMPMLHRLSVFRDDVIFLIYVYQRWKYPVDKKRVNEFGFGGEEEPAAQETLEGSDPAAAAAATEAGERRARKPSDLQSFDHPNVARPSAAPALPQRV

SEQ ID NO: 269918 - protein, 151 aa, Zea mays
  unsure (1)..(151): unsure at all Xaa locations
  Clone ID: MRT4577_177763C.1.pep
VIDDCLHINACRNAKRWNSAFHNVTAMVGAGALGLPYAMFKVGXWPGIAELVLTWIITLNTMRQMVQMHYMAPGKRVNRDHHMEQHSFHXRLGLRSPVPQQLTWEVSLNIDYMDTGGKSLKKFHDTFCGDDNHRCKGRDIKLTYFIMIFNS

SEQ ID NO: 269919 - protein, 141 aa, Zea mays
  Clone ID: MRT4577_177764C.1.pep
YVVIPFAYKSHCDAISQQIRTFIQMRTNLKVVDNSGAKRVMCIQSLRGKKGARLGDMIIGSVKEAQPRGKVKKGDVVYGVVVRAAMKKGRSDGSEVQFDDNAVVLVNKKGELIGTRVFGPVPHELRKKKHLKILALAEHIV

SEQ ID NO: 269920 - protein, 603 aa, Zea mays
  Clone ID: MRT4577_177765C.1.pep
MSQPAAAVAAEAQPQGRGLAGRQGGGGGLGQSIAGIVRMAVFWYFAAKFFGPKRPPADPGILMSNLFQKGEPMDMWMYLSESDKFNDFANEDALIWHEANIPYAVWGPTSTRTRSLTYYPSEALKHNGSLYAHVYFARSGYPVDPTDPEYEQKSAFGRTHPVVAFLPKSKAGKKKSLLGDSEEPEEQAPPKENKEFEDKDEGPTEYLSYWKPNVTINLVEDFTRYPNNNVPPIVAPYLNVDPVTGDYYPTVFFNEFWLLKDKLIALNETVEELPLNLEVGPISMTKWQLFLQIEQSFQVHRSYGSMLEGEADELKRVFLEGNPYLLGLTMVVSLLHSLFDFLAFKNDIQFWNKNKSMEGLSAKSVVLNFVCQLVVFLYLLDNDTSWMILASSGVGVCIEFWKIGKAMHIEVDRSGKIPMLRFRDRESYAQNKTKEYDAIAMKYLTYVLFLLVVGFSIYSLKYEKHKSWYSWILSSMTSCVYMFGFIMMCPQLFINYKLKSVAHMPWRQMTYKFLNTIIDDLFAFVIKMPMLHRLSVFRDDVIFLIYLYQRWKYPVDKKRVNEFGFGGEDEPAAQEAVEGSDSAAAPQLTEAGSETSTEDKKTK

SEQ ID NO: 269921 - protein, 200 aa, Zea mays
  Clone ID: MRT4577_177766C.1.pep
MSSSKSRSVREKDASPRRLLRCTFFKLQPPSGASISKLVAEMGSGRPRVTLIEADVKNNNQDTKMIPGIDIDNVEDMNDGSVVVSAVITNVGAAPCITSEASLANMHSEDVVPETRGSDYVKTEAYLGKHGVCTNSSLRSDLEWIRKGYGQLLSQNASLKEVQLLFRRIALALSGMETLSAKHEDMVDVNLKPTSNQSNS

SEQ ID NO: 269922 - protein, 116 aa, Zea mays
  Clone ID: MRT4577_177767C.1.pep
LLDIDGNAFSGRYHAFLRSNSLIYKMALFREWQDEWIDAWVHYVPLGMKGTDTVESVRYFAEEEEGMIQAPRLAKQGNEWAQKVLRNEDLEVWFFRLLLENGRLIDDNRENIGYMP

SEQ ID NO: 269923 - protein, 70 aa, Zea mays
  unsure (1)..(70): unsure at all Xaa locations
  Clone ID: MRT4577_177768C.1.pep
NIXDCSPXLCLAHTVGLQLXXXXPXXTPXNXADSXXTPLAPXXXTXXXGRRLXYLHXYHRTQXTXXXETA

SEQ ID NO: 269924 - protein, 102 aa, Zea mays
  Clone ID: MRT4577_177769C.1.pep
RFIPPPIKKNWLPPMVRAQIPGVTPGRGIKFFLGILKKAFLCGGWGCSPCDIASVFPRDKLWYVGPPRGDLDTPPFFFFKIHGSFACFSPKPIFCCHLWGPM

SEQ ID NO: 269925 - protein, 85 aa, Zea mays
  unsure (1)..(85): unsure at all Xaa locations
  Clone ID: MRT4577_17776C.1.pep
GPXXKGGEEKEXXKEGPKKKXXKEGEGXETPEXGDEGEXXXTGTXPEGTKXDXSXEXGEPPQGKPGQGQGKKGGEQGNKTXKKGE

SEQ ID NO: 269926 - protein, 69 aa, Zea mays
  Clone ID: MRT4577_177770C.1.pep
KREPVIINETQPQAHPYLCEVHNMAPYQQYQLACNHGNQWAQSSCVRAVLQYAIRCRQGKRRTWRAGYV

SEQ ID NO: 269927 - protein, 70 aa, Zea mays
  Clone ID: MRT4577_177771C.1.pep
VIKVIVSIDRRSGVTLCCCRFIHGMRVQVHGICVSRPFRTMFYHVHGSLPCNSIYGIKCIMKGVQERTLL

SEQ ID NO: 269928 - protein, 142 aa, Zea mays
  unsure (1)..(142): unsure at all Xaa locations
  Clone ID: MRT4577_177772C.1.pep
FVYKILIFLYYHIFFFIIFIFLFYFIRFFLFWYLYPFLIFYXFIIFHFVILFIIFFLXFIILFFXLFFFILIYFIYIXFFFIYFYFHLFYIILYYYFYFFPYYYFLXFFFNFFFFYLFLFFLLYFIFFSFFLYLFFFLFSIF

SEQ ID NO: 269929 - protein, 49 aa, Zea mays
  Clone ID: MRT4577_177773C.1.pep
RDCSIQMAHKLPNEVLIDLLAKLPVASSLSDLYTDTPNDAHGTICPHVF

SEQ ID NO: 269930 - protein, 70 aa, Zea mays
  Clone ID: MRT4577_177774C.1.pep
LESKCTSCCKGFGKSTRLGPSAPCHSGRCHAQALSSQLSLGQNPPIFTSRHVINCLRGSPLIFQDADPYA

SEQ ID NO: 269931 - protein, 67 aa, Zea mays
  Clone ID: MRT4577_177775C.1.pep
TKLIQKVVVQVVPFWLGSVGISNLAFGGSQLFPLKILESHICECKCTVESLCVIASIVSKIDIVCFP

SEQ ID NO: 269932 - protein, 101 aa, Zea mays
  unsure (1)..(101): unsure at all Xaa locations
  Clone ID: MRT4577_177776C.1.pep
RPRVRQVMSYLTAFLTFDGALNVDVNEFQTILVPYRRIHFMLSYYAPLISAEKAXHEQLSVAEITYSAFEPFYMMAKCYPRHGKDMACLLMYRCDVAPKDV

SEQ ID NO: 269933 - protein, 231 aa, Zea mays
  unsure (1)..(231): unsure at all Xaa locations
  Clone ID: MRT4577_177777C.1.pep
LSVHXWSHPSLTTLTXEQIIAELGWTREAIRQITGVSPNTMRPPYGDIDDRVRAISMAMGMTPIIWTSVNGNDFDTNDWHIPSGQSVYSVVQTFDTILEEAASLPGGFIVLAHDLYQQTVELATGYILPDALARRNPAFNLMSIIECQKKPLSDAYVETNNNQTNPFSSNANPLTGSAAVSATAAGGGASSGGSPTGSSSAASATNQKSSAVAKTAGVGAVGVVALAAGML

SEQ ID NO: 269934 - protein, 238 aa, Zea mays
  unsure (1)..(238): unsure at all Xaa locations
  Clone ID: MRT4577_177778C.1.pep
MGKSGAKKKKPATAAAAAKPPPASVELKATPSSSSLPAANGAAPHQVVDAGVLLRRAHELKEEGNRLFQSRDYAGALRQYELALRLAPRGHPDRAVFHSNRAACLLQLRPVDHEAVAQECSLALQAEPRFPRALLRRARALEALGRHELALADALALLALDPDHREAIDLSYRLRSRVNASSAASASSAPEPTSRPSPAALGAXSAVVAGLGHSLPARSFPKKHHHQPLLLICSQISQ

SEQ ID NO: 269935 - protein, 80 aa, Zea mays
  Clone ID: MRT4577_177779C.1.pep
QWGSKQQCPKMWYRLKEVDQHFEFQYPSQKDDAVLIICRALSRKVPSSKRKAPSSDRFSRSSSARYTERGVWLFVSIGLM

SEQ ID NO: 269936 - protein, 211 aa, Zea mays
  Clone ID: MRT4577_17777C.1.pep
MDPMDIVGKSKEDVSLPKSTMTKIIKEMLPPDVRVARDTQDLLVECCVEFINLLSSESNDVCSRDDKKTIAPEHVIRALQDLGFKEYVEEVYAAYEQHKLETLDSPKATKFTGIEMTEEEAVAEQQRMFAEARARMNNGAAKPKEPALEPQNQPQQPPQPQLQLHPTAQQPPQPQSQLHHPQSQQPLHPQLQPYTQAAPQQPLHPQLQPYT

SEQ ID NO: 269937 - protein, 54 aa, Zea mays
  Clone ID: MRT4577_177780C.1.pep
HPSLARTPDFFHLLPTSTLGGSRTFTMASTVVSVDVKLYKLRAEDAKLIQISEI

SEQ ID NO: 269938 - protein, 54 aa, Zea mays
  Clone ID: MRT4577_177781C.1.pep
RSLLRQSYLTVVRDTYRVLRMEHSSGGYTICCRTGLIYEAWTMMYVVDTTGMDN

SEQ ID NO: 269939 - protein, 47 aa, Zea mays
  Clone ID: MRT4577_177782C.1.pep
IMLLRWNPCCQLTIITFEGYNLCMQVLVCPTHHCALHIQLIQRPVHK

SEQ ID NO: 269940 - protein, 182 aa, Zea mays
  Clone ID: MRT4577_177783C.1.pep
MEVKEVCVQDMLVDLEKGKCLLPIEDNSGMKVNSIVGHASTMRPSSWDDLVALKDDKSHHICCFSSHRQDSSVKSGEPMKAEGEIKVGILDKSTADKENKKWYKKPPRPPRSQTTSPLDPADQKLISALSELAVLKKARIERMKALKKMKNSKPASSIGNLVALIITGILCFFILWQGLLMK

SEQ ID NO: 269941 - protein, 92 aa, Zea mays
  unsure (1)..(92): unsure at all Xaa locations
  Clone ID: MRT4577_177784C.1.pep
IGAGYIGDPTMADIGLRCPNIVGVLEDMFKHSIAAXNSGTLPLYEPGLDDVVKQCRGRNLFWSTDVEKHVYEADIIFVXVNTPTKTRKLGAG

SEQ ID NO: 269942 - protein, 77 aa, Zea mays
  Clone ID: MRT4577_177785C.1.pep
SAFILTATAAAAAHAHRDSTVTASGDQLRPLLVMDADCASACALSLTYLAVLSSATSAPTRIMNLKLIAVQIAHSSP

SEQ ID NO: 269943 - protein, 90 aa, Zea mays
  unsure (1)..(90): unsure at all Xaa locations
  Clone ID: MRT4577_177786C.1.pep
KTVHFVDWSPPGFKXGINSHPPFFVPGGALAKVQRPVCFITNTPPVFEVFSRIVPKFPFLYPKGGFFHWYVGKGMKKGXFSKAREDLAVF

SEQ ID NO: 269944 - protein, 76 aa, Zea mays
  Clone ID: MRT4577_177787C.1.pep
LHYNITMAATTLQYCSRINKHGRKLDIAKTPHLQCLIVFKHKLINYCRQPTSVVRSDLLVYFHHLTLCHWETAIIS

SEQ ID NO: 269945 - protein, 310 aa, Zea mays
  unsure (1)..(310): unsure at all Xaa locations
  Clone ID: MRT4577_177788C.1.pep
DEQRIHQLSFAEKQPSKSLSECVEEEQQQEERVVPLHTPDRVHKLVFSMAKLFGKVAIVTGAASKLGEAIARKFVDNGAKVILADINRHSCENIVAALNKTNHGPAVAHAMRIDVSEPDSILATVEEAKKVYKQDVDIFYNNAGVSNVSSPGLXSIDMMSFRNTMAVNVESVIASINHAGAVMRSNKIGGGCILCTGSPVGSLGDVVPSAYSISKAAVVGVVRAAAAELGGHGVRVNAISPYGVAARFDKGVLRHIFPHATDQQLDTMISSYGNYTVTEDDVANAAVYLASDAGKNVNGQNIVLNGKFGL

SEQ ID NO: 269946 - protein, 598 aa, Zea mays
  Clone ID: MRT4577_17778C.1.pep
MEHIAGASKISMAEVMPPNSTNFTSRLLNPMTSDDQPTIQRDNSEDAIVPEVGMAFKSEADAYEMYNSYARKIGFSIRKSNARRRVDGTIYQKHIVCSKEGEKVRGSSFFYAIQLDEEDGRIANFIWADGQAIMDYACFGDAVSFDTTLFQTNKFEMPFAPLLGTNHHKRTIIFGAVLLYNETIESFIWLFNTFLAAMSGKHPSTIFTDQCAAMSAAIRIVLPNTRHRLCLWHIYQNAAKHLSQVMKDHPKFLADFKKCVYEESSMASFDKMWTDLLETYELKDNSWLSNLYELRAHWAAVFRDSFTADMTTTQRSEGMNNVFKKRFRRKLCLSELLEECENCVKHLRENELDDDHKSRYSSPITYIPGLPMLKTAAESYTRNIYSDFEEEFKKQFFVSCKLLQSEGTIMTYQVIPMKFQDEALVVFNSEDMTIMCSCRKYECIGLLCKHALRVLNINEVFILPTHCILNRWTKYAKRDFYYEKKPINEDETLKTRAARISRKATSVALKCSGSKKLLDDLEKAISKLDLEADNALSQRPAKSRGVSQSSNANGSDILKGKVSIRVPEVIKGGVQQDAIDNIKDAEIQEFTMRQGLLL

SEQ ID NO: 269947 - protein, 301 aa, Zea mays
  unsure (1)..(301): unsure at all Xaa locations
  Clone ID: MRT4577_177790C.1.pep
FDFLRFIGFFFFFSPPPFFFFKKREAAKQEPFRVCGAAAAAAVRLFGKVAIVTGAASKLGEAIARKFVDNGAKVILADINRHSCENIVAALNKTNHGPAVAHAMRIDVSEPDSILATEEPAKRGEQSKLXIFHGKAXGKVAIVTGAASKLGEAIARKFVDNGAKVILADINRHSCENIVAALNKMCTGSPVGSLGDVVPSAYSISKAAVVGVVRAAAAELGGHGVRVNAISPYGVAARFDKGVLRHIFPHATDQQLDTMISSYGTYTVTEDDVANAAVYLASDAGKNINGQNIVLNGKFGL

SEQ ID NO: 269948 - protein, 91 aa, Zea mays
  Clone ID: MRT4577_177791C.1.pep
HHLLGRDARDRPDLCRVFPTADTSAPYMTCLPGLQNYSSTLRGCPEHTRALSPTVTHSIMSRSRSRQLGHARLLQEPHFRLARRITHLDLR

SEQ ID NO: 269949 - protein, 87 aa, Zea mays
  Clone ID: MRT4577_177792C.1.pep
MADRLVGLSMLVAATAVFVYYTVWTLFMPFVDDDHILHSLFLPRVWAIRIPVILLILGTTVVGSFVSVVMIKSNRKKALKAQQKKAS

SEQ ID NO: 269950 - protein, 88 aa, Zea mays
  Clone ID: MRT4577_177793C.1.pep
VTSILVNYCVLFSFVKHSILVNYCVLFYFVKHLFSRIALQVKFLFHALTNKQREMKLKNSFSHIFCLVFSHNHMHEAVSKTVSSNNIF

SEQ ID NO: 269951 - protein, 62 aa, Zea mays
  Clone ID: MRT4577_177794C.1.pep
VSQEEVYQVESKGIKIWVHDNGEPISEVCVYFDLISSRFCPFLFFFFFLFFFFNFFCFCFFF

SEQ ID NO: 269952 - protein, 376 aa, Zea mays
  Clone ID: MRT4577_177795C.1.pep
MDPSPQSTPPTGDDPAAAADPDLPRLTVTQVEQMKVEARVGDIYRSLFGAAPNTKSIMLELWRDQHIEYLTPGLRHMGPAFHVLDANRPWLCYWMVHPLALLDEALDDDLENDIIDFLARCQDKDGGYSGGPGQLPHLATTYAAVNTLVTIGSERALSSINRGNLYNFMLQMKDVSGAFRMHDGGEIDVRASYTAISVASLVNILDFKLAKGVGDYIARCQTYEGGIAGEPYAEAHGGYTFCGLAALILLNEAEKVDLPSLIGWVAFRQGVECGFQGRTNKLVDGCYSFWQGAAIAFTQKLITIVDKQLKSSYSCKRPSGEDACSTSSYGCTAKKSSSAVDYAKFGFDFIQQSNQIGPLFHNIALQQYILLCSQVR

SEQ ID NO: 269953 - protein, 86 aa, Zea mays
  unsure (1)..(86): unsure at all Xaa locations
  Clone ID: MRT4577_177796C.1.pep
PRTISLCCLFSPSLHTHQVGKRARSKEADYXWRASAXAPAGXIPEIWGEAAERSSDKLPVPAVSXGEVDDVRPGXSIIIQPTSIHA

SEQ ID NO: 269954 - protein, 146 aa, Zea mays
  unsure (1)..(146): unsure at all Xaa locations
  Clone ID: MRT4577_177797C.1.pep
MCPDIEGVLGDMYLLLIEVCMNDTLTIYKTGLDDVEKXXNGINLLLISDADNTRIVIADIISHLNEHPRLDPKLXIVKSTDLTDSXSCIRMISXMILSDKIFTQKSNVPDLTAEAIEKILTHNSKGVNYQILSNPXFLAERTAIED

SEQ ID NO: 269955 - protein, 139 aa, Zea mays
  unsure (1)..(139): unsure at all Xaa locations
  Clone ID: MRT4577_177798C.1.pep
FIVAGLRAAGCNPRRTLFLDDSERNIAAGKALGLRTALVESVPPISSDKYMPDECMPDGLNPTTKQVGKRARSKEADYXWRASAXATAGXIPEIWGEAAERSSDRSSIDKLPVPAVSXGEVDDVRPGXSIIIQPTSIHA

SEQ ID NO: 269956 - protein, 269 aa, Zea mays
  Clone ID: MRT4577_177799C.1.pep
MAATSPFDCVLLDLDDTLYPGDTGIGAALRRNIDEFLQAKLGVSADEAAATRAELFRAHGSSLAGLIALGYDVHPDEYHSYVHGRLPYDRIARDPQLARLLQSIPQRKVLFTNSDRAHMERALERLGVDEAAFDAVVCFETMNPHLFGDDGGDRRPAVVLKPAVDAIVAGLRAAGSNPRRTLFLDDSERNIAAGKALGLRTALVGKRARSKEADYAVESIGALRRAIPEIWGEAAERSSDKLPVPAVSVVRSTTSDLDSIIIQPTSIHA

SEQ ID NO: 269957 - protein, 33 aa, Zea mays
  Clone ID: MRT4577_17779C.1.pep
CLKIQAITDSHTRLSGCNPIGTFSCGVGEFLKT

SEQ ID NO: 269958 - protein, 172 aa, Zea mays
  Clone ID: MRT4577_1777C.1.pep
GLARRWAVELHDASSSSSSPAFPDPPGFTRSAPEADDAASARQRKETEAAWKGQKAWEVAQAPFKNLMMMGFMMWMAGSTVHLFSIGIVFSALWQPFNALRSVGKVFEPFKDPRVDTLAPKLLFTALNLAAMGLGVWKLNTLGLLPTNASDWVSSLSPAREVEYAGGGIPLM

SEQ ID NO: 269959 - protein, 273 aa, Zea mays
  unsure (1)..(273): unsure at all Xaa locations
  Clone ID: MRT4577_177800C.1.pep
LVRFFFILFCPWPAGADLDDTLYPGDTGIGAALRRNIDEFLQAKLGVSADEAAATRAELFRAHGSSLAGLIALGYDVHPDEYHSYVHGRLPYDRIARDPQLARLLQSIPQRKVLFTNSDRAHMERALERLGVDEAALRTXVCFETMNPHLFGVGGGDRRPAVVLKPAVDAIVAGLRAAGSNPRRTLFLDDSERNIAAGKALGLRTALVGKRARSKEADYALESIGXLRRAIPEIWGEAAERSSDKLPVAGRERXRSTTSDLDSIIIQPTSIHA

SEQ ID NO: 269960 - protein, 149 aa, Zea mays
  Clone ID: MRT4577_177801C.1.pep
KLFFFFFFFFLLFFFFFFLNVYFHHTGGRYYGIPAGHQAGGKQEHKGGRRERESRSQGHTDTQPKAQTGNPGEPKEGTNAQKKGGPNRKKSRRETRRANPKKKKANPRREAAKKKDPQPPTGKMTLSPRGERPGKPYQPTQRREYGYPQ

SEQ ID NO: 269961 - protein, 50 aa, Zea mays
  Clone ID: MRT4577_177802C.1.pep
QYYCSTTATRCHGICLNRFAINQLNSVLSTTKLDLAKYSSSQRQPRVLVG

SEQ ID NO: 269962 - protein, 140 aa, Zea mays
  Clone ID: MRT4577_177803C.1.pep
MAAEEQEALREFMAVTGTEEERARFVLETAGWDLQVAPRGGPLRAGWGMRSAASAPRFLHGRSAQLSVRGWALPGPGLMVSGVACHASPAWLGSSWTRAGPACFSGPPFSGGLAVLARLWALRQSAWSASLGTWLPRRVL

SEQ ID NO: 269963 - protein, 95 aa, Zea mays
  unsure (1)..(95): unsure at all Xaa locations
  Clone ID: MRT4577_177804C.1.pep
KLLAEKXGIXXXXGKKSCXRKAIXGKKARNGNKVKKLKXDKVQKXAKETNGEFNKGGIVTGNKEALLPSGTVKRRERSTSNCGRHSAKNSTRLQG

SEQ ID NO: 269964 - protein, 640 aa, Zea mays
  unsure (1)..(640): unsure at all Xaa locations
  Clone ID: MRT4577_177805C.1.pep
LVKEMVMDQRARPSDRTKTPEEIAQEEKERLEKLEEERQKRMLGTADTSDEDDGNENDNHMKLGNSKPISGDDLGDSFSLDESTVKKKGWVDEIYEREGRKIGDDAAASDDGESNDDEXGDDGADDEDSEEDSSDNDFGNMSARDWEQSDDDEVDVGDDEMEDFKEKGQEINDKVVNKDAHNLKGESNVKPQVKDGSIPFVIDAPNDLKDLSSLLDGRSEAEIIEIISRIRACNSIRLAAENRRKMQVFYGVLLQYFAVLATQSPVKFRIIDILVKPLIEMSGETPYFAAICARERLIHTRTRLCEDIKVPGKSSWPNLKTLLLLRLWSLIFPCSDFRHVVTTPLLLLMCEYLMRCPIQSGRDVAVGSFLSSMVLVVTKESKKFCPEAIGFLQSLLVTSXRKSGNSSAQSDXDQFMELKTLKLWLSIHDHVHEVNPVNILEIVGMDPDAPYFSSDNVKAGVLLSVAECLRGFVIIHEGLSSFPEIFLPISSLLQEILDRSELPGSLQDIFHEVIDLIKKRSDEHYASREPLRMRKKKPEPIKQLNPKFEENYIKGLDYDPDRERAQMKKLRKRVKSEMKGAKRELQKDNYFLSAVKEKERRKRDEERAEMYGKAMAFLQEQESAFKSGQLGKGKGRKRMR

SEQ ID NO: 269965 - protein, 109 aa, Zea mays
  unsure (1)..(109): unsure at all Xaa locations
  Clone ID: MRT4577_177806C.1.pep
MANPHVTFDMTVGGAIADQIVTDLDANNVPKTGANFTALSTGDKGVXSSSRXVYYKDCTFHHVMRECMYYGRDYTTGNGTICEYMYREKMLDQKYMRKHTVSMVLSMAN

SEQ ID NO: 269966 - protein, 149 aa, Zea mays
  Clone ID: MRT4577_177807C.1.pep
CGNISVPYPFGLEEGCSARKLFKLNCRNATASMLQFDDDRVVAFINVAESLVGIRFTSHFEDDQLGIYVPGEPDLFMGLGESVVSMHWAAANLTCDEALKNKSQYACVSSNSKCLGVNSKDGYIGYRCKCLDGFQGNPYTISDGCEGTT

SEQ ID NO: 269967 - protein, 64 aa, Zea mays
  Clone ID: MRT4577_177808C.1.pep
HGRLALNSHFIPLYYIHLLTTSLTLQFFTSTIHYHSSIILYITQPADLHTFIHNYYTFHNFHFN

SEQ ID NO: 269968 - protein, 71 aa, Zea mays
  Clone ID: MRT4577_177809C.1.pep
ESVPADITTFPMPCKLANYCQNELSPTVPTVTYLNLLARFFLPRSCLDYADSEQQRPGGNLPGFFMCPIWP

SEQ ID NO: 269969 - protein, 67 aa, Zea mays
  Clone ID: MRT4577_17780C.1.pep
KNPFLAAALTNGCFANLFNPHFQAIGFMPPRTDEIDPWFSYIHGLPSWGAQKILNPPNMVFPWALFP

SEQ ID NO: 269970 - protein, 237 aa, Zea mays
  Clone ID: MRT4577_177810C.1.pep
MKVRNEEVEKFPIQVQKQNGHPENLSLSSDLPREQSPSLPPHNAFRSGRKMSFAYGMTESNQRQFGERTYSTLTTDRARNARFSMRVPDVNGSIINKKVDSQDIAITHENKASVDDGLQVQEPIRISNNRNDNKVRELELKIELLEAELREAAAAEIGLYSIIAEHGSSVNKVHTPARRLSRHFVHALKNCSRDKMGSAARNTTSGLVLVAKACGYDIARVSFWLQTVLYCEQCTET

SEQ ID NO: 269971 - protein, 68 aa, Zea mays
  unsure (1)..(68): unsure at all Xaa locations
  Clone ID: MRT4577_177811C.1.pep
MGKIKIGXNGFRRIGRXVARVYLQSEDVKLDAVNDPFITTDYMTYMFKYGTVHGQWKHSDIVLXDSKT

SEQ ID NO: 269972 - protein, 55 aa, Zea mays
  Clone ID: MRT4577_177812C.1.pep
LEKSIPDTVLSLIIKSRFQSIHSPYLQHNISLSLSLIPYSYANPHLLFYLHTKSC

SEQ ID NO: 269973 - protein, 37 aa, Zea mays
  Clone ID: MRT4577_177813C.1.pep
SKGFYRNKVTPPPSHHAVGSYLLGPLRCRHAYARVRH

SEQ ID NO: 269974 - protein, 34 aa, Zea mays
  Clone ID: MRT4577_177814C.1.pep
FYKLVGVVNFFPRRFVTSGPIGRSYLNNGLCLCK

SEQ ID NO: 269975 - protein, 159 aa, Zea mays
  Clone ID: MRT4577_177815C.1.pep
SRPSGDLWGPLQAYLLSSHAHVERPRLNPTRSSRCGSNRQVGNPLYSCINMDVEPTLCLYHRQTHDPIVHPVIPLRQERERTELVGGLRVRCWSGHIWWTGGHHWRTTLMCVACRGEEDLVSRKFLVGGGTLLRVRGGAWETPSAPHLRSEVTCHVKSK

SEQ ID NO: 269976 - protein, 218 aa, Zea mays
  unsure (1)..(218): unsure at all Xaa locations
  Clone ID: MRT4577_177816C.1.pep
TGPGVTGRVQPMGTIAVVRGVLGAHHVDAALTGVGLAIIPVGLPKKPRLTRDDLFNKNAGIGRTLSEXMKKXCPNAIENLISNPVNSTVPIAGEVFKKAGTYDPKRLFGVTTLDVARANTFDGQALGVDPRNVSVPVAGGRAAITMLGLLCQATPSXDLLRMEXRYFTHRIQNGGTEDVEAKAGSSSWTLSKAFAVWKFSDTCLRAMRCESGIVGCSY

SEQ ID NO: 269977 - protein, 64 aa, Zea mays
  unsure (1)..(64): unsure at all Xaa locations
  Clone ID: MRT4577_177817C.1.pep
GRVGSKRSLTLDIVTKSPKLYCDNEPRVFYFYTNKFSAAAKHIDMRXYVVKKKLQHXTIELEHM

SEQ ID NO: 269978 - protein, 91 aa, Zea mays
  Clone ID: MRT4577_177818C.1.pep
IVKNRMPPSLFSHFNSKYKPWKFDSTVIGVIGLHGPAPVVNLGCGTIMKSFAIAFFGSPHIIPVVFPHSYMNGIHISMKSPSCNACCLDPF

SEQ ID NO: 269979 - protein, 237 aa, Zea mays
  unsure (1)..(237): unsure at all Xaa locations
  Clone ID: MRT4577_177819C.1.pep
RVQPSHLVLALATAYLXLSXKFFRMLYLVAGDPVAAFYSSSSSDHLPPHGFAFSSSDIIATSKASLFLVHLFWHSYERVSLPDLLSRNHFALDRMAKTPXVLSLTAWEEDTTFAGDPXALLIAAVDASCATYAAKCPFAVSRRTWGQVVFLPCGLAASPSVIVVGTTHMEYVXQLPQMRXGGGTINVSXFMVELXDLRVIDGKDPPRILHLNPRLXGDWSQHPILEHNTCYRILVPN

SEQ ID NO: 269980 - protein, 103 aa, Zea mays
  Clone ID: MRT4577_17781C.1.pep
QMLTLGWGLLPSMCGTSNADMCIRLSCVSKLGKPGARLVCGGLTTSSSTSASSSTTVSSSSSMAPSFCAIVTSTPPGVLRAFPRAAPAPRLVCLVFFGVLNSS

SEQ ID NO: 269981 - protein, 278 aa, Zea mays
  Clone ID: MRT4577_177820C.1.pep
MAAKASRAAASGAAYEEQRKKRVLENLKHLEDLGIAEMSKSLLQAARLQKLNKAGVRAGPKERKKFDATEVRRSSRAKTTVSYKDDFGELDAFLRGTRRSGGRNTEHGREYTGRIPSYEQQQRAFRKAEKLQDSLDPNNPSFVKTMVRSHVSSCFWLGLPISFCKNNLPSKEFRMVLEDEEGLEFDAVYIGNRTGLSGGWRGFAMHHNLEEGDSLVFELAEHDKFKIYIIKAIDDDVKEAEPDDKNDNGVTKEEPDQEESPVAEPPKGAKRRKLRGRR

SEQ ID NO: 269982 - protein, 60 aa, Zea mays
  Clone ID: MRT4577_177821C.1.pep
KKPNLVNTIWGRAPWSFLGQKKVLVLGFKNPIWGPKVIYLVWGLPLLVKTGVSSFDSMNM

SEQ ID NO: 269983 - protein, 171 aa, Zea mays
  unsure (1)..(171): unsure at all Xaa locations
  Clone ID: MRT4577_177822C.1.pep
MATQTVEDSSRSGPRSTTVGKLFAIISFLIFFNFXFYFFFFLFYTFYYFFLFVIFLFFFYISLYSFFHLFFFFFSLSFLGGGVCLFYISFFIFLFFIILFFXFIFLFFYFHYYFYFFIYFFILYFLILLFIYTNLFLLYFIFLFSFFTFIFFYFLIFHLFTILFSFFIFLF

SEQ ID NO: 269984 - protein, 60 aa, Zea mays
  Clone ID: MRT4577_177823C.1.pep
PEWKAGSTMRTQATHICGTLCISGALDYGAHGEQTHDRHSCRIDKDIPMEPLNISAGDKW

SEQ ID NO: 269985 - protein, 70 aa, Zea mays
  unsure (1)..(70): unsure at all Xaa locations
  Clone ID: MRT4577_177824C.1.pep
CWPRLRLRPLTQCNPAQLTPCSAPALLXEPVPPSCCAQLPTHQGXLCWYARSPNYGSYIRRRNAARLLCI

SEQ ID NO: 269986 - protein, 220 aa, Zea mays
  unsure (1)..(220): unsure at all Xaa locations
  Clone ID: MRT4577_177825C.1.pep
MQNKSAAAIEASSGPLSAAASRLSARSRALPSSRDFHFYNNFPAFKSPVGAAAAKADASLGVLGGASILPTRQQPFPVGGDLDDAHDWLVALNDDLLERFGASTDEFKTLRQKEETSGRRAAPQAGDGFQVVCGKKKKKVGDGGEERVGRVEAFGGFGSVRMVTKDKAAAPGVKAKVPFHIRTIPRPQDVYCIVVDNXQQPFEHILLDRSEDGTRXVHPL

SEQ ID NO: 269987 - protein, 148 aa, Zea mays
  Clone ID: MRT4577_177826C.1.pep
MASKRILKELKDLQKDPPTSCSAGPVAEDMFYWQATIMGPSDSPYAGGVFLVTIHFPPDYPFKPPKVAFKTKVYHPNINSNGSICLDILKEQWSPALTVSKVLLSICSLLTDPNPDDPLVPEIAHLYKTDRVKYESTARSWTQKYAMG

SEQ ID NO: 269988 - protein, 215 aa, Zea mays
  unsure (1)..(215): unsure at all Xaa locations
  Clone ID: MRT4577_177827C.1.pep
MEPHAESKPIPLMTPYKMGSSLDLAHRVVLAPLTRQRSYGNVPQPHAAVYYGQRATPGGMLITEATGVSDTAQGYTDTPGVWTAEQAEAWRPVVDAVHAKGALFFCQLWHVGRVSSYGFQPGGAAPVSSTQRMVGPQVRHDGTTEEFSPPRRLXVEEIPMIVDDFRKAARNAINAGFXXGVEIHGGNGYLIEQFLKDSANDRDDGYGGSLENRCR

SEQ ID NO: 269989 - protein, 76 aa, Zea mays
  Clone ID: MRT4577_177828C.1.pep
TGGLRGGGGGGVPGVFEGHPTNIWSERGGWSTPDNRWGINKGAQGEFFKTGGYFVWPPCCCWVPPPKGKIFTGGRS

SEQ ID NO: 269990 - protein, 215 aa, Zea mays
  Clone ID: MRT4577_177829C.1.pep
PLSMTWADYFALGRYSLANGNRGEFAGRRFRRRTVSCHGPTVGAWCHPRLLVGSCDRWDDDVVCQRSKRCGHPVRPCGRCSLMAFSGSGSVEEGSVGHVHSSDIHRAAAEEEELHHLLIATVPCDGRRRCCFPIVDQWHSGRALATSSSPTGNTHGRIDSVCFHKNASVDGRRVESERERRGMATAREYQSHEELGQYARFSFTRVDRISRPARG

SEQ ID NO: 269991 - protein, 79 aa, Zea mays
  Clone ID: MRT4577_17782C.1.pep
VPEVCPMLHRSNHAHTRLQALDEANALRQSFAFGTPFADVLGLGPAAMYRLQPSPGALDMSSCCVQYAEREVQADLIHT

SEQ ID NO: 269992 - protein, 57 aa, Zea mays
  Clone ID: MRT4577_177830C.1.pep
TLPAVCSGLLFCASTGFGLVFKFKLTSAMVRESHNIGYWHVLGSNPMALSQAGACSV

SEQ ID NO: 269993 - protein, 75 aa, Zea mays
  unsure (1)..(75): unsure at all Xaa locations
  Clone ID: MRT4577_177831C.1.pep
GVGPGVRPGVRPGVRPRVWSPPPFLIHPQWLGFYQGAGPKGGPLFQLQQLVPLNPLGFSNPAXFAGHPLMGGAPF

SEQ ID NO: 269994 - protein, 70 aa, Zea mays
  unsure (1)..(70): unsure at all Xaa locations
  Clone ID: MRT4577_177832C.1.pep
WEKTENPKPKPKPKPKNRNRIQKGRKAGGVASVTVLGKGSGRHRRKSKVPVVVLVVAXRTNIRSQNRGGF

SEQ ID NO: 269995 - protein, 102 aa, Zea mays
  Clone ID: MRT4577_177833C.1.pep
FPLNHLGGFCFYKSGKGFLGQNLFESCCYSLALAPMFTSGFFFFLGGRVFRNGSLKSPNVLGPLFFSDIKLLVGVLGETNWFFFFWGEKGILVCFKPPIPFP

SEQ ID NO: 269996 - protein, 104 aa, Zea mays
  Clone ID: MRT4577_177834C.1.pep
LAVFLKLWNWKNLGFSKFNPFEKNPLFASWVNIKKAPPIPLSKNLPTFIGKWTPLFSAFLNPGGGVFTPKGTFNFARPLTPVLFFFFLSFFASFAVFPRKVLNR

SEQ ID NO: 269997 - protein, 92 aa, Zea mays
  Clone ID: MRT4577_177835C.1.pep
TTTEPAVRPIHPCGTVPVPRHADAVTPWGSDAAAGSLRSYQSLLILLQAESLRALTACPLEAGQCEEVSCALLHRRLAVRDHTVCLVGTLTA

SEQ ID NO: 269998 - protein, 96 aa, Zea mays
  Clone ID: MRT4577_177836C.1.pep
IEYVRPLRNVSVRAVEICSVRQRRLARRRRSSVWLLLYYVLDAIRVRVGQSGQGRFAAILHHVVIAVTTIRDLCSIGSSIPGADAFARSRRYRQRV

SEQ ID NO: 269999 - protein, 87 aa, Zea mays
  unsure (1)..(87): unsure at all Xaa locations
  Clone ID: MRT4577_177837C.1.pep
FERVVGGSWYCRRMRHHAVYARSLGVAARGSHTNELKESTVRIIVLHINLHFRLHTPSSSLSPHRRLNRPEPPIXPIINTFXNRPST

SEQ ID NO: 270000 - protein, 96 aa, Zea mays
  Clone ID: MRT4577_177838C.1.pep
PKRKKNGDENPLGIYSPREQGLGKNFFPKGFAGTPQGNFFLPGTETVSFFRGGTPPFHYFGGQTPRVVQPPWKGACLPLRGGVYLPFSNPGGFLPP

SEQ ID NO: 270001 - protein, 101 aa, Zea mays
  Clone ID: MRT4577_177839C.1.pep
FLLPFTSRRRRSTPAAQVFVGRFPAKSILAREGMGKTHHKDHGAKLQKLLNTVTVGSVDETHALVEGIRPTRLHGRHRKYYYYKGQSCAHPIKQTTMRCPL

SEQ ID NO: 270002 - protein, 179 aa, Zea mays
  Clone ID: MRT4577_17783C.1.pep
SAKTMLEEREKFGAGTSIDGFYESRREWMGRRHFILSLEGSTEGMYKIIRPAIGEALREMPSSELKSKYRKVSSIDKVSKGWQEEYDASSKQCMHGSKCKIGSYCTVGRRLQELNILGGLILPVWGTIEKALAKQERLIHKRIRVVRLVTTNDSQRIVGLLIPNSAVESVLTGLQWVGH

SEQ ID NO: 270003 - protein, 61 aa, Zea mays
  Clone ID: MRT4577_177840C.1.pep
QRSPTASSYHKQVISCAIAAWLFDQQNSRGRSIRCLVIGIPAISWPKLQNAVPTLIKVRPD

SEQ ID NO: 270004 - protein, 252 aa, Zea mays
  Clone ID: MRT4577_177841C.1.pep
SVWKERLEAIGILKQEVVSLTELDKSAELLIRLLCAVPGWSEKNVQVQQQVIEVITYVAFTVILFPKRCVVLCLLGVSERVADIKTRTYAMKCLTAFCEAVGPGFVFDRLYKIMKEHKNPKVLSEGILWMVSAVEDFGISNLKLNDMIDFCKDIGLQSSAAVTRNATIKLIGMLHKFVGPDIKGFLSDVKPALLSALDTEYEKNPFEGAAAAPKRTVRVLDTASSVSAGLSDGLPREDISSKITPTLLKNLG

SEQ ID NO: 270005 - protein, 170 aa, Zea mays
  unsure (1)..(170): unsure at all Xaa locations
  Clone ID: MRT4577_177842C.1.pep
MSSAAGGYGGGGGAGSGAEPHGHADFLLHHHAQHVAAQQLYHVPQHSRREKLRFPQDDAPPHASASVPXAARRGGXWPPPPAFYSYASSSTSSYSPHSPTXLAQAPAXVAHGLAPPLXRRFPTQNFALSLSSSSSNPPPPXXXPRRAHAAPFGPFTGYAAVLGRSRFSSP

SEQ ID NO: 270006 - protein, 79 aa, Zea mays
  Clone ID: MRT4577_177843C.1.pep
DLFVSAFHPPTKLYIADRCVPSICHIYIVFSIIFMPLVQLKKLRPVRKVGLPPFPKSPHRCWPPIGQVCREPFQRKSGS

SEQ ID NO: 270007 - protein, 135 aa, Zea mays
  Clone ID: MRT4577_177844C.1.pep
TCPRLVVDQPGTLLQCLLLLHLWPSVGVGALWPVRRLRLPSGQASRRGASKSDGWGQCTGMAPGRGRVERPRLRWEQGPVTNAKASLQTGESPVGARAGMEARASGRGAGMEVDAGPDGDVGRIGDFLCRFYLTL

SEQ ID NO: 270008 - protein, 362 aa, Zea mays
  unsure (1)..(362): unsure at all Xaa locations
  Clone ID: MRT4577_177845C.1.pep
NPVKRSRQLQPRPLAMAGEAGKDPQAWLAANETASAFLSRSLSSRPPITLPPPLHRAPLRPGNVVEIAGPSNSGKSHLLLMAAVQCILPKEWEGIYFGGLGRAVMYLDLDCRFDVLRLAQILRNRIAEGCRLAHLRNGDPENDVTKDEFQCSLQNTLFSDRMQRFLYARCCKSPEFIDALKTVQSQSRREVSGAGIYFVMIDSIGAFYWIDRGSQASRENKGKTLQSIFESVGHELRKILQLEPALVLVTKASVYGEGAXTANDFNRDSSIYMLEDPSGLGYSRREEERTLSNREYMPSIWQSFVTHRINLQVEAEVPLVWESEVPPPHTSEWVQPCLKMKEKFSIMDVRFWYSYQDGLLQT

SEQ ID NO: 270009 - protein, 58 aa, Zea mays
  Clone ID: MRT4577_177846C.1.pep
LIDRHGKQSKEGPLKWKQGEKKIFGKKMAKKGGATFKNGKGQPPYLKFKGKKKKLGGK

SEQ ID NO: 270010 - protein, 72 aa, Zea mays
  Clone ID: MRT4577_177847C.1.pep
PKTPLTFLNKTAYSKLVRTYNAGGYHYPIKGYDIFYNQYLDAHSNVLDYDYTTALHKYTISILDNYGPKILN

SEQ ID NO: 270011 - protein, 70 aa, Zea mays
  Clone ID: MRT4577_177848C.1.pep
CNLNSIQWTGFFILLNEKTMLNPTSLHLFENELFTSYLHKIDVGHNPFSLQYPKTNVKWHFPSLDAFNAW

SEQ ID NO: 270012 - protein, 71 aa, Zea mays
  Clone ID: MRT4577_177849C.1.pep
CRGSAAASAGGLGARRTCSSQQRSVTRPSQLTTGRTPGGVPPECCRAGERCGQCGWIGSEEDMFLAATFSH

SEQ ID NO: 270013 - protein, 91 aa, Zea mays
  Clone ID: MRT4577_17784C.1.pep
TQMIWSQFRAAPPPLRDSGIPPLGESSTPTPSERAAPPPPQRKRHPHPLRESGTPTPQRQRHPHPSETAAPPPPQREHPHPQNPTLVNINV

SEQ ID NO: 270014 - protein, 73 aa, Zea mays
  Clone ID: MRT4577_177850C.1.pep
MFNTSTCQVRRVQSLVETLDKLKARNANPFSDHNNAVSVTTQWETFENGMGSLSAPPPHVPSEQVNTDWEQFD

SEQ ID NO: 270015 - protein, 59 aa, Zea mays
  Clone ID: MRT4577_177851C.1.pep
RRRGRPPAGPSWPTRPRSSAGPPRRHRVCRRTSWCQEKLASGQCEALSMCVAQVAIGPS

SEQ ID NO: 270016 - protein, 147 aa, Zea mays
  unsure (1)..(147): unsure at all Xaa locations
  Clone ID: MRT4577_177852C.1.pep
MNTYKKRXPNIGSSSRFCSNYSCYCIWNSNSALTVKNRGCFLXEDYXLIEKLDLVYRDRXVPERDMHARRDEAEGVYLDTLDVSHLTCAXDFLRAPAIQTSVIGRLSTXSHEXGRPETLRDHTXFAXKFYLPEGNXFDLKFNNMPEY

SEQ ID NO: 270017 - protein, 126 aa, Zea mays
  unsure (1)..(126): unsure at all Xaa locations
  Clone ID: MRT4577_177853C.1.pep
FGFPKQDGGNWGNSHVAKFFARDSPYSLPDNVAKLPPPELXKGRVFPRVGPLNKAGGGKDFLFLARFAPKKVFPEKKIGKVFXTSFLANPKRPPLEKKRFKWKGPGFSAYQKVVRGGPLDPFKLFV

SEQ ID NO: 270018 - protein, 80 aa, Zea mays
  Clone ID: MRT4577_177854C.1.pep
VPQYWASLLMLNDSRVVFPDGIGALIVESDERVLRSAGLMLSLLNYRVATCERPTSVVKLITGRLKDADVVFIDALRGAT

SEQ ID NO: 270019 - protein, 118 aa, Zea mays
  Clone ID: MRT4577_177855C.1.pep
ELLKDKKLKLDRGSNYMHPMAIVDCRLGSPVRRRLIALSLERKQRHMTVVSGWDDEFVLLDTMVAEASPVCESRRKRRASTCSNDDGAGSNTKYGDTVDRLQQGSSLLRCEVFVNRCT

SEQ ID NO: 270020 - protein, 50 aa, Zea mays
  Clone ID: MRT4577_177856C.1.pep
LFILPHITIIIATLTNFANPKLNPHSLKYYKIPLSYLHLIISIPTSHSTS

SEQ ID NO: 270021 - protein, 102 aa, Zea mays
  Clone ID: MRT4577_177857C.1.pep
PRHPHCHHARRDARVREASRAHRRNQPPSSIAAERHPPTPAVSMSPSSSTRGTTSSSSLNGGLHQTTIPTVVDLNRLLTHNVQQTSSPPPTPAPAPDMECPP

SEQ ID NO: 270022 - protein, 108 aa, Zea mays
  unsure (1)..(108): unsure at all Xaa locations
  Clone ID: MRT4577_177858C.1.pep
QTPLMREQLMKPAHYLMSXWNPDIQXSTVGFRHQGNSASPXYYDGRYXTMRELPMCGCNHATQVHQELQEDIKSYPEAFHXRDIIFHNITDRQQRRSRFIAYKTPGRD

SEQ ID NO: 270023 - protein, 56 aa, Zea mays
  Clone ID: MRT4577_177859C.1.pep
YKVLRKNASPIILSPLMEACRPSHTSSHMQVSLTDGKYLGRHCCAVVATGFHFICC

SEQ ID NO: 270024 - protein, 56 aa, Zea mays
  unsure (1)..(56): unsure at all Xaa locations
  Clone ID: MRT4577_17785C.1.pep
XXXTKRTLRQFSFPLFFCLDSFYKFYTMICSMPLSNKIFEGSQNEVVVHIRLFLGL

SEQ ID NO: 270025 - protein, 156 aa, Zea mays
  Clone ID: MRT4577_177860C.1.pep
DRLPVLWINQLSKLTKLNLEVTRLMQDDISFLGKLPTLSILRLCVNLPEDALLRFCVFINGFEQRSYQKLKVLELACRFSFHVTFGSETMKNLDLLKIDCCSGWLDQLSGLLHLSELKEVWLKGSYEDTLKHGLEDQLAAHPNNPVLKLEEEAPRQ

SEQ ID NO: 270026 - protein, 177 aa, Zea mays
  Clone ID: MRT4577_177861C.1.pep
MQQSCAAANLARLPLPVVPGLEDLASLFLARNGPVPAHDYSSSFDLDVAVGLDPAYYYYCPHSCDGGVAIATPVSSVSAERKRRRLASNRASARRSRARRQRRLHELSLRAAELLGANQRLLVELNRVVARHGAVARENARLREEAAGLRRRLGEVEEVGEAAAAAAAGQGPLRAPS

SEQ ID NO: 270027 - protein, 67 aa, Zea mays
  Clone ID: MRT4577_177862C.1.pep
SFTTPPCTKNVIWSVLAQVREITVDQAAALMAPLEQAYRRNNRPTQPRNGRVVQVYRNGFINKKTAP

SEQ ID NO: 270028 - protein, 131 aa, Zea mays
  Clone ID: MRT4577_177863C.1.pep
LGDDDLDLSRTHRSILHAPHPVVPVLDLGSTSLGTSTTGPRRNRTNSPSPANNFPIPIRFMRRAQVDEDNHTRRRVPRAHARGRGSGADGLHRSLFSLMFLFVCSAIRITAALPFFAYSAHRTPNTRLPRP

SEQ ID NO: 270029 - protein, 74 aa, Zea mays
  Clone ID: MRT4577_177864C.1.pep
RFGDTSTRPAGSASVVLQRDRHDEVVHHRCTFRLRPGSRRGMPPAPLLLVDNWLDDQAEEEQPRHRLRSDRLSL

SEQ ID NO: 270030 - protein, 29 aa, Zea mays
  unsure (1)..(29): unsure at all Xaa locations
  Clone ID: MRT4577_177865C.1.pep
GMVVILPRACKRSPPXFYIIXLKNINSSL

SEQ ID NO: 270031 - protein, 87 aa, Zea mays
  Clone ID: MRT4577_177866C.1.pep
GRVPAAFDGGDDDEEDDDDAINSDLDDPEDEHDDDDVDDDGLGNIMLCMYDKVQRVKNKWKCTLKDGVLTVNGKEYVFHKATGEYEW

SEQ ID NO: 270032 - protein, 68 aa, Zea mays
  Clone ID: MRT4577_177867C.1.pep
LDKQHRNYSREGPRKITIRVVPQWIMTRDLDTSIRRVAQSCVRIHRRLSVSLRHHKSLTITPLQNWHQ

SEQ ID NO: 270033 - protein, 202 aa, Zea mays
  unsure (1)..(202): unsure at all Xaa locations
  Clone ID: MRT4577_177868C.1.pep
MPATTAETLSLVTRTVSVAPLVLLSAADHYGRQAKGTRKRVVGVLLGQNDGNNVRVSNSFAVPFEEDEKDPSVWFLDHNYVESMNDMFKKINAREKLIGWYHTGPKLRASDLEVNELFKRYTPNPLLVIIDVQPKEVGVPTDAYFAVEEIKDDGTTTSKTFVHTPSIIEAEEAEEIGVEHLLRDIRDVAVGTLXTXITSQLQ

SEQ ID NO: 270034 - protein, 42 aa, Zea mays
  Clone ID: MRT4577_177869C.1.pep
THSMLKYIIIPSSDSIIACTFPARLSRLARGPYTFIESYTYT

SEQ ID NO: 270035 - protein, 94 aa, Zea mays
  Clone ID: MRT4577_17786C.1.pep
SAASATCHRGGDRAPLTPELWKPKVRDPCRRGLRRSSSTDDKTTPLQTATRILHTGGITAIAHARPPRPRPPRKRAQRAAERREQPKKLTEEDL

SEQ ID NO: 270036 - protein, 39 aa, Zea mays
  Clone ID: MRT4577_177870C.1.pep
TANIMVPKQEWLYNFSHYPSVILIASERPLLYALRVNGC

SEQ ID NO: 270037 - protein, 204 aa, Zea mays
  Clone ID: MRT4577_177871C.1.pep
MAPPPEPRRPYKRPAISDQQRRRELALQAQSARRADAQARARALATPLLTTQAPTAATSRDDYEEEEYEHEEEDERELTACGVAAAAAASRLRGSEARRWFARQVMLPEWMVDAPPHLATDWHVFARPSGKRCLVVSSNGMTISRVRNGSILHRFPSALPNGSKRDISGPASSYSILDCSSRMPDETYYIIDMICWRGYSLYDL

SEQ ID NO: 270038 - protein, 51 aa, Zea mays
  Clone ID: MRT4577_177872C.1.pep
TYLNLNTYSTNSNQTLLFNTPTINLLYQYTNNIPIYPNYPFTYNNIHLIPH

SEQ ID NO: 270039 - protein, 91 aa, Zea mays
  unsure (1)..(91): unsure at all Xaa locations
  Clone ID: MRT4577_177873C.1.pep
MVDQANQPTVLHKLGGQFHLSXIISEGVRVCNICPSASSYERRSATLYYMTQSLQGPHKYATPRAPTHDRPSPSLRARHPHPLFFVFPPPP

SEQ ID NO: 270040 - protein, 76 aa, Zea mays
  Clone ID: MRT4577_177874C.1.pep
SNEEEYVGAFVFRRCSKTHLIIGCQHVHKCCRNFGIEYLRNRMKIKTKLLSFVTTTHRDEGEHCREKASTVPCPSC

SEQ ID NO: 270041 - protein, 221 aa, Zea mays
  unsure (1)..(221): unsure at all Xaa locations
  Clone ID: MRT4577_177875C.1.pep
MAAPRVSFGEKDMENGGDGAAERSRKWSQAPGNIEDLDEYTALQKYISTYRDPKAHAAEDAEANAADAGKGKAWYQFWRSGNSGKATGADPGFVPDEMLEADIKQGISSHEVEQRRKRYGWNEITTEKENLFIKFLGFFTGPVLYVMELAVLLAAGLRDWIDFGVIIGILLLNAVVGWYQEKXAADVVASLXGDIAMKATVVRDGQESRHQARELVPGDIS

SEQ ID NO: 270042 - protein, 44 aa, Zea mays
  Clone ID: MRT4577_177876C.1.pep
IKCILFMLQDDETLAHSFCLVRISFSRGICRRSVPEERASLSSP

SEQ ID NO: 270043 - protein, 53 aa, Zea mays
  Clone ID: MRT4577_177877C.1.pep
LFLNGSSLVWHQASVPPLYRCMSNMRRFQGSQEGKGWLITCKLSFMPCLSDML

SEQ ID NO: 270044 - protein, 132 aa, Zea mays
  unsure (1)..(132): unsure at all Xaa locations
  Clone ID: MRT4577_177878C.1.pep
RPXKKKKKKKSMPKYLYPASHSLQVLDESQLALKIARHSRCATCSSCTGLVPPLGYTVLSDAAPDSDDVEQFLLESTTNDNDDEPAKGYLNICCCAHGLEMHGADKSKIGQEEFMRRARAAVRLDELLQVRG

SEQ ID NO: 270045 - protein, 45 aa, Zea mays
  Clone ID: MRT4577_177879C.1.pep
KKGPVFPTLPPRKEKWVKKLFGFNQLGLRVSPPHDFYLYVGKYSC

SEQ ID NO: 270046 - protein, 1209 aa, Zea mays
  Clone ID: MRT4577_17787C.1.pep
PEVMRLNKLGSFSMSQLGQSKSPFFQLFKRNKANSSNFADSMLKLVRTLPKVLKYLPSDKAQDARLYILSLQFWLGGSPDNLQNFLKMIAGSYVPALKGAGIKYDDPVLYLDSGIWHPLAPTMYEDVKEYLNWYGTRRDANDRLKDPKAPIIGLVLQRSHIVTGDDGHYVAVIMELEAKGAKVIPIFAGGLDFSGPTQRYLVDPITGKTFVNAVVSLTGFALVGGPARQDHPKAIAALQKLDVPYIVALPLVFQTTEEWLNSTLGLHPIQVALQVALPELDGGMEPIVFAGRDPRTGKSHALHKRVEQLCTRAIRWAELKRKTKEEKRLAISNFGPKPEKGIVGTAADLNVFSSIYSVLSDLKKDGYNVEGLPDTPEALIEEVIHDKEAQFNSPNLNVAYRMNVREYQSLTSYASLLEENWGKPPGHLNSDGENLLVYGKQYGNVFIGVQPTFGYEGDPMRLLFSKSASPHHGFAAYYTFVEKIFQADAVLHFGTHGSLEFMPGKQVGMSDACFPDSLIGNIPNIYYYAANNPSEATVAKRRSYANTISYLTPPAENAGLYKGLKQLSELISSYQSLKDTGRGPQIVSSIVSTAKQCNLDKDVPLPEEGEELPPKERDLVVGKVYAKIMEIESRLLPCGLHVIGEPPSAIEAVATLVNIAALDRPEDGITSLPGILAATVGRDIEDVYRGSDKGILADVELLRQITEASRGAITAFVEKTTNSKGQVVNVTNNLSKILGFGLSEPWVQYLSTTKFVRADREKMRVLFGFLGECLRLVVQDNELGSLKLALEGSYVEPGPGGDPIRNPKVLPTGKNIHALDPQAIPTTAALKSAKIVVDRLLERQKADNGGKYPETVALVLWGTDNIKTYGESLAQVLWMIGVRPVADTFGRVNRVEPVSLEELGRPRIDVVVNCSGVFRDLFINQMNLLDRAVKMVAELDEPAEMNYVRKHAQEQAEELGVSLREAATRVFSNASGSYSSNVNLAVENASWTDEKQLQDMYLSRKSFAFDSDAPGAGMKEKRKAFELALATADATFQNLDSSEISLTDVSHYFDSDPTKLVQGLRKDGRAPSSYIADTTTANAQVRTLSETVRLDARTKLLNPKWYEGMMKSGYEGVREIEKRLTNTVGWSATSGQVDNWVYEEANSTFIEDEAMRKRLMDTNPNSFRKLVQTFLEASGRGYWETTEENLDRLRELYSEVEDKIEGIDR

SEQ ID NO: 270047 - protein, 84 aa, Zea mays
  Clone ID: MRT4577_177880C.1.pep
PCLGIPAGGPRSIESPGPDRGGSRRRRPTRMPPRPAAVGALAPAWPWRRGKRVGKRRRPCDPNAPYWPACLVCANSRALLCLSV

SEQ ID NO: 270048 - protein, 66 aa, Zea mays
  unsure (1)..(66): unsure at all Xaa locations
  Clone ID: MRT4577_177881C.1.pep
IKNEKKGYLPPPPIRKKKLNQILKQNXISNSQQIGIHLSQDFFLPFELISIILLVALIGAISVARQ

SEQ ID NO: 270049 - protein, 122 aa, Zea mays
  unsure (1)..(122): unsure at all Xaa locations
  Clone ID: MRT4577_177882C.1.pep
GEKGFPCPPNSAIGEGKKPPTRXGAGXSPNPRPPGNPXFLTKEGALPPPGVVGPPPPGAKKIPFGAPPLFFSPITKNRGFLVRVPPPKRGPPXPSKDRPLGTETPGPAXPRSKNPPGPPPGP

SEQ ID NO: 270050 - protein, 603 aa, Zea mays
  unsure (1)..(603): unsure at all Xaa locations
  Clone ID: MRT4577_177883C.1.pep
YCLFPLAFHSLDLQFQARPELGNSDPPTKGSPRSQGLVPLVLRCGNSSHPASKAAAKVVNSGGRRHGFRRQQRRRVGGRVAGARAGASDTASRTXVTKGRGLRRWRRIPREQHHEGSPVSPGLGNSAGASAGEDLAAQLHKRRYGPADDKPKGKQDAAAEEVESSVASVKSSFVPLEASPPPPPTLTRLDPNLGHLIATTGFSVGAGGADSDNSDDRTSKSSTAASAPRHDFSSVGFGRERDRARSRAPGAAHGKGIRAARVRGATMRVASSPAEAGNSRSSVESNLRSSNAAHARRSSAGVTSNGVHKILFPDGHQSDDEPPSGDMRYGTGRFYKENGSIEGRLGNCDSDSNHHTFDEASVGKFENGGTHSGLDLYGESMALLQSAQEALENEIQKFVEIRKETDEDSTAHQSEIEWSSSPVEELNEKIKMLELKLEEATMLINERDSKILELDALSHVQPQNTVACNNYPLSLQSDVDRLFLEKMEAEIQCFILTRASQDWKLLTMDQFALNEAQKSLLSDHKSLETKLRHAENRAMMLEEMVDKLESQCKALSETSEVLKLQAGASRASLFCSIQFVLLCIAIGTLLVRFLSSSPEIVPT

SEQ ID NO: 270051 - protein, 195 aa, Zea mays
  Clone ID: MRT4577_177884C.1.pep
MASAIEKSEAADHTSKVSMDGIVAYEEGKAQLSGETVVCTDEDNKRILWKTDIWMLSLLCMVYFLQSADKGIIGLTAVYGLKTDAHLKGNDYSNIGNIGYYAQLGVQPLAAWVLVKLRYRHVLPVIIVCWGISVAGGLAASKNYGGLMASRFFLGAFEAAVVPLFSMITIAFYRRSEQPFRVACWYSCYGPYTLI

SEQ ID NO: 270052 - protein, 147 aa, Zea mays
  Clone ID: MRT4577_177885C.1.pep
MQPAGSASRLAVLVAVVVLASSAACCRAQLASNYYAGKCGNASAVEAVIQSAVQARLAWDKRMVAGLLHMLFHDCFVQGCDASLLLDGPNTEKTAPQNSGIFGYDFIDDIKSDLEAACPGVVSCADIIIAATRDAIALCGGPSYAVT

SEQ ID NO: 270053 - protein, 41 aa, Zea mays
  Clone ID: MRT4577_177886C.1.pep
SKQTTTKGSSLWSGIGHRCWRSPSRHHRLGFGRLGPMPLWL

SEQ ID NO: 270054 - protein, 78 aa, Zea mays
  unsure (1)..(78): unsure at all Xaa locations
  Clone ID: MRT4577_177887C.1.pep
MVITAPTPDILGERQLGQDVRTKNAXASGAVXNLVKSSXGPARLDQXMYLDDLGDVPITNDGPPLLTMLQVEHPPAKD

SEQ ID NO: 270055 - protein, 145 aa, Zea mays
  unsure (1)..(145): unsure at all Xaa locations
  Clone ID: MRT4577_177888C.1.pep
PPHHNDHWEDAADIDPYSEYWTLYNLSFGKPMIXGDRDLLKEMWGKDMATSPPAGHDXLDLDELLXDPELQKLHAYRIAALRKEFDNRDSLYKPGHGEYREISVGDLHWEVTGSHXVICHXYHRXYYRCTIMHYHMKALAPVYVG

SEQ ID NO: 270056 - protein, 65 aa, Zea mays
  Clone ID: MRT4577_177889C.1.pep
SRNDGNKFSDLVWRAICTTIPGRECTPCQDPSGYRSPWSTCAVVDVINDDRPYRSNILLSPTGCI

SEQ ID NO: 270057 - protein, 60 aa, Zea mays
  Clone ID: MRT4577_17788C.1.pep
NTVSCIVCTCTARYRTFRKQQRELPLHLAQSKCTLQYKYDTCEKSTPHRQKAARSYLVPN

SEQ ID NO: 270058 - protein, 85 aa, Zea mays
  unsure (1)..(85): unsure at all Xaa locations
  Clone ID: MRT4577_177890C.1.pep
ILSIITCLPFSNISXIGIFVLFFQIYIXSFLLXCFXVNKQXFSFFLLFLYNNYCFFSLTTDIMLVFISILCDHIIHFLLFFFNHI

SEQ ID NO: 270059 - protein, 83 aa, Zea mays
  Clone ID: MRT4577_177891C.1.pep
IPTIKNNGSTDFRHALTISVLHHTRWATTIRHTMGSTSHIAGSMIMNTTVGAIEAPPGSLLMFTHLGLQDPNTMAKYTCYQYA

SEQ ID NO: 270060 - protein, 65 aa, Zea mays
  Clone ID: MRT4577_177892C.1.pep
CSVTLAWSSPWRSWFGTATRASALLGRQGRRLRLRVALVVVCVVASVAREHVVLAFALLSPPTLA

SEQ ID NO: 270061 - protein, 77 aa, Zea mays
  Clone ID: MRT4577_177893C.1.pep
HTLPLFFFFLNNNRLSAPTKGILGFCNKWRRHFEDGTQEVFFLQIQKSGLVRIQAKKSSSMGKTVLLSSSTYLCQQS

SEQ ID NO: 270062 - protein, 50 aa, Zea mays
  Clone ID: MRT4577_177894C.1.pep
VYSPLKHFGLTTPGLRGGILERNDVRYRFVVDVAGSNVEAEAAAADAASN

SEQ ID NO: 270063 - protein, 367 aa, Zea mays
  Clone ID: MRT4577_177895C.1.pep
MGSLASERKVVGWAARDATGHLSPYSYTLRNTGPEDVVVKVLYCGICHTDIHQAKNHLGASKYPMVPGHEVVGEVVEVGPEVAKYGVGDVVGVGVIVGCCRECSPCKANVEQYCNKKIWSYNDVYTDGRPTQGGFASTMVVDQKFVVKIPAGLAPEQAAPLLCAGVTVYSPLKHFGLTTPGLRGGILGLGGVGHMGVKVAKAMGHHVTVISSSSKKRAEAMDHLGADAYLVSSDAAAMAAAADSLDYIIDTVPVHHPLEPYLALLKLDGKLVLLGVIGEPLSFVSPMVMLGRKAITGSFIGSIDETAEVLQFCVDKGLTSQIEVVKMGYVNEALERLERNDVRYRFVVDVAGSNVEAEAAAADAASN

SEQ ID NO: 270064 - protein, 74 aa, Zea mays
  Clone ID: MRT4577_177896C.1.pep
KEEGASLCNLTSLLRRQCSPSCISLYLKRMVSLPARRGYGCLHTAGRALLSLILSLAFERHGIEGTSSPGMRRP

SEQ ID NO: 270065 - protein, 124 aa, Zea mays
  unsure (1)..(124): unsure at all Xaa locations
  Clone ID: MRT4577_177897C.1.pep
WPGFEVHELRGKSKVDLQAQLXKECKSELSLXLRVXKATGGAPNKLSKIKGVRTSIARVLTVISKKQNAALREEYKKKKLLPLDTXRPENTRAILRRLTKDQVSVNIDREKKXEKYFPMRKDAI

SEQ ID NO: 270066 - protein, 114 aa, Zea mays
  unsure (1)..(114): unsure at all Xaa locations
  Clone ID: MRT4577_177898C.1.pep
SWNEKRQGCRAHXQFSIGPELGQPKRQIPSRLDAIPCTWRASSQLHIGLDQAGSRCPPPQRFLRGPRALEPHVRTQGRGQSERPAAERKDMRLYADRGAPPNXAKACAPPGGGG

SEQ ID NO: 270067 - protein, 165 aa, Zea mays
  Clone ID: MRT4577_177899C.1.pep
IWRKIGRKQHRQAQRGAARRDHATLLSAPWRGRRGGSPASARGRAPPSCSAPAAAGTASAWWGASARTRRGGGRRSAPCKGRGPSPRCPCRRGGPRPRSSRGRPRTPASGTEASRRRPAATTASGSRLPRRGRAPAGSAGTPTRPTRRRWAGSCRRRRTAASAGP

SEQ ID NO: 270068 - protein, 100 aa, Zea mays
  Clone ID: MRT4577_17789C.1.pep
MAQVAKTLLLVALVVVSAVELCRAIEFDERDLASDEALWDLYERWQTHHRVHRHHGEKGRRFGTFKENARFIHARSSPGTPLPSDRLIHLGVELVLLARK

SEQ ID NO: 270069 - protein, 74 aa, Zea mays
  Clone ID: MRT4577_1778C.1.pep
PKESPCVLSVGLRVASSFKHDDGFPADGVSIAHWYPSKRKIGYSKAKKDPPCFMVIVTKKCLQGTLLRLRAPRL

SEQ ID NO: 270070 - protein, 67 aa, Zea mays
  Clone ID: MRT4577_177900C.1.pep
LSCCEHGRILCTVSVLMCWFAAALGGIGIKICFLFPSALYTYKLAMNRSDKHKKKKKNQKTKGGRRL

SEQ ID NO: 270071 - protein, 220 aa, Zea mays
  Clone ID: MRT4577_177901C.1.pep
MVHSAYDAVELVADVPGHIEAVASHAGKLLVAVSDTEGFLWGSDCSLRIYSAPSPSDGGGEIRWDGPYALERQEPRFWRRPPLAMEVSASRDLLISLSEWIALHRLPGLETVAVVSSKTKGANVFAWDERRGFLAVGRQKRLTVFRLDSGREFVEVKEFGVPDILKSMAWCGDNICLGIRREYMIINSMTGALTEVFSSGRIAPPLVVPLLTGELILGKV

SEQ ID NO: 270072 - protein, 77 aa, Zea mays
  Clone ID: MRT4577_177902C.1.pep
FVEYLHANLHPVLEKSYPVQPQHNHLTICNMAKTVLIHQTELNYRSHTAKNGKISKEQMQEQIKYHLNKMVHHSSAH

SEQ ID NO: 270073 - protein, 52 aa, Zea mays
  Clone ID: MRT4577_177903C.1.pep
HDWTHTKRFVDAYMLNTWFIKQTPLDELKYNHVRYCRYLRRYPACVHLTEHI

SEQ ID NO: 270074 - protein, 84 aa, Zea mays
  Clone ID: MRT4577_177904C.1.pep
GSRSAKFLLSLTIHNSSKNQAQRNLQLRGSNQYWTSTMDTNPEIVQPADWQTGEAVPVFLIHDGGGTTFSYHCLEPLCRPVYGI

SEQ ID NO: 270075 - protein, 141 aa, Zea mays
  Clone ID: MRT4577_177905C.1.pep
QKVLKKKPRKGSKNTKPITKTEDCESFFPFERPPQVPDDDEEIDEDIAEQLQNEMEQDYDIGSTIRDKIIPHAVSWFTGEAAQDEEFEVMDGEDDDDEDNDDEDEDDEDDDDDDDYDSKKTKGTAGGEGQQGERPAECKQQ

SEQ ID NO: 270076 - protein, 126 aa, Zea mays
  Clone ID: MRT4577_177906C.1.pep
RPTDTKKMWAGQGPSGQTGKRRGLDMPRKTQLYWEGPSTPEAKRRRGGVLTRVQKNQKKGDGGLGAPKKRKPGKEIRCGLGNGGGGGAITPGGQRPQKTNGTPGLEPKGGLPENNFAHPPGGNHTP

SEQ ID NO: 270077 - protein, 72 aa, Zea mays
  unsure (1)..(72): unsure at all Xaa locations
  Clone ID: MRT4577_177907C.1.pep
MRTAIWGIWNGTTLVLLLSPGPTLIRICKKGWVEQYSPIPYVATLMNXMMWEKYRLPLMHPHSMLVITITGT

SEQ ID NO: 270078 - protein, 41 aa, Zea mays
  Clone ID: MRT4577_177908C.1.pep
IQPFITTFLFYPSISSLPIIVNQNYTKCCYLHPPICNVICF

SEQ ID NO: 270079 - protein, 78 aa, Zea mays
  Clone ID: MRT4577_177909C.1.pep
EGPSANLDSGGGGGVMTFSISYRFLGAVWIVCRSVVDETYACVSGSRSCLRAMSWLCETICVSSFGPFFGCFTGQGVS

SEQ ID NO: 270080 - protein, 57 aa, Zea mays
  Clone ID: MRT4577_17790C.1.pep
CSTRVMYTGAASVAAYLVSSTLLFSYNGIIHEGRQGVDYVGVSPLNYCFCPPRSCQC

SEQ ID NO: 270081 - protein, 110 aa, Zea mays
  Clone ID: MRT4577_177910C.1.pep
HPQTRFKVDVNAQENKLTGAVVITDSISVVVVEGGKKSIKRYNKLMLNRIDWPAAVGGDEDTEMEADKPVNSCVLVWQGSVAKPTFHRFRTLVASADLCWLHARDVWPVL

SEQ ID NO: 270082 - protein, 68 aa, Zea mays
  Clone ID: MRT4577_177911C.1.pep
MFDHFLYDCQQFCCQSDCMCSIIRRISTNSFVIPLLVRNVYESNSSFIQWIHYSSLKELVLSLRYVYP

SEQ ID NO: 270083 - protein, 75 aa, Zea mays
  Clone ID: MRT4577_177912C.1.pep
YILPPFFFICRWIVLYYPATSKYRFRMQTRTYNGYISSCPIYQGLCIITNTFFTHTQHRWSVREVIHIYTPATVS

SEQ ID NO: 270084 - protein, 218 aa, Zea mays
  unsure (1)..(218): unsure at all Xaa locations
  Clone ID: MRT4577_177913C.1.pep
PGASVAARARGDRRLHAYISAQLPSASPCSYDYRYKEGSAGALGVVGTDSATIALPGGKVAQLQDVVLGCSSTHDGQSFKSVDGVLSLGNAKISFASRAAARFGGSFSYCLVDHLAPRNATGYLAFGPGQVPRTPATQTKLFLDPAMPFYGVKVDAVHVAGQALDIPAEVWDXQSGGVILDFGTTLTVLVTPAYKALVAVLTKLLARVPKVDFPPFEH

SEQ ID NO: 270085 - protein, 500 aa, Zea mays
  Clone ID: MRT4577_177914C.1.pep
MIPQEFSSIPNLIVAGNSFVNMPASPPQALTPPPNPRGRPDDRRGPTSAPTVPETPIDPDDKKMQTGPLVGIAVGSIAAASCVLFALVLCLHNARKKPDDGSSEAKASSREVMDSSHDNAAVATSDLQLIQPAGKMTPDDRAHGPNGCTAKRPKQQVTVTTVSSYTVAALQVATNSFCQDSLLGEGSLGRVYKAVFPNGKVLAVKKIDSASLSLYEEDNFLAVVSNVSRLRHPNIVPLAGYCVEHGQRLLAYEYVGNGTLHDMLHFSDDDGMTMPGKTTRLAWNTRARIALGTARALEYLHEVCLPPVVHRAFKSSNILLDDEYSPRLSDCGLAALSPNPETEREAFAGVVGSFGYSAPEFAMSGTYTAKSDVYSFGVVMLELLTGRKPLDSSRERSEQSLVRWATPQLHDIDLLAKMVDPALDGLYPAKSLSRFADIIAICVQSEPEFRPPMSEVVQQLVRLMQRASIVRRQSDDQLGYSYRVPERDGGGTAGGDVVVA

SEQ ID NO: 270086 - protein, 146 aa, Zea mays
  Clone ID: MRT4577_177915C.1.pep
GYSAPEFAMSGTYTAKSDVYSFGVVMLELLTGRKPLDSSRERSEQSLVRWATPQLHDIDLLAKMVDPALDGLYPAKSLSRFADIIAICVQSEPEFRPPMSEVVQQLVRLMQRASIVRRQSDDQLGYSYRVPERDGGGTAGGDVVVA

SEQ ID NO: 270087 - protein, 126 aa, Zea mays
  Clone ID: MRT4577_177916C.1.pep
DRNSLDSTSSTSKRRKRDKGNELSKSSDPFLDMLGGFRGDLKNASNHFGKMTEIMEREAKLQEEAAHEDPMQALQQKSISELTRLGFTGTELVKAAGVFVNVPNQMTMLFALPETLRREFILHMIQ

SEQ ID NO: 270088 - protein, 107 aa, Zea mays
  unsure (1)..(107): unsure at all Xaa locations
  Clone ID: MRT4577_177917C.1.pep
TLSAKEMQLVCLGGWALAVEVVWAAWRTPDGRTAARQAGSNCMGPGRTGGPRRRGQCVSARGRGGAARSGDQVGDEGRRSGGPGSXGAWRPHARVRTLTPEDSRSAD

SEQ ID NO: 270089 - protein, 231 aa, Zea mays
  Clone ID: MRT4577_177918C.1.pep
MLANSGFSWDENRKMVQCEKQQYEDHCKRHPDAKGLYGISFPHLDTLAAIYGKDITTGEGAEGLGDAISNLEKEITLEESHDQEVEEDSMSRETPRWASDRNLLDSTSSTSKRRKRDKGNEVRKSSDPFLDMLGEFLDDLKNASNHFGKMTEIMEREAKLQEEAAHKDPMQALQQKSITELTRLGFTSTELVKAASVFVNVPNQMTMLFALPETLRRGFILNMLANEAQKN

SEQ ID NO: 270090 - protein, 125 aa, Zea mays
  unsure (1)..(125): unsure at all Xaa locations
  Clone ID: MRT4577_177919C.1.pep
MLSLLLKNMPGVGSWEEPIRVMSGRPEKAYKPALQPHVDTSSNLELYPDSVQASTECLXPXPTKPGPGGGLDARYSTFKGGLTTLLNHVYPLAGRIVANPSSGAPELQCHNQPTALGAGGSQRRP

SEQ ID NO: 270091 - protein, 130 aa, Zea mays
  unsure (1)..(130): unsure at all Xaa locations
  Clone ID: MRT4577_17791C.1.pep
MMRSSPARSREKNILTTCVFTRQFWHHLLXPLGLGGISPRQNEVCFAEWWRKSSRRVEKDRREGFHSFVIFGAWTLWNKRNIYVFEGASPSLSVAQNFSREEVRLWCLVGAAKLQVLVSGWVIFGHGGMA

SEQ ID NO: 270092 - protein, 137 aa, Zea mays
  Clone ID: MRT4577_177920C.1.pep
ASNTRGIACTIAWLDFKIQLYLLYHSDTYGYKYSSRHFLLCFQEKKTVAKITVAFDIQHTAKTGPKNISSAETLFPLLIIESLLEFVLFIRNFLIVIGFFWCLQIHRLFFHIQICEEVQRNTGTNNSASTLSLKKVT

SEQ ID NO: 270093 - protein, 94 aa, Zea mays
  Clone ID: MRT4577_177921C.1.pep
PVLGREQKARDAVLFPSKNAATGFSRKLPPQQVKVFKEPPGVFQVVPSQTFQVHGPGFGPPQGPTPPLGLLLRGFKIQKTVFSMAVWPRFYQCV

SEQ ID NO: 270094 - protein, 108 aa, Zea mays
  unsure (1)..(108): unsure at all Xaa locations
  Clone ID: MRT4577_177922C.1.pep
MHEANPALRLWRLKRDGMCSPGEGTRADYDYLMRLLLIXESGGSEKXQLLRILDGSFTTSIITXTLAIDYKIRTVERDGRRLNLHICDTARQDRCRTITTAYYWGALG

SEQ ID NO: 270095 - protein, 126 aa, Zea mays
  Clone ID: MRT4577_177923C.1.pep
AKLNEKKFLAPSSPASSLLSQHRLRIIIENARELLKVIDEFGSFDSYCWSFLSNKPTVGRYRHTREVPLRTAKADAISQDLMRRGFLGVGPTVVYAFMQAVGMANDHLVTCYRFEECCDLESCAAP

SEQ ID NO: 270096 - protein, 495 aa, Zea mays
  Clone ID: MRT4577_177924C.1.pep
MIRSHSAELLRDGVSLEQIGLDFSPELTETTAPDSIRMLVQTVLSDKKPEEIQSVVESLLSKVINELEHRIASQSELVKETMDTNGCNSVLRMESPCNTNDSKSLSRVDPPQVELTSCSDLEKVKETMDTNGCNSVLRMESPCNTNDSKSLSRVDPPQVELTSCSDLEKATENIKMDEVDENALSLTEDVSTLVHAPLSNDNVNKNMPKPVRNFDREEKQIQDLKSNMSTVKCCMEQLKLLYSEDLKKLGNQLRIVSHAASGYRKFVQENRKLYNQIQDLTAKSNEEGGEGGEEVRELKEQIACLRAALARKDGGQESIRSTQSSPDIYRMRTGNGLPALRHPIVDGSIENDSALGDFAEHSPFGSSNSLPELGPDGTQDLAFYQRSSPEQQWSWSGSVATEDSDDFEVATNCSSDLDCVRPSSAPKASGLSNGGGSAARKTQLKGSKSSDVRGVNPGKRSSPLQKKLSAPSPTVTKKSGTEGKKTPNGKTGAKK

SEQ ID NO: 270097 - protein, 82 aa, Zea mays
  Clone ID: MRT4577_177925C.1.pep
YTLLQGSLANSEECYSSRSTMTSLSAVPETSRKPTPDSPCSTYGSRIIHDCGPRIVHVPYNHDNGPTTACPQSTDIKPDLYS

SEQ ID NO: 270098 - protein, 48 aa, Zea mays
  Clone ID: MRT4577_177926C.1.pep
IMCKSPDFSSGSSGGTFVLHGTWDTSCKRGSGWLKGDIWSYVSQGRDH

SEQ ID NO: 270099 - protein, 248 aa, Zea mays
  unsure (1)..(248): unsure at all Xaa locations
  Clone ID: MRT4577_177927C.1.pep
MAAATGRTMKTMALVVVLAALLCSISVAAAASGGLSSYVVYLGQHAHGAALGTHGAEELQALERDAAEAHCDLLAGVLGGDKQKAREAIFYSYTKHINGFAANLDAATAAEIAGKPGVISVFPNQGRKLHTTRSWQFVGLAGPGGVLHGGAWRKAKFGADTIIGNFDTGVWPESESFRDDGLGPVPSHWKGACDKGQDDKFLCNRELIGARYFNKGYAAAAGALNASMNXPRDMDGHGTHTLSTAGGS

SEQ ID NO: 270100 - protein, 54 aa, Zea mays
  Clone ID: MRT4577_177928C.1.pep
TPLSTLKPLLSQIILISPSSHGTQGFGDKDTFISSSISLYSFLHSIHVPSLSLY

SEQ ID NO: 270101 - protein, 151 aa, Zea mays
  unsure (1)..(151): unsure at all Xaa locations
  Clone ID: MRT4577_177929C.1.pep
GFLLGDDSHTKAYRVFSESSGLVKVSSSVVFDETNGSATEPVVDVHDVYEEDIPTVAIRTTPLDDVRPQHQKXQDQRSASSMVHPPTRDDEQVIQXKEGDHVGDQDDHVMEEKAQLTRPTQVRASIESNHTVDQIVGHISKAVTTRSRVEL

SEQ ID NO: 270102 - protein, 42 aa, Zea mays
  unsure (1)..(42): unsure at all Xaa locations
  Clone ID: MRT4577_17792C.1.pep
EVXYFLHLIRRLLPPSVLCHPRFASAGAPHRLRSCSLGSCTP

SEQ ID NO: 270103 - protein, 147 aa, Zea mays
  unsure (1)..(147): unsure at all Xaa locations
  Clone ID: MRT4577_177930C.1.pep
MALRRQLCLGVRGLMATTSADKSGFMDSNPIRXPDTDRAASEREXSMFCIVGRTRDALTFAXFARRYGKSYYSASEPQXRFRLLQRSARPGTTQSEKALRTAVHMYRFLXLSXEECRANRVSWLQNCSATXLDGNHQMRAAADVEVS

SEQ ID NO: 270104 - protein, 45 aa, Zea mays
  Clone ID: MRT4577_177931C.1.pep
HPGIIVVLASESERANEHKYRKYLAHPIKYDAVIAFVVLQASWSP

SEQ ID NO: 270105 - protein, 233 aa, Zea mays
  Clone ID: MRT4577_177932C.1.pep
LDGCGATSCHETSSGGNLLRFGITMQGRGSKVWDVVLDTSTMEISCGCRKFERMGLLCSHALKVFTLQNVDTIPEKYVLKRWTKDARRSMYTLAQDDSTQHECTEAELAYRNRAMHYAYNLIIKSQELEESRKIFWDSLETGEKALEVFFEMRNMRTQAAKDADKNVKKKKKTSKGTNPKKAKQAPGVSSTGPELIVHTNEHQFQSSQDAQGNATIGRPYYYQQAFPNAPIQP

SEQ ID NO: 270106 - protein, 62 aa, Zea mays
  unsure (1)..(62): unsure at all Xaa locations
  Clone ID: MRT4577_177933C.1.pep
SDFLCSLPAFSSSRFFAASASCCLIKXRRSTSFRALFCFSLLLKLHISSMSFLFLKLLSFTP

SEQ ID NO: 270107 - protein, 67 aa, Zea mays
  Clone ID: MRT4577_177934C.1.pep
PCGTTLNPGVPVVGYGQKAAGGARFWFVKNLWGQGWGPPGSLRIKKNVPGNPEGFLGFPIRPSYPLM

SEQ ID NO: 270108 - protein, 197 aa, Zea mays
  unsure (1)..(197): unsure at all Xaa locations
  Clone ID: MRT4577_177935C.1.pep
PKKKKILLSHSNAGRSLSLEHSGHLYHLXXMRVEASDMXCTCKAIGLVGDXRKEXSWEKEXLEILAXARDXXGGGESIGSVFXDVLDAMGCXTAKKRDCVKFLFGLGFXKQMQAKKTKDFSGSWRMKIALSRALFINPNNLLLGEAPNPLNLEACVLVEETLKKFDRLLVGILHSQEFLNGGGANIIHMQNKKLKLY

SEQ ID NO: 270109 - protein, 227 aa, Zea mays
  Clone ID: MRT4577_177936C.1.pep
MKTSTIILAAAAVVANAHYDDTHVGFTTVYKNGTVTEPTQYTTSTVYSTKTYTVTQCPPTVVNCPVGHVTTETIAVSTTICPVTEVHNPTEPAHPNPTEPSKPHEPTHPGQDVITKTQTYAYPHPTNHGESVTKTITYTVPVDHTNNGTAVYPPHTYHPVFWWCSLPVSLLLLLTPGSEGGKTPQGEQPSNDDGTDSGSNGGSKGSDSGSTAAAPRARVLAPAPTLA

SEQ ID NO: 270110 - protein, 128 aa, Zea mays
  Clone ID: MRT4577_177937C.1.pep
KRGKGKKTAKTSIRLWKKRRCAKNIIWKVKRNPKEPHKKRRCHYIKGGHTSGRGQRGENETKKRGHNGAGALGKAKKTKGPKGQKRSHWQKNSDRRAQRHKREENVKKTPTDLMPSKSKQTADTRNTG

SEQ ID NO: 270111 - protein, 63 aa, Zea mays
  Clone ID: MRT4577_177938C.1.pep
LVLDRYGRLFFSSIFHLLTPFFLIVSSSFIFSLFSETPIKPPTPNLLSKNLLKILIQLPVLGF

SEQ ID NO: 270112 - protein, 45 aa, Zea mays
  Clone ID: MRT4577_177939C.1.pep
TISSRSLKRTLDICSCVTDNTRVRTLCICRSYLIATCIKCETNCA

SEQ ID NO: 270113 - protein, 128 aa, Zea mays
  Clone ID: MRT4577_17793C.1.pep
MPLNIDIDLFKLDIDELIADYSKENCTSLFEFKRVWMGKKFTYIYEGRPKTYSGLFMQSLFLHCVGHLASQRSLHQRLAGLYCLYCLCECQPYWPQFKIYLCFGECRPLKDVVVLADLIGLPLVPALV

SEQ ID NO: 270114 - protein, 179 aa, Zea mays
  Clone ID: MRT4577_177940C.1.pep
SSGKPEVCSYPFTTRGILMGHIVSNQERFQVTDTPGLLTRHDDDRNNIERLTLAVLSYLPIAVLYVHDLSEDCGTSVADQYITYKHIKDRFGDRLWLDVISKCDLLGKKEPISFHDADEDVARYRRLGPEGALQVSVQTEIGVKQLKERVHELLTSQMARIQSSKAEHETHEVATSVVY

SEQ ID NO: 270115 - protein, 88 aa, Zea mays
  Clone ID: MRT4577_177941C.1.pep
MEMKKIACAVLVAASAATVALAAEDPAPVPTSGSSAVATAVVCRLGGAVASFFPTTFNDRLGRPLAEVKKHCPAGEMPAEHPDARQCL

SEQ ID NO: 270116 - protein, 208 aa, Zea mays
  Clone ID: MRT4577_177942C.1.pep
MERLQRIFGAGGMGQPPSDSPLLDSSEQVYISSLALLKMLKHGRAGVPMEVMGLMLGEFVDDYTVRVVDVFAMPQSGTGVSVEAVDHVFQTNMLDMLKQTGRPEMVVGWYHSHPGFGCWLSGVDINTQQSFEALNPRAVAVVIDPIQSVKGKVVIDAFRLINPQTMMLGQEPRQTTSNVGHLNKPSIQALIHGLNRHYYSIAINYRKN

SEQ ID NO: 270117 - protein, 105 aa, Zea mays
  unsure (1)..(105): unsure at all Xaa locations
  Clone ID: MRT4577_177943C.1.pep
GAEPFQKRLKTQIKSEIQLGXXHRKYCTGIDHHCNRYDXERGQSPFQKFHPHFPIYXGWIYAPXKYMLLLTRFNSQLIFIYILLKXLMGNVTTXXEPPSPRSNIT

SEQ ID NO: 270118 - protein, 127 aa, Zea mays
  Clone ID: MRT4577_177944C.1.pep
ELGLKPLAVIRGMADAAQAPEEFTTAPSLAIPKALKNANITAQQVDFYEVNEAFSVVCEANMKLLNIPANKINVFGGAVSIGHPIGCSGARIIGTLITVLKAKNGRIGVASICNGGGGASAVVIERL

SEQ ID NO: 270119 - protein, 42 aa, Zea mays
  Clone ID: MRT4577_177945C.1.pep
LDHMETDEVSIVASRQLLQTIAQDLGKLGADAHKEDAQYALT

SEQ ID NO: 270120 - protein, 65 aa, Zea mays
  Clone ID: MRT4577_177946C.1.pep
MSVKMPVRKFFRHGNSDRDVELILSRHPYFHLTQLASAPMPPPFAALPQPSQCRSCRRCVRSRSH

SEQ ID NO: 270121 - protein, 157 aa, Zea mays
  Clone ID: MRT4577_177947C.1.pep
NGDKNLSRFNKLLKLCTLTILHIGNRLRHPTRSSPSNRTKPPQCSWTRARYRRLQLSSSVTGLLGVDYAFLGVGTDGNRSLQRRSRRNAAMRSLELLVDEGGADVSWWTQAWRSSATTGELGGDARPSSSPTAPPHRLQIHRAPTFDSCWLFNLPGW

SEQ ID NO: 270122 - protein, 49 aa, Zea mays
  Clone ID: MRT4577_177948C.1.pep
YIIFNYFINYPYQMGASGKIQLFSTTGTIKLRGPIQIAAPDSKRRPSSI

SEQ ID NO: 270123 - protein, 75 aa, Zea mays
  unsure (1)..(75): unsure at all Xaa locations
  Clone ID: MRT4577_177949C.1.pep
MYCRNAQPRLQIIGMNQRNTANVVEDLLGDCEYQLQAPYIMYRKAAQEXVYEVXNYNSDERHEVGPLFSWNMTAY

SEQ ID NO: 270124 - protein, 316 aa, Zea mays
  unsure (1)..(316): unsure at all Xaa locations
  Clone ID: MRT4577_17794C.1.pep
SEAWTGLRLGHAFKYRAMALKAVSREAARHKKAGSGDGDGHRRIWFERDVLLSLRHPLLPSLRGILATEAVVGFAIDRCGGGDLNSLRRRQTEKMFSDSVIRFFAAELVLALEYLHSLGIVYRDLKPENVLIQDSGHIMLVDFDLSTRLPPPPPQEPDAPVISPKPAPPVAAPSPSRGSARKPAGAALCFPFRTAIATKPAAPATDSPSPLSTSRTASTATSSSTXTALTPSTATTVEKAQQLPQWPWSFTPVTAPSCRQSTDRGGSAAESYMNPGTAPARAAGESCRRRSLMRESANVDRNSSRPMSPNRFRRRR

SEQ ID NO: 270125 - protein, 70 aa, Zea mays
  Clone ID: MRT4577_177950C.1.pep
RGVGCFLSPDRSLRLHCLLVHQPSFPLLNSSWPHQTTASCFDVLPNLFEHSVHICLKKEKYNSFCPLHLL

SEQ ID NO: 270126 - protein, 65 aa, Zea mays
  Clone ID: MRT4577_177951C.1.pep
RRGLLFVFVCKINVPAMSFRQQCIRHCTANVRYEVALAGIPSHRIYEQRSVANVTNRRKSPDRPA

SEQ ID NO: 270127 - protein, 377 aa, Zea mays
  Clone ID: MRT4577_177952C.1.pep
GSCFHPQGEHFHALLGTNNSALELFLIKRKVKGPSWLSVSKFVTRPSTQRVSWCKFEVTVDCPKDISVLTTSTNLEVPTVVVGAVNLKTIINEKHNVHEIVSASLICCHRVKIDSPMRPEDWQKRGMLSHFTVVRKLEGSIFPIGLAKEASDRNQKAGSNVLALESSERALLNRLMIELSKLDCDVLVGHNISGFDLDVLLHRAQTCKVPSSMWSKIGRLRRSLMPRLTKGSTLYGSGASPGIMSCVAGRLLCDTYLCSRDLLKEVSYSLTQLAETQLKKVRKEVSPHDIPMMFQSSGELLKLVEYGETDAWLSLELMFHLSVLPLTRQLTNISGNLWGKTLQGARAQRVEYLLLHSFHARKFIAPDKFARNKELNS

SEQ ID NO: 270128 - protein, 96 aa, Zea mays
  unsure (1)..(96): unsure at all Xaa locations
  Clone ID: MRT4577_177953C.1.pep
GFFPWQVVLLGRLALLGGVGXLEELFPLGSRVPLCGMSPHGGRFILIGECFPSGECLRVSSALQAITLSPRRVASSNVWRYLQTTFGFIQASGTRD

SEQ ID NO: 270129 - protein, 78 aa, Zea mays
  unsure (1)..(78): unsure at all Xaa locations
  Clone ID: MRT4577_177954C.1.pep
PAREESIVPGGGDLLVYATNVLDKISKADXDHTEGLNIIMNRMKDPXLTISEYADIDVVILISSRIRQKDLSWGYDAI

SEQ ID NO: 270130 - protein, 46 aa, Zea mays
  Clone ID: MRT4577_177955C.1.pep
DHTPPLTVLIILPNRIRTITFKIIQLYNHSPPIYIKHIVNILSHSY

SEQ ID NO: 270131 - protein, 52 aa, Zea mays
  Clone ID: MRT4577_177956C.1.pep
LNCIVHINWMLQISINSPLHLKNTQHAMTHILQQATALLCAYKSKNKRPMPG

SEQ ID NO: 270132 - protein, 160 aa, Zea mays
  Clone ID: MRT4577_177957C.1.pep
MMDESFLDRMVSQLRSTCKYYTGYPKDLGRSRIIPFTSERQFVQLLHEGRPVVVAFTIKCTYTQHLDKVLEEAAAKFYPHIKFVRVECPKYPGFCLTRQRNEYPFVEVFYNPEQAASPGKSVDPNITKYSVKVLPFNYDQSVYGFREYFKKHGFKYSETN

SEQ ID NO: 270133 - protein, 196 aa, Zea mays
  Clone ID: MRT4577_177958C.1.pep
PGPSSSSQRRRSLSRSLPYSRSAHRRRRSGSQRRRQRLTLAPSPPVLRTPAGDPAYYTGYPKDLGRSRIIPFTSERQFVQLLHEGRPVVVAFTIKCTYTQHLDKVLEEAAAKFYPHIKFVRVECPKYPGFCLTRQRNEYPFVEVFYNPEQAASPGKSVDPNITKYSVKVLPFNYDQSVYGFREYFKKRGFKYSETN

SEQ ID NO: 270134 - protein, 160 aa, Zea mays; identical to SEQ ID NO: 270132
  Clone ID: MRT4577_177959C.1.pep

SEQ ID NO: 270135 - protein, 378 aa, Zea mays
  unsure (1)..(378): unsure at all Xaa locations
  Clone ID: MRT4577_17795C.1.pep
MAQVAKTLLLVALVVVSAVELCRAIXIDERDLASDEALWDLYERWQTHHRVHRHHGEKGRRFGTFKENARFIHAHNKRGDRPYRLRLNRXGDMGPXNSCSGFADSRINDLRREHTAWAGASRWFMYDDDTDLPWSEDWRXEGRVDDHLVPGXCRSCWSFSRXVSLEEIRHIRSRSLVXLSEQGLIDWDXGTRPGCEGGVIEHALDXIKFHGGITTESAXPYHASNGTCDGDRARRGGGVVVVIDGHQAVPAGSEDALXAKAVAHQPVSVAIDAGGQALQFYSEGVFTGDCGTDLDHGVAAVGYGVSDDGTPYWIVKNSWGPAARQWGYVRLKRGAEMGGCPDMIILTWYFRRFLPDPPQALHRGLVTGGAYSQRREEL

SEQ ID NO: 270136 - protein, 103 aa, Zea mays
  unsure (1)..(103): unsure at all Xaa locations
  Clone ID: MRT4577_177960C.1.pep
MVAATTAGMFLVCFESLCPCFGSKSKDGSEDHVLAEHSNSLNSSEMRSISDRIAASPLRVPASPSRFSLSSPPSRNEPLNISLEHVXKLTHNFAPTLMIGEGY

SEQ ID NO: 270137 - protein, 87 aa, Zea mays
  Clone ID: MRT4577_177961C.1.pep
LDTDDAMCTSVASEQQILAVGCSRGVVELYDLAENTRHIRTISLYDWRYSVEDTGPVACISWTPDNCAFAVGWKFRGLTVWSVSGCR

SEQ ID NO: 270138 - protein, 55 aa, Zea mays
  Clone ID: MRT4577_177962C.1.pep
YIFCLFCVFFLTSGGAQKSLVKLPFYIKTRVTGKTNFPQTTLKIALDNYQRMPVI

SEQ ID NO: 270139 - protein, 52 aa, Zea mays
  Clone ID: MRT4577_177963C.1.pep
NAYHYEVYIFRDDYLYVLPKKITDQAGVAGYGARLDAAVMLTAKRILLIKFP

SEQ ID NO: 270140 - protein, 76 aa, Zea mays
  Clone ID: MRT4577_177964C.1.pep
LVCLPIFSILMMFRNDHLLFWCFRAPSRFVLMVLSWFYLLIANRALFSMFWVWAYELKLTGVCNVRPAPNFRLSIP

SEQ ID NO: 270141 - protein, 55 aa, Zea mays
  Clone ID: MRT4577_177965C.1.pep
HRKHPRSEHSFRVFTATIGGPMQPPLHGIQSPLQPPLVLWLEQLTPPLQRRNRAI

SEQ ID NO: 270142 - protein, 81 aa, Zea mays
  Clone ID: MRT4577_177966C.1.pep
PRVLLLVRALVRSRVRKVFGACLRATWGRNIGLMLLPCSPALPPRLHRPRRQRLCKLHRVLAPTVVRALMTIGHALRWHLC

SEQ ID NO: 270143 - protein, 104 aa, Zea mays
  unsure (1)..(104): unsure at all Xaa locations
  Clone ID: MRT4577_177967C.1.pep
GGGGGGGGGLLPPQRPTPPRPLAASPVAPPRPPPVPASPARSTLPWWPRRPHRRVHLISRGLGTACQRPTHTPTNSLDGRRVLLRLTRLELVRRRRTQRSXXNH

SEQ ID NO: 270144 - protein, 100 aa, Zea mays
  unsure (1)..(100): unsure at all Xaa locations
  Clone ID: MRT4577_177968C.1.pep
GKAGRGIGSHTDYGLLVIAAQDEVGGLFIRPPSEEEQTANWQTSAAVXEDGEGWVYVPPVPDVFTVFPGDMMXYITNSFLPSTPHKVGLNTRERFAFAYF

SEQ ID NO: 270145 - protein, 106 aa, Zea mays
  Clone ID: MRT4577_177969C.1.pep
SKSIEGPLDTGFLFKKSSIGGARGGPFNLGRAWGDSSGIVLWYPNMGEEGVPVGWDGRQISKRERKGLYYGGCKCFGPGAAPKKKKKVGWALAPPEGQANPLVGTP

SEQ ID NO: 270146 - protein, 315 aa, Zea mays
  Clone ID: MRT4577_17796C.1.pep
MPLNIDIDLFKLDIDELIADYSKENCTSLFEFKRVWMGKKFSYIYEGRPKTNSGLFMQSLFLHCIGHLTSQSSLHQRLAGLYCLYCLYECQPYKPQFKIYLSLEECRQLKDVVVMAKQNGLQLVPALVKRMLDKDMFLFGYMNLIDDNGDKQVEEMTALQNKRVKFACDKLFANTQAERYLHMDLGAEFELDSIKKLSKEYAEAKELALAEASQTVEVDDAKHLLQSERLLGDKIDEVVKEWDVQKEGFYERTGLSSSPGDQLMAIDNDESGAQCHEDGSRCDQLMAVDNDELGVQDHEDLDDDDGFAELELLLE

SEQ ID NO: 270147 - protein, 87 aa, Zea mays
  unsure (1)..(87): unsure at all Xaa locations
  Clone ID: MRT4577_177970C.1.pep
RPGAGPVARARHGFGITRTAARVVGSARGDMGAEAVEPGSILSLASVFFLWSRIYGPGFRDLGGGGXXLFLAERALFSACPCWGSGA

SEQ ID NO: 270148 - protein, 156 aa, Zea mays
  unsure (1)..(156): unsure at all Xaa locations
  Clone ID: MRT4577_177971C.1.pep
MATSTMALSSXAFDGKTVNVTPSTAFXKARVXTMSKTXSKTKPAPQTQSPWYFPDRVMYLGPLFGEPSSYLTISSSPAEYTLXTATMSQDPEMFAQNRQLQVIHSRWAMMQALDCVFPKLLAXRNGCQXTGEARVISRNDXTIFPEARINYLENPS

SEQ ID NO: 270149 - protein, 140 aa, Zea mays
  unsure (1)..(140): unsure at all Xaa locations
  Clone ID: MRT4577_177972C.1.pep
KISRARRSTSNRATSLIEEANAKAVPVLLPTDMAFADNEPGDAESKNVPGTAIPADWQXRDDDPDAKKTFNESLDTTKTGIWNGPMTTXEFPKSGIXGTEANAKKLTELTTTNGVTTIIGGGDSVRXVKKAGLAAKMSHI

SEQ ID NO: 270150 - protein, 69 aa, Zea mays
  Clone ID: MRT4577_177973C.1.pep
YLYKPSSPLICSLQDPRLCASAIMLISGANARCRHTRTIWSCGWSPLNLITRASNEAWRYLKKNHRKKI

SEQ ID NO: 270151 - protein, 49 aa, Zea mays
  Clone ID: MRT4577_177974C.1.pep
VHIPVLLDYLSFLLKRKSSVVYALGYDAQCGSFCLSPVGLARGSCYQVP

SEQ ID NO: 270152 - protein, 35 aa, Zea mays
  Clone ID: MRT4577_177975C.1.pep
PRGVRFKRAFVSTFHSADCSWPGSLSSVRRSLEPN

SEQ ID NO: 270153 - protein, 50 aa, Zea mays
  Clone ID: MRT4577_177976C.1.pep
VGGSAMRARRGRAARVGHPRRSVSLEAFGGFPLPAVWHTKLRPPAQGPIP

SEQ ID NO: 270154 - protein, 66 aa, Zea mays
  Clone ID: MRT4577_177977C.1.pep
PGRFCGGRRGGLSWNEAELLPPQSGDDGELVMILTEICDFFREGTSSLSSGTGGRSSHTARRTAAG

SEQ ID NO: 270155 - protein, 61 aa, Zea mays
  Clone ID: MRT4577_177978C.1.pep
FKDPQAGMTALTSINFDRPMEKTLQNLLVILPAMPHFLSSTLNPQILRSKMDELTHYLVCR

SEQ ID NO: 270156 - protein, 159 aa, Zea mays
  Clone ID: MRT4577_177979C.1.pep
MAQESWKESEETVQTPEAPILCVNNCGFFGSSMTNNMCSKCYRDFIKATTMAAPVVEKVFSVASSSSVTLEQAEADEVPAAAVADSQAAQEPPKPPSNRCLSCRKKVGLTGFQCRCGGTFCAMHRYADSHECTFDYKKAGREQIAKQNPVVIAEKINKI

SEQ ID NO: 270157 - protein, 45 aa, Zea mays
  Clone ID: MRT4577_17797C.1.pep
FFFYVGGRGKMTGLTILRNAMYRAKFLSHRDTQLWLAAHESRVSD

SEQ ID NO: 270158 - protein, 118 aa, Zea mays
  unsure (1)..(118): unsure at all Xaa locations
  Clone ID: MRT4577_177980C.1.pep
TRSTYTGAARCSDSHAAGRAHAAASSWLELGLPDGLLPLARLDXVGYNRTTGFEWLRQAAGLTDTCASIGTQXGTTGEVXAFVEXRPMHRLTXGVKSQELLIWVSSSENDSRALRHQR

SEQ ID NO: 270159 - protein, 436 aa, Zea mays
  Clone ID: MRT4577_177981C.1.pep
RCCRTELLNQPLIGEERLSAHDFFLTLAACNTVIPVNTEGSHDLTNEVDEIGAIDYQGESPDEQALVIAASAYGYTLVERTTGHIVIDVLGERLRLDVLGLHEFDSVRKRMSVIVRFPDNNVKVLVKGADTSMLNILKVEIDDELYDSLHVKIREATENHLSAYSSEGLRTLVIGSKNLTDAEFSEWQEMYEEASTSMHERSAKLRQAAGLVECNLTLLGATGIEDKLQDGVPEAIDSLRQAGIKVWVLTGDKQETAISIGLSCRLLTQTMHLIIINGSSEVECRRLLAEAKAKFGIKSADFGRDLQGTEDMYHGDISKLRPSNGHLSETGAQSLELTGVIGGDKSEYSENVTNFDGTELALIIDGSSLVYILEKPLESQLFDLATSCKVVICCRVAPLQKAGIVDLIKSRTSDMTLAIGDGANDVSMIQMADGGG

SEQ ID NO: 270160 - protein, 53 aa, Zea mays
  Clone ID: MRT4577_177982C.1.pep
YASARLIIMFNKLRKSRNSRRLRSSCNYRARFSYSELFRYSGQLVELVYRVEF

SEQ ID NO: 270161 - protein, 269 aa, Zea mays
  Clone ID: MRT4577_177983C.1.pep
MTVVSIMWSLVQVQVLVAVALSFLVGGAWCGPPKVPPGKNITANYGSDWLDAKATWYGKPTGAGPDDNGGGCGYKDVNKAPFNSMGACGNVPIFRDGLGCGSCFEIKCDKPAECSGKPVVVYITDMNYEPIAAYHFDLAGTAFGAMAKKGEEEKLRKAGIIDMQFRRVKCKYGSKVTFHLEKGCNPNYLALLVKYVDGDGDIVAVDIKEKGSDTYEPLKHSWGAIWRKDSDKPIKGPITVRLTTEGGTKTVYDDVIPTDWKPNTAYTTK

SEQ ID NO: 270162 - protein, 269 aa, Zea mays
  Clone ID: MRT4577_177984C.1.pep
MTVVSIMWSLVQVQVLVAVALAFLVGGAWCGPPKVPPGKNITAKYGSDWLDAKATWYGKPTGAGPDDNGGGCGYKDVNKAPFNSMGACGNVPIFKDGLGCGSCFEIKCDKPAECSGKPVVVYITDMNYEPIAAYHFDLAGTAFGAMAKKGEEEKLRKAGIIDMQFRRVKCKYGSKVTFHLEKGCNPNYLALLVKYVDGDGDIVAVDIKEKGSDTYEPLKHSWGAIWRKDSDKPIKGPITVQLTTEGGTKTVYDDVIPAGWKPNTAYTAK

SEQ ID NO: 270163 - protein, 108 aa, Zea mays
  unsure (1)..(108): unsure at all Xaa locations
  Clone ID: MRT4577_177985C.1.pep
ASCCRCRRRRPRPVRRLRRAPLSLVSPGWLLSVRPRSVSAACAPSRRLRALVVGVWAFVRLAVGVRRARRLXLLAVLGRRVPPPPSCPPAVGVAGWFLLWSPGRCSSV

SEQ ID NO: 270164 - protein, 265 aa, Zea mays
  Clone ID: MRT4577_177986C.1.pep
MWSLVQVQVQVLVAVALAFLVGGAWCGPPKVPPGKNITAKYGSDWLDAKATWYGKPTGAGPDDNGGGCGYKDVNKAPFNSMGACGNVPIFKDGLGCGSCFEIKCDKPAECSGKPVVVYITDMNYEPIAAYHFDLAGTAFGAMAKKGEEEKLRKAGIIDMQFRRVKCKYGSKVTFHLEKGCNPNYLALLVKYVDGDGDIVAVDIKEKGSDTYEPLKHSWGAIWRKDSDKPIKGPITVQLTTEGGTKTVYDDVIPAGWKPNTAYTAK

SEQ ID NO: 270165 - protein, 286 aa, Zea mays
  unsure (1)..(286): unsure at all Xaa locations
  Clone ID: MRT4577_177987C.1.pep
PLHPCKIRSDSEGVANTGANYGVKTEIIKLEEDDFKPRYAEITILNPLEDRARQPTLVEGTSAATPVASPSNYAEVNTSVQINNGDQIADMSISPFSTNRNLSSLSTLAATPERTTDKDCHDSFINRSVNSHYEKKRRLSSPMSCTYTTHSSPPSKSFCHTGSVMPGDWNRNSELCCKNIGLSRCENVKFERNYSPEEVSAKKSMQKKLLINCIRCKTALGLEEDGFLVTCTQYYSSKLYLAYLLKHGLSTFGILEDDXSASTPTEVQVVQCEASSLNKNVFGXFS

SEQ ID NO: 270166 - protein, 268 aa, Zea mays
  Clone ID: MRT4577_177988C.1.pep
MTVVSIMWSLVQVQVLAAMALAFLVGGAWCGPPKVPPGKNITANYGSDWLDAKATWYGKPTGAGPDDNGGGCGYKDVNKAPFNSMGACGNVPIFKDGLGCGSCFEIKCDKPAECSGKPVVVYITDMNYEPIAAYHFDLAGTAFGAMAKKGEEEKLRKAGIIDMQFRRVKCKYGSKVTFHLEKGCNPNYLALLVKYVDGDGDIVAVDIKEKGSDTYEPLKHSWGAIWRKDSDKPIKGPITVRLTTEGGTKTVYDDVIPAEWKPNTAYTT

SEQ ID NO: 270167 - protein, 69 aa, Zea mays
  Clone ID: MRT4577_177989C.1.pep
WPLLYYYDQQSADQLMMATTAGWGCSRWPAGIATSIYLCLNTCLPNNTLLRALWCNDNASSGVEATRLL

SEQ ID NO: 270168 - protein, 40 aa, Zea mays
  Clone ID: MRT4577_17798C.1.pep
PWRSLARSHYLISNSSISSQVIKQANTGSPGGPRGYSPKS

SEQ ID NO: 270169 - protein, 84 aa, Zea mays
  unsure (1)..(84): unsure at all Xaa locations
  Clone ID: MRT4577_177990C.1.pep
MAAKIFCLLMLLGISASAATATIFPQCSQAPIASLLPPYLSPAVSSVCDNXIHQPTGSTGNAAGTYIITLFSTSSAYTAVLCDY

SEQ ID NO: 270170 - protein, 46 aa, Zea mays
  Clone ID: MRT4577_177991C.1.pep
RDKCECCDNGDQSGMRVSPEILRSESLSHRMCQPLAIVMWAVEAVL

SEQ ID NO: 270171 - protein, 85 aa, Zea mays
  Clone ID: MRT4577_177992C.1.pep
ISLKPGALNMGRGFGQFLPPGNVCKTLGLWMGVGCFLTILTWCSFGFLAMDVFTVQGPPSKIRGFFFGYPDRGSFPEFLAAKIWG

SEQ ID NO: 270172 - protein, 181 aa, Zea mays
  Clone ID: MRT4577_177994C.1.pep
MASSIVSSAAAATRSNVAQASMVAPFTGLKSAASFPVTKKNNNVDITSLASNGGRVRCMQVWPPINMKKYETLSYLPDLSDEQLLSEIEYLLKNGWVPCLEFETERGFVYRENNSSPGYYDGRYWTMWKLPMFGCTDATQVLAEVQEAKKAYPQAWVRIIGFDNVRQVQCISFIAYKPEGF

SEQ ID NO: 270173 - protein, 71 aa, Zea mays
  Clone ID: MRT4577_177995C.1.pep
AGKAVTTVFFALDEITKQIQGGVAVPGRSPWLRLRGRRRGLFLTPATHPIHPSVHGLLGLAASLLSGGQPS

SEQ ID NO: 270174 - protein, 190 aa, Zea mays
  Clone ID: MRT4577_177996C.1.pep
MYLTAVSFPPTAAFSSSSQKLLPRSIIEEQQEIARSKGSSGDEPLTWADTRRMHVTSRAIQETMRVASILSFTFREAVEDVEYQGYLIPKGWKVLPLFRNIHHSPDHFPCPDKFDPSRFEVAPKPNTFMPFGNGTHSCPGNELAKLEMLVLFHHLVTKYRWSTSKSESGVQFGPFALPLNGLPMTFARKD

SEQ ID NO: 270175 - protein, 48 aa, Zea mays
  Clone ID: MRT4577_177998C.1.pep
HPSNTWTNVSCFLNPARLSFCPGKLFKFEYKAWNCFLPPMTLVHGSPP

SEQ ID NO: 270176 - protein, 68 aa, Zea mays
  Clone ID: MRT4577_177999C.1.pep
VHELIWKKYMVNVDLLHGSYTSSKMTCPSFAGKAAILEVETLTCLEGSGEVLCMNRSVFFLEQLSFTA

SEQ ID NO: 270177 - protein, 123 aa, Zea mays
  unsure (1)..(123): unsure at all Xaa locations
  Clone ID: MRT4577_17799C.1.pep
RPGRTGATHARADAKEXKQNSKAEGQHNTTAKGAEDEPHENDREPPEAGKEEESKAADAPRTRRYLIKKAKSGWWPRLLKQEGKPPAFLKDDWDKWHGQDDEDAAFNDYGGMDFSKQDIGGAD

SEQ ID NO: 270178 - protein, 46 aa, Zea mays
  Clone ID: MRT4577_1779C.1.pep
PRVPIIYANPWLLLLHVAFFKTLNIFNGGIPRRMPIVAGPHSYRRE

SEQ ID NO: 270179 - protein, 176 aa, Zea mays
  unsure (1)..(176): unsure at all Xaa locations
  Clone ID: MRT4577_177C.1.pep
MRECIXIHIGQAGIQVGNACWELYCLEHGIQPDGQMPGDKTVGGGDDAFNTFFSETGAGKHVPRAVFVDLEPTEIDEVRTGAYRQLFHPEQLISGKEDAANNFARGHYTIGKEIVDLCLDRIRKLSHNCTGLQGLPVFNADEGGYASALDSLVLQRLSVXDYAEESXLGSGMYTSP

SEQ ID NO: 270180 - protein, 37 aa, Zea mays
  Clone ID: MRT4577_178000C.1.pep
RKNGMSFIIGIYYKPIIPGQSNMVVERLGDYLIEQGF

SEQ ID NO: 270181 - protein, 154 aa, Zea mays
  Clone ID: MRT4577_178001C.1.pep
MASSWGSRLPLAVVLLLVACSSSTAAATSYTVGDGSGWTTGVDYTSWAASKNFKVGDNLVFNYAKGLHTVVEVSAAEYMACTAANSLGSDSSGATTVVLRTPGTHYFVCSITGYCGAGMKLAVTPGGSNSPVATPRTSSPTPTTRKKTPAPTTR

SEQ ID NO: 270182 - protein, 140 aa, Zea mays
  unsure (1)..(140): unsure at all Xaa locations
  Clone ID: MRT4577_178002C.1.pep
CGYTSGAKPVTTNYRYRNARYLAELSGPWHXLVVSMHQDNTLLERDNNWNILWTISGSPKHLGPYYCGDLAXKSFGRDMXDTHYKVCLSARINISGVNGDDMPGAGEIQLGPSMGICSCDQVWVVRYIVERITDIVGLAV

SEQ ID NO: 270183 - protein, 50 aa, Zea mays
  Clone ID: MRT4577_178003C.1.pep
QKPICAFDCKDTLRQLIKLSSSSDSRDPCINQHGLWNQRMLLLLARFELQ

SEQ ID NO: 270184 - protein, 154 aa, Zea mays
  Clone ID: MRT4577_178004C.1.pep
MGPEAVRKSLEPTATAEEITGSTPARLHFYDPFVLSGVRIEAAEHGRLLCSFVVTPRLASPVGYLRSGVTATLADQLGSAVFFCSGIPSSGVSIEISVSFVDSAAVGEEIEVEGKLLRAGKSVGVVSVDFRKKKTGKLMAQARHTKYLVASSKL

SEQ ID NO: 270185 - protein, 144 aa, Zea mays
  Clone ID: MRT4577_178005C.1.pep
ISRFLKKKKKKKKKKKKKKKKKKKKNKKKQLGITIAKKIKCFFPPRAPPWGGDFSIFPSPWGPFALLFWGPLSPFWGSFYHSLAGVFPSRLWEPPGFPPFFAFAPFPLFPISLFSKGAPPVGPSYLLPALFAYWPPPLPALSPP

SEQ ID NO: 270186 - protein, 282 aa, Zea mays
  Clone ID: MRT4577_178006C.1.pep
YKIVRTFGEKRVEDNLKNHVDLCRMLDIVALEKGADVAGGRGFYLKDEVTGDGEDKYLIATSEQPLCAYHLGDRIYPAELPIKYAGYSTCFRKEAGSHGRDTAGIFRVHQFEKIEQFCITSPNGNDSWEIHEEMLKNSEDFYKEIGLPYQVVSIVSGALNDAAAKKYDLEAWFPASKTFRELVSCSNCTDLQSRRLGIGYGQKKNDEQSKQFVHMLNSTLTATERTLCCILENFQKEDGVEVPKALQPYMGGIEFLPFKQPLDAKQAADSKSNKSKSKGNAA

SEQ ID NO: 270187 - protein, 131 aa, Zea mays
  Clone ID: MRT4577_178007C.1.pep
IEFSPRLSSAHLPPSRPPPPLPAPEHPAPSAPPHPNSPRPSRSRWWCPWRRLRGDRSRRKCWSTWRRTTSNNGGRSYARASPTPAASSRSLFGAMGTTSPPRPSGHRRRTCLLSTSSKSLDPMAKVCVYGS

SEQ ID NO: 270188 - protein, 458 aa, Zea mays
  Clone ID: MRT4577_178008C.1.pep
MLDINLFRTDKGGNPELIRESQRSRFASVELVDEVIALDKAWRERQFELDKIRQELNATSKKIGKLKASKQEEEAKKLMESTDEIKKRLAAKEVEVQEAKSTLDAKLTTIGNIVHESVPVSEDEANNKIVRTFGEKRVEENLKNHVDLCRMLDIVALEKGADVAGVRGFYLKDEGVLLNLALINFGLAFLRKRGFKPMQTPFFMRKETMAKCAQLAQFDEELYKVTGDGEDKYLIATSEQPLCAYHLGDRIYPAELPIKYAGYSTCFRKEAGSHGRDTAGIFRVHQFEKIEQFCITSPNDNDSWEMHEEMLKNSEDYYKEIGLPYQVVSIVSGALNDAAAKKYDLEAWFPASPTFRELVSCSNCTDFQSRRLGIGYGQKKNDEQSKQFVHMLNSTLTATERTLCCILENFQKEDGVEVPKALQPYMGGIEFLPFKQPLDVKQASDSKSNKSKSKGNAA

SEQ ID NO: 270189 - protein, 458 aa, Zea mays
  Clone ID: MRT4577_178009C.1.pep
MLDINLFRTDKGGNPDLIRESQRSRFASVELVDEVIALDKAWRERQFELDKIRQELNATSKKIGKLKASKQEEEAKKLMESTDEIKKRLAAKEVEVQEAKSTLDAKVTTIGNIVHESVPVSDDEANNKIVRTFGEKRVEDNLKNHVDLCRMLDIVALEKGADVAGGRGFYLKDEGVLLNLALINFGLAFLRKRGFKPMQTPFFMRKETMAKCAQLAQFDEELYKVTGDGEDKYLIATSEQPLCAYHLGDRIYPAELPIKYAGYSTCFRKEAGSHGRDTAGIFRVHQFEKIEQFCITSPNGNDSWEIHEEMLKNSEDFYKEIGLPYQVVSIVSGALNDAAAKKYDLEAWFPASKTFRELVSCSNCTDFQSRRLGIGYGQKKNDEQSKQFVHMLNSTLTATERTLCCILENFQKEDGVEVPKALQPYMGGIEFLPFKQPLDAKQAADSKSNKSKSKGNAA

SEQ ID NO: 270190 - protein, 167 aa, Zea mays
  unsure (1)..(167): unsure at all Xaa locations
  Clone ID: MRT4577_17800C.1.pep
IFIALKSAVARASEDFMPREPTLQTLHIASVAFNSLLLGEIFIPDWDMFHSKHESAEFQGGARALSGGGVYVXDGSILRARYAGRPTRDCLFTDPVMDGKSLMKIWNLNNFTGVIGVFNCQGAGQWVWPVKQTAYVPTNINITGQLSPXDVESLKEIAGDDWNGETA

SEQ ID NO: 270191 - protein, 49 aa, Zea mays
  Clone ID: MRT4577_178010C.1.pep
PGFKCVVMHQCVSFSKALRFACHLIQAVRCRFCVYNIIYPNKGFKSIVL

SEQ ID NO: 270192 - protein, 145 aa, Zea mays
  Clone ID: MRT4577_178011C.1.pep
TPTTSSERHCLLQPSANPRRDLHVVPTDATDATPKPTQPPTTATDNELDDTYEAKKEHRNKAVNDHNDVKNITEPARDAKDPTEHKKNNNVMNQQLDGTSNECNWCKQKLGANAILAGSLAVSKAGAMAKKIPLYQHIANLAGNK

SEQ ID NO: 270193 - protein, 130 aa, Zea mays
  unsure (1)..(130): unsure at all Xaa locations
  Clone ID: MRT4577_178012C.1.pep
MWNAGVETSINTLXMTEMRQXGLRITLKNFCQRSGTINYPSERAPLSARFAGXHTLRRYTCXGHIRVLVXTLCEDIWPAHAITXEAEDHLPLRRRTTTYDIDLTSCLYCXGLCQHACPVXAIVDPPMCDL

SEQ ID NO: 270194 - protein, 102 aa, Zea mays
  Clone ID: MRT4577_178013C.1.pep
LARGLREASKALDRRQAHMCVLNEACEEDAYKKLVIALCSEHKIPLIKVPDGKQLGEWAGLCVLDREGNARKVVNCSCVVVKDWGEESQERSILLNYFQTEQ

SEQ ID NO: 270195 - protein, 164 aa, Zea mays
  Clone ID: MRT4577_178014C.1.pep
ERHPPPPGSLKRPKGPREPILLAKKKFPQNFCPGPKKNGKKKENPRVIFKGWENPTPRPFFFGPKRKKMVPGPVNPAPHKKPPPQKIFNTRQRKKFFSLKKKKKKKKNLSKKKKKKKKKKKRAAPPKTGGQTRAERPSVQILALAPKFKLDPLRPKRKKVPCVS

SEQ ID NO: 270196 - protein, 51 aa, Zea mays
  Clone ID: MRT4577_178015C.1.pep
WSGHTNNNIAAQLFSGRNYTLSDLCIPGSFCLYQPFFHSPNPSCLAPLDIF

SEQ ID NO: 270197 - protein, 46 aa, Zea mays
  Clone ID: MRT4577_178016C.1.pep
LISTNQKSHRNTSCFLDNKKQHPIFIQIPIPSIKHQGIQLNFFYNS

SEQ ID NO: 270198 - protein, 113 aa, Zea mays
  Clone ID: MRT4577_178017C.1.pep
SLDQREEVRTLSCGHVFHLRKGPKCMSNIDDWLRENRMRCPSCCKPVYPVLPWKAPTTSVPPTAPVPLPAQSSTSTSTSDLEAQEPRRWASSEQGPQRRLSLDLGRPRYPPSI

SEQ ID NO: 270199 - protein, 123 aa, Zea mays
  unsure (1)..(123): unsure at all Xaa locations
  Clone ID: MRT4577_178018C.1.pep
RGTCTTSTVRSTLLPRLPYVQXAGXMPPQAPCGRIRRLLEQDNNTPDRRPMCGWLKNGGNGANGSGTYMKRAVALXNKGEETLPDKNKTNVNCLTKNRMRGAAHPSDEECMHGGQRSSLATGL

SEQ ID NO: 270200 - protein, 37 aa, Zea mays
  Clone ID: MRT4577_178019C.1.pep
SKSKTLVLFHADLCTCERVSSLSSDCYLESWTTIVCC

SEQ ID NO: 270201 - protein, 768 aa, Zea mays
  unsure (1)..(768): unsure at all Xaa locations
  Clone ID: MRT4577_17801C.1.pep
MPGACQDLSTITPTPRRQSMAQLQRGSVLVGGRELLVRAPPNVNLRXPPVPASPXGAASGAAFLGARAPAASSRHVFSVGNLASGWRWLSLFRFKIWWMIPATGVGAAAVPAETQMLLLEYRSEAGPAAATERGSLYALVLPVLDGGFRASLQGSPEDELQFCFESGDPDVQTMEAVDAVFVNSGDNPFKLLKESIKMLSKIKGTFSHIEDKEIPSNLDWFGWCTWDAFYKAVNPSGIEEGLQSRREGGVPPRFLIIDDGWQETVDEIKEVDEALREQTVFAQRLADLKENHKFRGETCKNLEDLVKTIKEKHGVKCVYMWHALLGYWGGTLAASEVMKKYNPKLVYPVQSRGNVANLRDIAMDSLEKFGVGIVDPDKIYEFYNDQHSYLSSVGVDGVKVDVQNVLETLGRGFGGRVAVTRKYQQALEESIAQNFKTNNLICCMSHNSDSIFSALKSAVARASEDFMPREPTLQTLHIASVAFNSLLLGEIFIPDWDMFHSKHESAEFHGAARALSGGGVYVSDKPGVHDFSVLKKLVLPDGSILRARYAGRPTRDCLFTDPVMDGKSLMKIWNLNNFTGVIGVFNCQGAGQWVWPVKQTAYVPTNINITGQLSPSDVESLEEIAGDDWNGETAVYAFGSCSLSRLQKHQSLEVSLSTMTCEIYSISPIKIFSEVVQFAPLGLIDMFNSGGALDNISSVADSSATTVHIRCRGPGRFGAYSDTRPELCRVDEHEVEFTLAEDGLLTFYLPPSSSQDNLRHVEIVYKAS

SEQ ID NO: 270202 - protein, 81 aa, Zea mays
  Clone ID: MRT4577_178020C.1.pep
QEDSWGGDAYAWSDLEHPWSYGSKGGSTSVEKDYGGAGGGIVWLFADDLVMNGTVLADGGDSNEKGGGGSGGSIFIRAASM

SEQ ID NO: 270203 - protein, 140 aa, Zea mays
  Clone ID: MRT4577_178021C.1.pep
RNGACKGGPNQKNTNRHRHTKNRGQKNPKNQPNPKKGTVWETGTQLKKPAPEKHIPHLKKPIGPEKKNTPKNRAPLWEAAHPKSKHGAKNTKVTTKTRPQEGGGQKKGKGPPPKGGEKKIKREGRAPGPTGAPKAQEKQG

SEQ ID NO: 270204 - protein, 119 aa, Zea mays
  unsure (1)..(119): unsure at all Xaa locations
  Clone ID: MRT4577_178022C.1.pep
HXNPLPPSYPRAVAAAAGNHLPPPLHPHLPPXHPLDDCRGPAGXAPRHRIGDFRDAPRLPLGHPVSFQEAAGAGVRHFVGLGHGGAGGPLPPXPGVGAALEERLGAWVCEARAPVGLCP

SEQ ID NO: 270205 - protein, 107 aa, Zea mays
  unsure (1)..(107): unsure at all Xaa locations
  Clone ID: MRT4577_178023C.1.pep
MXPIVDPCVPDVWRSCATLTVDIXLKALIVGDDLLVASLFMVAIAVSGRTCXALLLLVVPVGAVSAGILAVTMLSRAVWGVLACRRRGWTEDSFLAVLCGGLFSVLL

SEQ ID NO: 270206 - protein, 137 aa, Zea mays
  Clone ID: MRT4577_178024C.1.pep
KKKKKKKIKNFKKKKKKKKKMGKKKHKTLPCAAGITTQVPIRHYIYIDPTQSHGGAPLYGPMFLAPSWRLLLFFLVAVNSLLGARFSRRGGGKTRGEPLFIAFADFSFSPGWFNVKWPTRDLFSKNAACILDMCTPL

SEQ ID NO: 270207 - protein, 98 aa, Zea mays
  Clone ID: MRT4577_178025C.1.pep
QTRELVLKYTDFVPELMTGRMLAIRRCVKPDRPSLMTMYALVQTYVFRRFGLAMETYVPHLQHSNNTMHIPALPMRTHPEQRCLVYSLKNVAFVSTSC

SEQ ID NO: 270208 - protein, 92 aa, Zea mays
  Clone ID: MRT4577_178026C.1.pep
TMCCVEISWKDQSINMIVRHLVGAARALLYIVPAYIFSYHANIDVIKIWKVISSRSPCILIVTRYASGFMLLYHSQLCLPLKISLQSCIFLN

SEQ ID NO: 270209 - protein, 65 aa, Zea mays
  Clone ID: MRT4577_178027C.1.pep
SFRSWCTTATSTNVLCLEFLGRELGDAIQIDHASWIRAYYPSRRPYIDQQRHPPASSHGPHLIYE

SEQ ID NO: 270210 - protein, 37 aa, Zea mays
  unsure (1)..(37): unsure at all Xaa locations
  Clone ID: MRT4577_178028C.1.pep
HSNAYAISDGLGFYSKSEHPYHLPXTNYXHIQNXGXT

SEQ ID NO: 270211 - protein, 45 aa, Zea mays
  Clone ID: MRT4577_178029C.1.pep
ERGLLNFKLLTFLTQLPTWENQGLPDLNFQTLNPQFSKWHIKNNA

SEQ ID NO: 270212 - protein, 276 aa, Zea mays
  unsure (1)..(276): unsure at all Xaa locations
  Clone ID: MRT4577_17802C.1.pep
KETEGVLICEFFYSLMKIWNLNNFTGVIGVFNCQGAGQWVWPVKQTAYVPTNINITGQLSPSDVESLKEIAGDDWNGETAVYAFGSCKYLLADCFFLTIPSYHYTISXISHLFCLPGSLSRLQKHQSLEVSLSTMTCEIYSISPIKVRTSDYFPLPPFLHVFHIVNIKFLQTFFASCTRFSAXVQFAPLGLIDMFNSGGALDNISSVADSSATTVHIRCRGPGRFGAYSDTRPELCRVDEHEVEFTLAEDGLLTFYLPPSSSQDNLRHVEIVYKAS

SEQ ID NO: 270213 - protein, 118 aa, Zea mays
  unsure (1)..(118): unsure at all Xaa locations
  Clone ID: MRT4577_178030C.1.pep
VYLRGRGRLPLAPIPSVGRRSIPVRRIAIEGSALSNHIGXAGXMLGNAGWDLYSLEHGIQAGGQMPGAKTIRGGDDAFNTFVPETGAGKHERRAACGDLGPTVLGDVGTGTYCQLFHH

SEQ ID NO: 270214 - protein, 413 aa, Zea mays
  unsure (1)..(413): unsure at all Xaa locations
  Clone ID: MRT4577_178031C.1.pep
MAAAAATSSSSHLLLLSRQQAASLRCRLSFLGQPRRPGRVTAQAPAAKDVRCMAAVDTTAASTAAEETSPKSSSYEIVTLTTWLLQQERTGAIDNEMTIVLASISTACKQIAALVQRAPISNLTGVQGAVNVQGEDQKKLDVVSNEAFSNCLKSSGRTGVIASEEEDVPVAVEQSYSGNYIVVFDPLDGSSNIDAAVSTGSIFGIYNPNDEXLADVDDNDTLDSVEQRCIVNVCQPGSNLLAAGYCMYSSSVIFVLTVGTGVYVFTLDPMYGEFVLTQEKVQIPKAGKIYAFNEGNYALWDDKLKLYMDSLKEPGDSGKPYSARYIGSLVGDFHRTLLYGGIYGYPRDKKSKNGKLRLLYECAPMSFIVEQAGGKGSDGHQRILDITPTEIHQRVPLYIGSVEEVDKVEKFLA

SEQ ID NO: 270215 - protein, 593 aa, Zea mays
  Clone ID: MRT4577_178032C.1.pep
MATSPLPTATASASKKRRSRGGTLALDEVKKLGTELLSSRSHLNHAPALLALLSPTAPLDLALEALISLQSFFVPLIPSIPSASAAANAGDAGSDPELVFGAWLRQRFDELVAALVELSVSPHSDDAIRDVALDALMDFVKLGKDGKFHSAIYHKFLYAVVHAADPVDMLLELLVSKYFKYTDIRYFTYTSLDKIANSLGSKTTGSGKDALQNGSDESKNRSSIFIHNIYNLLAHVPLMDFQKESTFDMWSTVGLSSKGENDSSKDTSTYINKKLKLKFTKAWLSFLKLPLPLDVYKEVLASIHQNVIPSMSNPSILCDFLTRSYDIGGVISVMALSGLFILMTQHGLEYPKFYEKLYALLTPAVFMAKHRSVFLQLLDTCLKSSYLPAYLAAAFAKRLSRLALSVPPAGALIIIALIHNLLRRHPSVNFLVHWEVDESDSNATREASQSKKIGSDPFNQNDADPAKSGAMRSSLWEIDTLRHHYSSAVSRFVVSLEEDLTVRAKTTEMKITDFSSGSYATVFRDEVRRRLKQVPLAFYRTTPTSLFLGSDFPGWTFGDQHNSTVETTVEGNGKVEAVGASDSTPSKRLRMET

SEQ ID NO: 270216 - protein, 93 aa, Zea mays
  Clone ID: MRT4577_178033C.1.pep
QTLKQAIEIDNSVLTGLSSSISTKRADIIFNWLGPHGRDCGIVNVIIRTNGAQIGAAFGGEISTGGGRKPESNWWNQYMRRKACTKSYASNVR

SEQ ID NO: 270217 - protein, 80 aa, Zea mays
  Clone ID: MRT4577_178034C.1.pep
MGINLARTFRECPTHAHGGIRDVEPAFPQNRARNGQMVATGVTLRLYVRKGLPIHRAQLIWGDEEEAVRILALTKLTEEL

SEQ ID NO: 270218 - protein, 92 aa, Zea mays
  unsure (1)..(92): unsure at all Xaa locations
  Clone ID: MRT4577_178035C.1.pep
GTXCYXLEVGRSLVYMSIMSNCLLPLSSLFLVIWAVNWVSCNXIQINFXNMGEIXPPRRXGPLILFFFXGGKKKIYFFFFFGQFWGGRGVFF

SEQ ID NO: 270219 - protein, 89 aa, Zea mays
  Clone ID: MRT4577_178036C.1.pep
VPWHRYQCDLAAYIPPIGRCILQLIIHLILSSHSDMRSAPAPAVCPFRDSTLLVSSSSVELFAGSERRVDGLRSSVDPARERPELILSR

SEQ ID NO: 270220 - protein, 67 aa, Zea mays
  Clone ID: MRT4577_178037C.1.pep
QSLACAPPLPQIWIRAAVFIEADIHCGESGSSEHYGLEANEAAVTFFVCLVPVAFDVHIKYWVCLFV

SEQ ID NO: 270221 - protein, 164 aa, Zea mays
  Clone ID: MRT4577_178038C.1.pep
ATVWVHAVCGQRAGYFAQDRRKIEADLFGGKLHGVAATNALELGIDVGHIDATLHLGFPGSIASLWQQAGRSGRRAKQSLAIYVAFEGPLDQYFMKFPHKLFGRSIEHCQVDSHNLKVLEQHLPWAAYEHPLCVQYDECYFGSSLDSVMTTLKDKGYIINNRAG

SEQ ID NO: 270222 - protein, 298 aa, Zea mays
  unsure (1)..(298): unsure at all Xaa locations
  Clone ID: MRT4577_178039C.1.pep
MDRRAGAILVFLLVVLVWDVAAVAETEPGSVRLVQEAPHRKVVEDGAKAGRVPVSTVAWSTLAMAAATGLGAVPFFFMELEAQWAGLCNGLAAGVMLAASFDLVQEGQVYGSGSWVVFRILSGGIFIWLCKNSQGXRPPKDAGXIAGLNVLRIINEPTAAAIAYGLDKKATSVGEKNVLIFDLGGGTFDVSLLTIEEGIFEDKATAGDTHFGGEDFDNRMVNHFVQEFKRKNKKDITGNPRALRRLRTSCERAKRTLSLTAQTTIEXDSLYXGIVFFSTITRARLEELTMDLPMKCLE

SEQ ID NO: 270223 - protein, 76 aa, Zea mays
  Clone ID: MRT4577_17803C.1.pep
MAVARAPLGAVFSMAVAAFVFAIFMTPPVWGQAPGPGPPRGGTSIDLGIGYILMLVALGLPYLIPPLEGSSPSKFF

SEQ ID NO: 270224 - protein, 121 aa, Zea mays
  Clone ID: MRT4577_178040C.1.pep
LQALLSQKPLVGQRGLANLRLNTDQFWLHHKLPFGPGGLCHQQCFSPTPINKGFHIASLYPKKAKTRCISRKSYLDAIDFTPSSKHPPVQVTRSTTEHLAFYSGSISSQCCQKEGKAYNVA

SEQ ID NO: 270225 - protein, 118 aa, Zea mays
  Clone ID: MRT4577_178041C.1.pep
VTKEATVAHEATDDTSGGPLLVWDCGCMLYGLVRAHRLQAPTRRQCAFQHALALHAAPHCQGRHNLAAHHRRTVPSMKGVHVEAPGHPATVAFVLGCFRWGYYQTPVSPGAHYWTGDD

SEQ ID NO: 270226 - protein, 115 aa, Zea mays
  Clone ID: MRT4577_178042C.1.pep
SYQQCRGSCSSIKPVFFTQAWKLGTHIFFGEHLVQVMLSNSLVSVSPTGIRSSLYCPVQKKKLFPLPLMIFHRADVKVSGLEFGPPCGIMTLLAKVISTTYTLLCLKKKKKAAAD

SEQ ID NO: 270227 - protein, 63 aa, Zea mays
  unsure (1)..(63): unsure at all Xaa locations
  Clone ID: MRT4577_178043C.1.pep
PKKAAKAPXKAEKGADAEPKKHXGRPEKRSRRGRRENNRPGSRKAKEPRTRKAQDRESAKRQR

SEQ ID NO: 270228 - protein, 58 aa, Zea mays
  Clone ID: MRT4577_178044C.1.pep
LPSLAAHFFSTTVHQWRYPLRSRLPGCWRLHEDEDTKRQSVSTGMARGRYPLTIRALR

SEQ ID NO: 270229 - protein, 90 aa, Zea mays
  Clone ID: MRT4577_178045C.1.pep
PPCCEPKLLLCATQRDPPCKRLLPLHRLWHLTAQVGFCEPLSRPFKAPCFLVPARPFIHFAPIAIMESPRPYVLVTCKGPVTSFSPPEKE

SEQ ID NO: 270230 - protein, 154 aa, Zea mays
  Clone ID: MRT4577_178046C.1.pep
RALAHLLLALLCWQWTCAEWRSIRTWFDFFISLENGQSGAMVPASNSSDRSDRSDKPMDQKVLRRLAQNREAARKSRLRKKAYVQQLESSKLKLASLEQELQKARQQGIFISSSGDQTHTMSGNGAMTFDLEYSRWQEEQNKQINELRTAVNAH

SEQ ID NO: 270231 - protein, 72 aa, Zea mays
  unsure (1)..(72): unsure at all Xaa locations
  Clone ID: MRT4577_178047C.1.pep
TVWNEMATVRTPLNFDXSSKQSFCQYSIXDLLGGGLLVAITGDWITLMTTXSAISKLLRVAAWKKSCLMVKI

SEQ ID NO: 270232 - protein, 359 aa, Zea mays
  unsure (1)..(359): unsure at all Xaa locations
  Clone ID: MRT4577_178048C.1.pep
MADASSRTDTSTVVDMDDKNQXYFTKFQLLSVGHLMVXSWRDACKVLENGQSGAMVPASNSSDRSDRSDKPMDQKVLRRLAQNREAARKSRLRKKAYVQQLESSKLKLASLEQELQKARQQGIFISSSGDQTHTMSGNGAMTFDLEYSRWQEEQNKQINELRTAVNAHASDSDLRLIVDGIMAHYDEIFRLKGIAAKADVFHILSGMWKTSAERCFLWLGGFRSSELLKLLVNQLEPLTEQQLMGLSNLQQSSQQAEDALSQGMEALQQSLAETLAGSLGPSGSSGNVANYMGQMAMAMGKLGTLENFLRQADNLRQQTLHQMQRILTIRQAARALLAIHDYFSRLRALSSLWLARPRE

SEQ ID NO: 270233 - protein, 151 aa, Zea mays
  Clone ID: MRT4577_178049C.1.pep
MADASSRTDTSTVVDMDDKNQRLENGQSGAMVPASNSSDRSDRSDKPMDQKVLRRLAQNREAARKSRLRKKAYVQQLESSKLKLASLEQELQKARQQGIFISSSGDQTHTMSGNGAMTFDLEYSRWQEEQNKQINELRTAVNAHASDSDLR

SEQ ID NO: 270234 - protein, 498 aa, Zea mays
  unsure (1)..(498): unsure at all Xaa locations
  Clone ID: MRT4577_17804C.1.pep
MESESLDHVGKRVIEMLDQVTPVVKEMFSSMESSSSAQAAAAAAAWPEDLPERRTLPPVLCRTTSHHPSDGDEVAMHTGRCKVEAPAPGHETDEGVCTREEDGQTSSREPLSAPIPTAEFLPLQPTLSSVSPHLLSAPPPSPMPVVGLSMLLQSWEATQDGHATAVAVVPPAGVAQPAEAAPTAHKDTTPVGTSMEVEGSTSSVLLEAGQPEPCVDSPNGSTQAPAQGGNAAVPNVPPPPPPVPAHRGRSQEGPSMDEPGPAVTDTPPRPPCEMQGGPPALPPXPPRFRRXPSPPPLPAHRGRFQEGASMDEPGQAVTDTPPRPPCEVQGGPPAPPPAAAKVSPAPPPPPGSISATVRGKKAASKLKRSTQMGSLYRRLRDRVEGSGXARTATGCGRTAXPRTVGASKSDAGGQGMAEALAEMAKRSTYFRQIEEDAEKYAAVILELKDAIGSFQSKDMSELVRFRQHVERQLVCLTDETQVLARFEGFPSKKLEALR

SEQ ID NO: 270235 - protein, 335 aa, Zea mays
  Clone ID: MRT4577_178050C.1.pep
MADASSRTDTSTVLDMDDKNQRLENGQSGAMALASNSSDRSDRSDKPMDQKVLRRLAQNREAARKSRLRKKAYVQQLESSKLKLASLEQELQKARQQGIFISSSGDQTHAMSGNGAMTFDLEYSRWQEEENKQINELRTAVNAHASESDLRLIVDGIMAHYDEIFRLKGIAAKADVFHILSGMWKTPAERCFLWLGGFRSSELLKLLVNQLEPLTEQQLMGLSNLQQSSQQAEDALSQGMEALQQSLAETLAGSLGPSGSSGNVANYMGQMAMAMGKLGTLENFLRQADNLRQQTLHQMQRILTIRQAARALLAIHDYFSRLRALSSLWLARPRE

SEQ ID NO: 270236 - protein, 118 aa, Zea mays
  Clone ID: MRT4577_178051C.1.pep
GRPVPPLGTPPAPPGGNAFRFAPQKRPLRAKWKKKGLGGVQRKAQKFGQGSQLAVSNGFWALLHGGGQTFFWMGWGAFGKILPPPGVPGPPQFNVLPALPWALFPPPPWFLNPGFPLK

SEQ ID NO: 270237 - protein, 44 aa, Zea mays
  Clone ID: MRT4577_178052C.1.pep
GERLNSPGKECNKVFVGTSQGKPVGPMLECPKEWGGKPLPLKVK

SEQ ID NO: 270238 - protein, 105 aa, Zea mays
  unsure (1)..(105): unsure at all Xaa locations
  Clone ID: MRT4577_178053C.1.pep
MGDQVNHGQGGQFKGGFNLFHKDGDGCITTKELGTVMRLLGQNPTEGELQDMINEGDAYGNGTIDLPEFLNLMGRKEKGTDFVGEVKEGFRVXTQDQXNGFIFGA

SEQ ID NO: 270239 - protein, 109 aa, Zea mays
  Clone ID: MRT4577_178054C.1.pep
THFEHLCGSRQHPSILQKQNQHAGFQPSCPYLNHLKSPCTEATPTPIGPGPSMAAVQILDKSTQQAADITSEYLPALESKTERSISSGVPDTPIPPDTTHSVQLSMSHG

SEQ ID NO: 270240 - protein, 79 aa, Zea mays
  Clone ID: MRT4577_178055C.1.pep
FQNSAEPDVLNLFSVHLIVPYNPPFSHYDGFRDQSHFYNPRGIMSCAASNLRPQGAELFRCISLGLFRYNLLLDQYWAP

SEQ ID NO: 270241 - protein, 126 aa, Zea mays
  unsure (1)..(126): unsure at all Xaa locations
  Clone ID: MRT4577_178056C.1.pep
MAASASSVSGLDGASLPRRPXSXSFMRGNRVSAKTPLMNKNLDKNGTINCMTFHLDWLSTELSVIGFGLIRWMGPSIVSAINGNSLTGLFFYSIRHQLDQLPTRPLVNSQFWLWLVTCDLSLFIVL

SEQ ID NO: 270242 - protein, 134 aa, Zea mays
  unsure (1)..(134): unsure at all Xaa locations
  Clone ID: MRT4577_178057C.1.pep
SRAQSRALKARWAEFEATPGPSRREQGTAGRAGKRAGASEHGXEDAAGRGHGRARPGAGAGGRAGAXGAAEPGHGAAEPRRGAGGQAGGRARGDRGRPGAEPAGRGRGRGGRGRGRGRARWSGRARQGRGGRAH

SEQ ID NO: 270243 - protein, 95 aa, Zea mays
  Clone ID: MRT4577_178058C.1.pep
KKQNKPSPQSFERGKRLTKKGGEKKAASTFGHPLGFNPRILNLQGPQKEKLWGPPPLWAVPISEKKPKGLGQKTRQKGCKNPGVTRKSPRSPSKL

SEQ ID NO: 270244 - protein, 114 aa, Zea mays
  unsure (1)..(114): unsure at all Xaa locations
  Clone ID: MRT4577_178059C.1.pep
GQLQGXTCGDGSTSNLNQCVXYLRHQTMPPXTPYCSXNASICGKRVXLDIKPVDLLHRIQAILGXTLQTILQEXAXSGQGPTLPAVHIAHELTRMCGLXQSTACPYAGTGGAPH

SEQ ID NO: 270245 - protein, 99 aa, Zea mays
  unsure (1)..(99): unsure at all Xaa locations
  Clone ID: MRT4577_17805C.1.pep
MKLNERSVAHYALSDSPADHMGFLRTWGGPGTPPTPSGTGRRCWFVLKGNLLFSFESREGRAPLSLVVLEGCTVELAXAPVPQEFAFAICFDAPGVRPH

SEQ ID NO: 270246 - protein, 37 aa, Zea mays
  Clone ID: MRT4577_178060C.1.pep
LGFAIVSGVCEYVNPVVSMFFSIFFFFVWYVLSGEVM

SEQ ID NO: 270247 - protein, 113 aa, Zea mays
  Clone ID: MRT4577_178061C.1.pep
EFPQPLQKGEYLGGSMWRATPVFPPCAGYKNPPPGDISWNRQRDSHYSAPKRRGPYLRVGPPFDVILIVRSTFISPPNLFCLPPFFFFFLFFFFVLFFFTPSLCVVFYNTTHY

SEQ ID NO: 270248 - protein, 95 aa, Zea mays
  Clone ID: MRT4577_178062C.1.pep
DDRVGSVTEETGPRRPAETSPGEDHLAEHGHGLIDRSERCPGVDLGPGRTTHHHDLAAAAAAPYDLSSCCSSYHAAAGVGESRPPKHDHGPRTRG

SEQ ID NO: 270249 - protein, 450 aa, Zea mays
  Clone ID: MRT4577_178063C.1.pep
MVQIVEHRAETSTDFLVEEEVVSSTPQVSDRPVPGIVAVHATRQHTLAQTSRTPSRTALGALSAARELLRHPLRSTASPGAMKQWRDDVDRLLVMAHSTSTRSRSRSSRRQHEASTSVRSPSVRGAQTNDLRAELNRRHAGEDARISLERARERRQNIDGRNLDQDFTAIAPQAPMGTRSQAGVPLANVGCAALAEHLRAVSWPPKFRPHLPEKYDGTSNQSEFLLVYVTAITAAGGNTAVMATYFHVALSGPARTWLMNLALGSIYSWEELCAWFVANFASAYQQHGVEAHLHAVRQEPGETLRTFISRFTKVRGGSGAVPRDGKKKKKKDRDYQKPRSIALVVAAATRGQGDRNKRPRPQRGNSGSCPVQPNGCHNAEECREIIDLAKRVSERREQSSKDGSPPHHRPGKEKADDGEVAAAERDLGYQSPEGDLKDVFAGGSYSSGDS

SEQ ID NO: 270250 - protein, 63 aa, Zea mays
  Clone ID: MRT4577_178064C.1.pep
SKNDRAGAKYSYHEGGVSLKRCLTPRRKSPFVSFGESGFAAQAPVYVLCQMGQLQFLFPILEG

SEQ ID NO: 270251 - protein, 48 aa, Zea mays
  Clone ID: MRT4577_178065C.1.pep
FRGRPLFFFFFCLCFNLVFSLAKYAISWGSALLYFPMLNAYPQHSLRG

SEQ ID NO: 270252 - protein, 100 aa, Zea mays
  Clone ID: MRT4577_178066C.1.pep
ILVTSFVSSSNCVNTFSRPEIRMSTWNTYSALLSITDLCTTNIYLVSLPKAPPFSRAEHVLLCNHNHALWAVTPGTVCHLYEEESQALLLPEYCSWQQNL

SEQ ID NO: 270253 - protein, 127 aa, Zea mays
  Clone ID: MRT4577_178067C.1.pep
GFPFYDEEMGYSYIVLLNYPVLISRQNSCDGDSGGPAKGGRDPGGTLTARSSQPLEPRCERARGQMSQTGAGGRDLPADVTEALLLQPNRFFLTKKIILKEKSLNLYLLSGLVFFLFELPSVKRTRE

SEQ ID NO: 270254 - protein, 343 aa, Zea mays
  unsure (1)..(343): unsure at all Xaa locations
  Clone ID: MRT4577_178068C.1.pep
IGYLEAGRGRKLDVNPPAVLEXNYAAHDEQKQCDVLSPEEYSDEGWQAASMRGRSANVRKKSSRRKPALMKLMVDHFEDGHTGSVYRTGLQPQTKGGKEDSVSAPSQLSFGSFLKTDSSIAEDKTCNGSANQEQRTKPTGINRPTSIASKFISYKDVAVSPPGTVLKPILEKKEAKEKDSGRDIDLALSSEEEDKKFTEKEKEKPSEDSSKEILSSQRDLECHVEIPHDSNSDEGPSAASKASGSKLSASAPPFNPGSVLSMSQPYSTVAVYDASAILQAIPSQAMEILPSAIDTRVPRGPRSTLYYRTGHSFXRKQGYTHSQSTIVRXGLLPTTMNPHAAEF

SEQ ID NO: 270255 - protein, 40 aa, Zea mays
  Clone ID: MRT4577_178069C.1.pep
SRIISILKRIHNTDYRIKIMTRAIQFGKPVIFCPHPVLFL

SEQ ID NO: 270256 - protein, 105 aa, Zea mays
  Clone ID: MRT4577_17806C.1.pep
RAPFTLSFARHNRQRRLSTVWLICHKPPSSEPFNIRINHIVHTHRNHLVILFLTVLIKPRPCSDRLIHPQDHIDGLINYHQHDPADRSTGRTNGGLKMTLRKRIT

SEQ ID NO: 270257 - protein, 56 aa, Zea mays
  unsure (1)..(56): unsure at all Xaa locations
  Clone ID: MRT4577_178071C.1.pep
KKXSKXXAIFHGFAXRXXKKKKKKXKKKXKKGTERYKRKPKLNERRAMRTVIRLIL

SEQ ID NO: 270258 - protein, 38 aa, Zea mays
  Clone ID: MRT4577_178072C.1.pep
YAWGANRASRAGEHVGQTLTDASTMSGHLSLLQPMLML

SEQ ID NO: 270259 - protein, 498 aa, Zea mays
  unsure (1)..(498): unsure at all Xaa locations
  Clone ID: MRT4577_178073C.1.pep
MSGSSSLWETGAPSLDTLAESAATYAVMMSSQQQQQQQTAGPSRQAVYGAPVLPEIPTRFVYRPQVATDVMSGSSSLWKTGAPPHDTLAESAAMYAATLSSHQQQQQMARPDRQAMYGAPVLPEIPTRFVYRPQTATDVMSSFSSLWETGAPPPAAYAAMLSSQQQQMPTTRPGWQAAPRGAPVPPPMNMRFVPNTMPAADAMDVGSSAPMAPSDSSSERTPSPLQRVEVRQVWAHNFDSEAKLIESLLPKFRYVAVDTEFPGTVYRPAGPAYKLEPAERYRLLRCNVDALHPVQLGLTLFDAGCVLPGGHGGATRYVWQFNFSDFDVRRHRHVVESVAALRSRGVDLDRTRQYGVAXQRCSARACASGRAPASAAPXVTSHGGYDLAYLVKMMFGTGFRMSGSAAEFNAVVKSVLHRRRVFDIGEMARLCPHEHLHRGLDSIAGQLNAARFAADAARQAGYDSLRTCYTFMKLREIYFDDDGKLAGVDGILAEVTAF

SEQ ID NO: 270260 - protein, 149 aa, Zea mays
  Clone ID: MRT4577_178074C.1.pep
CAQTHQGQGPMRYYQKLHYCSHEVRTEGPDGFRRHDVSRHQHHTKEKGEERPDVLTMAERTTTTTMDATGAEAWCCARPRTKKTSRPAAESSATTCNGTSPWQTDPADVRDARPDVLACVPDVCAVDDCMCRAIALGYRTRPHSAPARI

SEQ ID NO: 270261 - protein, 197 aa, Zea mays
  unsure (1)..(197): unsure at all Xaa locations
  Clone ID: MRT4577_178075C.1.pep
MAVPMSAIESAWQLLIANFTEFQLATVITFLLHETVFFLSGLPSLLFERFGLFAKYKIQKRSNTSAYQNRCVLRLILYHVSVNLPVMILSYPAFKFMGLRSSLPLPHWTVVVSQVLFYFVLEDFIFYWGHRALHTKWLYKHVHSVHHEYATPXFGLTSMTTITECCTQSQGTMPRHLFTWDWPRTMYRKAKRPLRSK

SEQ ID NO: 270262 - protein, 87 aa, Zea mays
  Clone ID: MRT4577_178076C.1.pep
CLVPVAQLSTSLASATVLERAISPTNSNGTSQPPMVHDLDLFDPCPIDFHYPPPRIFRSDLSASEIVTRSHCAPKRRSLPPSLAIVR

SEQ ID NO: 270263 - protein, 291 aa, Zea mays
  Clone ID: MRT4577_178077C.1.pep
RKKNPPSPPSRRPGSASPLPSPAIYLSLSAIDSAWQLLIANFTEFQLATVVTFLLHETVFFLSGLPSLLFERFGLFAKYKIQKKSNTSAYQNRCVLRLILYHVCVNLPVMIFSYPAFKFMGLRSSLPLPHWSVVVSQVLFYFVLEDFIFYWGHRALHTKWLYKHVHSVHHEYATPFGLTSEYAHPAEILFLGFATVVGPALTGPHLFTLWLWMVLRVLETVEAHSGYHFPWSPSNFLPLYGGSDFHDYHHRVLYTKSGNYASTFVYMDWLFGTDKDYRKAKTIEEKEGKNL

SEQ ID NO: 270264 - protein, 207 aa, Zea mays
  unsure (1)..(207): unsure at all Xaa locations
  Clone ID: MRT4577_178078C.1.pep
MQLLIANFTEFQLATDITFLLHETVFFLSGLPSLLFERFGLFAKYKIQKRSNTSAYQNRCVLRLILYHVSVNLPVMILSYPAFKFMGLRSSLPLPHWTVVVSQVLFYFVLEDFIFYWGHRALHTKWLYKHVHSVHHEYATPFGLTSEYAHPAEILFLGFATDDGPALTGPHLFTLWLWXMGLRALKTAEAHNGYHFPWSPSNFLPLY

SEQ ID NO: 270265 - protein, 274 aa, Zea mays
  unsure (1)..(274): unsure at all Xaa locations
  Clone ID: MRT4577_178079C.1.pep
MAAPMSAIDSAWQLLIANFTEFQLATVVTFLLHETVFFLSGLPSLLFERFGLFAKYKIQKKSNTSAYQNRCVLRLILYHVCVNLPVMIFSYPAFVFXGIREIMGLRSSLPLPHWSVVVSQVLFYFVLEDFIFYWGHRALHTKWLYKHVHSVHHEYATPFGLTSEYAHPAEILFLGFATVVGPALTGPHLFTLWLWMVLRVLETVEAHSGYHFPWSPSNFLPLYGGSDFHDYHHRVLYTKSGNYASTFVYMDWLFGTDKDYRKAKTIEEKEGKNL

SEQ ID NO: 270266 - protein, 131 aa, Zea mays
  Clone ID: MRT4577_17807C.1.pep
MSWQTYVDDHLCCEIDGQHLTSAAILGHDGSVWAQSPNFPQFKPEEIAGIIKDFDEPGHLAPTGLFLGGTKYMVIQGEPGVVIRGKKGTGGITIKKTGMALILGIYDEPMTPGQCNLVVERLGDYLVEQGF

SEQ ID NO: 270267 - protein, 105 aa, Zea mays
  unsure (1)..(105): unsure at all Xaa locations
  Clone ID: MRT4577_178080C.1.pep
GRSSRPGPDHSHTAAIHLRPLRSVAVSSASHARSSTSSPGPSPLPNRPTPTALPLQRPPPPPPTMSTTLPITTSRXLPQDPLHSGPRRDIRLRRPDGYETPTPQH

SEQ ID NO: 270268 - protein, 284 aa, Zea mays
  unsure (1)..(284): unsure at all Xaa locations
  Clone ID: MRT4577_178081C.1.pep
MQLLIANFTEFQLATVITFLLHETVFFLSGLPSLLFERFGLFAKYKIQILLSFPLELELGYSLRKXTKTQKRSNTSAYQNRCVLRLILYHVSVNLPVMILSYPAFKFMGLRSSLPLPHWTVVVSQVLFYFVLEDFIFYWGHRALHTKWLYKHVHSVHHEYATPFXGLTSEYAHPAEILFLGFATVVGPALTGPHLFTLWLWMVLRVLETVEAHSGYHFPWSPSNFLPLYGGSDFHDYHHRVLYTKSGNYASTFVYMDWLFGRTNGYRKAKRPLRSQEVKKKKNL

SEQ ID NO: 270269 - protein, 91 aa, Zea mays
  Clone ID: MRT4577_178082C.1.pep
MTKHPFKILCLYKVHRTNSYDELPKSEVTSPKNFGGGRNKNDMIPPLNNAAYTRLEPEEHQFCFQATLLGTRFLLLIQDVGFSWQLAGNII

SEQ ID NO: 270270 - protein, 119 aa, Zea mays
  unsure (1)..(119): unsure at all Xaa locations
  Clone ID: MRT4577_178083C.1.pep
TVAPENIKTGAPSWVAGLTPPGLSKQVGXWEQNPALETWRHQQAHTAGITPTTPVVLQQXIRLKPXLPEWHLLVLXLNEQQLQQLALAKLDKYFEVHKMLPSKQLAALNPTSYLLQPQL

SEQ ID NO: 270271 - protein, 110 aa, Zea mays
  unsure (1)..(110): unsure at all Xaa locations
  Clone ID: MRT4577_178084C.1.pep
VDEALAYSQLDVSFEIWAFLLPSSLAGPSSEMGTSVPPGFKVFAAPNVVEDEIDQYLSXQDGKIYRSRDPQLCRHGPLGKCVHCVPLEPFDEDYLNHLEPPVKHMSFHAY

SEQ ID NO: 270272 - protein, 109 aa, Zea mays
  Clone ID: MRT4577_178085C.1.pep
IHVGVIFFWGDLHQTQKIGHQRALEHSKSKNERTGWQNAEMNYTNPKSYTAPKSFQSVTKLLAIMDRHTDTHPKHISRTELQKHTVRIRADGGLRLADPLAHPMSSRPP

SEQ ID NO: 270273 - protein, 162 aa, Zea mays
  unsure (1)..(162): unsure at all Xaa locations
  Clone ID: MRT4577_178086C.1.pep
MAAVLDALAARVMNNIMDMGEAKMSMLLGVSHEIKKQEANVEPLRNILTDAERRRITDKSVQAWVTKLKSAMYEASDILDLCQLEAMDRHDKQHSRGLCLRLREKLPFLGXWGKSCRVSSXFLFCVQNPRFANEVXCRIKNLNDELLTICKRVSLGFNFHID

SEQ ID NO: 270274 - protein, 146 aa, Zea mays
  Clone ID: MRT4577_178087C.1.pep
MPKNKGKGGKNRKRGKNEADDDKRELVFKEDGQEYAQVTRMLGNGRCEATCVDGTRRLCHIRGKMHKKVWIAAGDIVLVGLRDYQDDKADVILKYMNDEARLLKAYGELPETLRLNEGVDVDGPEEGEENGDYNYIQFEDEDIDKI

SEQ ID NO: 270275 - protein, 74 aa, Zea mays
  unsure (1)..(74): unsure at all Xaa locations
  Clone ID: MRT4577_178088C.1.pep
PPHGFVKGDPLXVQGIFLGPKKRVVPLRQSLLKQTSRLGLEEIKLKFIPPSSKFGHGRFPPPHKKQRFFGKPKA

SEQ ID NO: 270276 - protein, 231 aa, Zea mays
  Clone ID: MRT4577_178089C.1.pep
DVLQAILSTSLLSALAAAAPAPQVAGYTDADASFSVEYPTGTPSSYSFGPDSQVAAQPTQPGSAYPRVSADPTGATSHGPFSGTPTTTGAAKAPATLGTAIAPLPPNPTATYYNTNGSPQNPMPIPYTPAGGLGTNGTEPRYMVNSDFDYESIQLGLYQEWIELDLFNNGLAVFSDQDFLDAGLTAEDRAYIAFMAIQETGHATLLSNMLGETAAPQCTYDYPFRTVREFI

SEQ ID NO: 270277 - protein, 44 aa, Zea mays
  unsure (1)..(44): unsure at all Xaa locations
  Clone ID: MRT4577_17808C.1.pep
SKAESMSFPSRDLKFCDCDACECSDFICSSSIRCLXYHGIHRMK

SEQ ID NO: 270278 - protein, 68 aa, Zea mays
  Clone ID: MRT4577_178090C.1.pep
RGGASKGPKQSPKGGPRLVKPPKKIPQTGYIFPPLNPGAHFFRAPIFGFGYPPKYYLGGGGEKFFLSP

SEQ ID NO: 270279 - protein, 89 aa, Zea mays
  Clone ID: MRT4577_178091C.1.pep
GRVGARASYTRAKLNSCCVYILLLLPLCTCACMNCVCVYGLKSLCSWLLSRSVSVFSRFAWICTSSCCITSYQRDHALCFEKKKKKKKK

SEQ ID NO: 270280 - protein, 122 aa, Zea mays
  Clone ID: MRT4577_178092C.1.pep
NSVTDVAYAVCTDTITGRNFVIAIVEFGGSCLQIDIVNLLYICECNSVPDVANYCKQVIKITDYNQNQFVKLVVASMFSTVDGMSIAVHGFAFTKDTGHSRVTPAIDVCNGLLGENDQISIY

SEQ ID NO: 270281 - protein, 55 aa, Zea mays
  Clone ID: MRT4577_178093C.1.pep
TNPFCNIIVDPLGSSALIPLAGYRMCWQRDVNRYIITVATYVYVCVCVCVCVCMC

SEQ ID NO: 270282 - protein, 102 aa, Zea mays
  unsure (1)..(102): unsure at all Xaa locations
  Clone ID: MRT4577_178094C.1.pep
SFAAGSLHQQLHITGHDGRGEVLDNDRLLTLALDRTSDSQLQFRHEYLFVKIDMQLRLVPGNSAGTVTAXYLTPHDGAHDQIDCELLGNESGEPYTLHTNAL

SEQ ID NO: 270283 - protein, 88 aa, Zea mays
  Clone ID: MRT4577_178095C.1.pep
QTVPNHTAKQFLPSWRWHVRTLTSGREMTQHTHEIISILLSCICLRAILFSLAVGTRSVSPSDLPCMLCCSECCLVLKYVVRQNSCPC

SEQ ID NO: 270284 - protein, 129 aa, Zea mays
  unsure (1)..(129): unsure at all Xaa locations
  Clone ID: MRT4577_178096C.1.pep
STYGEVLECKIILDRETQRSRGSSFVTLXTEEAMRNAINGMNWKELDGRNITGNDAHSHGRRRSSGSGGYXVDTEAGDNRRGGXKIAAAATGESSRYRSRRTCYRGGRRXYRGGNRGGGYGNSHGNWRN

SEQ ID NO: 270285 - protein, 70 aa, Zea mays
  Clone ID: MRT4577_178097C.1.pep
IHQNFWRNIKLPLSWMHLSFSHSLIRLPEQMKHTIALRHLYTDGCTRLECMPPELGQFTSLRTITWEKNA

SEQ ID NO: 270286 - protein, 59 aa, Zea mays
  Clone ID: MRT4577_178098C.1.pep
ASLRFLSSASLRRARAGSPRACSSGFRRGCAVAWRPCCCCCWPVLARGCVGGRLFLVPL

SEQ ID NO: 270287 - protein, 83 aa, Zea mays
  Clone ID: MRT4577_178099C.1.pep
SSEFGSSVATGTVLTLQADLTNEGAIIKNPWDRDRIHPKPCKTDRDPQGCHAPSFKHQARPKRAHDHQLHSERDECAAKLQEN

SEQ ID NO: 270288 - protein, 36 aa, Zea mays
  Clone ID: MRT4577_17809C.1.pep
MSHRKFEHPRHGSLGFLPKKRSSRHRGKVKSFPKDD

SEQ ID NO: 270289 - protein, 89 aa, Zea mays
  Clone ID: MRT4577_1780C.1.pep
LNLAMGMTVGIQFSALQAQPSNTTDNDYDEPKQVRFSLWGGKNCINLGVTTAIRPINNPRLRSRDGGYATPTTITHSDSSLGSLRTICT

SEQ ID NO: 270290 - protein, 50 aa, Zea mays
  Clone ID: MRT4577_178100C.1.pep
MGHPFFAFNKHKRKRGLKPKGVASFPDRFFPFSLAGPGSAGPPGPKPGRH

SEQ ID NO: 270291 - protein, 127 aa, Zea mays
  unsure (1)..(127): unsure at all Xaa locations
  Clone ID: MRT4577_178101C.1.pep
APCSFLCVSLLRLPFPPGGVCLLAPFVGPVFCSPVCSCLVFCFLVCCRGLWLALFXCLLLSFVAVLALPAALXVVCRVRVAPLPLRLPLFVVGPAFCWSFGPVLFAGXXCLVFFFRXRGSSRVSXXG

SEQ ID NO: 270292 - protein, 58 aa, Zea mays
  Clone ID: MRT4577_178102C.1.pep
ASHQNAKSSFVPIDECYLIRRSVCVLRQVTIREVELHAYLIKYDDACKVVSVSSHLES

SEQ ID NO: 270293 - protein, 97 aa, Zea mays
  Clone ID: MRT4577_178103C.1.pep
MQVEEVVDISNWEKKEVYGKKRKLQSFRDEDYYISSVPQNHHLEAGLSVRDNEGFVENRLDAVVLDLVDDEASGMQAQKTRYHWMKVDNWSYVSYSY

SEQ ID NO: 270294 - protein, 113 aa, Zea mays
  Clone ID: MRT4577_178104C.1.pep
GALHRVMVGRTSVVVAHRLGSLQGCDTIAVLDRGVVVVVGSLLFLLASGRSGPFFGLVFLLLLGKQPCVVWVFLAWLLWQGGCSLVPLVVLGLLMALLRVPALVGILVSVGVG

SEQ ID NO: 270295 - protein, 135 aa, Zea mays
  unsure (1)..(135): unsure at all Xaa locations
  Clone ID: MRT4577_178105C.1.pep
MVHGTCYRNYGMTFMKPRXPYEKERVDAELKLVGNDDLKYTREVGRSQYALTTIRSAARHLLTLDEKNPRGLFEGEALIYRMNRLGLLAEGQNKLDXCLALTADNFLVRRHQTLCFTAGMAKSIHHARVVIKQRH

SEQ ID NO: 270296 - protein, 82 aa, Zea mays
  unsure (1)..(82): unsure at all Xaa locations
  Clone ID: MRT4577_178106C.1.pep
MGNACIDALRSNYLLIFKHAEFQRHDSEYSASASADDSSRKPTPSATTDAHAPVPSAVAIMFGAAGATPDLGXGLGHTTPNL

SEQ ID NO: 270297 - protein, 145 aa, Zea mays
  unsure (1)..(145): unsure at all Xaa locations
  Clone ID: MRT4577_178108C.1.pep
VRLQVPVRNSRVDPRVRXAXXFXFXPSVLXQITXXXSRAXXGXXXXTYXXQXILQHXXXKXLXQXXVXEXXKLXTERXRKARPNXKXGIXGEHDXEPSSXXXFAKAGLDYVSCSPFRVPIARLAAAQVLVGCLLIGNRIACCWWW

SEQ ID NO: 270298 - protein, 323 aa, Zea mays
  unsure (1)..(323): unsure at all Xaa locations
  Clone ID: MRT4577_178109C.1.pep
RRFYAAELVLALEYLHSLGVVYRDLKPENVLIQDSGHIMLVDFDLSTRLPAQPQEPDAPATSPKPAPPVAAPSPIRGRARKPAGAALCFPFRTTGSAAKPAADSPSPLSTSRTASSSSSSSTATTASSSAASAGARTPAKSNSFVGTEDYVAPEIIAGRGHDFAVDWWGLGVVLYEMLYGRTPFRGQSRKETFYRVLTKQPELVGEQTPLRDLIARLLEKDPEKRIGARGVRAHPFFRGVDWDRILQVARPPFIPTPPPQDEGEDGDGDEALDVEKVVREVFASNDAEGGKAWPVADGGRVGGDGDCDGRGDQSKDGPXGVFF

SEQ ID NO: 270299 - protein, 37 aa, Zea mays
  Clone ID: MRT4577_17810C.1.pep
SPVFFYTTYIGRLVIISRILVLLCYPVDRCRGFLLSD

SEQ ID NO: 270300 - protein, 124 aa, Zea mays
  Clone ID: MRT4577_178110C.1.pep
PSDLSIDVEKAKRVVHDLAQSRLSNSLVQAVALLRQRNFKGVVLSLNDLLACDKAVPAEPMSWEVSEELSDLYAIYSKSDPKPAPEKVLRLQYLLGIDDSTATALREMEDGALFFAAEENNFVF

SEQ ID NO: 270301 - protein, 119 aa, Zea mays
  unsure (1)..(119): unsure at all Xaa locations
  Clone ID: MRT4577_178111C.1.pep
AKQPELVGEQTPLRDLIARLLEKDXERRIGARGVKAHPFFGGVDWERILQVARPPFIPAPPQDEDGDEALDVEKVVREVFASKEGEGGKASPVADGGPVGGDGDGRRDHSKDGDFSVFF

SEQ ID NO: 270302 - protein, 48 aa, Zea mays
  Clone ID: MRT4577_178112C.1.pep
SHHLMNSSTYFSCYHLCTNYTLIFFSGLTSIFSYSLHFFIVSQRSLTC

SEQ ID NO: 270303 - protein, 69 aa, Zea mays
  unsure (1)..(69): unsure at all Xaa locations
  Clone ID: MRT4577_178113C.1.pep
MATKIFSLLMLPALSAWVSNATILPQCLQASIACLLSPFRTLTLAXYCXNPALQPYLLQQAIASSNIPL

SEQ ID NO: 270304 - protein, 197 aa, Zea mays
  unsure (1)..(197): unsure at all Xaa locations
  Clone ID: MRT4577_178114C.1.pep
LSSAVTTGCENPILQPYRIQQAIXTGILPLXPLFLQQXSXLLQLLPMVHLMAQNIKAQXYNNIVLRNLAVYSKKQQYFTFNXQMAELNYYDYLQKQLPLSQLSSVYTNKCFPFYQLAAXLNSAXAYLQQQQLLPFIQLADANPIGFXTHTQLLALYLHTVTDADTLLQLLEMMTFNQLALTNSSAFYQQPIIGGALF

SEQ ID NO: 270305 - protein, 85 aa, Zea mays
  Clone ID: MRT4577_178115C.1.pep
HAPLAQPAQSFMLQAQIFSGNVITCVFVHRRTDYRHPYAQAVRLVLVPERSPRMDQPRAVPEGVQGTAPAHGPQIIRPCMSYIMS

SEQ ID NO: 270306 - protein, 136 aa, Zea mays
  Clone ID: MRT4577_178116C.1.pep
VGVLISLFLGCNFSQEPIRASDGVRNGLRKVNCVSNHIGILVLFMPPFMERGFSDPVGVVAPVFPCAEQEASSVPVSVLCECLFYGDRGPGLAGWDVDRDVGHKNRCVNPCRLCYVVASLRMGVYNKNCKSYNVNY

SEQ ID NO: 270307 - protein, 75 aa, Zea mays
  unsure (1)..(75): unsure at all Xaa locations
  Clone ID: MRT4577_178117C.1.pep
MAALAASGWSCGAKGAFLSCGSCRSVQPVDPAADYFRIFVLDRGYDVKDTTLEGKYKDWYEEVHPXDLVHSKSEK

SEQ ID NO: 270308 - protein, 96 aa, Zea mays
  unsure (1)..(96): unsure at all Xaa locations
  Clone ID: MRT4577_178118C.1.pep
RGCDPVDELRHMSMPQDYLQHFELCYSVSVEQANISDVGLKMVDLVVTVSPVFLWDLKPVDSGRGLLVISRSXNDCKINGIVNYINAVDSNYLCIS

SEQ ID NO: 270309 - protein, 133 aa, Zea mays
  Clone ID: MRT4577_178119C.1.pep
MSGGKGGKAGGDKAASQSRSSKAGLQFPVGRIHRLLRKGNYAQRVGAGAPVYLAAVLEYLAAEILELAGNAARDNKKSRIIPRHLQLAIRNDEELNKLLGQKDISQGGVIPQIHSELLPAKSKDKTSKVSQEV

SEQ ID NO: 270310 - protein, 267 aa, Zea mays
  unsure (1)..(267): unsure at all Xaa locations
  Clone ID: MRT4577_17811C.1.pep
MAAATSLAACARASASGLHTGRLAVRAAALPADGRSDGAASYKELGLYSLKKRIEDTVVRVETTASDALELEEAQRIKQEEVLQKRNLWDNPAKSHETLSALADAIRVVDHLKDLRFKAEEAKLISQLSEMDAINGELFKQAYKSSVDASEYLDRYQMYKLLKGPYDKEGACIIVTAVSNGVTSELWAEKVFGMYTSWARKQGYKVGLIEKIFSTSGHIQSATMEIESEYMFGTLSGEXGMHQMIYSSIENSDIDQALSARVDKIPL

SEQ ID NO: 270311 - protein, 93 aa, Zea mays
  unsure (1)..(93): unsure at all Xaa locations
  Clone ID: MRT4577_178120C.1.pep
IKNPPWFFKNLLAGPKDGNSISKQFEEPXQPIQSKKEFLQILGEGALPTGGFRGLNQFLKKDIGPPEDKEGLNSKAGFYLENNGEIVFSILQQ

SEQ ID NO: 270312 - protein, 65 aa, Zea mays
  Clone ID: MRT4577_178121C.1.pep
LVGKFKKKKKKKKKREKKKKKKKKKKKKKKKKKKKKKKKKNKKNRLYLLKYQNLLTLPFNFLIFI

SEQ ID NO: 270313 - protein, 146 aa, Zea mays
  Clone ID: MRT4577_178122C.1.pep
SFFFFFFFFFFFFFFFFFFFFGKKNFFFLFKRGKKGSGETGTNPPGGGGDKNNQKPAGKEIKRGDPRRDPPKGENQQTGGRVWGGMRAHQGGGKGGQRIGRGEKIILVTNRTKKGPNGQKGKKGGALGGGQSQKEHCGNGPHFRGG

SEQ ID NO: 270314 - protein, 97 aa, Zea mays
  Clone ID: MRT4577_178123C.1.pep
QWGALMSSCLMHNNVGVGERVGKKLIELEPDDGGRYVVLFNLYAVNGLWEDAKALRKMMEERGAKKETGLSFIEWNGLVHEFRSGDTRHPQTRQIYA

SEQ ID NO: 270315 - protein, 85 aa, Zea mays
  Clone ID: MRT4577_178124C.1.pep
SNVNPFLPTIAEVWLSQGCTPVKFFSMPFRANVGIFSGSFQGSCLFPSVLPRVRQKSLSPCLALFQWFQNGPRFPACFGKTNHQN

SEQ ID NO: 270316 - protein, 64 aa, Zea mays
  Clone ID: MRT4577_178125C.1.pep
LAPSGEKRPLGAARVSAVLGSRGTGTLNLPPGAGGGDPTHELPTLATAPKFPYFFRGPPVVLFG

SEQ ID NO: 270317 - protein, 63 aa, Zea mays
  Clone ID: MRT4577_178126C.1.pep
LTIPVILGKNKKKKKKKKKKKKKKKKKKKKKKKKKKKKKNHLKKKKKKKKGLSLGRNHLKGKF

SEQ ID NO: 270318 - protein, 43 aa, Zea mays
  Clone ID: MRT4577_178127C.1.pep
RAEISRQLSRTKMTACKRFYVVFMHLITLPLVFYILMILCTSN

SEQ ID NO: 270319 - protein, 42 aa, Zea mays
  Clone ID: MRT4577_178128C.1.pep
ILNEHTLKLHPKIQLQSISVLVNKENSCGGCYKTSLINDFSS

SEQ ID NO: 270320 - protein, 119 aa, Zea mays
  Clone ID: MRT4577_178129C.1.pep
AFNCSNGDLFKWKQLWPILPDHFGLEWAGSQGEENRFKLEEAMAGKKTVWAKIVRENALITPELFEIPNWWFVNPMFSVETQLLGSMNKNKGHGFLGFRNTVSSFNPWIEKLKVFKIVP

SEQ ID NO: 270321 - protein, 55 aa, Zea mays
  Clone ID: MRT4577_17812C.1.pep
IGFIGRTFIPLLRGKPCRFPIIMRLQLIPFFSLLGYNKEVPFDPLLSLGSLFIGL

SEQ ID NO: 270322 - protein, 90 aa, Zea mays
  Clone ID: MRT4577_178130C.1.pep
ELGSGGNLKGSLFLVTWVPLQGALRTPIRGSCAKQETGPETTEDQITDHQIARLKEVLSLLNKVGGGGITAKELGTEMRSLGQNPTEAAL

SEQ ID NO: 270323 - protein, 76 aa, Zea mays
  Clone ID: MRT4577_178131C.1.pep
DMKSPNILENLHFYQIDWKSSLLTTQLEADCVMANRYQFPKFSAVTSGTRGNLIENSGDLKGALPMTLRTPRPSPA

SEQ ID NO: 270324 - protein, 99 aa, Zea mays
  Clone ID: MRT4577_178132C.1.pep
MPQHPQKESSQHVIADSHDNFEAKLKEVDVKVETPVNQKKSQEQNAGTPQTVVQDQLDEAQGLLKTTNSTGQSKEARLARVCAGLSSRLQEYKSENAQL

SEQ ID NO: 270325 - protein, 116 aa, Zea mays
  Clone ID: MRT4577_178133C.1.pep
GLRASSGEIKLRDGERKPDAAAVLATTTDWGKREGEKEDAVVTGGTDLLHARGIGMDALGSLVDGELRCLRCRRGDGEGPRGHQNFSPMPLLRRGTTSAVVGEYQHPHHCVRLRVT

SEQ ID NO: 270326 - protein, 87 aa, Zea mays
  Clone ID: MRT4577_178134C.1.pep
THCSSTSPKLPATLCAHLLSSIAERSRLLDISLLTSVVVCLTACVVSLFQLPTVIRCKFPSLVKKKKKVKIKIRASALMVTKLSTRA

SEQ ID NO: 270327 - protein, 75 aa, Zea mays
  Clone ID: MRT4577_178135C.1.pep
FLLCFRGSIALPRNYKATIGYTSNTMFEPVKGQFPVKGDPFGGFSMYRSIGEVKNCLAGLSDYQNVHFIETRKLA

SEQ ID NO: 270328 - protein, 62 aa, Zea mays
  Clone ID: MRT4577_178136C.1.pep
PLFFLFYAISHNRPASFSDKINQLIIWYYNNCATRSAGCAGTSSSTASSSSRLKLHSSLTGE

SEQ ID NO: 270329 - protein, 140 aa, Zea mays
  unsure (1)..(140): unsure at all Xaa locations
  Clone ID: MRT4577_178137C.1.pep
MLIKEYHILLPMSLDEYQVAQLYMIQKKSREESSGEGSGVEILANRPYTDGPGGSGQYTHKVYHVGSHIPGWFRALLPKAALQVEEESWNAYPYTRTRYTCPFVEKFSIEIETYYLPDGGQQPNVFXLSGAERRQRILDT

SEQ ID NO: 270330 - protein, 119 aa, Zea mays
  unsure (1)..(119): unsure at all Xaa locations
  Clone ID: MRT4577_178138C.1.pep
MPPRQHASIAMPISGDANGDGISRRSRLMTNLPCGLRFHPTDKELMMHYLMRNYGSLPGPVPFIXQYNIYHSNRCKLPAYALFCHKDRFFFTPCYRWYTNGAPPNRATGSANWKATACD

SEQ ID NO: 270331 - protein, 182 aa, Zea mays
  unsure (1)..(182): unsure at all Xaa locations
  Clone ID: MRT4577_178139C.1.pep
MADGDGAAATGKLAELPSGAEKGLPRRGKASSGRTLNTAQIPLVASHPDVYEPCDDSFALVDALLSDKAQLLTLQPRLCMEVGSGSGYVITSLAIMLRQLGSGAQYLATDINQHAAETTQATLEAHGVHADVIVTDIMSGLDKRLAGMVDVAVVKPSYVPXPVEEVDVXGLLSSWAGGXNGP

SEQ ID NO: 270332 - protein, 110 aa, Zea mays
  Clone ID: MRT4577_17813C.1.pep
FFFFFFFFFFLVFVFVFFYNNVFLTAYIFNFSPQHNCITHGDVKIGGHTIPSGGIEFFATRRGWQHTTHTNIFPHTINPNNTDSMSRLRGRYGNTSFFSLFPLKSRNLFP

SEQ ID NO: 270333 - protein, 51 aa, Zea mays
  Clone ID: MRT4577_178140C.1.pep
EKFSIPKPKLPITIHNYTENIWLVTFFEDLRKRNAPNRSHQMNQCLKPWFG

SEQ ID NO: 270334 - protein, 44 aa, Zea mays
  Clone ID: MRT4577_178141C.1.pep
RSLRPRGECSRFRFGVVGKPMAAAPAVQAMHMTDSDSDPLAHAW

SEQ ID NO: 270335 - protein, 53 aa, Zea mays
  Clone ID: MRT4577_178142C.1.pep
TISPPSAATMIQWSYTHNSGKGFSSSVITRTTSRIPSSIPALERTSTSQIHGI

SEQ ID NO: 270336 - protein, 40 aa, Zea mays
  Clone ID: MRT4577_178143C.1.pep
SLDVHGVNISGPALPGGRTPCISLILVLNVNLSALTLDPP

SEQ ID NO: 270337 - protein, 58 aa, Zea mays
  Clone ID: MRT4577_178144C.1.pep
CNESWFHDACNLHQRCFRTLALHLKRQSNSRNGNINSPTSRAQLQKLSTMTPTSSWAQ

SEQ ID NO: 270338 - protein, 72 aa, Zea mays
  Clone ID: MRT4577_178145C.1.pep
MTPLNGKELFLGKKVFWNFLKKKKKKKKKKKKKKKKNQKKKKKKKKKKKKKSLTCPGGRSKGRCRPHTGGVR

SEQ ID NO: 270339 - protein, 88 aa, Zea mays
  Clone ID: MRT4577_178146C.1.pep
MNAEHYEGPEEADATEKTMKVVEDIVKSLDESSFKEGESKETQKKQPQDYDIMSLIKLRSTYKKCLIARKEGKRPPLEEVDGNACIDH

SEQ ID NO: 270340 - protein, 88 aa, Zea mays
  Clone ID: MRT4577_178147C.1.pep
PTQSGSSHHNRSPAMSAAAGAFEVAPSVVATSYTASSSWAGSRDPADGARKNAQSTMMVCTWSIHQAPSTSPASSSSPAGKRAAACRP

SEQ ID NO: 270341 - protein, 282 aa, Zea mays
  unsure (1)..(282): unsure at all Xaa locations
  Clone ID: MRT4577_178148C.1.pep
MCKLNTKVVMWRLCCCNCQVDETDRCESHVKATTNKIDGVTKGLRDSATAKVEPHDDAPPIDVDVLSLDDLIXKIVDFGSRALIGEGIYGTLYYATLGNVTKMTVKKLXTENEPIVEFLXRLVLPLIIDHGGYYQTMMLTXCQVSLVSRMTHENFVDMLGDRIKRNLRIVSYEFATMGSLHDVLHGRKVFQGARPGPTFGWMQRVQIVVDATKGLXYFHGKVHQSIVHRDNRTINIILFEGFKAKIVDFRYGCPLALELTSSLRISCRTIIILFLKAMRRLN

SEQ ID NO: 270342 - protein, 298 aa, Zea mays
  unsure (1)..(298): unsure at all Xaa locations
  Clone ID: MRT4577_178149C.1.pep
MRHPRRVPRGGPRPPPLRRLQWLVVMWRLCCCNCQVDETDRCESHVKATTNKIDGVTKGLRDSATAKVEPHDDAPPIDVDVLSLDDLIXKIVDFGSRALIGEGIYGTLYYATLGNVTKMTVKKLXTENEPIVEFLXRLVLPLIIDHGGYYQTMMLTXCQVSLVSRMTHENFVDMLGDRIKRNLRIVSYEFATMGSLHDVLHGRKVFQGARPGPTFGWMQRVQIVVDATKGLXYFHGKVHQSIVHRDNRTINIILFEGFKAKIVDFRYGCPLALELTSSLRISCRTIIILFLKAMRRLN

SEQ ID NO: 270343 - protein, 93 aa, Zea mays
  Clone ID: MRT4577_17814C.1.pep
GLALALALGSGDPAWKTYVKDGLAKADSKAGAPASKGKAAAAPNKEGTQKKDAAGAGRPRKGVARKARNESACLAGGETHPSITPIDRPLSWM

SEQ ID NO: 270344 - protein, 84 aa, Zea mays
  Clone ID: MRT4577_178150C.1.pep
ARMVDLVGHGHLERHGLQHAPVGEVRPHQHHDGTAGAGASLGIRDTGTGTASTANATAAWLWLWFSIATVVANLPHVVKAGRKR

SEQ ID NO: 270345 - protein, 90 aa, Zea mays
  Clone ID: MRT4577_178151C.1.pep
KSSDKFGGPGCRHPLILVCIWRSSCISGADPWTHCANQRQDVDHRTLPVPVARLQPAVCCTMELPCTNRADAWMDRFAQVAPPWTCTPRM

SEQ ID NO: 270346 - protein, 199 aa, Zea mays
  Clone ID: MRT4577_178152C.1.pep
QCHGQGCVDRGGARNVEIPQLLCMPRHRLGPSSTRRNVQHIEGLWPLLLARGGGRVALYNDRRWRTQHWAGLSQNAEKDMPRSSCRSEELRVSGLSAGKDLGAQPRAWHGQAGKKRIGWGNSGSGPRRLLACAPVEGSRGMGVWEKARRGERRAGLYRGGFGVVAEEGDGGARLEEHGMEEGAAAAMGNERIFFPRTGR

SEQ ID NO: 270347 - protein, 53 aa, Zea mays
  Clone ID: MRT4577_178153C.1.pep
AGSSLIRIPGQPQPQSNPVQVAGWLRVSTTSPMRSRSRTPHASSSSSAPMASN

SEQ ID NO: 270348 - protein, 70 aa, Zea mays
  Clone ID: MRT4577_178154C.1.pep
AHPTSCRRNSLTLASHGAYGPAMAEEYELRAGEQRGAFRGPQVADGPTRGVQTCARLPPHAVLPSGPTLR

SEQ ID NO: 270349 - protein, 71 aa, Zea mays
  Clone ID: MRT4577_178155C.1.pep
RTRPPSLAYQRASTTQSSHHLSMCWLPTLAQHTHTIYRSTIQKNYYLTTIDLNSFLFRTNSYQNIHHWISY

SEQ ID NO: 270350 - protein, 71 aa, Zea mays
  Clone ID: MRT4577_178156C.1.pep
YRELADIPLGTMVDMYMLWAFMTTQMVMWGTANGRNWGGANNSPCRVKTIPRPSPEKKRYLTHYVMQPMGG

SEQ ID NO: 270351 - protein, 84 aa, Zea mays
  Clone ID: MRT4577_178157C.1.pep
CVTLHQQDFECFCNLFQTMLVPLIAISQDVSLMGVNRPTHLITYSLEAERSSIIAELKQLSDNILLLMEIKFQDISSVRIDFRL

SEQ ID NO: 270352 - protein, 128 aa, Zea mays
  unsure (1)..(128): unsure at all Xaa locations
  Clone ID: MRT4577_178158C.1.pep
VVFQEKILGSKSQSRKEREAKVQIEKESSSDDDLDANINLMVRKTIKMLKKLNREGIRFDSRKKFFSSKRKPSLKWTATIVESLVILLINATSSRRTSLRARKMMIMMXWKKKKKKKKKKVLCVVTTA

SEQ ID NO: 270353 - protein, 101 aa, Zea mays
  Clone ID: MRT4577_178159C.1.pep
MAGVSRSMVAPLLVLNLVMYIVVIGLASWNLNHFINGTTNYAGVAGNGATFYFLLFAILAGVVGAASKLAGVHHVRTWRGDSLATSASSALVAWAITALAF

SEQ ID NO: 270354 - protein, 90 aa, Zea mays
  Clone ID: MRT4577_17815C.1.pep
LPATSIRKRRGIERAESSKHGNGRKFEYYWEMQHYLESEELSLYMGTQDDALSCYDSSSPEMLFSNSSWAPAGVAATASEKREGPGGAAA

SEQ ID NO: 270355 - protein, 82 aa, Zea mays
  unsure (1)..(82): unsure at all Xaa locations
  Clone ID: MRT4577_178160C.1.pep
KTVRMGXLEGALRKGMXMKNLKRVKKCGLKRESPPPPYVXYEDKVRTRXQRGTLQNKGGGIKQKQNKEGEKKKKKNKKAPPA

SEQ ID NO: 270356 - protein, 96 aa, Zea mays
  Clone ID: MRT4577_178161C.1.pep
MVFRRFVEVGRVAYVSFGPHAGKLVAIVDVIDQNRALVDGPCTQVRRQAMPFKCMQLTDFILKFPHSAHQKYVRQAWQKADINTTWAATRWAKKIE

SEQ ID NO: 270357 - protein, 75 aa, Zea mays
  Clone ID: MRT4577_178162C.1.pep
TGGGVELFLLKIQIPHPPINLRGFYVHRRRQRQLNPRRRSTMASSLLSSPAKPTITTATKTTPVPRLVRFAHAHV

SEQ ID NO: 270358 - protein, 53 aa, Zea mays
  Clone ID: MRT4577_178163C.1.pep
EIKKKKKKKREKGNRRTGSRIPSSFLLHATSYILYPETNLQSTGRHLTTLVTP

SEQ ID NO: 270359 - protein, 859 aa, Zea mays
  Clone ID: MRT4577_178164C.1.pep
MESESLDFEDNGDHQPSSEASLASDVVYDDSLVCPCIGSEHQAEIPNLATEDECRKLMASSHNDSIFHGYGYPVVVGLALPITWASPSEVDKTEEVLQTQKCSEFGTKGSTGDVHSQVTSTCATSNDTGICAATFQYPHTVVPVVQIKSDSNQAYDEKMVPCPTQEGQNVTNNSIMQQRETKQLSPLPYSPVALWSDLEAEVFLLGLYIFGKNLNLLSRFLGTKTVGDVLAYYYGKFYRRDTYKRWSDCRKAKTRKCILGERIFQGWRQQELISRLKSKIPKEAHDSLIEVFKSFSDSQTSLNEFVFSLKSTVGAETFVEVVGVGKGKHDLTGFVTDQSKPNHALSVHSDLPTGKDCSSLASEDIIKFLNGDFRRSKTRSNDIFWEAVWPRLLAKGWHSEQPKDVSTTKSCLVFLVPGIKKFSRSKLTKGTHYFDSVSDVLKRVAADPVLLELKVDAINNGLTAEENGSITDVKLNQDSPLDGYQELPKFTIIDTSLVEGEEPFNIRELRNLPADANITFLLSQHSSNMVSYSSSEEEAANDRLSDDQEDCGRVKAEAKEIEMVSAGSLQNMVTANGHSSNVNDKIDLTGIYGIKTKPERRKYLSPVSKRRRLNSCSNEQASRRSFSFSKGGGFEKQKSKPPLISSKPAAVEVGDTFQSKTISSCSTKEKPSEHTADALNSLIDDEQNARMVMEVEAVAEVHSKVIAVQPKFVKERAEFIGPVDLNKLETLHDDKASRSIDTTSLGNLGSMKVDEAPSSSDKNMACDPSGAAGRPVSEAPDPALQVNARRHGTRNRPPTAKALEAVAFGLLGSGKRKGDLKNRATSRPSQRARKSAKDLVPVASSGDAKASCIDAEEQR

SEQ ID NO: 270360 - protein, 505 aa, Zea mays
  unsure (1)..(505): unsure at all Xaa locations
  Clone ID: MRT4577_178165C.1.pep
TMFAVMKDTDYAAKPTFIDNFFTDWRKVLGKNHIIKNFELCDFTPIYEWHLREKERKKQMTTEEKKKXSGKKXKQGEKYMXWAVVDDVKENVXSFKGEAPRLFRGRGEHPKMGKLKRRILPSDITINIGKGAPVPECPIPGESWKEVKHDNTVTWLAFWNDPINPKDFKYVFLAASSSLKGQSDKEKYEKSRKLKGHIQRIRENYTKDFKNKDVTRRQIAVATYLIDKLALRAGNEKDDDEADTVGCCTLKVDNVTCMPPNQIQFDFLGKDSIRYFNTVEVEELVYKAIEGFRAGKKPGQDLFDKIDTSRLNAHLKDLMPGLTAKVFRTYNASITLDGILHEETEDGTVLEKIAVYQRANKEVAIICNHQRSVSKSHESQMTRMNEKIDELKSQMEELKADLNKAKKGKPLGYDSEGKPKRNLAPEAIQKKVATLEGKIEKMEMDKRIKEDLKTVALGTSKINYLDPRITVAWCKRHEVPIEKIFNKSLLAKFVWAMDVDPEFRF

SEQ ID NO: 270361 - protein, 410 aa, Zea mays
  unsure (1)..(410): unsure at all Xaa locations
  Clone ID: MRT4577_178166C.1.pep
NFKDDDEADTVGCCTLKVDNVTCMPPNQIQFDFLGKDSIRYFNTVEVEELVYKAIEGFRAGKKPGQDLFDKIDTSRLNAHLKDLMPGLTAKVFRTYNASITLDXRELKRILSYWVSFVHSFELLRFAWTLRAVDVDVLFSSGILMFINVTCSTAQLNANKXGQCYTVCHIFIFCTSDFLLSXHVSMLLTYYACSCDYPVRMVXVYILVLILQLHEETEDGTVLEKIAVYQRANKEVAIICNHQRSVSXSHESQMTRMNEKIDELKSQMEELKADLNKAKKGKPLGYDSEGKPKRNLAPEAXTSQPPIIHFVVFWFCVLEXSRVGNLTKPTCRIQKKVATLEGKIEKMEMDKRIKEDLKTVALGTSKINYLDPRITVAWCKRHEVPIEKIFNKSLLAKFVWAMDVDPEFRF

SEQ ID NO: 270362 - protein, 54 aa, Zea mays
  Clone ID: MRT4577_178167C.1.pep
KYIIRDFRPINLLNVGRTSAAAIGFTCRLAAACFYQSSVCKTASSFPWFLVVVV

SEQ ID NO: 270363 - protein, 76 aa, Zea mays
  Clone ID: MRT4577_178168C.1.pep
TGLLTFLSIHQLLVGPVATASYRRQVGTVCPLKLYLWWAGTFEVVIFFGPRDSRSVPCYRGYWKTLSNTVIFLTST

SEQ ID NO: 270364 - protein, 205 aa, Zea mays
  Clone ID: MRT4577_178169C.1.pep
SEAHRTDRPAPLYAATKKAGEEITHTYNHIWGLSVTGLRFFTVYGPWGRPDMAYFSFTRNILQGKPITVYRGRDRVDLARDFTYIDDIVRGCLASLDTAGRSTGTGGKKRGPAPYRIFNLGNTSPVTVPTLVSILERYLRVKAKKNVVEMPGNGDVPYTHANISLAREQLGYKPTTSLEMGLKKFVRWYLSYYGYNRGTHTFRNS

SEQ ID NO: 270365 - protein, 144 aa, Zea mays
  unsure (1)..(144): unsure at all Xaa locations
  Clone ID: MRT4577_17816C.1.pep
DIGLTDFSACFFKFIIEALQREFAVLVLAYIHHFLGISGTHSAYGLFLSQRQFIQDVLXRTVMSACKPCITPVDLHSKLFAVGPHVADATQFLILAGALXYLTFTRPDIDFAVQXQICLYMHGPLVPHLATIQRIMLYLQGTLA

SEQ ID NO: 270366 - protein, 59 aa, Zea mays
  Clone ID: MRT4577_178170C.1.pep
SPNASQVSIIPNGPHIKAGELSHTRTLFTIRSCLKSRSNINSCNFKCTLQPRKRVASLF

SEQ ID NO: 270367 - protein, 70 aa, Zea mays
  Clone ID: MRT4577_178171C.1.pep
ENPPPPPPCLIANFLFTFGSQEVFPTPLPEDMPYRVAARGHRDLGPTLGAISRRDEEKARAGEGDRRETP

SEQ ID NO: 270368 - protein, 66 aa, Zea mays
  Clone ID: MRT4577_178172C.1.pep
LLLCSGLVLAARQKTRRCCWGQGEGGKVAGHLLEPEARSREDVAAIAASIRTGQDTECTVAVKNGG

SEQ ID NO: 270369 - protein, 35 aa, Zea mays
  Clone ID: MRT4577_178173C.1.pep
AMKAEFNITLIHPKDLTVLSNMLPKGPSTPLPEDP

SEQ ID NO: 270370 - protein, 179 aa, Zea mays
  Clone ID: MRT4577_178174C.1.pep
MELAARTSSHRASHRRPSSATLGAPPQPCRPRTPMTRDPCTTMDLPPDHRSWMLDITLPHLFGGWHVVDRRRAFFGSRSEEARAEVGKGEVCGSAYDIAMGKQWMDRSSRFMSSALNLGMKRLGKWQQDYNDVAYLGESPSEASDFIELAQLPGGENTCRKIFLDEQAKMPRKHFRCEG

SEQ ID NO: 270371 - protein, 67 aa, Zea mays
  Clone ID: MRT4577_178175C.1.pep
YGSSNTCNLAACLFLEFNSFCWSNTTFTFSPKSDCISNYLLGQSLTAKQNMTGREMVSMSFICRYLM

SEQ ID NO: 270372 - protein, 341 aa, Zea mays
  Clone ID: MRT4577_178176C.1.pep
MAPLLSPPLLADSVTKFHAASTPVSCSGSPQRYVITGLAGAGRGEHDWRRRTWGRTNLRVKAVAAESRSSEGGIAEDYYAVLGVMPDATPKQIKKAYYNCMKSCHPDLSGNDPDVTNFCMFINEVYTVLTDPIQRAVYDEIHGYAATATNPFLDGSAPRDHVFVDEFSCIGCKNCANVCSKVFEIEEDFGRARVYDQSGSTELIQEAIDSCPVDCIHWTSAAQLSLLEDEMRRVERVNVGLMLAGMGGSIDVFRMASSRWEKRQAKVLEKVRRRMSQDDSRKGGSWSDIWGAPTRYEKNEEEVKERAKRAAAAARRWREYSRKGADKPPTFKLPEAVPSKE

SEQ ID NO: 270373 - protein, 181 aa, Zea mays
  Clone ID: MRT4577_178177C.1.pep
MAPLLSPPLLADTVTITGLAGAGRRDRGWRRRAWGRTSSRVKAVAAESRSSAGGIAEDYYAVLGVIRVPRPKQIKKAYYNCMKSCHPDLSGNDPDVTNFCMFINEVYTVLTDPIQRAVYDEIHGYAATATNPFLDDSAPRDHVFVDEFSCIGCKNCANVCSKVFQIEEDFGRARVYDQSGS

SEQ ID NO: 270374 - protein, 98 aa, Zea mays
  Clone ID: MRT4577_178178C.1.pep
YSKPDPAERRAPRQTEYGGKTLQCIFTTSTAGLDLSEPESGRHRLPPDSWDPVCNIQDSYALGQPCKAVQAGVSLTDDQFQIYSIGVTFMPSTKKEMA

SEQ ID NO: 270375 - protein, 94 aa, Zea mays
  Clone ID: MRT4577_178179C.1.pep
TRALLRFWRGVSEWVSSTPAPAGGGVMADWEGIPPRKRRQMEEILQLDIKELNVEVVDDNQEDEEEEAEDYTEEDHERHALLREFIEDGGDSTS

SEQ ID NO: 270376 - protein, 51 aa, Zea mays
  Clone ID: MRT4577_17817C.1.pep
SARGARARFFPFRPLGSRRAFFRGCLPTTEGIRERLSRLTAAYDPDLPGGP

SEQ ID NO: 270377 - protein, 58 aa, Zea mays
  Clone ID: MRT4577_178180C.1.pep
EPTSRRPPSGLGVCSIFHFSVHSLIMGGGKQSGGRPKLHWTRLRMPQPRGARPLKSRT

SEQ ID NO: 270378 - protein, 46 aa, Zea mays
  Clone ID: MRT4577_178181C.1.pep
MITRPAPYAATARGLWLVCIPLIAAVLVWTPQKLQNLRQWHLRQLQ

SEQ ID NO: 270379 - protein, 54 aa, Zea mays
  Clone ID: MRT4577_178182C.1.pep
RCFLLQASLNRVRNTDLSIMLHRSSKSGNQFHIPWFRMHIRTKECEIGSDMHSE

SEQ ID NO: 270380 - protein, 87 aa, Zea mays
  unsure (1)..(87): unsure at all Xaa locations
  Clone ID: MRT4577_178183C.1.pep
LLASPALRLRLWPWVPGRRWSPLVPLGCLRAPASPAVVSVAVFSSLPRLLVVGDALGVSRRGAVVLFSFPPPRPRGRSRXXLKTGKG

SEQ ID NO: 270381 - protein, 80 aa, Zea mays
  Clone ID: MRT4577_178184C.1.pep
PARGSVISFWGKRGPSPPPWGSPRAFWPFQWKFRRFPPNLFWWNLGWRAPPPPRTRRLGGRNPRFNWGTWYPPGPLVKKV

SEQ ID NO: 270382 - protein, 73 aa, Zea mays
  Clone ID: MRT4577_178185C.1.pep
QRRVRGLGWDNVLSLGSISNRWEEITGQPDSSSWLDRLRNYAVQNKWTTPSRICKKKKKKKKLSPLRFQTRKE

SEQ ID NO: 270383 - protein, 163 aa, Zea mays
  Clone ID: MRT4577_178186C.1.pep
DNSGTWGHGGMFDALTSLSTCIPDAYHRASEFDDLHMGDLHLIQLDEGNCTRSLDAPLWVALAIVQSYNPRRKVPRSEISMSDLELCISKAAFSAAQHSAAIHMPRIGYQGGSQRSEWYTIERLLRKHSSLHGIDIFVYYFQRRQADCQIVTQVGHAYDLTPA

SEQ ID NO: 270384 - protein, 62 aa, Zea mays
  Clone ID: MRT4577_178187C.1.pep
CNSLPIPECAVPELARRVPVPVVTIATDYSPCRGQDRWSSCTPRLVPFSDLRVTLKLTQPRL

SEQ ID NO: 270385 - protein, 48 aa, Zea mays
  Clone ID: MRT4577_178189C.1.pep
AELRHSGDFRGAGEHFPLTMGQGKTHINIGGIGHVDSGKSTTTGHLIY

SEQ ID NO: 270386 - protein, 94 aa, Zea mays
  unsure (1)..(94): unsure at all Xaa locations
  Clone ID: MRT4577_17818C.1.pep
NKQSKRGAPPMHVLLVGEPQGLLKARWTKRQQYVVEVRRVARIAANRGYKGSNCCCVKKDSTGLLQQAWLKEEECWPXANKHQGFSAVQQDYTQ

SEQ ID NO: 270387 - protein, 171 aa, Zea mays
  Clone ID: MRT4577_178191C.1.pep
CADYVCRVPGRPRTMAFLMFLPPRRESFLPFLPPFFWTPPSCFLFFRWAAFVQAVGFFSPLCPPFVKGVFVVTPGPPLFFEAVFDPTPGGWYFWEARVCHTLPGRFFCPPGVWNRPLPALFAGGLLACRSFLALFVGGVAARLSSNVLLFGCVPSAPLNIVLFWEFFLFFN

SEQ ID NO: 270388 - protein, 167 aa, Zea mays
  unsure (1)..(167): unsure at all Xaa locations
  Clone ID: MRT4577_178192C.1.pep
MTGSQXXGGGLRGRIPFDAIRSFPTTPEALMKEIDAAIGSTEDARALRPPRPLPSVSLGAARDRGRGPRGPGSLPSASGLLRREGRGTSVPRAERDAGGGTARRRRADPAGAAGKLSAGQGRGCGQGEDHDGHRVRVAAQAAATGPAAAEQELKPSYFDIDAALERC

SEQ ID NO: 270389 - protein, 37 aa, Zea mays
  Clone ID: MRT4577_178193C.1.pep
GDKLRRRGAWENWLLPKLNYSAGSSSGSMTPVTSNID

SEQ ID NO: 270390 - protein, 129 aa, Zea mays
  Clone ID: MRT4577_178194C.1.pep
MTEKMQKGGKYDYASEFLEFAAEFSSSDNGEDGATLLMYKHYAATAISKGIHCLSLRLTDEYSSNAHARMSSVFCVLATLIFFATLSREIHGMFSFSDPLMVALFLMFPRLLRKLQEQKLSMASENLMV

SEQ ID NO: 270391 - protein, 72 aa, Zea mays
  Clone ID: MRT4577_178195C.1.pep
LRPEGTSYTAGAGRQIGISTSRDLPNRPSMPNPVKDQKLPSSLRRQLTMRLSAETVGHVCNVFKHIIFVFIP

SEQ ID NO: 270392 - protein, 265 aa, Zea mays
  unsure (1)..(265): unsure at all Xaa locations
  Clone ID: MRT4577_178196C.1.pep
MLGFSTGQLLVVLGACSVMMKPSDMVKIARTAGRMTGRAVGRLIVARRQLDEILGQSAATQVHKELKDAMTQLDSIRYEVQNLSRLSPGQFMLKQHNAGMAEAGKSDSSDGPTTXRRISSGNSQYNSRXFEKYCRTQPIQNSVSTTEHRKLHVADEPTALKSKDMKMANSGLTNLHNQAMTYARLSEAPGLKMDSSLSGNYKDQSKEMDGLLTVLPISAESAGLLPSRPDKPTGSDLVLEAVLEAEVAENAKLFVSQPHDQLPKE

SEQ ID NO: 270393 - protein, 122 aa, Zea mays
  unsure (1)..(122): unsure at all Xaa locations
  Clone ID: MRT4577_178197C.1.pep
MAAGRHGGYRDYEARERELDAEASRRSKEQHHHLGGRHRDVDRHRDGGRSRGGRDFANGYGRRRSPPPRSRLAGRLGDREPGEVLXRSASDDXGGRPHRGRENGVLSSGREGDWMAVTDDSG

SEQ ID NO: 270394 - protein, 83 aa, Zea mays
  Clone ID: MRT4577_178198C.1.pep
PILRRYSIYNHGPRAAIEVLWYPKPSTISIHTHGYDIIKNRAIYTYKIHIAVLLLHTLPYPKLISYQFLLTIQLSLYGDLSTL

SEQ ID NO: 270395 - protein, 167 aa, Zea mays
  Clone ID: MRT4577_178199C.1.pep
MEETLAVESAAGETAAAQAPELNEETLEEVLSRHRKEKSKLQDKETSLKKAAAKGSKAEQKAKKKQVEEEITRLSSELEANHAAELASFGYKPSGSSEKGNLDNLVKAIAGVSVSSNSDSAKLSKGARRREKKAKEEAAREQRIQEEQSNLVSDRMVENEKLERKLE

SEQ ID NO: 270396 - protein, 170 aa, Zea mays
  unsure (1)..(170): unsure at all Xaa locations
  Clone ID: MRT4577_17819C.1.pep
YFKKKKKKKKKKKKKKKKKKKKKKKKKKKKKKKKTPPFFGPHLQQKKANWGPNRGPKKFGFLKPLGFLGRGGTRTFFPKGQKAPKGFFFPPXLKQGXVLIWENPIFXPLRDQKGIGGGLLPLNPLVPQKPGALIKEVPWGHLGAQNIGGPTPPQPGLGNLGGQFKKKEFF

SEQ ID NO: 270397 - protein, 178 aa, Zea mays
  unsure (1)..(178): unsure at all Xaa locations
  Clone ID: MRT4577_1781C.1.pep
MGHASAALPVIDLASPDIGAATKSIRQALVDYGFFYVINHGIDDALMKSVYAESASFFQQPMEEKMALHKNSSHRGYIPPDFEGFEADAGGKGDLLECFHIGSGVDGDSKNPVNQWPPAERFPYWKETMKSYYQCAMGTSKRILSLIVLSLDLDAEFFKXMAPKQFFDPIHYSXRAIE

SEQ ID NO: 270398 - protein, 76 aa, Zea mays
  Clone ID: MRT4577_178200C.1.pep
SLIRPRVRIQFSLASYFDRDLLTRTDREDYSQHWINDMNYSYHCQLYMNATLPSSSSTNPLEKLSTISLSNDTLIL

SEQ ID NO: 270399 - protein, 95 aa, Zea mays
  Clone ID: MRT4577_178201C.1.pep
VRVVRPRLQLGWQMQVRPRQILITSVDRHGYDYYLSSLWWWLNNNKQGRAGCQTKELWGVCERETTKVLQFAIPLCMFGVSLCAHERTCVNLHVG

SEQ ID NO: 270400 - protein, 187 aa, Zea mays
  Clone ID: MRT4577_178202C.1.pep
MACINMYNPDGAAGFGGGPQQPAALGPRISFSSDFAVEPTPVQNRATSLRCQEEDLNFEFSVGSHPMMAADQLFSKGRILPLKDNGGGSVCFAAARPPTTLRDELRGGGDDDDERAAFSAAGTKGSNSNRWKEMLGLRKALCVGVGGGGNGSPAKKASSSDKQGVVAAAAPGPDDHMAASNQQEQLS

SEQ ID NO: 270401 - protein, 81 aa, Zea mays
  Clone ID: MRT4577_178203C.1.pep
MGFFGWDDSQNYHEQVYGQQQHEAKFSHELIAGAASFEAFKAFEDHRRKEGQPVSHAFAKEALVGLVGAEIDKLAETKGMD

SEQ ID NO: 270402 - protein, 61 aa, Zea mays
  Clone ID: MRT4577_178204C.1.pep
SIIVMFRGLISRQSSQQTLSIALVSKVRSARYRVVSRHDRCELRCTPSSSSSPLRQPRATP

SEQ ID NO: 270403 - protein, 110 aa, Zea mays
  Clone ID: MRT4577_178205C.1.pep
CTGMGRLSGGHRRGGQRGRDAERALPVLRRQGDDGSGDRLSRLPSRHAGGHGVGSACCRCGRLDRVARHPLHGYRPHAGRAATSLTLLRKKHPQPIDGESHVEDTSLHPR

SEQ ID NO: 270404 - protein, 97 aa, Zea mays
  Clone ID: MRT4577_178206C.1.pep
FLSGPPPGGPSPLFSLKPPEKSKPPKSFNPKKRLPPSGTHFARASPLEFGSSHFPHNFPGGQALPNQKKVPFISDALEIECQGKEKFKCGPPVFWKW

SEQ ID NO: 270405 - protein, 182 aa, Zea mays
  unsure (1)..(182): unsure at all Xaa locations
  Clone ID: MRT4577_178207C.1.pep
MSVQEYLGKHLLSRKSEEALNTAVRAKAPNPALFIVGHMRREAPTVITRVRARQILDGRSAPAVEVELHTNKAVHRASTASVGALEGAAADAAGASERRKFLARGVAYAVRVINDKVSEALVGMDPQQQTQIDQAIMXLDRARHKVPLYKHIADLVGKSATTLRVPAITVINGGRAHEDTRI

SEQ ID NO: 270406 - protein, 201 aa, Zea mays
  unsure (1)..(201): unsure at all Xaa locations
  Clone ID: MRT4577_178208C.1.pep
MSVQEYLGKHLLSRKSEEALNTAVRAKAPNPALFIVGHMRREAPTVITRVRARQILDGRSAPAVEVELHTNKAVHRASTASVGALEGAAADAAGASERRKFLARGVAYAVRVINDKVSEALVGMDPQQQTQIDQAIMXLDRARHKAEFGANTMLGVSIAACKAGXPLYKHIADLVGKSATTLRVPAITVINGGRAHEDTRI

SEQ ID NO: 270407 - protein, 67 aa, Zea mays
  Clone ID: MRT4577_178209C.1.pep
ELGAALDEVGHVDHGQITLEAAEALLVEILVRVLPCTECYLHRERHGARGGSPRNWYWRSEILREEG

SEQ ID NO: 270408 - protein, 92 aa, Zea mays
  Clone ID: MRT4577_17820C.1.pep
QTGKHVVFPLVYKLIELALLLPVTTASVERTFSAMNIIKRELRNKIEDDWLNDLMVCYTEKEIFKSVDDELIIRRFQRLKTRRMQLPRSTRT

SEQ ID NO: 270409 - protein, 43 aa, Zea mays
  Clone ID: MRT4577_178210C.1.pep
AKTTHVLFTWISTLLRPHSNQRGDHDVSIAAYHTPPCNTATAP

SEQ ID NO: 270410 - protein, 100 aa, Zea mays
  Clone ID: MRT4577_178211C.1.pep
RPGLSPPAASGLLPCPFFLDGQGPYGQAPPGGRPVGPPQGEAGVPGPRPQGFSPAPPCPGAGVFKKKPPLSGPGARPPLTPSGAGAFGPLRRWLFLRTLP

SEQ ID NO: 270411 - protein, 79 aa, Zea mays
  Clone ID: MRT4577_178212C.1.pep
IGETNSTCINRYMTPSIVYTKTGTTHGIENMSFPNCLFNPVKFLSQAHSNSTDKTYCPPPMITAPNNISGEFFPKKRQL

SEQ ID NO: 270412 - protein, 142 aa, Zea mays
  unsure (1)..(142): unsure at all Xaa locations
  Clone ID: MRT4577_178213C.1.pep
VPPQGNAVCPIPGPTKIANFYQNVGALFVKLTPDEMVELELXTPRFIKXGDRYGDQLANPWKDSETPPLFSWKFWVASLWYFQLGPLFVEGSPSFRDAKIFLVPFAKASKNIMLWVMMFGPDPKGGFVLPPPFWFCLDMLKC

SEQ ID NO: 270413 - protein, 41 aa, Zea mays
  Clone ID: MRT4577_178215C.1.pep
FFCFKKKKKKKKKKKKKKKKKKKKKKKKKKKKKKKKKKKNH

SEQ ID NO: 270414 - protein, 40 aa, Zea mays
  Clone ID: MRT4577_178216C.1.pep
PMDRASQWRQSFSRVRGCECVALLAGNERPPRRARSGVVA

SEQ ID NO: 270415 - protein, 94 aa, Zea mays
  Clone ID: MRT4577_178217C.1.pep
GVFFFFLTGQSISWSRRQTDERSQLISLKLDSDNPPAGEPHWARPGQPRARDRSHDGATSGQPRMQYPCGLAGRAIRTQAPRHQQRKRKLVVVG

SEQ ID NO: 270416 - protein, 57 aa, Zea mays
  Clone ID: MRT4577_178218C.1.pep
RLGVTILSRSFIHAHSISITSRGSKLHSCVWVVAVDVLVCDRPALYLRMGIDHIGRA

SEQ ID NO: 270417 - protein, 84 aa, Zea mays
  Clone ID: MRT4577_178219C.1.pep
SLLKPLNERFDERTGRLTQRDINHGETNGLPEVHTGVHTLMEGLNQRKRPTKLTMDQTLQQVVQAKVSETKNSTKERTLKVNVT

SEQ ID NO: 270418 - protein, 83 aa, Zea mays
  Clone ID: MRT4577_17821C.1.pep
RLMEKSFGLENYQLTNTLSVKLVWYSRRSSGSMGSRNGNVVRCMLLKLGFNTTGTRLFPRFRNGTNVSRTRNVTKFPVPVTKV

SEQ ID NO: 270419 - protein, 89 aa, Zea mays
  Clone ID: MRT4577_178220C.1.pep
GTVQSLGITLRTRVSSCSVVRQGAGHRVIWCSYHVSYTRGCVHANAKVNGHTTGHSRPTVALVAPVLAPPHASGNPGLPARVTSRSPIT

SEQ ID NO: 270420 - protein, 235 aa, Zea mays
  unsure (1)..(235): unsure at all Xaa locations
  Clone ID: MRT4577_178221C.1.pep
MAPKVLAVLTSQSKMNNGRPTGWYLPELAHPYYDLVNNGVEITVASPAGGEVPLDQASVEMFKGDEESVKFLNEKKQLWQQTTPLKDFLGKASDFDAIFYPGGHGPMFDLVNDETSIKLIEEFYKAGKPVAAXCHGPIVFVNVKVDGKPLLEGREATGFSNSEEEAVKLTSAMPVLLEDEIKRVGGKYVKADDWAEKLAVDGQVITGQNPASAHAVGKAILXAIGAIDHDTTLMR

SEQ ID NO: 270421 - protein, 96 aa, Zea mays
  unsure (1)..(96): unsure at all Xaa locations
  Clone ID: MRT4577_178222C.1.pep
RKGTXCMAFFAVKPLLVGESLGSLIPRGLHGHITFAMQSRTRSSTHLDMLNMHVAASDKLTKHARKHVTVAALTITPPKAQASRTCDTMFMNTHDT

SEQ ID NO: 270422 - protein, 48 aa, Zea mays
  unsure (1)..(48): unsure at all Xaa locations
  Clone ID: MRT4577_178223C.1.pep
XAKHRGQSPPNPGWKNYRAPYMQGPMTCMRALRHNTYIRTRAQLTCLA

SEQ ID NO: 270423 - protein, 76 aa, Zea mays
  Clone ID: MRT4577_178224C.1.pep
TYSTEALKVASIPHFGTRAMTLGQCFFGSSFLPQARPPLCHACSILLQPHCNKQPIQSKYCHDVIRLILESCVDLR

SEQ ID NO: 270424 - protein, 38 aa, Zea mays
  Clone ID: MRT4577_178225C.1.pep
KMVPVPIVGTLKAHTRKKCKTRKVEEEQNTLANGAETP

SEQ ID NO: 270425 - protein, 59 aa, Zea mays
  Clone ID: MRT4577_178227C.1.pep
ISPRVKKKKFFFFKQGEFHGKTKIFSNSGPQKHFLTTKWKNTHRFLKGFLYTPHSKIGG

SEQ ID NO: 270426 - protein, 66 aa, Zea mays
  Clone ID: MRT4577_178228C.1.pep
SHRLPSAAPPPAPYLLRVVGAELLASPSSVVAVITSSSREVFDMCFGCVPEYRCKKQIQDIHFDEV

SEQ ID NO: 270427 - protein, 46 aa, Zea mays
  Clone ID: MRT4577_178229C.1.pep
SVVFKPVYAKCIYAPLSQNFFFFSESIRVYLLASLGFRCKFYCITP

SEQ ID NO: 270428 - protein, 150 aa, Zea mays
  Clone ID: MRT4577_17822C.1.pep
MAPPPLFPLPPLLILLVIGPLFPTVARTVTTLPLYRHLPHVSEGVASHHHPLSRLDVASVDRALHLKRRDPNHHSQKGSSGHPSVPAHRRAVPALLRGVRLHGDDRHADASAPHAGQQRQSPHVGAMHLDATTATTGPPHPSPPSRTCNT

SEQ ID NO: 270429 - protein, 211 aa, Zea mays
  Clone ID: MRT4577_178230C.1.pep
GRVGGRVGFSLGCLIFYCITKGKHPFGEYYERDVNIANNRFDLFMVDYIPEAVHLISHLLQPNPEARPTAVYVMHHPLFWSPELRLSFLRDTSDRIEKTSETDLINTLESIGSLAFGGKWGEKLDAALVTDMGRYRKYNFESIRDLLRYIRNKSGHYRELSDDLKGILGSLPEGFDRYFASRFPKLLIEVYKVLWVHCKDEEAFSKYFKGS

SEQ ID NO: 270430 - protein, 925 aa, Zea mays
  unsure (1)..(925): unsure at all Xaa locations
  Clone ID: MRT4577_178231C.1.pep
MRSLRGVLIPLVLLAGLAFRVDDGGAALLPLPPPALPASPSRLALPGGAPEDDGAAASRSTEIVTAGVRSTEIVAPVGPKKQSLRELLVRPQPARHEPSSLVSGEAKAETRSVLQFYDNGTIQLVDKLSQSPLWEIATGPPLSDHITTTESGPNYLIYPFNGNENMNGNSTELWEVYNGNSVRLPWKLEEFVARSPYIRDSVVTIGSKVSTVFVVDADSGEIIYRHSIPSALKELEGPXVEEXPSKLXVRTSDTVIXYIVLVRXDYSLSASDLGNHLFNWTRTSFTANYYVKYKHPDMLDQSSCLQGDIPCIRTEGLPLALPDLNSANVIVLKDGTPFVSMHGSDALXPIQTPRKLPNTAGKSNILLDDSQNQTHDVARSHAISADPEATLNPTRNTSGWLFPLFPIFLVTGYLLSLISASKSCRQFMIQLIEPFTHNKKSVDIRGRSEGTPKKRKTRKKDGLVNSSETLTASDKECSDTGGSTEAPMKNSALTDALGGRQIGKVYVSNKEIGRGSNGTIVFEGSYDGRQVAVKRLLRSHNDIAEKETRNLIISDHDPNIVRLYGCDHDSDFVYISLERCHCSLADLIQKQSYLSSGESISNNEVSMSINSKISNVKGIDVELWTQDGLPSAQLLKLMRDVVAGLVHLHNLGIIHRDLKPQNVLISAEGPIRAKLSDMGISKHLQDDMTSVSHHGTGIGSSGWQAPEQLRHGRQTRAMDLFSLGCLIFYCITKGKHPFGEYYERDTNIVNNRFDLFVVDYIPEAVHLISQLLQPNPETRPTAVYVMHHPLFWSPELRLSFLRDTSDRIEKTSETDLINALESIGPVAFGGKWGEKLDAALVTDMGRYRKYNFESTRDLLRYIRNKSGHYRELSNDLKGILGSLPEGFDHYFASRFPKLLIEVYKVLWVHCKDEEAFSKHFNGSSL

SEQ ID NO: 270431 - protein, 52 aa, Zea mays
  Clone ID: MRT4577_178232C.1.pep
PTHIYPKMGENNISSIMGNAPFKTPLTKKPNSSAWRYYKYSKNQGSNPNKNS

SEQ ID NO: 270432 - protein, 59 aa, Zea mays
  Clone ID: MRT4577_178233C.1.pep
GQPRALQTGAFRSIYRAPYSQHLSWVHTRIPPTAQRNSPHSINWSIIRTSMGTREMSKR

SEQ ID NO: 270433 - protein, 144 aa, Zea mays
  unsure (1)..(144): unsure at all Xaa locations
  Clone ID: MRT4577_178234C.1.pep
MAMAYKMATEGMNVKEECQRWFMEMKWKKVHRFVVYKIDERSRAVLVDKVGGPGEGYEELVAALPGDDCRYAVFDFDFVTVDNCQKSKIFFIAWSPAASRIRAKILYATSKQGLRRLLDGVHYEVQATDPSEMGFXDVIRGRAQ

SEQ ID NO: 270434 - protein, 122 aa, Zea mays
  unsure (1)..(122): unsure at all Xaa locations
  Clone ID: MRT4577_178235C.1.pep
MGMKGKKECTGLVXMEVKWEQVPGLGVYKIDERSRAVLVGKVGAPXDWRHAVLGLDFVTVDNCQKSKIFFIAWSPAASRIRAKILYATSKQGLRRLLDGVHYEVQATDPSEMGFDVIRGRAQ

SEQ ID NO: 270435 - protein, 617 aa, Zea mays
  Clone ID: MRT4577_178236C.1.pep
MSGAALCAALTELGFDGEDPLDADALEWPFQYEEARPLLAWICSCLRPSNVLSPSHLAQYEQLVEEGRLLEGEDLDSAFDSISAFSSKKDNQEAVFGSEETILDIREAKLAYRAEVFELQKQLVRQQAQFDLLAGQASTLIQGRRSRVSAMSAVSGELISLDEILSSRNLEMNSVLGRITATTQELAHYHSGDEESIYLAYSDFHSYVVGDLACTKELNRWFSKQFEKGPFRLVAEEGKSKCSWVSLDDITNCLIRGDSEKSHHHQRVAELQRLRSIFATSERQWIEAQVENAKQQAILSILKAQVSSDEAHIHRDIHSLRRKGSELAGELSTLSQKVQALVSETIPCLCSELAQLQGTYILQGDYDLKVMRQEYYINRQKTFINHLVNQLARHQFLKIACQLERKNIASAYSLLRVIESELQSYLSAVNTRLGHYNSLIQAASEVREQGAIDDRDTFLHAVRDLLCIHSNVQATVPTYMSAHALVQQISALQSDLLSLQSELENTLPADRKRCINELCTLIQTVEQLLFASSTTAEPILTPWPLMRALDDMENANAQVEVSVEEVTKARTQKIKIFENRAHEVGRERQIFVDFFCNPERLKNQVRELTSRVKALQD

SEQ ID NO: 270436 - protein, 143 aa, Zea mays
  Clone ID: MRT4577_178237C.1.pep
MAMAYKMATEGMNVKEECQRWFMEMKWKKVHRFVVYKIDERSRAVLVDKVGGPGEGYEELVAALPGDDCRYAVFDFDFVTVDNCQKSKIFFIAWSPAASRIRAKILYATSKQGLRRLLDGVHYEVQATDPSEMGFDVIRGRAQ

SEQ ID NO: 270437 - protein, 69 aa, Zea mays
  unsure (1)..(69): unsure at all Xaa locations
  Clone ID: MRT4577_178238C.1.pep
MATQISKKKKFVSDGVFYAELNEMLTRELAEDGYWFXXVRXTPMRTEIIIRATRTHNVFGEKGRRNGEI

SEQ ID NO: 270438 - protein, 56 aa, Zea mays
  Clone ID: MRT4577_178239C.1.pep
ALSVFLVKNFSCTVKSVLCIHVHRAFQLGTIITRVMRKTTQVDPKRGLIRRIKRMN

SEQ ID NO: 270439 - protein, 72 aa, Zea mays
  Clone ID: MRT4577_17823C.1.pep
RRNPPSTHAVRKKKKKKKKKKKKKKKKKKKKKKKKKKKKKKKKKKKKKKGGPVLGDPTFHSPPFQKKKLLFS

SEQ ID NO: 270440 - protein, 143 aa, Zea mays; identical to SEQ ID NO: 270436
  Clone ID: MRT4577_178240C.1.pep

SEQ ID NO: 270441 - protein, 115 aa, Zea mays
  Clone ID: MRT4577_178241C.1.pep
MAMAYKMATEGMNVKEECQRWFMEMKWKKVHRFVVYKIDDCRYAVFDFDFVTVDNCQKSKIFFIAWSPAASRIRAKILYATSKQGLRRLLDGVHYEVQATDPSEMGFDVIRGRAQ

SEQ ID NO: 270442 - protein, 143 aa, Zea mays
  Clone ID: MRT4577_178242C.1.pep
MAMAYKMATEGMNVKEECQRWFMEMKWKKVHRFVVYKIDERSRAVLVDKVGGPGEGYNELVAALPGDDCRYAVFDFDFVTVDNCQKSKIFFIAWSPAASRIRAKILYATSKQGLRRLLDGVHYEVQATDPSEMGFDVIRGRAQ

SEQ ID NO: 270443 - protein, 143 aa, Zea mays; identical to SEQ ID NO: 270436
  Clone ID: MRT4577_178243C.1.pep

SEQ ID NO: 270444 - protein, 59 aa, Zea mays
  Clone ID: MRT4577_178244C.1.pep
EQTFKFIDIYKNSFIFFPKSRSPIPKGHFRHRISKCEIPIVLEGKGKNDQSQAEIDRKD

SEQ ID NO: 270445 - protein, 143 aa, Zea mays; identical to SEQ ID NO: 270436
  Clone ID: MRT4577_178245C.1.pep

SEQ ID NO: 270446 - protein, 103 aa, Zea mays
  Clone ID: MRT4577_178246C.1.pep
FAWKAGGWREGGTEGAFVGPLSVLSSIVTHQSSHEVAVGRCSAGGAGPWSHGGRPATQRGHHSRQQGARMNYYQLPPTAVLAVPVALCKCAWRRTVSLNLRKS

SEQ ID NO: 270447 - protein, 143 aa, Zea mays; identical to SEQ ID NO: 270436
  Clone ID: MRT4577_178247C.1.pep

SEQ ID NO: 270448 - protein, 41 aa, Zea mays
  Clone ID: MRT4577_178248C.1.pep
GGTLGGPHYATVTVELERQSHRTVLPASTDHMVTTFTAMFC

SEQ ID NO: 270449 - protein, 50 aa, Zea mays
  Clone ID: MRT4577_178249C.1.pep
PQCYSSGPQDTCPCVSICTALPLRAQSVWFVAKCVTLCLRLVIRIEGLFC

SEQ ID NO: 270450 - protein, 54 aa, Zea mays
  Clone ID: MRT4577_17824C.1.pep
RNNNTAQNMHYSSVMWQKLNQMAKKRKQTGSAVGPDKLNPLLQSSKFFFWGGGD

SEQ ID NO: 270451 - protein, 127 aa, Zea mays
  unsure (1)..(127): unsure at all Xaa locations
  Clone ID: MRT4577_178250C.1.pep
TVRHRQQPTSQNNLRSSGIHTSTSKPTISTSVRSLCKLQHATMGQSGCGEDKVSLPSVHVWLFIRSRTCKNHLQRNFCEQKKIYIVPREQIMQNKTTWKIKKSSHPYFPATNLFIFFGYQINLXFFL

SEQ ID NO: 270452 - protein, 43 aa, Zea mays
  Clone ID: MRT4577_178251C.1.pep
IILPKSLLSNGRVVFNHNIVEPLVLHNLISPFQCYLWAVYSKY

SEQ ID NO: 270453 - protein, 41 aa, Zea mays
  Clone ID: MRT4577_178252C.1.pep
THSYYSLYLVNHIYIYTLTIHSALLDPCELSATTCLFFIIQ

SEQ ID NO: 270454 - protein, 512 aa, Zea mays
  Clone ID: MRT4577_178253C.1.pep
MVVVPFSLRIARNPIRLRLLPVSAARFTRLAMSTTPPAAATISVEYAKSGRSICKGCSGVIASGALRLGASARDPRGFGATKWYHVSCLPSSSYPLGPIGSIKGFDSIKDHDRAELRELEKNHKRDNTAVSPPEEQRPKKARIQMFSPAEGVPDNVTVSVEYAKSGRSTCKGCSENIAKGALRLGASFPDPRGYENTKWYHVVCFPTSSYPLFPMSNLKGFDSIEDHDRDKLHKLVENHKSDGKAADVLNESNLKREMAHSMDDSNEGAEKDLEGIKIHCMGEFEEGAEKNLEEAKLPAGNKMIGPSISFSLSDIKKEYKNATLPAHWKVFDTVIFREKEDGLHASSKIAAFDFDGCLANTSMKRVGADQWSLQHKSIPEKLQRLYDDGYKLVIFTNESNIERWKNKRQQAVDSKVGRLDNFIECVKAPIQVFIACGLGKGKGIPDDPYRKPNPGMWWLMAQHFNSGIKIDMDQSFYVGDAAGRENDHSDADIEFAKAIGLKFHVPEEYFGF

SEQ ID NO: 270455 - protein, 168 aa, Zea mays
  unsure (1)..(168): unsure at all Xaa locations
  Clone ID: MRT4577_178254C.1.pep
HLRVAIIDSNPALKSRSYLDKNSIPDSRVSTVTPATISFFKDIGAWEHVQQQRHAFFGKMQVWDYTGLGYTRYNARDVGKEHLGCVVENKVLCNSLLLRLQXLVSLTFPLKTRQAGMEPLSVGHTTEEFHHSDLVKLDLSDGRSLYSKLVIGADGSKSNVRQIAGIKT

SEQ ID NO: 270456 - protein, 124 aa, Zea mays
  unsure (1)..(124): unsure at all Xaa locations
  Clone ID: MRT4577_178255C.1.pep
AGIALHFIVARPDLPGQLPSASATARTRGRRRLRGLAWPXRLRARSEEHVEYGAQQEVGAETRGHCRPPAPHRSPPPGRPAPRGSPAPAPGGSGSEAAPLCAPHAPCPARAHGPGDPDPGPSRA

SEQ ID NO: 270457 - protein, 133 aa, Zea mays
  unsure (1)..(133): unsure at all Xaa locations
  Clone ID: MRT4577_178256C.1.pep
RGAPPRPHHRPGAGGGGATGGTGAAPAARTSRQRGAAPRAPRAADRPEGXTDGAAPARRAKQRHAGAAPTRRPGPTRGRAAAAPRARATQPGAAPGPHAARTHKSTRQGHGGPQAAGAADGPAEDGPGAPPYH

SEQ ID NO: 270458 - protein, 117 aa, Zea mays
  Clone ID: MRT4577_178257C.1.pep
SLFSQAPGLGSPFSLFRETGGLFGAPNSLKSKISCVFSLSARGATPPRGCLGFPSLDPFALFFPLPFLGYSLLWLIRKPQGPGGRGSWVVFKISQGALLGFFCLLVQGNIIKLPCWV

SEQ ID NO: 270459 - protein, 167 aa, Zea mays
  unsure (1)..(167): unsure at all Xaa locations
  Clone ID: MRT4577_178258C.1.pep
MNLSSILIWNAGGLNNKPRCDYVRDTVLSSKADIVCLQETKVEAFSAYLLLSACGTEFDKCLTLPANGTCGGILIAWKGAVCQAISLXIDIFSVSVQFDGVNWWFTDVYGPQEDENKIQFLQELKDIRALCSGPWVLTGDFNMIYQAADKNNSNMNRALMGRFRSFL

SEQ ID NO: 270460 - protein, 82 aa, Zea mays
  unsure (1)..(82): unsure at all Xaa locations
  Clone ID: MRT4577_178259C.1.pep
WKSVGREPXPEREDMWLRLSLKYVLEEMQGGEGMESGGRVTWLLSAVMAFSRSDSILGLQQIVLRVACRATIFKCSADGSER

SEQ ID NO: 270461 - protein, 81 aa, Zea mays
  Clone ID: MRT4577_17825C.1.pep
QRVCRERPTHTRSVSESAKQGAGPHISGQFSHTHFLCPRTHKKKNGDTKYSNLDILALFRLLSTPPTIALDLDIKFSQFPT

SEQ ID NO: 270462 - protein, 94 aa, Zea mays
  Clone ID: MRT4577_178260C.1.pep
IRECQQLGVLVARNDQGVLLEIFPEPVGDSQTLFVEIILRIACMEKHDKGQESQKGGFGGFGKGIFSQLFKSMEDYDKSLEPKQGAAAPGTQGS

SEQ ID NO: 270463 - protein, 98 aa, Zea mays
  Clone ID: MRT4577_178261C.1.pep
MLSSLRRAASSSCATNCETVTSCPTSVTTMGVPLPPSPALALALALRTAPSARPGLVDDVPALVALASMALRDPLVQPISSSSFSCSRSQAAMTAVVR

SEQ ID NO: 270464 - protein, 82 aa, Zea mays
  Clone ID: MRT4577_178262C.1.pep
AIDVGRRVQHVDILRSDGHMDIAASAVQPDMLYARENTGMTYSTGHFPHGINDIYSLVQSTMTAKPNGSSVKHSNISSISMR

SEQ ID NO: 270465 - protein, 48 aa, Zea mays
  Clone ID: MRT4577_178263C.1.pep
GVVDPKKFSVLGNWQREYTMEYILTHLKKEMASPQNRKLVQPPEGTFF

SEQ ID NO: 270466 - protein, 118 aa, Zea mays
  Clone ID: MRT4577_178264C.1.pep
PRFPGPGTGVFLPPGSGPPFPPQKKPGFYGQGGPNFSQGLSPSPQSKGNGKETFNGHLFPKNSPKKTFFPPRGKPQTNGGFNGGGGSPEEKSPVGMDPPNGVPKNFGSNKVPPHGHAP

SEQ ID NO: 270467 - protein, 72 aa, Zea mays
  Clone ID: MRT4577_178265C.1.pep
NFTLSCTIPSPISLETVHFGKGSNELRVSKCNTVSKETRGSYLIKIALWRGGKIIRQKIKNPGKKKCLLCNL

SEQ ID NO: 270468 - protein, 61 aa, Zea mays
  Clone ID: MRT4577_178266C.1.pep
TCPPPLPVSYPCPPEPLVSYPHLVSCCIMSRHELAGWWVLCYVVLCIACVCVLSLSRLLAL

SEQ ID NO: 270469 - protein, 110 aa, Zea mays
  unsure (1)..(110): unsure at all Xaa locations
  Clone ID: MRT4577_178267C.1.pep
RPHGSHLPYHPGQVEALSVFLALPFTFYIFFAPLLWSKVFQYIVMLLYTPLLLCILFLYIXCAAANPANPGLFKSKNYLSLYRSGKHKHLKESKKTSSNARLQMEGTSEK

SEQ ID NO: 270470 - protein, 443 aa, Zea mays
  unsure (1)..(443): unsure at all Xaa locations
  Clone ID: MRT4577_178268C.1.pep
MAAANKSIDRLAARRVVPAEPTPTGPLRLSWLDRYPTQMALIESLHVFKAAPDRPATKTGGTDAAASPARTIERALARALVRYYPLAGRLVLSESGAQQAVDCSNAGVWFTEAEAACTLEDVDYLEAPLMVPKDELLPPAPAGXHEDERELILLVQVTVFECXGFVVGFRFSHAVADGLGAAKFMGAVGELARGADRISVAPTWARDAIPDPAGVLVGSLPEPTGAKRLEYLAVDISADYIDHFKSQFAAATGGGRCSAFEVLIAKAWRSRTRAAGFDDPDSAVHLCFAVNARPMLHASLPRGGAGFYGNCYYIMRVSAPAGKVAGASVAEVVRMIKDGKRRMPAEFARWAAGELGAGGVDPYQITSDYRTLLVSDWTRLGFAEVDYGWGPPAHVVPLTNLDYIATCILVKPWAHKPGARLITQCVTPDRVAAFHEAMLDTSC

SEQ ID NO: 270471 - protein, 433 aa, Zea mays
  Clone ID: MRT4577_178269C.1.pep
MAAANKSIDRLAARRVVPAEPTPTGPLRLSWLDRYPTQMALIESLHVFKAAPDRPAAASPARTIERALARALVRYYPLAGRLVLSESGAQQAVDCSNAGVWFTEAQAACTLEDVDYLEAPLMVPKDDLLPPTPAAEDERALVLLVQVTAFACGGFVVGFRFSHAVADGPGAAQFMTAVGELARSGAVSVEPQWGRDAIPDPAAALVGRLPTPDAGTRRLAYLAMDISADYIGHYKAEYSAAHAGAGWCSAFEVLIAKAWRSRTRAAGFEPDTLVHVCFAVNARPALHGSLPRGGAGFYGNCYYIMRVSAPAGKVAGSSVAEVVRIVKDGKRRMPAEFARWATGEAGAAGVDPYQITADYRTLLVSDWTRLGFAEVDYGWGPPAHVVPLTNLDYIATCILVKPWAHKPGARLITQCVTPDRVAAFHDGMLDTSC

SEQ ID NO: 270472 - protein, 83 aa, Zea mays
  unsure (1)..(83): unsure at all Xaa locations
  Clone ID: MRT4577_17826C.1.pep
SLXDQLIKQHITXXGHPAKIINLSSHLTKPVHTHNNLSPLYTPVLTHIESKHMKNTQETYSTIHLHITTCCETQTSNMTPWAP

SEQ ID NO: 270473 - protein, 72 aa, Zea mays
  Clone ID: MRT4577_178270C.1.pep
RGHKKNGVSPEGAPPGLPHKRPDGWMEGELGTWATHGGGVPLVVRSSVKEARFGGTWKKGLFVQGPEIGPKD

SEQ ID NO: 270474 - protein, 443 aa, Zea mays
  unsure (1)..(443): unsure at all Xaa locations
  Clone ID: MRT4577_178271C.1.pep
MAAAPKSIERLPARRVVPAEPTPAGPLRRSRLDRDPTQMAPDELRLHRHAHPGQPLGARASAAGPLAPADARPLLPLRRRHGGLDLADRRAQPVAXATAVVWLSASXAYAAVIAVTVVDRXXLVLPMEPLREPTPAAEDERALVLLVQVTAFGCGGFVVGFRFSHAVADGPGAAQFMTAVGELARASAGGAGAGAVSVEPQWGRDAIPDPAAALVGRLPTPDAGTRRLAYLAMDISADYIGHYKAEYSAAHAAGAGWCSAFEVLIAKAWRSRTRAAGFEPDTLVHVCFAVNARPALHGSLPRGGAGFYGNCYYIMRVSAPAGKVAGSSVAEVVRIVKDGKRRMPAEFARWATGEAGAAGVDPYQITADYRTLLVSDWTRLGFAEVDYGWGPPAHVVPLTNLDYIATCILVKPWAHKPGARLITQCVTPDRVAAFHDGMLDTSC

SEQ ID NO: 270475 - protein, 179 aa, Zea mays
  Clone ID: MRT4577_178272C.1.pep
MSGSSNSSLETRTFLDEVRGLEKNWMVDLGHPLLNRVAESFVKAAGIGAVQAVARESYFMAMEGEGGGTGAVSDSTGARKRSFPDLNGGNSSKSAEAMVKSVSKESLQWGLAAGLHSGLTYGLTEARGTHDWKNSVVAGALTGAAVALTSDRASHERVVQCAIAGAALSTAANVLSGIL

SEQ ID NO: 270476 - protein, 72 aa, Zea mays
  Clone ID: MRT4577_178273C.1.pep
SRSRTWTRLGFAEVDYGWGPPAHVVPLTNLDYIATCILVKPWAHKPGARLITQCVTPDRVAAFHEAMLDTSC

SEQ ID NO: 270477 - protein, 82 aa, Zea mays
  Clone ID: MRT4577_178274C.1.pep
MIRFILLQNRQGKTRLAKYYVPLEDSEKHKVEYEVHRLVVNRDPKFTNFVEVIVFLIPSKFFISYFATSESECERGYEDLSM

SEQ ID NO: 270478 - protein, 813 aa, Zea mays
  unsure (1)..(813): unsure at all Xaa locations
  Clone ID: MRT4577_178275C.1.pep
PASAQRPPSVRVNAGAAPGGRGRGGGRGFMNFGERKDPPHKGEKEVPEGAPDCLSGLTFVISGTLDSLEREEATDLIKRYGGRVTGSISKKTSYLLADEDIGGVKSNKAKDLGVPFLTEDGLFDLIRKSKPAKAPVDKRQNNNSSEKLQKSQTKSSPAKVEKRAEASAVGKSIASNSNXQVPPXKQKPKIVDRGSMQWTEKYRPKVPNDIVGNQSMVKQLHDWLKSWDALFLHSGQKGKGKKQTDSAAKKAVLLSGPPGIGKTTTAKVVSQMLGLQAIEVNASDSRGKADSKIEKGVGGSTSNSIKELINNATLNYSDNRLKHPKAVLVMDEVDGMSAGDRGGVADLIASIKISKIPIICICNDRYSQKLKSLVNYCLMLNFRKPTKQQMGKRLMEIAKKEGIQAQENAMEELAERVHGDIRMALNHLQYMSLSQSVVKYDDIKERLNSSSKDEDISPFTAVDKLFGFNGGRLRMDERMDFGMSDPDLVPLIIQENYINYRPNTIGKDESGVKRMNALARAAESIADGDLVNVQIRRYRQWQLSQAACFASSIVPAALMHGNREILEAGERNFNRFGGWLGKYSTTNKNRRLLEDVHSHILASQQANLDRDALRLDYLTLILRELTDPLKKMSKDEAVQKVVEFMDTYSLSQEDFDTIVEVSKFKGHPSPMDGIQPAVKSALTKAYKQGSSSRVVRAADLINIPGMKKPLKKRVAAILEPVEESLPEENGLASAEDDEDGSSDADNNDELVPADSTPKLDLQSDKKKGIQVQLDLKSNGDGPRGKKAPAARSRATGSGGKAAAGGGSAGKRKR

SEQ ID NO: 270479 - protein, 76 aa, Zea mays
  Clone ID: MRT4577_178276C.1.pep
ERTARGGIGSATAMGMGMETADTARAFYTDVKRIIIKVGTDAVTGMNGRSAMGRLVSLCEQVRQLNVYGYEEILLT

SEQ ID NO: 270480 - protein, 183 aa, Zea mays
  unsure (1)..(183): unsure at all Xaa locations
  Clone ID: MRT4577_178277C.1.pep
MAAKIFDSLXLLGLCGXAGTDTIGPQXSQAPIASLFSPYLXPTVSGACENPIXKPCRIQQEVAGVIPTFMXLVLQQCMMPITGXPLVHVLGQNIXAEDLQQLVLSKLAAYSENQKLIPFNQLAALNYAFYLQQQQLPFSQISAAYPQPFVSFNQLTALXNSSAYLQRSQLLPFSQLAGVSPDT

SEQ ID NO: 270481 - protein, 72 aa, Zea mays
  Clone ID: MRT4577_178278C.1.pep
QNKYCPAVNTVTKFGIGSRHWRSPPLIYNHLQLDEDDVNTGVSGSVTGRGAYRPLEHGRHDGVAHGLHLLEL

SEQ ID NO: 270482 - protein, 44 aa, Zea mays
  Clone ID: MRT4577_178279C.1.pep
GCMLMINSGLYVHVRRLINYLFILVREKGCLTLETSNYIWSDTY

SEQ ID NO: 270483 - protein, 84 aa, Zea mays
  Clone ID: MRT4577_17827C.1.pep
NAEMQEVGVGLYPSISLLNHSCDPNCSIVFNGPHLLLRAVRDIEVGEELTICYLDMLMTSEERRKQLRDQYCFECDCFRCQTQD

SEQ ID NO: 270484 - protein, 53 aa, Zea mays
  Clone ID: MRT4577_178280C.1.pep
APWSSRTPRRPEVSPRQNACRRIRRRWHVPGRIPGPARRRRSRPPCWMIPMCG

SEQ ID NO: 270485 - protein, 75 aa, Zea mays
  Clone ID: MRT4577_178281C.1.pep
ARNSARAEPNHSIYVTGMPVKMGQRDDIDVLEPPDALKAMDAEAMDAIHIVAHEENAHTPNSQLGALSLTERIIC

SEQ ID NO: 270486 - protein, 67 aa, Zea mays
  Clone ID: MRT4577_178282C.1.pep
SARDHVRLFYHLANLGVGRMTKWHRMRCSGQINDTTEPTAMDNHPRRLLQRPIGPPDLHEVLPIREP

SEQ ID NO: 270487 - protein, 152 aa, Zea mays
  unsure (1)..(152): unsure at all Xaa locations
  Clone ID: MRT4577_178283C.1.pep
GPVGQVETGVIKPGMVVTFGPTGLTTEVKSVEMHHEALQEALPGDNVGFRGXSAAXXXLKXGXXAPNTKDDPAKEAPSXTXQXXNXNHPGQXGNEKAPXXDXHTXHXXXKXXEXXTKNDRRXGKEXEKEPKXXKNXXXXXXKKKPTKPXXXE

SEQ ID NO: 270488 - protein, 51 aa, Zea mays
  Clone ID: MRT4577_178284C.1.pep
GANFVVSVQLREVVVVISYGLCDASYSLILYLVVVGHFVSLNARGYPSIEL

SEQ ID NO: 270489 - protein, 68 aa, Zea mays
  Clone ID: MRT4577_178285C.1.pep
LAHKVLFISDNTLLDNPWTAGMVHFNAAVETAWQAKFAKAMVKMGKVQVLPGDEGEIREKCFAVNPHY

SEQ ID NO: 270490 - protein, 51 aa, Zea mays
  Clone ID: MRT4577_178286C.1.pep
WCLRLFRVGVRLADPPLDLNNLRIFVWVVPDFITLHICQALLLCKEAFFFI

SEQ ID NO: 270491 - protein, 63 aa, Zea mays
  Clone ID: MRT4577_178287C.1.pep
TVSLIIRILPISAAFISHFIYGLNRHKDLLIHYNMYYIENSVAMPREQLTFSLPLCGKRCVDL

SEQ ID NO: 270492 - protein, 69 aa, Zea mays
  Clone ID: MRT4577_178288C.1.pep
LKPGGGGGGPCKRVRKWAPPAFTGKKTPPDKKPYKGGGGPKNTFLLRGKGGFPYSQVKHYLLGEGEPQP

SEQ ID NO: 270493 - protein, 144 aa, Zea mays
  unsure (1)..(144): unsure at all Xaa locations
  Clone ID: MRT4577_178289C.1.pep
VHARRDACSNATLAPSLSCRRLALLIDIVKRRPKPDMATKLSNATASDXRSHFKNESDTALWLYQPSATKAHGRLHDSISDHAAIPFRTYWGGVGRTAQAKARHCNGHGPRPVKXSRXIVDLLKNAESNTDVKGLDVDNLYNSH

SEQ ID NO: 270494 - protein, 58 aa, Zea mays
  Clone ID: MRT4577_17828C.1.pep
RSFKQRGRACFFRILAQLCCEINLRCRGFYLIVSGVAKVRSCIGEVLTNKTDWLPIPL

SEQ ID NO: 270495 - protein, 63 aa, Zea mays
  Clone ID: MRT4577_178290C.1.pep
DQMILLIHGVIQGSDRGLYGCGISSNSGSGHCAVWHSLESAVQGTPLSVFRGRTPSARVEIKA

SEQ ID NO: 270496 - protein, 112 aa, Zea mays
  Clone ID: MRT4577_178291C.1.pep
RPRCLLAGSSIRGGDDAGCGSSSSDDHYQHDVIMLRRTRSGRAFPPPISVIGKGGRPRLCLRAHRGGGRLVLRQMHLPSQELLQTCKEDGRFKLLMHPEVRARTCHDGTPDE

SEQ ID NO: 270497 - protein, 54 aa, Zea mays
  Clone ID: MRT4577_178292C.1.pep
VHLTVNCIWNYIIQHIHIFTCFVHSLYSKLTDHAENHSNDYIFYIIRSKIYYSE

SEQ ID NO: 270498 - protein, 165 aa, Zea mays
  unsure (1)..(165): unsure at all Xaa locations
  Clone ID: MRT4577_178293C.1.pep
TFISFGFQENISIKALKTFSGKIEKTPGWFFNPPEEFTPAFGDFFPNNVKGGGPNISNGRGKNKLMGFFNQKGPFTPWGAXVGYVLKKGGGAIFXKKRFQYFFTCPKKRGPLFFFKGLTNRAVPPNGKKGGGLKNCFFYFKKKVWSHPPKLGFERATGKFAFFFP

SEQ ID NO: 270499 - protein, 127 aa, Zea mays
  Clone ID: MRT4577_178294C.1.pep
PAGFGPPGGGVHQPFVKEKFKGVYRFAGAGATPPPPLGPPGGPGFFVGEPRVEEDFPPCPGGVPEPRESFLPRVNLTARGAGIPPRLGLPGSLFFFFFFPGSLSLARVRTCPPPPPVRISPISSCPE

SEQ ID NO: 270500 - protein, 173 aa, Zea mays
  unsure (1)..(173): unsure at all Xaa locations
  Clone ID: MRT4577_178295C.1.pep
SSSVPLPPPALHGPRPAQPNRRRSAASSSPSSPSRSSSQPARPDSSSSPPDTTAHDEPRPRGLPRGPPPANERAHTLDSGSGDFGVDRRPSRRIKLPEGSHLGALSDRPTGRPDDRRTSGPDGSRVKALXRWWCTTGXRGDGDQLGFEGGAGSAKSPAQDSNGSLYRPAQAGA

SEQ ID NO: 270501 - protein, 56 aa, Zea mays
  Clone ID: MRT4577_178296C.1.pep
GMAWGNLNYITALQHSNMDQSNQNPIFLPYNTKNDQTPRSTLIYLFSSRTLTYVKL

SEQ ID NO: 270502 - protein, 111 aa, Zea mays
  Clone ID: MRT4577_178297C.1.pep
EKLGGVDLCCPSTLVGEKEMFLLFLTPASPGLALQASVLRALRLKALRGQDPPVWGLPGVGTDKAPLTVTKLGRFEKCQNQQVPLVDEMVVQKHPLLGQMGSGPVFAGICF

SEQ ID NO: 270503 - protein, 266 aa, Zea mays
  Clone ID: MRT4577_178298C.1.pep
MAASIGIMDGAYFVGRGEILHWINATLQLSLAKVEEAASGAVQCQLMDMVHPGVVPMHKVNFDAKTEYDMIQNYKVLQDVFNKLRIGKNIEVNKLVKGRPLDNLEFLQWLKRYCDSVNGGIMNENYNPVERRSKGCKERVSKGSNKPSKSLQANRLSGADPTDGGHGVGKVCNTFSEEHYIEQIQKLSEKIADLKVSVDSTEKERDFYFSKLRDIEILCQRPELEHLPMTKAVRKILYAADAKDSPLPEANDIITKSPSLFSNETE

SEQ ID NO: 270504 - protein, 198 aa, Zea mays
  unsure (1)..(198): unsure at all Xaa locations
  Clone ID: MRT4577_178299C.1.pep
MGGFDFSNHNRNVALHAQGIPLPKATSTGTTIVGCLFDGGVVIAADTRATSGPIVADKNCEKLHFIAPQIWCAGAGTAADTEFTTAIISSNLELHALSTGRKPRVVTCMTMLKQHLFRHQGHIGAYLVVAGVDPTGAHLFTVHAHGSTDKLPYXHHGXSGSLARXSVFETQWKAHLTRDEAVTLCXNAIXXGIWDDLG

SEQ ID NO: 270505 - protein, 419 aa, Zea mays
  Clone ID: MRT4577_17829C.1.pep
MPERSKLLERIRERPKFAAKSMDATQNGQTHDEEEDFGTGTIKVNRTKDTAPSLSQGTVRKSAVRDFSDRSEGTGTVRVVSRPPQIASTKDGRSDMPQSPKAPIRTADRENQWRSSGTGSEESLSLRDTQSGRGRVESSTDDNDHSVSGSGTVVLRSPRASQLYSTASNHSAKPPSRFSSYEDMSNSGTVVRTQNEDPETPRSSRSRLGIQEKTSNAPLEDSAINLAEAGAALQAGLRKGNARERPFINRHEKGSHEHRSSGVNSQEVQSEDVDTQKGHKLRQLPDGQSASRASSVASPAVSSLLLPSLKEATGDKFDRPVVHAFLDSLMDLERDIPGSCEVLVGRLLHRLGSSKDSSLQGLQETAMSIFTKEPEPPSEKAGDNKLANMPPLAAPTVSPLARFLLTRWQNQVSQDLNSV

SEQ ID NO: 270506 - protein, 48 aa, Zea mays
  Clone ID: MRT4577_1782C.1.pep
ELIENDRRAKIDKPATSLASYLIQWSCIQNASVKSFFQAPNLISNSGR

SEQ ID NO: 270507 - protein, 51 aa, Zea mays
  Clone ID: MRT4577_178300C.1.pep
TRVSATESSEHKGASSIVETPSQPSVDVRSRSRCLGRRGLTNVLTATTRTR

SEQ ID NO: 270508 - protein, 46 aa, Zea mays
  Clone ID: MRT4577_178301C.1.pep
STYVFFFGITRDLYSIYFETTNEGRSNGRGLGLAGHIENSLPSVYR

SEQ ID NO: 270509 - protein, 249 aa, Zea mays
  unsure (1)..(249): unsure at all Xaa locations
  Clone ID: MRT4577_178302C.1.pep
MAATQSALRRIIGHEIGSTSVSVLPRVVGAPRSFSISAVSRLGNPPPMGPSPFKEPAGRNPAEAFADVSKSLHDYGAYLTSCIPKYIQQFSVYKDELTLYTAPSAIVPTLTFLRDHRQCQYKQLXXISGVDYPTRAKRFEVVYHLLSIEYASRLRVKTYADEISPVPXXVSGVFRSADWFEREVYDMFGVFFQXHPDLRRILTDYGFEGHPLRKDFPLTXXYTEVRYDEEXKKRGVYEPLQLSQAFRNF

SEQ ID NO: 270510 - protein, 54 aa, Zea mays
  Clone ID: MRT4577_178303C.1.pep
LLDPIRRVHTTFPHYDLIDGRRGPEEDDYPQNLRWRGVSGVNRRRGCSRRPSTT

SEQ ID NO: 270511 - protein, 87 aa, Zea mays
  unsure (1)..(87): unsure at all Xaa locations
  Clone ID: MRT4577_178304C.1.pep
IGGSILASLGSYQXQMWFSKTEYKEHGVSYIQRKCPLNRGRNMNNQYYAFRALLLPMGSLCTTAWCLAMLANEYSKLFSSDVCCLRG

SEQ ID NO: 270512 - protein, 122 aa, Zea mays
  unsure (1)..(122): unsure at all Xaa locations
  Clone ID: MRT4577_178305C.1.pep
PPPPQPKTSTAPGGAGGAPTGTRPRRNGAAAKAKPPRAAGXXXAAAGAEAGGGGGGXXPEXSXGDPXTETGNXXXXXPDDXPDPARNXPNGQTXXGRPPGXXXDGRNXHDXXAEAXGXTKGP

SEQ ID NO: 270513 - protein, 74 aa, Zea mays
  Clone ID: MRT4577_178306C.1.pep
PSPVTPLYRTVPRKMEGDDLHVLRSAGWRLLLRAGPASIIVMWPDAPRIERVQLYNAAVVSLRYGGLLACAARP

SEQ ID NO: 270514 - protein, 134 aa, Zea mays
  Clone ID: MRT4577_178307C.1.pep
MTMTTCRSLLLLAVAAAAAVCAFVPTPATADPFLCPWRTVAHPEDPFIQNLGSWAVDQQHSVLHFDKVESAKAQGVGDCTSMTRNYELVIDASIRAGSGDYKYRAVVYVTNFTQPQKVISFAAIPPSRRPPAAN

SEQ ID NO: 270515 - protein, 50 aa, Zea mays
  Clone ID: MRT4577_178308C.1.pep
SMSLGLAFRLTVIHDMYIFLWRYCIPRSFSCTSCLMPDLFCSFSFLGVIS

SEQ ID NO: 270516 - protein, 87 aa, Zea mays
  Clone ID: MRT4577_178309C.1.pep
MGKWLINLDQALSRQSRPSVSIKDRTVDWPVVVETLQLATYPGEILFPYLLPSEAVKARIGARGPDNLGGLSQSSTVEDFNSRRVRK

SEQ ID NO: 270517 - protein, 42 aa, Zea mays
  Clone ID: MRT4577_17830C.1.pep
ANLSIDLISCISSSNQLLDGAGGEHRECGLLALDDQSWDTTN

SEQ ID NO: 270518 - protein, 40 aa, Zea mays
  Clone ID: MRT4577_178310C.1.pep
DLSGPPGAADAAPLIPLKGPGWEVVVPTKSGGGMLSSLTS

SEQ ID NO: 270519 - protein, 331 aa, Zea mays
  Clone ID: MRT4577_178311C.1.pep
EQMLPRKKEKSIYANMTEVQKRIQDHLVEKTFDVYLNDESDIVLRRPGIKTKLNSLFIQLRKNCAHPDLLEAAFGTTSLYPPVNKLLEQCGKFQLLDRLLTSLLARKHKVLIFSQWTKVLDILEYYLDSKGLGVCRIDGSVNLEERRRQIAEFNDLNSSLNVFILSTRAGGLGINLTSADTCILYDSDWNPQMDQQAMDRCHRIGQTRPVHVYRLATSYSVEERIIKKAFGKLKLEHVVIGKGQFEQERAKPNALEEGELLALLRDEQDEEDRMIQTDISDEDLLKLMDRSDLSGPPGAADAAPLIPLKGPGWEVVVPTKSGGGMLSSLTS

SEQ ID NO: 270520 - protein, 122 aa, Zea mays
  Clone ID: MRT4577_178312C.1.pep
MPPVAQPSSWLRAATDDRSNPNCPIKIAHGTTTLAFRFQGGIIVATDSRATAGNWIASQTVKKVIEINSVLLGTMAGGAADCQYWLAWLGMQCRLHELRHKRRISVAAASKILANLVYSYKG

SEQ ID NO: 270521 - protein, 61 aa, Zea mays
  Clone ID: MRT4577_178313C.1.pep
MLQPRAARARLEIERERDVSRVGWWVGVITPRSRRLFVRSVRCGSVIRAQRSKRTAWRRPG

SEQ ID NO: 270522 - protein, 96 aa, Zea mays
  Clone ID: MRT4577_178314C.1.pep
LAYKISIHNCLVERLRAVHVFLPTQMANSASLDMSSSRLGQGIVDPGLQYSMVGRAEVHHRGMPLESKAGVPCDDVQAIQVVRTRLKKMGSLCCGR

SEQ ID NO: 270523 - protein, 74 aa, Zea mays
  Clone ID: MRT4577_178315C.1.pep
LIWQSLRSSQQEKQGRRWSSFLAQDQFSPLSSVKIGSKNIGLFCQWLNKKKKNPKKNVKIKKKKNKGRRSRSRT

SEQ ID NO: 270524 - protein, 77 aa, Zea mays
  unsure (1)..(77): unsure at all Xaa locations
  Clone ID: MRT4577_178316C.1.pep
SVQFVGQQCXHQLRQVYPRHRYQSILGLVLQSILQQHRQSGQVASMLVAQIAQQMTGMCGLQQRSPLPYRRPAGVPH

SEQ ID NO: 270525 - protein, 402 aa, Zea mays
  unsure (1)..(402): unsure at all Xaa locations
  Clone ID: MRT4577_178317C.1.pep
MESRRKNQQKTSYIVISIQLLAALLLLELVSLVPGASCEELPLDFWVSALRGVGAKDVSTADGCTKKNKDTVLCSAQANTVTNFINPTNSEEQGYRTIGESIANIPDDSTKRYILILSGGTVYREKVLVSKSKPFVTIRSYDPINPAIIVWNDTAATLGKDSKPLGVDGSSTMTVESDYFIAYGVVFRNDAAAAAXEEGRXEAPALRVLGTKATFYNCTIEGGQGALYDQMGLHYFKSCTIRGTIDFIFGSAKSFYEDCTIVSVNNMEEIMTLXWHHXLDIHDNPIKVAPGEGGFSFKTCTITGEGQQIFLGRMGTPSIYSYTQIAKEVVPIIYDKGNIFMPSNMTGRRCATFKCYGPGLEKIWHVKLRYAEAIYFLGTDFINGDSWILSIPPTDAETLLSV

SEQ ID NO: 270526 - protein, 80 aa, Zea mays
  unsure (1)..(80): unsure at all Xaa locations
  Clone ID: MRT4577_178318C.1.pep
KKKKTRRSTSIVTHNKSLLLYLHNGILLGIVSSRAALHXLKVPEGETGIYRLAAIAEPPPSRRLDSSKRNFEPSVPKFMV

SEQ ID NO: 270527 - protein, 32 aa, Zea mays
  Clone ID: MRT4577_178319C.1.pep
MLSSTFVKKIPIYIDIKELIIQLKFFFAIKVI

SEQ ID NO: 270528 - protein, 112 aa, Zea mays
  Clone ID: MRT4577_17831C.1.pep
QTHVTLSNTLRSPIPLHYIEPNTSLVSFDRAEYGKSDPNTRRDVKSKALDNKELADQLDLGQKLHVSWVLMGGYSIWRRLRYIPHRQTHRYNQIHVNEICNSDFRVKLYMLY

SEQ ID NO: 270529 - protein, 149 aa, Zea mays
  unsure (1)..(149): unsure at all Xaa locations
  Clone ID: MRT4577_178320C.1.pep
HELPIPPDLGDVRVPHEAHRRRGLCAXLMVLLLLLYAVHRWRNPRCSGRLPPGSMGLPLVGETLQFFSPEASLDVPRFVRHRLQRYGPIFKTSLVGQPVVVSADEELNYMVFQQEGXLFQSWXPDSFVEILSKDNVGEQQGAMFKXLKK

SEQ ID NO: 270530 - protein, 89 aa, Zea mays
  Clone ID: MRT4577_178321C.1.pep
IYGVVQRMPCSVCGRPLRAVHRLFVSGPPHRDGAAEVLPGNDKVGFHVLRVARLIVRWRAPAKQPQVLVDVNRPDLAAVPKRRRSPQGM

SEQ ID NO: 270531 - protein, 41 aa, Zea mays
  Clone ID: MRT4577_178322C.1.pep
MDYAPTAVLVAAMAPLMQWEDVVVSTDGGSRLVHVYLGGKS

SEQ ID NO: 270532 - protein, 101 aa, Zea mays
  unsure (1)..(101): unsure at all Xaa locations
  Clone ID: MRT4577_178323C.1.pep
VAPTPLPASCGPPRNPKCFPSPSPPXDLPWFPPPVPPFPQXSPGPCPVPRCPPGFAPPPPPLSPPAPCPPRPPVPRWPVLTPPPPPVGSAVLPCVFKTELS

SEQ ID NO: 270533 - protein, 48 aa, Zea mays
  Clone ID: MRT4577_178324C.1.pep
TFGGGQDMKRSLFKFSSCAQSACASACTNPSYFSAKMLICVGSYGKNY

SEQ ID NO: 270534 - protein, 247 aa, Zea mays
  unsure (1)..(247): unsure at all Xaa locations
  Clone ID: MRT4577_178325C.1.pep
MFARQVLRPVRTLHQQVRRYASEAPKSGGNNGVLYTGIGAAGLAGAYLFLRGGDSPSGQKGNAPPSEEANKIPSSTGGPAKKAFTGGDQGFLSLVLDKSEIVNHNTKKLTFKLPEEDMESGLPVASAVITKYKGPEMQKPVIRPYTPISDVDQKGTVDFIIKAYPNGPMSEHMHSMEPGQRLDIKGPIPEFQWSPNKFEHIAXLLXGGTGITPMWQTARAIFRNPEDXNKVTLVYGNXTEEDILAQR

SEQ ID NO: 270535 - protein, 96 aa, Zea mays
  Clone ID: MRT4577_178326C.1.pep
MAGATSSSSVSLILILVASSSPRRSRGRVGIALRSYGYSGAELRLHWARRGSSRDGPAVVRAAAVPAGGEGEDAAAVGKSSSSKAVAVQGSESKGT

SEQ ID NO: 270536 - protein, 84 aa, Zea mays
  unsure (1)..(84): unsure at all Xaa locations
  Clone ID: MRT4577_178327C.1.pep
DCCVILEGYDWDGPQLYMRQGLKVSYKYYXSALWKGKQAAKTEIXKMKLSXLTCPEGIXVRLXKIIYXVHDQTKDKAFQLELNW

SEQ ID NO: 270537 - protein, 114 aa, Zea mays
  Clone ID: MRT4577_178328C.1.pep
QSYGRQTTGARSGRAVQHGAGAPAYTFPVVTPAGLREHGRGGREGSTRDELPPAEGRGHRTGGGIRETGSGRAMACGQSAGCGGRVVPHGGGGVPVSAGAETTDQRVASLVEAP

SEQ ID NO: 270538 - protein, 235 aa, Zea mays
  Clone ID: MRT4577_178329C.1.pep
QVANTSGQAQGAGNTNWGSALQSNANMAWGVMGQANMNMPWAAPAQGAASYNMGMTMPTQQNAVQNMGWVTPNPGNTNMNMVWATNQGQGTPNAAAMMGAQMQGVAMAPWGGAIAQGNANSYPGWVPQVGNASQNAGGWSAPPQGNSGPNPVNGTGQGNNNVNWNSPSGNPTWNNQRDFNGGGSRGRSWRPQSGGRGTRPPCHVFQRTGCCNKEHCSYSHTPGDEGYSQRNDRHF

SEQ ID NO: 270539 - protein, 78 aa, Zea mays
  Clone ID: MRT4577_17832C.1.pep
VLVGRLLHRLGSSKDSSLQGLQETAMSIFTKEPEPPSEKAGDKKLANMPPLAAPTVSPLARFLLTRWQNQVSQDLNSV

SEQ ID NO: 270540 - protein, 125 aa, Zea mays
  Clone ID: MRT4577_178330C.1.pep
MMALPKPSPVALLLLAEVAVLELARADLTHDNCVKNKKVTVQNLCMHHVTLTLNPLANSPPVMAGTYTLHPRRHAKFPVCWWTGLLRAPDAALLEIHVRVASGYFYLAPNAQPGQHVLFCGTLHG

SEQ ID NO: 270541 - protein, 44 aa, Zea mays
  Clone ID: MRT4577_178331C.1.pep
AADRITVASLCLHRYIRTTRGALISQQSSQTDNLLTQPKECCVR

SEQ ID NO: 270542 - protein, 53 aa, Zea mays
  Clone ID: MRT4577_178332C.1.pep
FLLLHPLLPFTQHPLPYPYHLIASAHHWWCLFYLLHHLNCTKKFSTFICASSQ

SEQ ID NO: 270543 - protein, 107 aa, Zea mays
  Clone ID: MRT4577_178333C.1.pep
QDFRTLRSRHVRVILLCQRVAMSRVIHRPYVVSLCNCNLGTKTGSLCRTDGGIIVLWLPCLTPHKIVLYDGPQDTYTLLFWAWWPCSPLLLLKVCRRAEYPLGTESM

SEQ ID NO: 270544 - protein, 45 aa, Zea mays
  Clone ID: MRT4577_178334C.1.pep
GFSFWACPVFSCALWAPSAAVRPRVCPPCPGATRWFGAWPLPRGR

SEQ ID NO: 270545 - protein, 86 aa, Zea mays
  unsure (1)..(86): unsure at all Xaa locations
  Clone ID: MRT4577_178335C.1.pep
MSNLDVQLPSXFDLFVEANAEXSGVALGTKDXVHVRIXERNDRKSLNTVQGLNMKKKFCCNGNVVQYPELGQVIQLQGDQHKDALT

SEQ ID NO: 270546 - protein, 113 aa, Zea mays
  Clone ID: MRT4577_178336C.1.pep
MSSPRPSSPVNGGAAASGANIGRPSSPAIPGGPRTAIRRRAAADQKEKIANARPSSTRAAGAGGSSSTMLRLYTDESPGLKVDPVVVLVLSLVFIFSVVALHITAKITRKFSS

SEQ ID NO: 270547 - protein, 73 aa, Zea mays
  unsure (1)..(73): unsure at all Xaa locations
  Clone ID: MRT4577_178337C.1.pep
CARSRPAVAAPEXRGACLPLRSRGPDPSSASSRPPFCPRRERTRGGIASTGARSSEGWRRPPPAARSSRVTCS

SEQ ID NO: 270548 - protein, 117 aa, Zea mays
  Clone ID: MRT4577_178338C.1.pep
MASDGDNKRLFRARRTALQMLADRGYTVKDDEIKLSLYEFVDRYGDPVRRDEIVIHCEKQGDPNDKVNVFFLDESKTGLAVVRSCVEKMKLGNATNGILVLQKALSGPVRTEVAQSK

SEQ ID NO: 270549 - protein, 161 aa, Zea mays
  unsure (1)..(161): unsure at all Xaa locations
  Clone ID: MRT4577_178339C.1.pep
AVPXVSQRXLGXXNXXPRXGHSFVGGPRGXVLDGRGVPCGAPSFLSPXVPLAWXXTGXCRAPSSXRGPXXRAFAGGXLQALGLPXXRRLPFFXLNSXSSPVLSXXRGHFGAGFGRRFRGPSSTFGSYFTSSAFPLSRRSFGFSSLGIWTRXXDLAFGHDAS

SEQ ID NO: 270550 - protein, 112 aa, Zea mays
  Clone ID: MRT4577_17833C.1.pep
MASFGEAPGGDAGSGEKIFRTKCAQCHTVERGGAHRQGPNLHGLFGRQSGTTLGYAYSTANKNMAVVWEEGTLYDYLFNPKKYIPGTKMVFPGLKKPKERTDLIAYLKESTA

SEQ ID NO: 270551 - protein, 252 aa, Zea mays
  Clone ID: MRT4577_178340C.1.pep
MRMCRRRTRAGLRRTGKSCRLRWVNYLHPGLRRGRITADEERLILQLHAQWGSRWSRIARSLPGRTDNEIKNFWRTRARKQKAAAQQQQQQQDSRSSKTATASAFSGSASSVTTTTSSCSGSPSPTSRGCGTATSSSALTESALRQSGGEDEDAELDEASTTTTTTASQRQHQDDDHQQQHQECYASDHFWNDIAAAEAAIYMLIDGGWTGSGPGHPAADPPSSPAWEYCSDYSLWRIDDDEYYEKMLDSSS

SEQ ID NO: 270552 - protein, 363 aa, Zea mays
  Clone ID: MRT4577_178341C.1.pep
LIRSASRSGRIRRAGSVALGDFLRREASAERAALPRALVAGFVKTDKDFQTKAHSSGTTVTLAIIDGSVVTVASVGDSRCVLDAAGSIYYLSADHRFDANEEEVGRVTECGGEVGRLNVVGGAEIGPLRCWPGGLCLSRSIGDQDVGEFIIPVPYVKQIKLSNAGGRLIISSHGVWDALTAEMAFKCARGLPPEAAAEQIVKEAVEAKGLRDDTTCIVIDIISPEKPKRTIQSQRTPGKGLVLLKNFFLRKTTSDSLSLPDKDNYPEPDLEEVFEDGCPSLSRRLNSEYPVRDMFKLFACAICQIDLESGQGISIHEGLSRPGKLRPWDGPFLCHSCQEKKEAMEGKRHSRDSSSRNSGSSES

SEQ ID NO: 270553 - protein, 142 aa, Zea mays
  unsure (1)..(142): unsure at all Xaa locations
  Clone ID: MRT4577_178342C.1.pep
HLRLRGPPNRCRGASLSAYYDASRRSCRRSTGPSAGPSXQESLSAEEDSVKELKGGAKTRKVPAXEILSXLPKIKKAKLDTWGFFETLVGTXSATRTWMLILTSKGHLEKGHNGPPTAVQRFXATTKRIQNGIYMGPILLLT

SEQ ID NO: 270554 - protein, 279 aa, Zea mays
  unsure (1)..(279): unsure at all Xaa locations
  Clone ID: MRT4577_178343C.1.pep
FTPSFDPLFLFLSIQIGPLRCWPGGLCLSRSIGDQDVXEFIIPVPYVKQIKLSNAGGRLIISSDGVWDALTAEMAFRCAQGLPPEAAAEQIVKXTLVPFPAHLNTRSKILSCTVPNWCTVXEAVESKGLRDDTTCIVIDIIPPEKQKRTIQSQRSPRKGLVLLKNFFLRKTASDSLSLPDKDNYPEPDLEEVFEDGCPSLSRRLNSEYPVRDMFKLFACAICQIDLESGQGISIHEGLSRPGKLRPWDGPFLCHSCQEKKEAMEGKRHSRALSHGLPLN

SEQ ID NO: 270555 - protein, 120 aa, Zea mays
  Clone ID: MRT4577_178344C.1.pep
LEAGRAGISLLSLTSSTRPEPPRLHRPRPAGDAAVAELDVHRRAFFLPASDPFFLTQLPSCSLLSAFSRAVGLQQSYGERSQEAVLPCARRSPSVPRASLAAMAAAITQHLPHSVAAQRV

SEQ ID NO: 270556 - protein, 64 aa, Zea mays
  Clone ID: MRT4577_178345C.1.pep
FTPSFDPLFLFLSIQIGPLRCWPGGLCLSRSIGDQDVGEFIIPIPYVKQIKVHWKVTLHHFWIK

SEQ ID NO: 270557 - protein, 462 aa, Zea mays
  unsure (1)..(462): unsure at all Xaa locations
  Clone ID: MRT4577_178346C.1.pep
MLARSATAAAAAGXAVIKDVGVAXGRIRRAGSVALGDFLRREASAERAALGGGERPSVAAGQACRAKKGEDFALLKPACERRPGAPSTSFSAFALFDGHNGSAAAVYAEEHLLANVLGCVPADLSRDDWLAALPRALVAGFVKTDKDFQTKAHSSGTTVTLAIIDGSVVTVASVGDSRCVLDAAGSIYYLSADHRFDANEEEVGRVTECGGEVGRLNVVGGAEIGPLRCWPGGLCLSRSIGDQDVGEFIIPVPYVKQIKLSNAGGRLIISSDGVWDALTAEMAFKCARGLPPEAAAEQIVKEAVESKGLRDDTTCIVIDIISPEKQKRTIESPKTPGKGLVLLKNFFLRKTASGSLSLADKDNYPEPDFVEEVFEDGCPSLSRRLNSEYPVRDMFKLFACAICQIDLESGQGISIHEGSSKTGKLRPWDGPFLCHSCQEKKEAMEGKRHSRDSSSRNSGSSE

SEQ ID NO: 270558 - protein, 364 aa, Zea mays
  Clone ID: MRT4577_178347C.1.pep
CDGTVEAPPPVVIPDLSVLGHEERAAIVAEVGDRRPATLAEERPSTSTAVVPDASAAGGPDASVDGRAEPWHVLGSSGLTPAQLNPNEGCGQPLRFWGHGTSEPLLFLNDELEEKARDSFREYTEAAMRSLRSTMETLSRDVPRVFQELADASTAKSLFIRSESDVWELLRSQWAALAEANERLAQRSAEVADLWLLCDGLKSEAAAARTEATSARAEALSTRELVASQAEEMWQRQLELGQAVGERDQSRSQATEVVIWAEALRGQLAEATERLAEASARAGTLAESLAEAVGSAQSAQAEASQQRARAEGFETALNESVKNCKALAQAAEQKEANRVAMSEAISALCQAFSLDGVPSGSVTP

SEQ ID NO: 270559 - protein, 174 aa, Zea mays
  Clone ID: MRT4577_178348C.1.pep
MDAATSVQLPTRFRFLEHISHLSPYLTSTSSPRSHRRSPGRFFHGLAGITGAITDQGTMVRSKVGIGDEPRLRPRHATKKLHHRAGTPREPYSSNDSVGTGRASSSRNLQAIGVVTRLVQGASTGEILPNRLISTFARCITDRIKDCCADRALRAPWRWRCRVLHPLACSTWGR

SEQ ID NO: 270560 - protein, 157 aa, Zea mays
  Clone ID: MRT4577_178349C.1.pep
RDATQVVRKPNRFSPFPCSPRPPHEIPCLITPISAVCNTSSCPIFINSSTPPHRGQIFGIGFCSVLPFGFGAEFSSDSEQLAAFSSSASEASLIPAMSLPAISMYTSPPGAVYSSEFDPASRGSSPCTTAAPPPPAASYRLPSGGGGLSCLFSSPAA

SEQ ID NO: 270561 - protein, 70 aa, Zea mays
  Clone ID: MRT4577_17834C.1.pep
LKNLADDLKPPFICSFGCYQCSWSLFSHESLFVMTFCVLLSWFFCRLFLVGLRPNVVEFALVGAYCTPAG

SEQ ID NO: 270562 - protein, 56 aa, Zea mays
  Clone ID: MRT4577_178350C.1.pep
LSFQLVRSFFKTHPSPLLTYVLFFKKKKKKKKKKKKKKKKKKKKKKKKEKKKKKGP

SEQ ID NO: 270563 - protein, 82 aa, Zea mays
  Clone ID: MRT4577_178351C.1.pep
MDRSFRQLVGKTIACTAWKHFPLLKMQTLELHSEQLKMTFWERYGQEMAQHHGDDFDWRHGPTNPSTVHASGVERRINSKDD

SEQ ID NO: 270564 - protein, 75 aa, Zea mays
  Clone ID: MRT4577_178352C.1.pep
HFFPGKNFFLFFPKFCSKFGFLNNAPQFFGICPFKGPPGGVKKKKKKKKKKKKKKKKKKKKKNKKKKKKKKKLVL

SEQ ID NO: 270565 - protein, 73 aa, Zea mays
  Clone ID: MRT4577_178353C.1.pep
QAHREMAFHVLILKRLPFFTSEASGAGGRRARPLPIFRVGVRALGFWIESRSCRIAGPIIEPPAELARLYGKK

SEQ ID NO: 270566 - protein, 126 aa, Zea mays
  Clone ID: MRT4577_178354C.1.pep
GRPLRGRRPACHVPPGDHQGHPVEEQVLSGRGCDETCGARIVGPRLVCKLSLPSLFPSRLRKHAPLCYLNPEVGELLYRTVCMMVLLPAGWPGGFPYHFMNWNSGQGCGTSDSHVILSSNFDLEIN

SEQ ID NO: 270567 - protein, 130 aa, Zea mays
  unsure (1)..(130): unsure at all Xaa locations
  Clone ID: MRT4577_178355C.1.pep
NGPCRARPSVPAAPQPRAPAAPPSLSRSSLLYGSRSMEGEXVHPQLPRARPCSRTAASIRARAVWKVSRRRIHGRPRGRLXRRLSRSPNLSRSMEVALWDPQIDGITARGRRPRSALALYMEGGDSGVFF

SEQ ID NO: 270568 - protein, 57 aa, Zea mays
  Clone ID: MRT4577_178356C.1.pep
TFSLNQTGTANQGAQNKIISLANRYMTEVRRLTLPQNQTKNVYRGFRELEKKFLSPY

SEQ ID NO: 270569 - protein, 158 aa, Zea mays
  Clone ID: MRT4577_178357C.1.pep
LKDVAHQVRSRKRIYSHGNAAHVSQDSQIQQVVGEVAALVYAAEASALKAAVPAQRAYVARFGGDDAVEREANVAAEIESATAQVVVSELIQRTTTELFNALGASDVRQGKALDRHWRNARTVSSHNPVIYKARIVGDWVINGTEPPFVWQIGNGSAR

SEQ ID NO: 270570 - protein, 522 aa, Zea mays
  Clone ID: MRT4577_178358C.1.pep
VPAGPEGSTMPCSSSSSSNPFHSLASAFPFLSSTSQPPSPPASPAPAAPHLAVPLLLPVSSASESRRGAQPLPGTRMVGAGATGGGNMASGGGGPAFVGQVFTMLDPSGNGLMAVTTRFELPRFLTNRTPMWFKRMLSPSKKTENSPVFRFFMDLNDAVSYVKRLNVPSGMVGACRLDVAYEHFKEKPHMFQFVPNEKQVHAANKLLKSLPQRGRRKKLDGVPVFSAQNLNIAVATNDGIRWYTPYFFDKNLLDNILEASMDQHFHSIMQNRHTRRRRDIVDDSLTSEIIEESAESLLEPPEVQELMNEIGPAGIPLNVVTKAAEIQFLDVVDKVLLGNKWLRKASGIQPKFPYVVDSFEERTAVSIANIATTSSLTASNDDSSCQNNQETQASEPSGDNSSYRNHNNEDHNHFPFSNLLPNIWPGHDRKFKSQESDNKFSRYDADMKSKLQANPLLPKITMVGISMGDGAQMSKANLKKTMEDLTKELEQTSEENMFGDEKDPLFVANVGDYSRITKISSA

SEQ ID NO: 270571 - protein, 41 aa, Zea mays
  Clone ID: MRT4577_178359C.1.pep
VATIAPYHKAGVASLMSDTQDYDRLASATVASSPPSPSPMK

SEQ ID NO: 270572 - protein, 41 aa, Zea mays
  Clone ID: MRT4577_17835C.1.pep
DEHYLGRAVEERLRVFAQQISGKHCKSLQDIVSGEQIRHEP

SEQ ID NO: 270573 - protein, 79 aa, Zea mays
  Clone ID: MRT4577_178360C.1.pep
NEQHSCTINQSTHFDDRKTRAKFLFVHTHWVRAGSFLLNTSALLLTHVYSHPEYTVSCVFRNRLGRSQSRGGLRQRRKP

SEQ ID NO: 270574 - protein, 180 aa, Zea mays
  unsure (1)..(180): unsure at all Xaa locations
  Clone ID: MRT4577_178361C.1.pep
MAYYCNACCAGKSCRLRWFNQLDPRISKRPFSDEEEERLMAAHRFYGNKWAMIARLFPGRTDNAVKNHWHVIMARKYREQSTAYRRRKXTRQSSGSSRQPPPRSXPPGAGAGDVAVGQHHHLLAAAAAAHAHDAAYSFAADPYGFGIRHQYCTFPFPPGAASAEDPPPPAFIDFLGVGAT

SEQ ID NO: 270575 - protein, 173 aa, Zea mays
  Clone ID: MRT4577_178362C.1.pep
MVQNIDNILTDIMVEANLSSDKEDDLTNFLNAIVADIYVNSSSDKREFTGCISFNDFELERRHIGVVIKRHCNNNYRRFARSMAKTVIEVMTDNPIFDELVAKRADQLNITPAEAIKMFDGAEGALIGRSAEIKLTKMKASKLRDANKATAGNSTNKDSALFISNSIADNDEI

SEQ ID NO: 270576 - protein, 151 aa, Zea mays
  Clone ID: MRT4577_178363C.1.pep
PPPFMERANWPSFGRVFFPEPPGQKQIFLEGQKCPSPPRPKGFPPLGGFFLTQTPPCPEKFSKIGKPWGGGAPPKGFGPPPSKLCQTPRFFFCPRGPFPRELWGEKIWGNLGGPRSNPSGFGGVWGPPGGVPPMFLVFPGGGEFFPLWGIL

SEQ ID NO: 270577 - protein, 198 aa, Zea mays
  unsure (1)..(198): unsure at all Xaa locations
  Clone ID: MRT4577_178364C.1.pep
MPKVRIYPAKDRMKVVSVHLAAAVAVLLLLAXKRTPAIAVPSPQCQRQCGGVDIAFXFGIGDNCSLSRGINLSCQEVQNGVYRPFLGNIEVLNIXLINXTXRGLNPXSTYCYDSSSGSMEPSTWSFDVSRXPYRFSDVQNKFTVIGCPDPSYTSRTTPTRATQREVRDSARAWSNMVERRVPAYGRGLVARQNIPKGN

SEQ ID NO: 270578 - protein, 183 aa, Zea mays
  unsure (1)..(183): unsure at all Xaa locations
  Clone ID: MRT4577_178365C.1.pep
STHAVLPDQSPRPVRFGILGCAAIARKLARAMLLAPGAAVAAVGSRSEEKARLFAADNGLXRRHHPXLHGSYDALLDDPDIDAVYMPLPTSLHVRWATAAAARGKHVLLEKPTALCAADLDTILAACDTAGVQFMDSTMWMHHPRTAKMREIVDDKDAIGDIRTINSVFSFRANEDFLQNDIR

SEQ ID NO: 270579 - protein, 186 aa, Zea mays
  unsure (1)..(186): unsure at all Xaa locations
  Clone ID: MRT4577_178366C.1.pep
HQHPTIQTIFSSINRPTSNQTSQPKHQQSCTSPPSCSLALPPPPLQPPSSSTTSATSLSTSSPSTTXSSTGVXSSSTPTRATPSAPPSPVPTSSSPPSPFLASPTSAAPCRPSTTSAPTPTGPTTTCPPSSVTLLRLRASSSSLAAPATASASSARRVRTATAPTLTLLATLVARTPSSTRALTPT

SEQ ID NO: 270580 - protein, 58 aa, Zea mays
  Clone ID: MRT4577_178367C.1.pep
KNITPLGGKTGFCPQNPIKGVFKKKATDFPKKEGILCTKRQHPLGQIYFYTGCGLSFK

SEQ ID NO: 270581 - protein, 131 aa, Zea mays
  unsure (1)..(131): unsure at all Xaa locations
  Clone ID: MRT4577_178368C.1.pep
LGTSRPAGVCSALLSMHGQXRSSSPRLPQSQCHHSSALHQSITRADSRLFVLWTRTSTECATSKQRHVADGHMKPADKHLIPAQQHMSQNSTRGPSRYTGMIMNPMMTPLVLLHLHSDVHRLRDLPDRLLQ

SEQ ID NO: 270582 - protein, 142 aa, Zea mays
  Clone ID: MRT4577_178369C.1.pep
SRRGVLGTLALYDVAVVYGSSVAEVRSYGCSSCCSPIDLLGRRARVSVERFPVSRCRCFWFCGSFALSRYARWAQPQHIQSCSARRMSEGCVVQCRIISMGGAVGSWGRGRFGGGGDGGFSGGGEQRAGPWSHLGYGFSWPS

SEQ ID NO: 270583 - protein, 524 aa, Zea mays
  Clone ID: MRT4577_17836C.1.pep
MCDATEGLISFFLYFHHACALSVCDDWATPPPPSSVWCRGLRWTLRPRLASARLKAMATERRRASVVVLGDIGRSPRMQYHSLSLANQASMEVDIVANGGSDPHLSLRENPSIHIHEMKTVQLTGISKISGALSLLLKAAVQFILLVWFLCFKIPRPDVFFVQNPPSVPTLAAVKLASWLRGAKFIVDWHNFGYTLLGLSHGRSHIIVKIYFWFEKYFGQMADGAFCVTKAMQHELAQNWGIRATVLYDQSPDFFHPASLMEKHGLFSRLGNSMCSAMGNADCISVEEVGEDMNTTAFTSKIDGQVFLKPNRPALVVSSTSWTPDEDFSILLEAALMYDRRVAAALGEDDSMDEGQLWIDIKNGKQFVYPRLLFIITGKGPDRKKYEDQIKRLKLRRVALRTMWLASEDYPLLLGSADLGVSLHTSSSGLDLPMKVVDMFGCGLPVCAASFSCIEELVKVNKNGLLFSTSSELADELMMLFKGFPEECNALKSLKEGAMKSASSSKWSTEWETNALPLVDQVIG

SEQ ID NO: 270584 - protein, 72 aa, Zea mays
  Clone ID: MRT4577_178370C.1.pep
RPLLYMLTYNLVLPGVKKRHYNYPNLLMYPDVVKMPLVIVKYLAFQLIIVSCQQNKSCVCPCTEKKKKKKRP

SEQ ID NO: 270585 - protein, 75 aa, Zea mays
  Clone ID: MRT4577_178371C.1.pep
LLSLRVELKVAIHSSSDEGQEVNGSVESYEGGRQVEYLGGLHFAWRPGPAVRVCLLYRLPWPGRAGPCAESPARR

SEQ ID NO: 270586 - protein, 61 aa, Zea mays
  unsure (1)..(61): unsure at all Xaa locations
  Clone ID: MRT4577_178372C.1.pep
TXEAPXRISSDSAQHVHTWHXXXXAXXGIXXSXSQESCXRXKXXPTTSXAXCXXLXCCVNG

SEQ ID NO: 270587 - protein, 67 aa, Zea mays
  unsure (1)..(67): unsure at all Xaa locations
  Clone ID: MRT4577_178373C.1.pep
MNIDAVGVCINGRHTHGTLXNSVETSYHQSRLILLTEPKIDHQPIEETAQKNIPTIAFGDTGSPMRY

SEQ ID NO: 270588 - protein, 205 aa, Zea mays
  unsure (1)..(205): unsure at all Xaa locations
  Clone ID: MRT4577_178374C.1.pep
MDPNYGEWNFSEIKIAKALIASHNAKSSYSSDMNNKQTDIIDMLQARFPTKEKHKVTKLYVDLMLEKMQMILSGNQHATMGKKLVNDKFGMSIEDPAIDFMGGDLVEKRTAKRKAREDMNTHLDSQKERRYRRFWTIDEHRNFLYGLRAYGRSDWKNISKHFVTTRTPMQISSHAQKYLHRMVFFARRQRSSINDIGXLHDDEPR

SEQ ID NO: 270589 - protein, 227 aa, Zea mays
  Clone ID: MRT4577_178375C.1.pep
MKHLRTSPQHWRPPPVNSFDHLRQAVTFVMLPKKASALGAALQPLDVNQETLREARSQKRKATSPTPQEEELDQEIRDLEAIHQQKKIDETTEEMRHLTQDDQDRRPQRRELRQDKSYDNDEWYDDFHHGNFAFDDASPLSAELQATQWPLKPPQLPMYDGHSDPKQLLMSYEATISSYGGNTVVMAKSFVILVKNVVQTWYSSLRSGTITSWQKLKDMLITSFQGF

SEQ ID NO: 270590 - protein, 177 aa, Zea mays
  Clone ID: MRT4577_178376C.1.pep
MDPNYGEWNFSEIKIAKALIASHNAKSSYSSDMNNKQADIMDMLQARFPTKEKHKVTKLYVDLMLDKMQMILSGNQHATMGKKLVNDKFGMSIEDPAIDFMGGDLVEKRTAKRKAREDMNTHLDSQKERRYRRFWTIDEHRLMISLFHTCICFALFISFVLFWKRFSHFHAHYCYIH

SEQ ID NO: 270591 - protein, 203 aa, Zea mays
  unsure (1)..(203): unsure at all Xaa locations
  Clone ID: MRT4577_178377C.1.pep
LVLSARVFVPIDDLLAGADKGGDPRPVSYQVRRPHSGRAHGVLYFCYKFTDVPAVACVPEPEGKQGQYAKYVLDSVNTTDKTMVPPTAYPPSAMPSTYPPPAMSPAYPPPQYGSPYPAYPPQPYAYAAPPPYGYNAATPQPAMYGYAAQPVAAPASHGGGMGMGLGLGLLGGAVGGMMLGEAIGDYEADAAYDAGFNXDALAF

SEQ ID NO: 270592 - protein, 76 aa, Zea mays
  unsure (1)..(76): unsure at all Xaa locations
  Clone ID: MRT4577_178378C.1.pep
MGXKFFXXDNWKXNGTANQDEKXVKTLNERNVPSSNXMKNDIRPPYVFLPVIKSQMCQEYQVAAHNCWAKKGCAFC

SEQ ID NO: 270593 - protein, 150 aa, Zea mays
  unsure (1)..(150): unsure at all Xaa locations
  Clone ID: MRT4577_178379C.1.pep
GIFGSTHPSGVNPYDEGGEGQCVFYTPVKVVHIGDTFPLQVRPPSDKKTIVAYIKKCIRNRSVEQGPYNAVEYKKGATGATNFVLIKLRDPQLFVGDSIKDDASAVXAITXDGATNXTFLHFSHGAIEITCSACGQISYPCWVLSMYYHY

SEQ ID NO: 270594 - protein, 243 aa, Zea mays
  unsure (1)..(243): unsure at all Xaa locations
  Clone ID: MRT4577_17837C.1.pep
FKYEKVNKPLPPISRTPDEDFSILLEAALMYDRRVAAALGEDDSMDEGQLWIDIKNGKQFVYPRLLFIITGXPFCYINMNNQVCFFMYSIFXKGPDRKKYEDQIKRLKLRRVALRTMWLAXEDYPLLLGSADLGVSLHTSSSGLDLPMKVVDMFGCRLPVCAASFSCIEEIVKVNKNGLLFSTSSELADELMMLLKGFPEECNALKSLKEGAMKSASSSKWSTEWETNALPLVNQTSCMAVYI

SEQ ID NO: 270595 - protein, 81 aa, Zea mays
  Clone ID: MRT4577_178380C.1.pep
GRVGKKKKKLKKKKKKKKKRGVKLHTRIPRYILRACYFYSASILQSNCTLVSPILNGITLELHNLTAVKPICNTSKLRHIA

SEQ ID NO: 270596 - protein, 206 aa, Zea mays
  unsure (1)..(206): unsure at all Xaa locations
  Clone ID: MRT4577_178381C.1.pep
GFVCCCFGVLYWSSVLPDGSLGDGRTVILTSAWRSAEVILSVDVLSGKVARITPEGSCYSWRALALDGTNVLAVSSSPIYPPXHLLTTSCRDXLRVKHVYRPGMKLLVHSWHPTAKLSPCXLHHSVSILKIPVPSPSADLSDGGKLPLEAIFVSCSCKGSSRSPTVVVLHGGPHSVSVSSYSKSSAFLASLGFNLLVVNYRYSSSL

SEQ ID NO: 270597 - protein, 113 aa, Zea mays
  Clone ID: MRT4577_178382C.1.pep
TPHPEASELIFLLEGTLFAGFISAETNKAYVKILKKGDLYVFPQGLLHFQFNTGNTTATAIAAYSNQNPGLQIAVYALFGNTLTVETVNKTTFVTKEEVMRLKDLFGQSSVPS

SEQ ID NO: 270598 - protein, 51 aa, Zea mays
  Clone ID: MRT4577_178383C.1.pep
IGGASPPLCDRLKHIHYVFECASSLSDAWIDLVGYQIHLIVSSITSYHYKP

SEQ ID NO: 270599 - protein, 97 aa, Zea mays
  Clone ID: MRT4577_178384C.1.pep
AHLLGVPHAATRAPPQGLHPSFQVTGRTLQRLGGQPPLCLLSRWAFSCPMCGDKVSLPATCGSSLSRCCQPPGGAGCPCSCTRWLRRLGRVPLVSSQ

SEQ ID NO: 270600 - protein, 85 aa, Zea mays
  Clone ID: MRT4577_178385C.1.pep
LGFGSPMVLPVFILMALATILDCCWCYCLFPQYGGTDTSFVAPLREVSVSVRSVFVSWSGGVAPGALLSGVVFNVWGQAHSSVVP

SEQ ID NO: 270601 - protein, 92 aa, Zea mays
  unsure (1)..(92): unsure at all Xaa locations
  Clone ID: MRT4577_178386C.1.pep
LXCXXXXRWLCXXXXXXXXRXAXXPXLXFXXXXXXXPLXASLXXXXXXPPLLXXXXXXPXXXVVLXLCAXXLPSPCXVLXPPVCLXCXXXXX

SEQ ID NO: 270602 - protein, 58 aa, Zea mays
  unsure (1)..(58): unsure at all Xaa locations
  Clone ID: MRT4577_178387C.1.pep
AGFAHGRTEVGGEREIAALXAHVTHEDGHFCXVSEINKSNAYCDAGNRQWPCAVEQKY

SEQ ID NO: 270603 - protein, 62 aa, Zea mays
  Clone ID: MRT4577_178388C.1.pep
SSLGQDSASYYGVFNAHCSWTPHRVCSTSNSVAPCPRAENDSPPWSEMTGVERKCGEKARPC

SEQ ID NO: 270604 - protein, 39 aa, Zea mays
  Clone ID: MRT4577_178389C.1.pep
LTVNVNFQPLKVLHVRSSKKKKKKKRRPVLRNPGYGRGA

SEQ ID NO: 270605 - protein, 63 aa, Zea mays
  unsure (1)..(63): unsure at all Xaa locations
  Clone ID: MRT4577_17838C.1.pep
SRGNFLINPIXALVICLLPXENLGGFVRGILXILTLPXGSHYSMLIWLVAFLFLLRAVPFFFL

SEQ ID NO: 270606 - protein, 74 aa, Zea mays
  Clone ID: MRT4577_178390C.1.pep
HSSISYYTHCALDAWTRHRRRFASPSSLPGLSLVVLPQLVHGLGHDLGEKLFCVAALHLFFDAWRLYPRLSNLQ

SEQ ID NO: 270607 - protein, 130 aa, Zea mays
  Clone ID: MRT4577_178391C.1.pep
KKRAILIRSRARTKQTRRSSSGGMVPRKHLPTKAARMSAPATGGVKKPHRFSLDTVALREILRYQKSPELLIRMLPIQRLLREIAHDFKTDLRFQSSAVSALHEAAEAYTGGLYEDTNLCVIHAKRVTIM

SEQ ID NO: 270608 - protein, 46 aa, Zea mays
  Clone ID: MRT4577_178392C.1.pep
GVFCKKKKNGSRSPKKKKKKKKKKKKKKKKKKKKKKKKKKKKKKKK

SEQ ID NO: 270609 - protein, 75 aa, Zea mays
  Clone ID: MRT4577_178393C.1.pep
RAPSGPQNGPFRLKPLKKNVGAPGKGDLCRVGLSPKEGFVLISRTLGGGPGAPSNYVVKTCVLLSRANQAQFFLF

SEQ ID NO: 270610 - protein, 168 aa, Zea mays
  Clone ID: MRT4577_178394C.1.pep
FQDVASRAMSFSGNGWAVCILTANGTVSNVTLRQGESSGGTVTYEGRFEILSLAGSYLLSESTGMSSRTGGLSVSLASPDGHVLGGAVAGPLTAASPVQVVIGSFLADTKMELDPGSAPEKHVFSRFQTTSSPSRGTESSGGHASPPNTTGSFSTSTQPGFPSFPTWK

SEQ ID NO: 270611 - protein, 50 aa, Zea mays
  Clone ID: MRT4577_178396C.1.pep
VFSRLFCLLSKLLKIVRVMLRYGVCMCPLTLCSLYVPRMCSRRICFSDRR

SEQ ID NO: 270612 - protein, 54 aa, Zea mays
  Clone ID: MRT4577_178397C.1.pep
NRGSVRSTFGLGVGTPEGGFGCSRYETIPEKDGQGFCSQKNSHNDIDILFPKEE

SEQ ID NO: 270613 - protein, 58 aa, Zea mays
  Clone ID: MRT4577_178398C.1.pep
LKKKNCFLNINNRLHNTRVGHPFQSAPTSCISSVSSRGSFLAKGCRETRMSAAAPADS

SEQ ID NO: 270614 - protein, 149 aa, Zea mays
  unsure (1)..(149): unsure at all Xaa locations
  Clone ID: MRT4577_178399C.1.pep
DLWAGLCACSEYGTEFHGITFSDIMAGAVDEVPNMPPSEIGLGKYALRVTPADSEFIATDEAXRSALLISLFRXSTLGKEDVVNNPVCGYHIAGKETADSRSDCACKSVDNRIGSXGPPAPNVAGGGIGLGSGLSPPECSLADHGKKLK

SEQ ID NO: 270615 - protein, 64 aa, Zea mays
  Clone ID: MRT4577_17839C.1.pep
CLAMVYKMFAPMDFACTPSYVWFSVEVVSDRLEVIRIQLSPAPSSHGSDILTRNVLWSVGANYL

SEQ ID NO: 270616 - protein, 164 aa, Zea mays
  Clone ID: MRT4577_1783C.1.pep
MCRAAPEHEEEAPQFGSPVEASSPPRPPLVRDSERDEEETKHNRAVRSCRNWWPPAPRKKLPRQQQKGGGRGVVVSRIARAMPLSRHTARSEYALGGRDLYRGADQHDPEAVLDGAAMAGLVGVLRQLGDLAEFAAQVFHGLYDEVMSTSARGHGLMLRVQQLE

SEQ ID NO: 270617 - protein, 107 aa, Zea mays
  Clone ID: MRT4577_178400C.1.pep
MVAISMYRGNLHIGGPDSGASAPRRWEAPRPTLDVKRFRRLLRNRFRAVARLAGTPLGQASPSSSGMDVGRGAADPEREAPDEEVRAFDGREEEQGPLQHDQHLDQV

SEQ ID NO: 270618 - protein, 88 aa, Zea mays
  Clone ID: MRT4577_178401C.1.pep
KKSPGCLIPPLPQEIGLGEKEKEKIGEVVLPVFKKSFFLQGHPTNFFFVVQAKKKGWRGRKKFPPVWGFSKRRNFVKVNFPRPPWFGV

SEQ ID NO: 270619 - protein, 108 aa, Zea mays
  Clone ID: MRT4577_178402C.1.pep
PPASWSSLIDSSKTARRWLTTDRWRRRRPTLNSTAGSCSRCAPSSSPPSLQYYGFVVYGEVVDDGSTRRWSTARGRGAAARGCPRRGRRGRWRRRGGRGAARARKRRQ

SEQ ID NO: 270620 - protein, 40 aa, Zea mays
  Clone ID: MRT4577_178403C.1.pep
VTAPSLSISALKKNMGYIPRGMFHNTRAHTHTHADMLTDA

SEQ ID NO: 270621 - protein, 189 aa, Zea mays
  Clone ID: MRT4577_178404C.1.pep
MEPCTKQFLPMPPQDPNSPSSSTSSSSSSSTSPSHPYHRAQPPHPHNLPPSPRPVPRTIETTPFPTTFVQADTTSFKQVVQMLTGSEQSSKNAAAATTSAGNGSAGNQAASGSGPCRPKKPSFKLYERRSSLKNLKMIAPLAMGAPPSPRNASAAPEILSPSVLDFPSLKLSSPVTPLTGDPFFPSPAS

SEQ ID NO: 270622 - protein, 48 aa, Zea mays
  Clone ID: MRT4577_178405C.1.pep
YACSFRLHWIYCTYTSGSSVLNARLIKSPYNSQAKGYEHVNVYTLICL

SEQ ID NO: 270623 - protein, 307 aa, Zea mays
  unsure (1)..(307): unsure at all Xaa locations
  Clone ID: MRT4577_178406C.1.pep
MTVLLSPSSSLFLAKPSAVAKGRAAAVTCFSGPSLSVGREDQEGVAVVVGRRALASAAAVASVLGFAGRGLAANQGLLAGRVPGLSEPDENXGWRTYRRPDDKSGGHGVGWSPIIPYSFKVPDGWDEVPVSIADLGGTEIDLRFANPKEGRLFVIVAPVRRFAGELXLNKMLKKCCDVVPVLQMXDDATIEKIGSPEKVITAFGPEVIGENVEGKVLSSATAAHSGRTYYQFELEPPHVFITATAAGNRLYLFSVTANGKAIVRRNKSQLFFLLSXNTINSWESFAGLQWKRHYKDLKQIAQSFRVV

SEQ ID NO: 270624 - protein, 91 aa, Zea mays
  Clone ID: MRT4577_178407C.1.pep
TPRMPIISARRRGTYCGGDHRAQRRHGRLALGTGGGSLQLEGQDKKQQPQKRRNAVKPVIKAVRRSKVCPVRRKCPGPPRQGTQYVVTCAH

SEQ ID NO: 270625 - protein, 261 aa, Zea mays
  Clone ID: MRT4577_178408C.1.pep
MTVLLSPSSSLFLAKPSAVAKGRAAAAAVTCFSGPSLSVGREDQEGVAVVVGRRALASAAAVASVLGFAGRGLAANQGLLAGRVPGLSEPDENGWRTYRRPDDKSGGHGVGWSPIIPYSFKVPDGWDEVPVSIADLGGTEIDLRFANPKEGRLFVIVAPVRRFADDLDDATIEKIGSPEKVITAFGPEVIGENVEGKVLSSETAAHSGRTYYQFELEPPHVFITATAAGNRLYLFSVTANGLQWKRHYKDLKQIAQSFRVV

SEQ ID NO: 270626 - protein, 142 aa, Zea mays
  Clone ID: MRT4577_178409C.1.pep
NSARGSRSPGFGSSHAKHNTGPSKANDQLSGAGCSGHREEHERGANGGRRREEASPAQHGVPLYLGSALLARLRCAPAGLTAERRACIHGRPARGSWVEVEIQILVHGLERSNEQNKGREYSFFFFLSFLKKKNCGGGLGEL

SEQ ID NO: 270627 - protein, 110 aa, Zea mays
  Clone ID: MRT4577_17840C.1.pep
QKKKKRGKNKKYRVYLNSIKQNEINNNIKTIKNPGGPPFEYPFFLPLFSPVNVFVNCALYYLLPLFFPPCMVKNPCPSPVHYPRTLSPFSRCVSFTLASALAPFPNGFSP

SEQ ID NO: 270628 - protein, 34 aa, Zea mays
  Clone ID: MRT4577_178410C.1.pep
MQIFVKTLTGKTITLEVESSDTIDNVNAKIHDKE

SEQ ID NO: 270629 - protein, 78 aa, Zea mays
  Clone ID: MRT4577_178411C.1.pep
CLLSLLNRNCCTIKIDRSKIWLQYYTIKYKSTVCIDHGQVLSIYPLQSSSKNNERRAALEIHRCREAGTLEELGVACG

SEQ ID NO: 270630 - protein, 177 aa, Zea mays
  unsure (1)..(177): unsure at all Xaa locations
  Clone ID: MRT4577_178412C.1.pep
MTPKEILGKFVSWHMMVKEARYVDDIANGPLLVYEPQPVALKATSSKEALPNKVAQVEAAGLNEDEMALVIKRFKTAMKGHKEYPNKNKSKGKRSCFMCNKSXGQEKKWKRXEKKNYRKAKGESHVGKEWDSDCSSSDSNDEGLAASAFDKSSLFPNKHHTCLMAIEKKITGIFLRD

SEQ ID NO: 270631 - protein, 47 aa, Zea mays
  unsure (1)..(47): unsure at all Xaa locations
  Clone ID: MRT4577_178413C.1.pep
ELENPPXQTGSGPSRKTMLNSKDLSFVGYTYKNFDAVKAIKISGLPP

SEQ ID NO: 270632 - protein, 264 aa, Zea mays
  unsure (1)..(264): unsure at all Xaa locations
  Clone ID: MRT4577_178414C.1.pep
MPWFDIPYPLQWGPPSFSADHSFGMMAAVLVSLVESTGAFKAAARLASATPPPPFVLSRGIGPHVRGLLLDGLFGTASGSTVSVENVGLLGSTRIGSRRVIQISAGFMIFFSILGKFGGLFASIPFTVFAAIYCVLFGYVGAVGLSFMQFTNMNSMRNLFIIGTSLFLGISIPEYFFHYDHGPSHTRAGWFNDLINTIFSSPATVGFIISVVLDNTLDVXNRAKDRGMPWWARFKTFRGDSRNEEFXYNLPVQLNRFFPTSLRF

SEQ ID NO: 270633 - protein, 83 aa, Zea mays
  unsure (1)..(83): unsure at all Xaa locations
  Clone ID: MRT4577_178415C.1.pep
GGDPFEGSLAVPPPFFVQMAILEKNPQLFSQDQFFCHQSQRAGMQGQLSFKKXPRFSPMFLGPTGAFXGMPPGSNLGFFPPPF

SEQ ID NO: 270634 - protein, 70 aa, Zea mays
  Clone ID: MRT4577_178416C.1.pep
PPVGMAIPKGLAVKVKKNPRFFVRGYDKSAIGQFAAPIKKWRPPEPSKGKGFKYMDEVVKRKKGKAGKKK

SEQ ID NO: 270635 - protein, 45 aa, Zea mays
  Clone ID: MRT4577_178417C.1.pep
FLGHSIRSWTTNETLPLACLSPKWFSALRVSSLALCTAASSSTGD

SEQ ID NO: 270636 - protein, 123 aa, Zea mays
  Clone ID: MRT4577_178418C.1.pep
PVSSVLPTLRSTSSYHFQSESTLTKGIEAQKMSSFTEKLTALAEHVAYPNKSENPGTPGTRCVPWGSSSRPRTINRDLGPPARREHRSSNQESGRLRSWNGRWSSTKSTSSTRASSRAFSPRS

SEQ ID NO: 270637 - protein, 77 aa, Zea mays
  Clone ID: MRT4577_178419C.1.pep
NVSLHRQLTGCLPLKEAKTCRNPGTPKRPPCYQLHLLSTENNGYNLGGGGVVKQGGVPFNVLSKCPVWLKGTNCMWS

SEQ ID NO: 270638 - protein, 178 aa, Zea mays
  Clone ID: MRT4577_17841C.1.pep
MALLRAALAQPLSPRPALPVRHPPTSLTGSRFILDFSLPPHPGPGAPRREYPRIEATARRGARTESAKVRNRRLQKKFNGTATKPRLSVFCSNRQLYAVLADDHNKKILFYGSTLQKSICGDPPCGTVEAARKVGEELVRVCNELGISEVSYDRNGFARGDKMMAFEVPVSQHGFLPR

SEQ ID NO: 270639 - protein, 67 aa, Zea mays
  Clone ID: MRT4577_178420C.1.pep
CPLRPSTLLRRPPDSSLASAACTLCSSRETRVHRRRPREPRALGNPWSIPVLRRDPLMLRQPGMLHG

SEQ ID NO: 270640 - protein, 76 aa, Zea mays
  unsure (1)..(76): unsure at all Xaa locations
  Clone ID: MRT4577_178421C.1.pep
GAWCGLGRVVCCVGAACRCGAWCGAPRRLRVGARAPPWCPREVVVCWLPRRGDNRRSVCPSGDHGAAQGQRXGWWS

SEQ ID NO: 270641 - protein, 43 aa, Zea mays
  unsure (1)..(43): unsure at all Xaa locations
  Clone ID: MRT4577_178422C.1.pep
SFCNPIIAKMYQGAGXYMVGAVGMXEDAPAGRGGLGPKIEEVD

SEQ ID NO: 270642 - protein, 230 aa, Zea mays
  unsure (1)..(230): unsure at all Xaa locations
  Clone ID: MRT4577_178423C.1.pep
MGASGKWIGPVGALKAPEKAAGHKGGRKWRLWRSSSATSRASAGEGSALASESSSASADSFNSVLAAVVRAPPRDFLLIRQEWAAVRIQTAFRGFLARRALKALRGIVRLQALVRGRRVRKQLAVTLKCMHALLRVQERARERRARSSADGHGSQGQDALNGCASSTKDAMEQWCDRHGSVAEVRSNLHMKHEGAAKRERAIAYALSHQPRXSRQKGTPSSPANCVRSHD

SEQ ID NO: 270643 - protein, 150 aa, Zea mays
  Clone ID: MRT4577_178424C.1.pep
MATSAALSTAANPTQLCRSRAALGKPVKGLGLGMGRERASQRSITCQAASSIPADRVPDMEKRKLMNLLLLGAISLPTVGMVVPYGAFFVPAGSGNGGGGTYAKDKLGNDITVEEWLNTHGPNDRTLAQGLKVKNRYPRMRRMEDAMMSS

SEQ ID NO: 270644 - protein, 227 aa, Zea mays
  unsure (1)..(227): unsure at all Xaa locations
  Clone ID: MRT4577_178425C.1.pep
MATSAALSTAANPTQLCRSRAALGKPVKGLGLGMGRERASQRSITCQAASSIPADRVPDMEKRKLMNLLLLGAISLPTVGMVVPYGAFFVPAGSGNGGGGTYAKDKLGNDITVEEWLNTHGPNDRTLAQGLKGDPTYLVVEQDKTLATYGINAVCTHLGCVVPWNGAENKFIXPCHGSQYNNQGKVVRGPAPLSLALVHADVDDGKVLFVPWVETDFRTGQDPWWSA

SEQ ID NO: 270645 - protein, 132 aa, Zea mays
  unsure (1)..(132): unsure at all Xaa locations
  Clone ID: MRT4577_178426C.1.pep
PGGAQCXGXREXAAFFAXAPHETGRFCAICEVNXXNPYWGRGREHWPRAXGXIGHGRGPLPNSGNLNFRPPGGALGFDGLRGPGXGARDPLGAGKAAPPGWVNSGHRAGPPGGRAPPRARNGAPRGGGGQTP

SEQ ID NO: 270646 - protein, 549 aa, Zea mays
  unsure (1)..(549): unsure at all Xaa locations
  Clone ID: MRT4577_178427C.1.pep
CRCPACPSRRSRRRRSRSRQGRRRRRRGRPCRRWATRWRRVKEDGAADSASECRTSQTASRSDGFACAKVSDWARTLRKTSGSVAMSTRADFTESGKSSMCRASTASDISDESSCSSMSSATTKPHKGNDSRWEAIHVVKSRDKVLGLNHFRLLKKLGSGDIGSVYLSELSGTRSYFAMKVTGETSLASRKKLLRAQTEREILQSLDHPFLPTLYTHLESDKLTLFKTENCALGDLQTLRARHRGKHFCGQAAKFNVAEVLLALFYLHMFLIIYLYLXPENVNVGEDGHITLSDFDLSLHRLVGLTVIKSANPGLDALQRNNAAYCAQPACIEPSCIQPSCVAPTTCFGPRFFSKSKSKSKSKPKKEKSKPDGPNQENLFPELIAEPTDARSMSFVGTHEYLAPEIIKGEGHGSAVDWWTFGIFLYELLFGKTPFKGSGNRATLFNVVGQPLRFPESPIVSFSARDMIRGLLVKDPQHRLGYKRGATEIKQHPFFEGVNWALIRCASPPDIPKPLELECRPKQVPSANGKVAPVANQKGPDNYLEFEFF

SEQ ID NO: 270647 - protein, 227 aa, Zea mays
  unsure (1)..(227): unsure at all Xaa locations
  Clone ID: MRT4577_178428C.1.pep
MATSAALSTAANPTQLCRSRASLGKPVKGLGLSIGRERAQRSIACQAASSISADRVPDMEKRKLMNLLLLGAISLPTVGMVVPYGAFFVPAGSGNAGGGTYAKDKLGNDITVEAWLNTHGPNDRTLAQGLKGDPTYLVVEQDKTLATYGINAXCTHLGCVVPWNGAENKFICPCHGSQYNNQGKVVRGPAPLSLALVHADVDDGKVPFVPXWVETDFRTGEDPWWKA

SEQ ID NO: 270648 - protein, 226 aa, Zea mays
  Clone ID: MRT4577_178429C.1.pep
MATSAALSTAANPTQLYRSRASLGKPVKGLGLSMGRERAQRSIVCQAASSISADRVPDMEKRKLMNLLLLGAISLPTVGMVVPYGAFFVPAGSGNAGGGTYAKDKLGNDITVEAWLNTHGPNDRTLAQGLKGDPTYLVVEQDKTLATYGINAVCTHLGCVVPWNGAENKFICPCHGSQYNNQGKVVRGPAPLSLALVHADVDDGKVLFVPWVETDFRTGEDPWWKA

SEQ ID NO: 270649 - protein, 90 aa, Zea mays
  Clone ID: MRT4577_17842C.1.pep
TPPPFSLGGGFNPPAPWGGPPGGAGGFPVFGFSLNLQKIFFSFQKTPVLNPPFPPFLFGGGGVFPFFSIKNLLVYPAKRAVFFPFFGNFF

SEQ ID NO: 270650 - protein, 54 aa, Zea mays
  Clone ID: MRT4577_178430C.1.pep
IQFAFFLVLLSESKREVKKRTTILHRVLIAETVCLLLSFNSKLQGLEVELGSVN

SEQ ID NO: 270651 - protein, 226 aa, Zea mays
  Clone ID: MRT4577_178431C.1.pep
MATSAALSTAANPTQLYRSRASLGKPVKGLGLSMGRERAQRSIACQAASSISADRVPDMEKRKLMNLLLLGAISLPTVGMVVPYGAFFVPAGSGNAGGGTYAKDKLGNDITVEAWLNTHGPNDRTLAQGLKGDPTYLVVEQDKTLATYGINAVCTHLGCVVPWNGAENKFICPCHGSQYNNQGKVVRGPAPLSLALVHADVDDGKVLFVPWVETDFRTGEDPWWKA

SEQ ID NO: 270652 - protein, 331 aa, Zea mays
  Clone ID: MRT4577_178432C.1.pep
MLTHPNGVVRPSTKEPLFSFGVIADVQYADIPDGRSFLGVPRYYRHSIAVLRRAVERWNGERSVRFCINFGDIVDGFCPKDRSLAAVQAVVREFDGFRGGPTYHMLGNHCLYNLPRSELVSVLRMPSASPGRAYYDFSPWPGYRFVVLDAYDFSAVGWPRGHPVSAAARRFLEKRNPNHDKNSPSGLEGTDRRFVMFNGGVGEAQLRWLDGVLRRAERRGEKAVVCSHLPMHPGAASPTGLMWNYEEVMDVVRRHGGCVVACLAGHVHKGGYAVDDSGVHHRTLEAALECPPGTDAFGHVEVHPDRLRLVGSDRMASTEMLLSPSNELASA

SEQ ID NO: 270653 - protein, 226 aa, Zea mays
  Clone ID: MRT4577_178433C.1.pep
MATSAALSTAANPTQLCRSRASLGKPVKGLGLSMGRERAQRSIVCQAASSISADRVPDMEKRKLMNLLLLGAISLPTVGMVVPYGAFFVPAGSGNAGGGTYAKDKLGNDITVEAWLNTHGPNDRTLAQGLKGDPTYLVVEQDKTLATYGINAVCTHLGCVVPWNGAENKFICPCHGSQYNNQGKVVRGPAPLSLALVHADVDDGKVLFVPWVETDFRTGEDPWWKA

SEQ ID NO: 270654 - protein, 61 aa, Zea mays
  Clone ID: MRT4577_178434C.1.pep
TRRVRIKPLHKPPALILHFDQIREKGPCSQLRIPTSPQLPYSHTLPLVKIPNPATTVLPPY

SEQ ID NO: 270655 - protein, 172 aa, Zea mays
  Clone ID: MRT4577_178435C.1.pep
RRHGREVCMFLARCSQRRSHQSVDSWGHGHSRRRLARVPAATMALFAAIGGQPSCALMASVELIEGLGGLPVDGSPAATAAPRSTMLLPGSARGALSKGRPKKRISMLSGAACSTLHLPDVVLRRRRARVEVELLWLEGGGEEWIGRWEGEEGLAVGRNTRMAIREGTTAIY

SEQ ID NO: 270656 - protein, 146 aa, Zea mays
  unsure (1)..(146): unsure at all Xaa locations
  Clone ID: MRT4577_178436C.1.pep
TDWRRGLSHLEACPLCDQEQETAQHILTSCVFARLFWHNIMATFGMGHLTPSQNEXSFADLWRKVSNNVHKXERKGINNAIILEAWCIWRQRNRTVFEGDLPAVSKVQQSFLEELTCLVLTGAHHLSILGIIDTLRAVGLGSLDHM

SEQ ID NO: 270657 - protein, 145 aa, Zea mays
  Clone ID: MRT4577_178437C.1.pep
QIPSGLFSNHPTETGGYASFKTKEKRAARANQGSFGLKAGNPFLGYPNFFGFRVGRTGLPSFVAHPGGALLPAPLYRGGNGEPPPPANYGKMPQRFGPQTPYSYPGQWTGPLPGPTFGDPGRSLGQRFQFRPWGGLSQLQNRNHR

SEQ ID NO: 270658 - protein, 44 aa, Zea mays
  Clone ID: MRT4577_178438C.1.pep
HTQRETDHACKVMHPKSLGRSLLVSCLVHWCRCCFCQIVRGVNR

SEQ ID NO: 270659 - protein, 125 aa, Zea mays
  Clone ID: MRT4577_178439C.1.pep
QVKARLREAGLAPVPMIIFAKDGHFALEELAQAGYEVVGLDWTVAPKKARECVGKTVTLQGNLDPCALYASEEEIGQLVKQMLDDFGPHRYIANLGHGLYPDMDPEHVGAFVDAVHKHSRLLRQN

SEQ ID NO: 270660 - protein, 208 aa, Zea mays
  Clone ID: MRT4577_17843C.1.pep
MQTTTSSAAASPRPRARAPQSVVAELEGALLRSADTFPYFMLVAFEASGLPRFALLLALWPLLRLLELAGRRGLALRAGAFVATAGVPRAESGAVSRAVLPHGRRRSQLPAAWAAFGCEGTTLTRKAKRAMLARFAGPRRARRGAPGKHPWQSRVKAPLRLLLHGELRQARARGDELPPRGAPLPADGARVERLQPHLHKTCSTAGQQ

SEQ ID NO: 270661 - protein, 125 aa, Zea mays
  Clone ID: MRT4577_178440C.1.pep
MRALALTLPALVLAALLSCTPEVSAVRVPAATLADQTSNRRGASSPPAAAEQPTRKAASDDDAAAAAAAASSARASRLADASASWKAPAVAGGASYSPPPSAVFDPDRMSKRRVRRGSDPIHNKC

SEQ ID NO: 270662 - protein, 53 aa, Zea mays
  Clone ID: MRT4577_178441C.1.pep
CGRVPSGEVMTSSVDARLTGHGSARYALGEMPDWREVTESVCAWRRDALAATG

SEQ ID NO: 270663 - protein, 451 aa, Zea mays
  Clone ID: MRT4577_178442C.1.pep
PRVRPRVRWGTQATHPLPPKIVAQLLRDNGIKKVKLFDADQGTLSALAGTGIEVMVAIPNVMLDTMTDYDTAKEWVRRNVSRYNFDGGVTIKYVAVGNEPFLAAYNGTFDKVTFPALQNIQNALNEAGLGDTVKATVPLNADVYMSPKDNPVPSAGRWRADIADLMTQMVQFLSNNSAPFTVNIYPFISLFLNDDFPVDFAFFDGGAAPLVDPGSGVSYTNVFDANFDTLVAALKSVGHGDMPVVVGEVGWPTDGDKHATNAYAQRFYNGLLRRLAANAGTPARPNQYIEVYLFGLLDEDVKSVAPGNFERHWGILRYDGQPKYPMDLSGQGQNAMLVPARGVEYLPRTWCVVNTNAGNMDKLADNINYACTFADCTALGYGSTCGGMDSNGNASYAFNAFFQVQNQKEEACGFQGLAVPTQTDPSTAACNFTIQIATTSAGHRRPPTSKL

SEQ ID NO: 270664 - protein, 113 aa, Zea mays
  unsure (1)..(113): unsure at all Xaa locations
  Clone ID: MRT4577_178443C.1.pep
MLLMCGVFLALLSLQXERLSNYSLFCARTCIMGSFAVLYVYTLELYPAPSRXTGVGITSSLGRIGSIVSPLVIVGLLESCRRKEAVFVVDLVLFLAGVACALLPRETKGCQIQ

SEQ ID NO: 270665 - protein, 100 aa, Zea mays
  Clone ID: MRT4577_178444C.1.pep
MRCAAAGPSAHVTRCRFHEGVDELEVPVHACRGGQGELRVTIYGEKVTQVRRVGWGFRGNRAAVLPDGKVVDVMWDVHDWWFGGRGGGSAGSGALVHGEG

SEQ ID NO: 270666 - protein, 72 aa, Zea mays
  Clone ID: MRT4577_178445C.1.pep
PLAHILPQAFGAAAQSYQYLHYSGVQSIKLFDGSWSSLKVLLKSSKDDVAVGGGSRLADSSRRERHGRIGLG

SEQ ID NO: 270667 - protein, 146 aa, Zea mays
  Clone ID: MRT4577_178446C.1.pep
MSRRGDWVYENNGGTCVAIAGADYCVVAADTRLSVGYNILTRDHSKICELADKCALASSGFQGDIKALHKNLAARELLYQHQHNKRMSCPAMAQLLSNTLYYKRFFPYYAFNVLGGLDSEGKGCVFTYDAVGVYERTGYSAQGTGS

SEQ ID NO: 270668 - protein, 42 aa, Zea mays
  Clone ID: MRT4577_178447C.1.pep
LHPRVLPLILYVSTLSHSHLQLVKLNIPLNLQAIIILIIPLI

SEQ ID NO: 270669 - protein, 51 aa, Zea mays
  unsure (1)..(51): unsure at all Xaa locations
  Clone ID: MRT4577_178448C.1.pep
CDXXTSCFRIKVAMSCYKCLIFFEYLYLYCDIYTCTHTWASCFSCGTLVDH

SEQ ID NO: 270670 - protein, 63 aa, Zea mays
  Clone ID: MRT4577_178449C.1.pep
YPAALIQFLTTQHTYFYLQRLSYILQSTFIKKQPYTSILNTPISTNTTNLPHLQTLSNLYQIS

SEQ ID NO: 270671 - protein, 46 aa, Zea mays
  unsure (1)..(46): unsure at all Xaa locations
  Clone ID: MRT4577_17844C.1.pep
EGFLVLFXQKKKKKKKKKKKKKKKKKKKNKKKKKKKKKVLCVVTTA

SEQ ID NO: 270672 - protein, 170 aa, Zea mays
  Clone ID: MRT4577_178450C.1.pep
SKTTDWVVQWIKDHAAAGATAKKPVLHEEYGWTDKSTRIPTLSKWQKASLDLQVSDMYWQFGTSKFSYGKNHDDGNTIYLEDDEAQPLVYEHAAAVNAANGEAVTTKPTATATATYKPSTTLSTTSKPTISGGPSVPRYGQCGGASWTEHTVCASPYTCKEQNQWYSQCL

SEQ ID NO: 270673 - protein, 154 aa, Zea mays
  unsure (1)..(154): unsure at all Xaa locations
  Clone ID: MRT4577_178451C.1.pep
MASGSRGGGGSDFSVVVVGSDVAEANACFSDLEERQVVRVQGTDRARRTIVRVVGKFFPAPAIDGERLKKYVFYKLHTELPVGPFCILYMHSTVQSDDNNPGVSILRTIYEELSPEYKERLQVFYFLHPGLRSRLAIATLGRLFXSGGLYWKIK

SEQ ID NO: 270674 - protein, 76 aa, Zea mays
  Clone ID: MRT4577_178452C.1.pep
LFCYRLYWKIKYISRLEYLWGDIKKREVEIPDFVIEHDKVLEHRPLTDYGIEPDPLHLADVPAVGYSLGRYEDKWT

SEQ ID NO: 270675 - protein, 251 aa, Zea mays
  Clone ID: MRT4577_178453C.1.pep
MASGSRGGGGSDFSVVVVGSDAGAGAALLVPSDRHSWHDCLAEADACFSDLEERQVVRVQGTDRARRTIVRVVGKFFPAPAIDGERLKKYVFYKLRTELPVGPFCILYMHSTVQSDDNNPGVSILRTIYEELSPEYKERLQVFYFLHPGLRSRLAIATLGRLFLSGGLYWKIKYISRLEYLWGDIRKGEVEIPDFVIEHDKVLEHRPLTDYGIEPDPLHLADVPAEEVGYSLGRYEDKWTPEDRWYSGNYM

SEQ ID NO: 270676 - protein, 257 aa, Zea mays
  unsure (1)..(257): unsure at all Xaa locations
  Clone ID: MRT4577_178454C.1.pep
MASGSGGGSDFSVVVVGSDFAVDAGAALLAPADHEVWHDCLPVLAEADACFSDLEERQVVRIQGTDRAGRTIVRVVGKFFPGARXPPPVIDGERLKKYVFYKLRTELPVGPFCILYIHSTVQSDDNNPGMSILRTIYEELPPEYKERLQVFYFLHPGLRSRLAIATLGRLFLSGGLYWKIKYISRLEYLWGDIKKREVEIPDFVIEHDKVLEHRPLTDYGIEPDPLHLADVPAVGYSLGRYEDKWTPEDRWYSRNYM

SEQ ID NO: 270677 - protein, 838 aa, Zea mays
  Clone ID: MRT4577_178455C.1.pep
RGSGSASPRASASAERPGFNSAPVLMGNGVPAAVRGTGQVYLKLTSGKTLVLKDVLYVPSMSRNLISVSLLCRQGLKLVFESNKVVLSKFGTFVGKSYESGGLFRLSVLNNHSSYHVNVVCNNDSINNIWHSRLCHVNFEAIKRLSDMSLIPEYKHVKGVKCGICVQAKQPRKPFHTVEGRSTTPLELIHSDICEMNGIITKGGKRYFLTLIDDATRFCYIYLLRTKDEALEHFKIYKTKVENQLDKKIKRLRSDRGGEYLSNLFDEYCKECGIIHETTAPYSPQSNGVAERKNRTVCDLANALLQSSRMPDIWWGEAVLTVCYVLNRVPPRNREATPYEGFKGRKPNLSHIRTWGCLAKVNVPLPKKRKLGPKTVDCVFLGYAHNSAAYRFLVVRSETSEVTINIIMESRDVTFFESIFPMRDKEVVAPDGPSRTYSLPSSVHDQTPDLELRRSKRQRTEKSLGDDYIIYLVDEEPRSLTEAYTSPDAEYWREAVRSEMDSIISNGTWEITDLPAGCKPVGCKWIFRRKRRPDGTIEKYKARLVAKGFTQKKEEDYFDTYSLVARLPTIRALLALAAAYKLLVHQMDVKTAFLNGEREEEIYMQQPEGFVVKGQESKTDLEAIMETKVFLSKNFDMKDLGEADVILNIKLIKVLEGFSDANWISDSDQMKSTSGYVFTLAGGAVSWRSSKQSVSTRSTKEAELVALDSAALEAEWLRDLLSDLPMLAKPIPAVLVYCDNTSVLLKVNSRKDNQKYSRHIRRRLDSCRHARETGVITVDYIKSERNLADPFTKGLAQKPIQAACMGMGLVERYALNEVNAISREIVLQNFLNDFTYMS

SEQ ID NO: 270678 - protein, 44 aa, Zea mays
  Clone ID: MRT4577_178456C.1.pep
TQSRARQPPPPHVYTGLISKQKIWISPQVNKTPPLIGMRVRSKK

SEQ ID NO: 270679 - protein, 50 aa, Zea mays
  Clone ID: MRT4577_178457C.1.pep
IRPRVAKGRANIAEGRNSSPGSVKVGPSKTQRAQKYPARIEFGFASAPLC

SEQ ID NO: 270680 - protein, 81 aa, Zea mays
  Clone ID: MRT4577_178458C.1.pep
MAPSMISSSALSGGPWPLPASAGTRLLLQQHVLKEKYQEGEALPHCGANHHHHHGHHGGHGFVERETMAEEDFNTCTADVL

SEQ ID NO: 270681 - protein, 48 aa, Zea mays
  Clone ID: MRT4577_178459C.1.pep
LPVESFSCPRNTPSRFCHVRAYSVSSQSMWIEWDGGLNPNNPRRLEVP

SEQ ID NO: 270682 - protein, 105 aa, Zea mays
  Clone ID: MRT4577_17845C.1.pep
EQAGQCGHAASVADPLDRVLALEVDAEDPIRRMRRVLCSPKNKQLVVGPTPQDPRCPASSQRGRPAYDSKVNQNMGGEYADPVDTGQDSREHRRTEMAADEKLTR

SEQ ID NO: 270683 - protein, 55 aa, Zea mays
  Clone ID: MRT4577_178460C.1.pep
QCAIKKGPQPYTFNLFQVFSSVSIMLKNICISIAENKVFISCNQKMEFQFKERVK

SEQ ID NO: 270684 - protein, 65 aa, Zea mays
  Clone ID: MRT4577_178461C.1.pep
RGGFAFKSGVVVPERPFLLVPGCSRCLKKKKKKKKKKKKKKKKKKKKAKKKKKKKKKKYSALLPL

SEQ ID NO: 270685 - protein, 73 aa, Zea mays
  Clone ID: MRT4577_178462C.1.pep
SRPSPKPTLTDWLPDKYWEGPEFVHTLTNNLFQRKKYFFQNPKNGPPKKGTKHLVYWPGFPKKNRPPPKFRAY

SEQ ID NO: 270686 - protein, 156 aa, Zea mays
  unsure (1)..(156): unsure at all Xaa locations
  Clone ID: MRT4577_178463C.1.pep
KNKIFLHKXHTDQQGGFLTRGGPKKPPQNTKKHASGSKPGEKKNPRGQSGKKKGGPTAQGGEQKQGGKTKKPPGGKKWGEQQGVNHTGGGPEKETPPTQPKREKTKARGSGGTPSGHQESRAEQPENRTGNPESARNKVCGAGITHPGASSGLWAP

SEQ ID NO: 270687 - protein, 72 aa, Zea mays
  unsure (1)..(72): unsure at all Xaa locations
  Clone ID: MRT4577_178464C.1.pep
FEVWYWCEXXMVNLRSSPGLCGCGVXGICVSPPPPHFCVYIVYMKKGQKAPTCGDSLQTGKDISKEKPWYSS

SEQ ID NO: 270688 - protein, 63 aa, Zea mays
  Clone ID: MRT4577_178465C.1.pep
NTISNLIKRSITPTFTRIGIYAENAMLKRTEHINYLRLTSRLDTLLTRLLHACLDSRHRQIHS

SEQ ID NO: 270689 - protein, 70 aa, Zea mays
  Clone ID: MRT4577_178466C.1.pep
IRLEAATRQDFMHTPNRFWLVGKTLAITWDYIQPGAVRLPTKTALLLWRLDATNCPDMNLLALGTATDSH

SEQ ID NO: 270690 - protein, 104 aa, Zea mays
  unsure (1)..(104): unsure at all Xaa locations
  Clone ID: MRT4577_178467C.1.pep
HLIVPLSXPSRLTHQHRLFSLHHGRRPPPRRFVLLHRLGPFFSASVFTASTTYPLQLDWEAAGPGGTRGGDRPLIVLANAKAPKKAPPAEGARPPPRPRNKGAK

SEQ ID NO: 270691 - protein, 87 aa, Zea mays
  Clone ID: MRT4577_178468C.1.pep
RRALRIPARARTQASQRRRCWLRSLTRLSLRAHTTSIQAAAVDGYHHLPYMYHARCICHLQLMLLHKSIYHSMSRWRLRNIYIRSSM

SEQ ID NO: 270692 - protein, 117 aa, Zea mays
  unsure (1)..(117): unsure at all Xaa locations
  Clone ID: MRT4577_178469C.1.pep
GIDGRMHLQFLCIVLLQVQSVMLHTDDELMMADEQKKKKKKKKKKGGHSKSANKKTIPPTLGAFSRNSCPSPALPLVGRIPPPLWPFLGAPVSSPPLTLPRXLFSLGSLCCPPPLPP

SEQ ID NO: 270693 - protein, 55 aa, Zea mays
  Clone ID: MRT4577_17846C.1.pep
EKGLIYHTKEPDQMNLNLQQQRIFHTLHKTKKRKSAISIQTIACLFRASGLLLVC

SEQ ID NO: 270694 - protein, 71 aa, Zea mays
  Clone ID: MRT4577_178470C.1.pep
GVFQRGRIRPSKKRSFSDRIVCSTLEILASESENSTSRRLLRLTTSGSEIECIGDLIHAIYDDNPHVRDWH

SEQ ID NO: 270695 - protein, 126 aa, Zea mays
  unsure (1)..(126): unsure at all Xaa locations
  Clone ID: MRT4577_178471C.1.pep
LVSVAMLSYGLAYGRLVVFVNGVHQNRARVYSRNMVRXQINFARLLVKDIKIDIELVPKKSTLIKSMKEVDVNLKWIISSWVKDLIVQNRRRXFSAFGRFKVKLSRIXMGGAFRLELSKLNQVSSA

SEQ ID NO: 270696 - protein, 128 aa, Zea mays
  unsure (1)..(128): unsure at all Xaa locations
  Clone ID: MRT4577_178472C.1.pep
IKNYYSPPDFHKXYTNVSASLQLVRSTNRKGLSYRLRVNRFAHMSRXDVRATRLGTTHNCYVTLTGNHRMHSAVDALPETKDWMVDGMXSPNKNQAHSAXYFTVSTTGALEAAFTQATGKPIYLSVQQ

SEQ ID NO: 270697 - protein, 151 aa, Zea mays
  unsure (1)..(151): unsure at all Xaa locations
  Clone ID: MRT4577_178473C.1.pep
SSLEKLVLPITGXSSFELITKKENKEAQRRVXHVYVQGLYIRTKWSHIPITFSQDNLHIKDYPHRDPMVISCVIKXGFVMHNVLVDTDSVADIIFAKAFKQXQEPKYKIQDSTFPLCSFGGXQVMARGKLPMPITFGYVNNTRTEVINKIV

SEQ ID NO: 270698 - protein, 50 aa, Zea mays
  unsure (1)..(50): unsure at all Xaa locations
  Clone ID: MRT4577_178474C.1.pep
SILAPLSFGRHKLMTLPKKRPIQTKCLIQQXXTCFRWVLKKQPMTQIFPF

SEQ ID NO: 270699 - protein, 111 aa, Zea mays
  Clone ID: MRT4577_178475C.1.pep
EWADPGLQRPIQRDYRPQGASKSSTITASSSISSRTFCCIGLEDHVQNLSNVIHIYMDQDLNVATFVILGASVNNESIDIHEGLPELAMLESHTWEPYITCDFEGWTATTE

SEQ ID NO: 270700 - protein, 44 aa, Zea mays
  Clone ID: MRT4577_178476C.1.pep
KLWIEHLYELMDIAFTSFDLNLRHFNLCLNRLDRINAHTKSEHA

SEQ ID NO: 270701 - protein, 63 aa, Zea mays
  Clone ID: MRT4577_178477C.1.pep
KHKNRWCISTYCMNTVIYYTTDNKKGSVRCINHVSFLICNQLLGIRTIDSSSRKKINIKLIYT

SEQ ID NO: 270702 - protein, 78 aa, Zea mays
  Clone ID: MRT4577_178478C.1.pep
ITNRLCGGFLTPRVFKLVVESIGGFKKIYPPFGMEGAQGKVFVFFRTNVLGPPSYGNKKLGQPLKKGCISNKPVFFVS

SEQ ID NO: 270703 - protein, 65 aa, Zea mays
  unsure (1)..(65): unsure at all Xaa locations
  Clone ID: MRT4577_178479C.1.pep
MAAAYSSPVFQMLLLAALAGIITNTATFIITNICWFTVWHLDTXVVSGTQLMPVGTLTVNVPAGN

SEQ ID NO: 270704 - protein, 80 aa, Zea mays
  Clone ID: MRT4577_17847C.1.pep
LKFALSEDTFLGTFFFFFHFFHLHIFLSKYKNIRVSLYFVFFLLPTSISSYFIFTLIFKCKLVLMLIMSLTRCAYQLIIR

SEQ ID NO: 270705 - protein, 58 aa, Zea mays
  Clone ID: MRT4577_178480C.1.pep
AGGPRPEVQASQGDDVEEAGTACGGMDPRSYPGERRWPRDHALRRHRTEATAPRRRAT

SEQ ID NO: 270706 - protein, 92 aa, Zea mays
  unsure (1)..(92): unsure at all Xaa locations
  Clone ID: MRT4577_178481C.1.pep
SNGAPAWCSANGGASCGKEQRAGXSFTIHCAKPVDDEIMDVASLDKNLQDSLWGAGGQVEKLGDSVTISPEKIKVIDTSDAHFSKRDLNYFY

SEQ ID NO: 270707 - protein, 157 aa, Zea mays
  Clone ID: MRT4577_178482C.1.pep
MEIPRSLGAQDNEEEEEYDSVFYEDIEAPKFVDLTAPDAACPADDPSWFCLRVGCDQRHEHVDPEALHRSFVMRVMAARSPNVRLQKAISRRNQSSTLPKCPHSAPAKPPRTRMTRLSLATGAAEKAARAGLQGHRIRSLRDSPVRTKAARVDAPSA

SEQ ID NO: 270708 - protein, 157 aa, Zea mays
  unsure (1)..(157): unsure at all Xaa locations
  Clone ID: MRT4577_178483C.1.pep
AARRPTXGPGGAXRRTGEAGPRGGGXXXPGGGXTGXRATPRTGASGPXTRTGGRGPAXARXQAGPTATANRPERGAXXGQRELTRGRCRXGDQGSPRPGAAARGAEADCHPGPEGSRAREWAGAERSVVNSWWKEPLVFSEGGGKGPWRAARHGRGC

SEQ ID NO: 270709 - protein, 70 aa, Zea mays
  Clone ID: MRT4577_178484C.1.pep
FPLSISLYPPTLLFCGTTPIFLFGFTNYFCLVIMKVLVLIKKKKKKKKKKKKKKKKKKKKKSLYLPGRPL

SEQ ID NO: 270710 - protein, 224 aa, Zea mays
  unsure (1)..(224): unsure at all Xaa locations
  Clone ID: MRT4577_178485C.1.pep
MDSHNSAPPHVPEVTMDISSASGAAGNKVCRGAACDFSDASNTSKDSKERSASMKKLLIAVILCVIFMAVEVVGGIKANSLAILTDAAHLLSDVAAFAISLFSLWAAGWEATPQQSYGFFRIEILGALVSIQLIWLLAGILVYEAIMRLINESGEVQGSLMFAVSAFXGLFVNIIMAVLLGHDHGHGGHGHSHGHGHGHSHDHDHVNSEDDHSHHGDHXAGHVH

SEQ ID NO: 270711 - protein, 107 aa, Zea mays
  unsure (1)..(107): unsure at all Xaa locations
  Clone ID: MRT4577_178486C.1.pep
TRAPKATEENPRXEAQRGHXEEAERNQTGARDEGKKGQTYACWTAPRVRAAKPAESDADQQAATRFYPERKGEQEDDPKPAMRGPCLAVNSWLLGGRRSTCGRGATG

SEQ ID NO: 270712 - protein, 73 aa, Zea mays
  Clone ID: MRT4577_178487C.1.pep
FHSKNKIKNLYYNMGSVINRYYFDSLEQLPLSLCTYPFPLGSSLRTTCFSKKGFGSGLPIFHSRVSLNLEVTT

SEQ ID NO: 270713 - protein, 68 aa, Zea mays
  unsure (1)..(68): unsure at all Xaa locations
  Clone ID: MRT4577_178488C.1.pep
KKKKKKKKKKKKKKKKKKKKKKKKKKKKKXEKIKRKQNKKXKKWGRAFLKNPVFQTRFWDQKFFLWGT

SEQ ID NO: 270714 - protein, 107 aa, Zea mays
  unsure (1)..(107): unsure at all Xaa locations
  Clone ID: MRT4577_178489C.1.pep
MGIPVVVPVEADYSCYYSLDAPPRAAADAARAPSRAHVAAAGMSSTASYFAGMQLXDLAEVAAXAADRPKRAASEXGGALLCKSLLRLGVPELRVIAGVARLVFRPK

SEQ ID NO: 270715 - protein, 270 aa, Zea mays
  Clone ID: MRT4577_17848C.1.pep
MAMLLLASTLAPRVPVTRGSGSGTSAAHPAYADATAYGLAAASALEAGLEEYGGGRIVDITHAYRPELPFPGRDGLGAVTRLTESMANGSVNNVSELRMVVHSGTHVDAPGHMVQEHFVAGLGVDKLDLDVLNGPALLIDVPRDTNITAQAMESLNITQGIRRVLFRTLNTDRKLMWTKEIDTSFVGFTEDGAQWLVDNTDIKLVGIDYLSVAAFDHLISAHLVFLNRRDIIPIEGLKLDHVKTGVYMLHCLPLRLIGCDGSPIRCILIK

SEQ ID NO: 270716 - protein, 94 aa, Zea mays
  Clone ID: MRT4577_178490C.1.pep
IEHSPATAATAADYYPNSTKIPLGVPQALSPEHREEVASETILHLLPVTDLMPTRYDHEANSSDVATAGNRKNLHPRRERQQNGRAARSASKRS

SEQ ID NO: 270717 - protein, 64 aa, Zea mays
  Clone ID: MRT4577_178491C.1.pep
YCKAYAFESISSLAPVFSISLILIHAELFYRFDVGARMQISFVKSHKHVKNHPFVVCFPSVVSI

SEQ ID NO: 270718 - protein, 426 aa, Zea mays
  Clone ID: MRT4577_178492C.1.pep
MSSSMESSYLPATTESLAQAQEAKDASESISILYRVIQDPSSSADALRTKEVAITNLTNYLTKENRAEELRNLLTQLRPFFAVIPKAKTAKIVRGIIDAVAKIPGTSDLQISLCKEMVEWTRAEKRTFLRQRVEARLAALLLENQEYTEALTLLTSLIKEVRRLDDKLLLVDIDLLESKLHFSLRNLPKAKASLTAARTAANAIYVPPAQQGTIDLQSGILHAEEKDYKTAYSYFFEAFEAFSALEDPKAIFSLKYMLLCKIMVNQADDVAGIISSKAGLKYLGPDVDAMKAVADAYSKRSLKYFETALRDYKSQLEEDPIVHRHLSSLYDTLLEQNLCRLIEPYSRVEIAHIAEMIELPIDHVEKKLSQMILDKKFAGTLDQGAGCLIIFEDSKTEEIFPATLETISNVGKVVDSLYVRSAKIMA

SEQ ID NO: 270719 - protein, 91 aa, Zea mays
  Clone ID: MRT4577_178493C.1.pep
MEEMKARTTKFAAIVLVFAVVSHGLMSPAMGMLENKGAGGETTTMATARSAYKPTLGVGGGTAVDNHHAIPRDQYSSHGGDDGGSGGDTNN

SEQ ID NO: 270720 - protein, 426 aa, Zea mays
  Clone ID: MRT4577_178494C.1.pep
MSSSMESSYLPATTESLAQAQEAKDASESISILYRVIQDPSSSADALRTKEVAITNLTNYLTKENRAEELRNLLTQLRPFFAVIPKAKTAKIVRGIIDAVAKIPGTSDLQISLCKEMVEWTRAEKRTFLRQRVEARLAALLLENQEYTEALTLLTSLIKEVRRLDDKLLLVDIDLLESKLHFSLRNLPKAKASLTAARTAANAIYVPPAQQGTIDLQSGILHAEEKDYKTAYSYFFEAFEAFSALEDPKAIFSLKYMLLCKIMVNQADDVAGIISSKAGLKYLGPDVDAMKAVADAYSKRSLKYFETALRDYKSQLEEDPIVHRHLSSLYDTLLEQNLCRLIEPYSRVEIAHIAEMIELPIDHVEKKLSQMILDKKFAGTLDQGAGCLIIFEDPKTEEIFPATLETISNVGKVVDSLYVRSAKIMA

SEQ ID NO: 270721 - protein, 119 aa, Zea mays
  Clone ID: MRT4577_178495C.1.pep
IFREKSSPNPKEHKEEKDEQGHGEEGKADRKQHSQRGLSEYIQGSWWCALMRGGVQHGPMKLASIPKWEGFLTAGSTPYKSQAGRGRQAASTGARAGALYFFCASSASARGTNSAGGQG

SEQ ID NO: 270722 - protein, 78 aa, Zea mays
  Clone ID: MRT4577_178496C.1.pep
PLGPGPGLGFRSWVLSFVSKGPGCSGPGVVFVLRGAGWVTKWMQLFASFGPALCWCVPLFGLGDRVWQTTRKARVLVA

SEQ ID NO: 270723 - protein, 55 aa, Zea mays
  Clone ID: MRT4577_178497C.1.pep
MIQVGLNDRLAIKGQLKCNDDDTIGDLKKAGVVHTVTRPEKIRIQMCYNIYTDHI

SEQ ID NO: 270724 - protein, 26 aa, Zea mays
  Clone ID: MRT4577_178498C.1.pep
MELNESKVRKASLQLQELARSLWRSR

SEQ ID NO: 270725 - protein, 151 aa, Zea mays
  unsure (1)..(151): unsure at all Xaa locations
  Clone ID: MRT4577_178499C.1.pep
MQRTCQGRGTRRKMRLTIGKLFSQLFTQIEMKILMVGLNAGRKTTMLYKLMLGQIVTTIPTISLTVETDEYTNISFTVCDAGGQDKIKPMSRPYLQNTQRIIHCVNSNDRNRDGEPRDELHKMLHKDQLHDALLLXFANEQDLPNDLTAAE

SEQ ID NO: 270726 - protein, 61 aa, Zea mays
  Clone ID: MRT4577_17849C.1.pep
MTCKSLGQKGATCPGSFLHAWRRQQHACTETCKNCEREFMDGTGVSLIQNTGGSNCSLGGL

SEQ ID NO: 270727 - protein, 46 aa, Zea mays
  Clone ID: MRT4577_1784C.1.pep
PLFKMYNAYPFMPLKMNASELICLNYSMHIFRGSTLLCCDYEKTIA

SEQ ID NO: 270728 - protein, 104 aa, Zea mays
  unsure (1)..(104): unsure at all Xaa locations
  Clone ID: MRT4577_178500C.1.pep
IVGLKSTDGRLEFVHSSKAMGKKKKGFCWTSSIGGMWGGGELGVGEAREGCFLFPGEREGLCFFIRGVLVKKXLPFFGVXKTKNLIKSTIWCFFVVGVMRKRVR

SEQ ID NO: 270729 - protein, 136 aa, Zea mays
  unsure (1)..(136): unsure at all Xaa locations
  Clone ID: MRT4577_178501C.1.pep
MAVTDAVLLRMDDPLLHISAGVDDAFLTKNDIKMXNAILAGQKNLPMNEKLTRKXNDEYIARELPHNSIQVAQWMXELSGATMYMICIVNDNIVEKMNNNAQDVRATDHYYNDDTAPTDTCAVCXVVAGEMSLIAN

SEQ ID NO: 270730 - protein, 85 aa, Zea mays
  Clone ID: MRT4577_178502C.1.pep
KREGMSDINELYSEKERLRDLRHWVSYRGQTLSRTVRGMMYYYEALKMLTFLDSASEHDLKTGSRELATMGSSRIGSSRHDGVAG

SEQ ID NO: 270731 - protein, 113 aa, Zea mays
  Clone ID: MRT4577_178503C.1.pep
SETPSHIIFHCPFARQFWSSIGFSVADDLGTQDLPNISRPDRLPGAEFNSFVLLCCWQLWKRKNGVGFRQDHATLVTTLHSCASEAKAWAFRHNRKEAQVLGAWLLAFSNPIM

SEQ ID NO: 270732 - protein, 60 aa, Zea mays
  Clone ID: MRT4577_178504C.1.pep
PKTGVNFVHRVFSSAILKFPLGLFQLVFLKKIKWVCLVQSPKNPAVYRGGHNIMGPFFCS

SEQ ID NO: 270733 - protein, 99 aa, Zea mays
  unsure (1)..(99): unsure at all Xaa locations
  Clone ID: MRT4577_178505C.1.pep
ASKLCDPDAENVFKAXRKAGVKTAVVSNFDTRLRPLLQALKCDHWFDAVAVSAEVCLPVLSFLLLMLETDGLVVEILYLLHSMLSCLYYVLLLPSATVT

SEQ ID NO: 270734 - protein, 108 aa, Zea mays
  Clone ID: MRT4577_178506C.1.pep
LSPPLSWVPSPRRRLRPRCAARTPPHLDFLLLVTSSPTTLPPSFASNKRIAIAYLLAAVCEIWLKGDDDVDSGYGLLRRYRYQLFVGLVLSIAYSILLYGIYVPDCEY

SEQ ID NO: 270735 - protein, 46 aa, Zea mays
  Clone ID: MRT4577_178507C.1.pep
WILPKKKKKKKKKKKKKKKKKKKKKKRKKKKNKELEKTHMSDANWD

SEQ ID NO: 270736 - protein, 95 aa, Zea mays
  Clone ID: MRT4577_178508C.1.pep
LAATHVPILVEYREDPWSHTEVHLRRILMRLVSRQGTNTGHRVRRAIHDLLMLTHMYDLLALAILLRDNLDVMMSHVNKPVTAQMDYLMTESHCY

SEQ ID NO: 270737 - protein, 125 aa, Zea mays
  unsure (1)..(125): unsure at all Xaa locations
  Clone ID: MRT4577_178509C.1.pep
MSKSHSESAKDAISQIVGDAMEKNTKFTETVQLQIGLNNYYPQKDMRFSGSVKLPHILRPKMKVSMLGDAQHVXEAAKMLLDYIDVEALKKMNKNKKLAKRLAKMYHAFLAXKAIIKQISRLLGS

SEQ ID NO: 270738 - protein, 60 aa, Zea mays
  Clone ID: MRT4577_17850C.1.pep
AAGTTRRHLGPHLRPRTRSCAMSPSKLTRRPRRSSRRISRYLDMCLVHLTIYCTYDRLKI

SEQ ID NO: 270739 - protein, 154 aa, Zea mays
  unsure (1)..(154): unsure at all Xaa locations
  Clone ID: MRT4577_178510C.1.pep
HRPGRAEKKKKNKKKPKFFSYISTKLFGEWVNNATIFPNHSQAPIPSIFSPYLTSIITPVCENPXLQPYMLKHALSPSNIPLSTSAFQQLPALSKGPPLVPTITAQQLEQLMLPAINQVIKANLSPYYPQQHLLTFNQXITLNPAVYSQLQLLP

SEQ ID NO: 270740 - protein, 294 aa, Zea mays
  Clone ID: MRT4577_178511C.1.pep
RAGNIGLSGSLERPRDDPTSIRSSQNYVSKSDPEGLSNFGIEGMSPELVKTATDMIGSMKPEELQKMFEVASSLNSTSSAGPNLGPNMPEMSPDMLKMASDMIASMPPDDVQKMMSFASQMGGPGGAPRSSENINFGPSVRATTSNSARGSSSQPVLENPDELSDDQRMSQSSSSLPPSTADMQETMRNSMKDPAMRQMLTSMMKNMSPEMMANMSEQFGMKLSKEDAAKAQQAMSSLSPEDLDRMMRWMERAQKGVEVAKKTKNWLLGRQGLILAIVMLILAFILHQFGFIGR

SEQ ID NO: 270741 - protein, 38 aa, Zea mays
  Clone ID: MRT4577_178512C.1.pep
AREAYIMITLRARNNITKGFISISKYVCNINIYHLVNF

SEQ ID NO: 270742 - protein, 94 aa, Zea mays
  Clone ID: MRT4577_178513C.1.pep
LPHHVLVLFQIHRPSVVYQRAKDSWGVGTSLLLASVSQCAWRTVSPFVRAVSVAPDRIAVACSCTTSTPPGRAAPRSASCRWRSAECRRRPYAW

SEQ ID NO: 270743 - protein, 71 aa, Zea mays
  unsure (1)..(71): unsure at all Xaa locations
  Clone ID: MRT4577_178514C.1.pep
GICVHTSTEVPLVXLFKSGRGVYNPRSMLSSMSRNSYACRNPPIQPSYISAFACPWKRGWRHLYSSASCCP

SEQ ID NO: 270744 - protein, 89 aa, Zea mays
  unsure (1)..(89): unsure at all Xaa locations
  Clone ID: MRT4577_178515C.1.pep
IYSKIRGGVLAYSKIRRRVVAAPPRPASEAAGGVRLIXVARGAGERPIVFVPLKRFADAGRTTAAPFLFLPAAALPPAPYYLLPAYCIL

SEQ ID NO: 270745 - protein, 50 aa, Zea mays
  Clone ID: MRT4577_178516C.1.pep
LIKLNFMFIEIRSMDSLSRIRTICIDYCICRIRINTTCFLSKKKKKKGAA

SEQ ID NO: 270746 - protein, 115 aa, Zea mays
  unsure (1)..(115): unsure at all Xaa locations
  Clone ID: MRT4577_178517C.1.pep
AQEPXXKQAPTXRTXTTRVSKKATTXDASHKREQPPQATRPTTTXAEAAPRAPPTRNFKNKSPAPDRARXQKDSNTTREXSHPLGEIFSHRSGAEASIWFVICVTLLFTSCLCSA

SEQ ID NO: 270747 - protein, 149 aa, Zea mays
  Clone ID: MRT4577_178518C.1.pep
LPRNHKRCPLVAVTILAVDQSSLFTIQTRAASATHLLLLCHRGIRILTLAADLQSTRDMPAADELPATVARCQRRAMCCASVMTLQLQAATIVKRLGLSLMIMHMNYLYNRRIQRHGMYRTDSGAGGLPAWNSAVGCMRHGGTAWHAGY

SEQ ID NO: 270748 - protein, 115 aa, Zea mays
  unsure (1)..(115): unsure at all Xaa locations
  Clone ID: MRT4577_178519C.1.pep
TESNRIQAMAASSISVXPSFNFTAGSRRRRRARRASTGDGRNAAEEALLGRAPGLGGGGPRWPRPPPRGRGRGPFLFPLGIGFVFRSRRGGCWELGTRNGRARPGFIWQGLIXTG

SEQ ID NO: 270749 - protein, 91 aa, Zea mays
  Clone ID: MRT4577_17851C.1.pep
AAFEKFLQDRIKIEGKVGVLGDSIPIPRDAAQLTVPSKIPISKRYLKYLTKKFLKKQLLRDYIRVIARSKNGYFLRYFNFPNNNEEEEADA

SEQ ID NO: 270750 - protein, 58 aa, Zea mays
  Clone ID: MRT4577_178520C.1.pep
IHGEEITLLGEYCPGCKMLLLYPCPHAAAEPPPRKHDQSFLLHRRSKYHHYLQEKEGY

SEQ ID NO: 270751 - protein, 168 aa, Zea mays
  unsure (1)..(168): unsure at all Xaa locations
  Clone ID: MRT4577_178521C.1.pep
NSTCPAPRRSAVSLSPSSPPHPGTHALVFSCMGAAYGTAKSGVGVASMGVMRPELVMKSIVPVVMAGVLGIYGLIIAVIISTGINPKAKPYYLFDGYAHLASGLGWGLGGLAXAGMAIGIVGDAGGRANAQQPKVVGGMILILIFAGALGLYGLIGGIILSSRGGQSR

SEQ ID NO: 270752 - protein, 129 aa, Zea mays
  unsure (1)..(129): unsure at all Xaa locations
  Clone ID: MRT4577_178522C.1.pep
MSSAFSGDETAPFFGFLGASAALVFSCMGAAYGTAKSGVGVASMGVMRPELVMKSIVXHLSSGLACGLAGLAAGMAIGIVGDAGVRANAQQPKLFVGMILILIFAEALALYGLIVGIILSSRAGQSRAD

SEQ ID NO: 270753 - protein, 242 aa, Zea mays
  Clone ID: MRT4577_178523C.1.pep
MPLPGGRVKQYLSRPTSQRRVPLAFFPTPPYPGTHALFRSDRQVQSRAEVRNLERSRRCPFQRGSRGSTGSGSSKGEMSSAFSGDETAPFFGFLGASAALVFSCMGAAYGTAKSGVGVASMGVMRPELVMKSIVPVVMAGVLGIYGLIIAVIISTGINPKAKPYYLFDGYAHLSSGLACGLAGLAAGMAIGIVGDAGVRANAQQPKLFVGMILILIFAEALALYGLIVGIILSSRAGQSRAD

SEQ ID NO: 270754 - protein, 165 aa, Zea mays
  Clone ID: MRT4577_178524C.1.pep
MSSAFSGDETAPFFGFLGASAALVFSCMGAAYGTAKSGVGVASMGVMRPELVMKSIVPVVMAGVLGIYGLIIAVIISTGINPKAKPYYLFDGYAHLSSGLACGLAGLAAGMAIGIVGDAGVRANAQQPKLFVGMILILIFAEALALYGLIVGIILSSRAGQSRAD

SEQ ID NO: 270755 - protein, 214 aa, Zea mays
  Clone ID: MRT4577_178525C.1.pep
MPATVAITLDLGCCRCKTKIHKILCCLQQRCGFVFDKVVYDKDKVLVSGTFDAMDLVCKLRCKAGHFATKIEIVPPPPPPPQQKKDPPPAQTAPAAAVGSPQQPVVTSNRPDPPPTCTKALIPYPCPYPYPYPLPCPSPQPRSCHCHSCKPPPCPTPPPPPPRPCPTPPPPPLPCPPPVSVCKCPAWTPCQCRGHPWVVCCEENLQPDGPCAVM

SEQ ID NO: 270756 - protein, 96 aa, Zea mays
  Clone ID: MRT4577_178526C.1.pep
RGGSVGSFYLSSLQGQYVSRSPETSTGARIDEHQYHLIRCCSASSTLAMVLSPDLWTSDWMTCSRRFSSQHDLVGSIPACRDVYGNAVPHDLVVGV

SEQ ID NO: 270757 - protein, 86 aa, Zea mays
  Clone ID: MRT4577_178527C.1.pep
ASRTLGAPRPSAVAEFDLLPKYGLPNRAHPGLRLLLQLRRGHGRLRDTRREHLTSTVGYHLVHYERTLYGKLYRGGIYDLCGAEEQ

SEQ ID NO: 270758 - protein, 162 aa, Zea mays
  Clone ID: MRT4577_178528C.1.pep
MATELCPVYAPFFGAMGCTCAIVFTCLGASYGTAKSGVGIAAMGVLRPDLIVKNIVPVIMAGIIGIYGLVVSVLISDGLRQDLPLYTGFIQFGAGLSVGLAGLAAGFAIGIVGDAGVRGTAQQPRLFVGMILILIFAEVLGLYGLIVALLMNSKATQDAVCA

SEQ ID NO: 270759 - protein, 259 aa, Zea mays
  Clone ID: MRT4577_178529C.1.pep
MANPLQTGAHRALARLRTGHRDPWQTPSRPQLPPHRQTRAKNVWVSFLLPVYSSKPYASSPTPCTTSSISHVEPLPPEAAATSTRLCPVRYPDLRSLDCDGVKTRKESEVKRDSYVSYVVGIADSSDECFWCPKKVETIFVSLPVLCLAKEHVVLLSKICTIDVEHVDVKDFALELLPKMWRTYPEDDGVIKWIFVQRMSSNKNTNLVLDSKKALASNSHGSKSCLETIAVFILDYLYLSLSVEDLFSNASRTRQHRKC

SEQ ID NO: 270760 - protein, 60 aa, Zea mays
  Clone ID: MRT4577_17852C.1.pep
AAGCRRESWRYSSWVKKTIDGDLLPPPPLSLLLLQLGVSESQCTCVRTTSKGHQRTRPPA

SEQ ID NO: 270761 - protein, 91 aa, Zea mays
  unsure (1)..(91): unsure at all Xaa locations
  Clone ID: MRT4577_178530C.1.pep
MQIFAKTLTDLFITLQNQSTPSVYNIXATIHHKQYIPPNQXRLIFSLNHLXDFRTLSPYIIHNDITLHLLLHLIPTMHNFPNTLTNNTITL

SEQ ID NO: 270762 - protein, 52 aa, Zea mays
  Clone ID: MRT4577_178531C.1.pep
VMYSACLRRIGVQVSVMIASEAIHGINFIIFIWVWGVSLPVTMRVIQSEFVL

SEQ ID NO: 270763 - protein, 91 aa, Zea mays
  Clone ID: MRT4577_178532C.1.pep
SKDSPRPEERRGSRQHSKLRGLPARIVVCSGDRSHERGPSSMLSDNWQVERSERRAACRLSRRRERLGMLVDSECIGRVDGVLGSRLNTGE

SEQ ID NO: 270764 - protein, 432 aa, Zea mays
  Clone ID: MRT4577_178533C.1.pep
MGEGRAGDGLIKLFGKTIPVPETAAVGEAAKDIQQSGGSGSGTTDPKGQENNVQDSTGSPPQQEVADTEDSSADKQQGEAGNPKEKLKKPDKILPCPRCNSMDTKFCYYNNYNINQPRHFCKNCQRYWTAGGAMRNVPVGAGRRKSKSASATSHFLQRVRAGLPVDPLVCAAAKTNGTVLSFGSAMSSLDLTEQMKQLKEKLVPIAGDERSVGSRTQGPSAKAEDPDRKENVTADKSARVVQHPCMTNGVAMWPFSCAPPVPASACYGPGSIAIPFYPAAAAAAAYWGCMVPGAWSGAWPPHSGQSETGSSITSASPAASTKSNICFTPGKHPRDRDEEGGAKGNGKVWVPKTIRIDDVDEVARSSILSLIGIGGDKAGKDGGRGCKLARVFEQNEEAARTATPHSAAISGLPFLQGNPAALSRSLTFQEGS

SEQ ID NO: 270765 - protein, 664 aa, Zea mays
  unsure (1)..(664): unsure at all Xaa locations
  Clone ID: MRT4577_178534C.1.pep
MAAKLTRLHSLRERLGATFSSHPNELIALFSRYVHQGKGMLQRHQLLAEFDELFESDKEKYAPFEDILRAAQEAIVLPPWVALAIRPRPGVWDYIRVNVSELAVEELTVSEYLAFKEQLVDEHASSKFVLELDFEPFNASFPRPSMSKSIGNGVQFLNRHLSSKLFQDKESLYPLLNFLKAHNYKGTTMMLNDRIQSLRGLQSALRKAEEYLVSIPEDTPSSEFNHRFQELGLEKGXWGDTRKRVHDTIHLLLDLLEAPDPASLEKFLGTIPMMFNVVILSPHGYFAQSNVLGYPDTGGQVVYILDQVRALENEMLLRIKQQGLDITPKILIVTRLLPDAVGTTCGQRLEKVIGTEHTDILRVPFRTENGILRKWISRFDVWPYLETYTEDVANELMREMQTKPDLIIGNYSDGNLVATLLAHKLGVTQCTIAHALEKTKYPNSDIYLDKFDSQYHFSCQFTADLIAMNHTDFIITSTFQEIAGSKDSVGQYESHIAFTLPDLYRVVHGIDVFDPKFNIVSPGADMTVYFPYTETDKRLTAFHSEIEELLYSDVENDEHKFVLKDRNKPIIFSMARLDRVKNMTGLVEMYGKNAHLKDLANLVIVAGDHGKESKDREEQAEFKRMYSLIEEYKLKGHIRWISAQMNRVRNGELYRYICDTKGAF

SEQ ID NO: 270766 - protein, 60 aa, Zea mays
  unsure (1)..(60): unsure at all Xaa locations
  Clone ID: MRT4577_178535C.1.pep
MAVTITWVKARQIFDSRGNPTVEVDVGLSDSSYARGAXVPVGHALGIYDALELRDVLLLF

SEQ ID NO: 270767 - protein, 79 aa, Zea mays
  unsure (1)..(79): unsure at all Xaa locations
  Clone ID: MRT4577_178536C.1.pep
KPXTGKTITXXEVESSDTIDNVKAKIQDKEGIPPDQQRLIFAGKXLEDGRTLGDXNIPQERILPLPLRFSPGTQMFATP

SEQ ID NO: 270768 - protein, 71 aa, Zea mays
  Clone ID: MRT4577_178537C.1.pep
GLIRLTENQKRYMSPKLPDRRRQQDQYQGPRRGHHPTPTFRSFKARTKGYSSDFNNWQYEFHLSWTLISSY

SEQ ID NO: 270769 - protein, 73 aa, Zea mays
  Clone ID: MRT4577_178538C.1.pep
FLFFFFLFFSFFVVGFHLYFSFFKTQKSPKPFGFELNSPPGQEGLFKYFGAVPLFLQLIKKKGLTPTGAFTFL

SEQ ID NO: 270770 - protein, 67 aa, Zea mays
  Clone ID: MRT4577_178539C.1.pep
AGRGDHVRHGPRRSRCCPQVIRGRRPIGKGRQIAFLSPCCMHAWISGSCVINKCIVITFTFFVHWGT

SEQ ID NO: 270771 - protein, 56 aa, Zea mays
  unsure (1)..(56): unsure at all Xaa locations
  Clone ID: MRT4577_17853C.1.pep
HQQNLSSRLLCFPRRELYLSLRGIWFVLRLGVLXXCFVSLNALPPPKKKKKKXXXX

SEQ ID NO: 270772 - protein, 93 aa, Zea mays
  Clone ID: MRT4577_178540C.1.pep
FPYQAWAPAKGSQTHLRGRPHLKPPIHTQSCAQGHSNLLGGSKLIEQGSPECDGGERPLLWTSWSISRLMRRSLHRRPFSSPSTRRRTPWRRP

SEQ ID NO: 270773 - protein, 53 aa, Zea mays
  Clone ID: MRT4577_178541C.1.pep
PLIRHSSISLMVLRRSSAKRTAKLVTHVGYYVCTIIISETIVVLAELNSKGFV

SEQ ID NO: 270774 - protein, 41 aa, Zea mays
  Clone ID: MRT4577_178542C.1.pep
KVGVTIFVPIVVTISHLSKYSLSSLNKVYCHFYHTLRYLDE

SEQ ID NO: 270775 - protein, 37 aa, Zea mays
  Clone ID: MRT4577_178543C.1.pep
PAGCSNAAVLALHCCGAGFSATGTYAANDPAPQPLTA

SEQ ID NO: 270776 - protein, 151 aa, Zea mays
  unsure (1)..(151): unsure at all Xaa locations
  Clone ID: MRT4577_178544C.1.pep
MANASAAQTDGDTMPDSPLLSDDVSVAPQKAGKVRIKILLTALSHTDQYTWSDKDPKGLVPCILGHETAAIVESVXGEGITDVQSDDHVIACYQAGRTECMFCXSGKTNLCXKARLATGVGGMMNDTNSTVSVNGKPIHHFMGTXTFSQYT

SEQ ID NO: 270777 - protein, 57 aa, Zea mays
  Clone ID: MRT4577_178545C.1.pep
EAICVRLFAIMPHVEKGMCCKRIKICDATVFSESTLCNDAHCNVYRGHYIREITWHV

SEQ ID NO: 270778 - protein, 248 aa, Zea mays
  unsure (1)..(248): unsure at all Xaa locations
  Clone ID: MRT4577_178546C.1.pep
RSTQRSHDSHAMFASRTTYAHGRNXSRRNHVVSHXXRKTCNGPTTVYHACSASFVLLCKNAKVFARKLGSKCKGDKTCIWVAKTVVTNLVGPNKSLVXDPSLNTLQVYAFGGSSWIIDSGCTNHMTEEKKMFTSYVKNMDSQDTIIFGDGNQGKVKGLGKIAITNEHSVSNVFLIESLGYNLLSVSQLCHMGYNCLFTNVGVSVFRRRDGSLAFKGVLDSKLYLVDVSKENVDLDACLIAKTNMGWLW

SEQ ID NO: 270779 - protein, 103 aa, Zea mays
  unsure (1)..(103): unsure at all Xaa locations
  Clone ID: MRT4577_178547C.1.pep
KFGEAIXWIKVGSQIFIEGELDYLGNPSLIHAHSILIIXACQVVLMGAEQGYRMTSGPLGXGKDPLYPGGXVEPARAADYSEAYAELXVKELKNGRLAMFYMF

SEQ ID NO: 270780 - protein, 48 aa, Zea mays
  Clone ID: MRT4577_178548C.1.pep
FAHTFADALVRVHGAGGPLPSSLKNASCITIGSDLITLTRRTLTLVGL

SEQ ID NO: 270781 - protein, 136 aa, Zea mays
  unsure (1)..(136): unsure at all Xaa locations
  Clone ID: MRT4577_178549C.1.pep
TTCPGTSCGTIRSLKHLQTLREVKANKDLAKSLGYLTQLRSLGITGVIQSHNADLWASIRKMTVLNKLAVATPGESNEVISFEELRPLKNLEKFYLTGKLAEGKLFPVFXNGFQKLKVLTMRWSRLTHDPLSSLWQ

SEQ ID NO: 270782 - protein, 213 aa, Zea mays
  Clone ID: MRT4577_17854C.1.pep
CRSDPLDSRPSHYLHFFQCGIMEDDSSWEALPIERIRIPAFNFRVISEASNGENELPVSLDAAVPDDILEKIFTFLPIASMIRSTAVCKRWHDIIYSSRYLWTHMLPQRPWYFMFTCNETASGYAYDPILHKWYDLELQGIDRSSCFVSSSCGLVCFMDNDNRNIISVSNPISKDWKRLLEPPGAKFPDYSTVAIKVDQVTHNYTGTLAKSKQ

SEQ ID NO: 270783 - protein, 53 aa, Zea mays
  Clone ID: MRT4577_178550C.1.pep
SSLYDAYSWSISGPFCFIYVSRCTLISYTFMIKFRTELVPCHITILIFWIMIM

SEQ ID NO: 270784 - protein, 104 aa, Zea mays
  unsure (1)..(104): unsure at all Xaa locations
  Clone ID: MRT4577_178551C.1.pep
VTHANPDPSWPRLSLPSQLGLFSWWRGGXSAAPRRASKPRRLRGSXTDVAASGTQGGGVVPRQRQAAVPSVFEFGSAAGSGAAVTLAGFCPVSVERRPCRWGLV

SEQ ID NO: 270785 - protein, 132 aa, Zea mays
  unsure (1)..(132): unsure at all Xaa locations
  Clone ID: MRT4577_178552C.1.pep
MATLMQFAKNEIXVFSLLTSAYXWHATGGAXNCYRAFAVELADAIPGCETSMGGTTIIGRLCAGTKIALVLSDTTTXLQLHNLLHCLPDRVXLRALADRLSAXGKCISCXDHVELSHPELANDTDDIDAHVL

SEQ ID NO: 270786 - protein, 185 aa, Zea mays
  Clone ID: MRT4577_178553C.1.pep
RYRWSISVATISYPASRSVVKKDIFCRPGRAGRDRPCDSYPNPAVAPAGTMSYYNPHGHGGAPPSSPCPSPSPPPPPPQGYPMDPYAERGMEHHHHHQYGPPPPQPMYASPYGQPPPPPPMYQQPYGQPVYASPYGQPPPPPAMYPPPYAQPPPPPPRKTGASFAEGCCAGFAAICCCCLMDACF

SEQ ID NO: 270787 - protein, 71 aa, Zea mays
  Clone ID: MRT4577_178554C.1.pep
LQILKSIVQLLYWILTEIHSDSLVNAPFHMRRHRTGRVRTMKGYRITALKPTTNILLSLPDFAQLMENPRR

SEQ ID NO: 270788 - protein, 102 aa, Zea mays
  Clone ID: MRT4577_178555C.1.pep
GLGVDRFVEGLFVPRVGIKFGFLEGIRALSVHRKGVFWPRSPGKRRKRVYDCHEWSKLLIVYPAPVYLLGRERLGSRWCTAASGSKEDPFFLLATGSLIRRP

SEQ ID NO: 270789 - protein, 44 aa, Zea mays
  Clone ID: MRT4577_178556C.1.pep
LYAKICFLTSFKDTCLINIVAGDLTPRKSFFYTYGVKYTTIPYM

SEQ ID NO: 270790 - protein, 105 aa, Zea mays
  Clone ID: MRT4577_178557C.1.pep
KSTMNLVVPPRTSKIPHVKQSSGINFDYIFSTITFYYILTIFNKFISYRFSFDLPMACDGSSVMSIEITLPIYIPNENCFLFDLWVKEGSIPQSSRRAWATGSAG

SEQ ID NO: 270791 - protein, 82 aa, Zea mays
  Clone ID: MRT4577_178558C.1.pep
AWKSCLDQTTTREVLYFGRTITKSTLETSLRAPESTSNLVIPRTSEEMLPHQRYGGFSLLLGSLSFSFTNNFRWRSVKRCHT

SEQ ID NO: 270792 - protein, 167 aa, Zea mays
  Clone ID: MRT4577_178559C.1.pep
MANAAPTPTQTRHVSRPIPTGLVPVAVLVAAAAGLLALLPSLAQAVWEVPHLFLLGAVISFGVFTQSQRNNDADGSGNGNAASAKDSPLAWNARYHPDDDPLVVVEDHAVPRGDDDDDDGLEGARERPLSLPVRRLKLKPAAASQSQESETGGDASDGFGEETDSCA

SEQ ID NO: 270793 - protein, 67 aa, Zea mays
  Clone ID: MRT4577_178560C.1.pep
AHSIKVRILQCKSNAGTAHRACGRGLPYAYKMYKYHRVRFYSTSLTLHGMVGEYVLNSETTVDDTCI

SEQ ID NO: 270794 - protein, 71 aa, Zea mays
  Clone ID: MRT4577_178561C.1.pep
QEGLVCQIMTYRSPAYTKWSQSAPGLSKGALWKASYPPGKAHRYRIRLITFTRSKGCLAGLMKAFSGNPEQ

SEQ ID NO: 270795 - protein, 68 aa, Zea mays
  Clone ID: MRT4577_178562C.1.pep
YFEPEVGNWPYLRFTYIPSRGGETGSVTMYITNITTTLEHAMALDSADFQIWPAEVTYTLRALIRHSG

SEQ ID NO: 270796 - protein, 83 aa, Zea mays
  unsure (1)..(83): unsure at all Xaa locations
  Clone ID: MRT4577_178563C.1.pep
LFNLILKILGLKVLGFSFLLMVTIMKPKFHLFLLTKGTIQPKIKNLXPVNLYLYMKLKVMGTALYIALNNSFGGGNALYIQTP

SEQ ID NO: 270797 - protein, 332 aa, Zea mays
  unsure (1)..(332): unsure at all Xaa locations
  Clone ID: MRT4577_178564C.1.pep
MAEVVDKLKDYDIKKEGEAEILLHKKNSVFFNPVQALAATGLRSLRYAREVEGLGKVVALDNDKASIEDCKRNIKFNGASATSKVEAYLVDARIHMLTHPKEFDVVDLDPYGSPSIFLDSAVQAVADGGLLMCTATDLAVLCGTNGEVCYAKYGSFPTKGKYCHEMALRILLASIESHANRYKRYIVPVLSVFMDFYIRVFVRVFTSASEIKNTPLKLSYIYQCVGCDSFHLQCLARTVQKKNNGVKHAPAIGPVVPQECSDCGKKFNVGGPIWSAPIHDQDWELHDVPLFFSLHNIAGTVKCTSPSLVTFRSAVLXXAGYRISSTHVNPLG

SEQ ID NO: 270798 - protein, 642 aa, Zea mays
  Clone ID: MRT4577_178565C.1.pep
MAEVVDKLKDYDIKKEGEAEILLHKKNSVFFNPVQANIFAPYNTNLRFLDPTRKTSIGVIKRVIRLKCCIPILSIERLVHNRDMSIAVLRTFVAKRKEEHEALVDKRNTSHKKNKQSETSNQNGEDASTGQQDEMDVVCEKELNKAEDQIDDLSKEATEPSWKVTRELKPPLVLEALAATGLRSLRYAREVEGLGKVVALDNDKASIEDCKRNIKFNGASATSKVEAYLVDARIHMLTHPKEFDVGVGVTIYMVMSLATDSKSEVSSIYYARVNLVLGISQWTEKSHVDLDPYGSPSIFLDSAVQAVADGGLLMCTATDLAVLCGTNGEVCYAKYGSFPTKGKYCHEMALRILLASIECVGCDSFHLQCLARTVQKKNNGVKHAPAIGPVVPQECSDCGKKFNVGGPIWSAPIHDQDWVLSTLTGVKSMKDRYPAYDKITSVLNTMSEELHDVPLFFSLHNIAGTVKCTSPSLVMFRSAVLNAGYRISSTHVNPLGIKSDAPWDVIWDIMRCWVKNHPIKEQPRDSPGTVILSKSPKLEANFSRAVAALSKAQTNKIKRFLPNPERHWGPKVRAGRKITSKHVSLLGPDAIKGAVNGGDCQKEGNGAEPDSTASEPEGIKDAEDEPSNKRQKTSDGEPASEP

SEQ ID NO: 270799 - protein, 304 aa, Zea mays
  Clone ID: MRT4577_178566C.1.pep
FDTTFSPLYIDTLLAFLFLWVLCKQKNNGVKHAPAFGPVVPQECSDCGKKFNVGGPIWSAPIHDQDWVVSTLTGVKSMKDRYPAYDKITSVLTTVSEELDDIPLFFSLHNIAGTGKCTSPSLVMFRSAVLNAGYRISSTSVNPLGVKSDAPWDVIWDIMRCWVKNHPIKEQARDSPGTVILSKSPKLEADFSRAVAALGKSGAKKTKRFLPNPERHWGPKVRAGRKITSKHVSLLGPDAINAAVNGGGGGDCHREGSGAAPDSSNTAPEPEELEDEPSNKRQKASGDGEPEGQKASDGEPASEA

SEQ ID NO: 270800 - protein, 604 aa, Zea mays
  unsure (1)..(604): unsure at all Xaa locations
  Clone ID: MRT4577_178567C.1.pep
MAEVVDKLKDYDIKKEGEAEILLHKKNSVFFNPVQVHNRDMSIAVLRTFVAKRKEEHEALVDKRNTSHKKNKQSETSNQNGEDASTGQQDEMDVVCEKELNKAEDQIDDLSKEATEPSWKVTRELKPPLVLEALAATGLRSLRYAREVEGLGKVVALDNDKASIEDCKRNIKFNGASATSKVEAYLVDARIHMLTHPKEFDVVDLDPYGSPSIFLDSAVQAVADGGLLMCTATDLAVLCGTNGEVCYAKYGSFPTKGKYCHEMALRILLASIESHANRYKRYIVPVLSVFMDFYIRVFVRVFTSASEIKNTPLKLSYIYQCVGCDSFHLQCLARTVQKKNNGVKHAPAIGPVVPQECSDCGKKFNVGGPIWSAPIHDQDWVLSTLTGVKSMKDRYPAYDKITSVLNTMSEELHDVPLFFSLHNIAGTVKCTSPSLVTFRSAVLNAGYRISSTHVNPLGIKSDAPWDVIWDIMRCWVKNHPIKEQPRDSPGTVILSKSPKLEANFSRAVAALRTAETARXKRFLPNPERQWGPKVRAGRKITSKHVSLLGPDAIKGAVNGGDCQKEGNGAEPDSTASEPEGIKDVEDEPSNKRQKTSDGEPASEP

SEQ ID NO: 270801 - protein, 210 aa, Zea mays
  unsure (1)..(210): unsure at all Xaa locations
  Clone ID: MRT4577_178568C.1.pep
YPPYPSPAAPPPAAYPSVSAPASAPPYSSYPADFAPAPSYPAYPPADLPHYAPPPAAPAPPQPYXLRAGAGATAPRPGSGSALFDDYGRSIGSAADRGGRGGSAASPKVVRAVPKAETSEDVRGGVQKFRVKLLPEGAGSPMDVLCQVGLDGIRMLDPNTGRTLRIYPLETVTRCDVLDSSIFAFWSKSSVDVXGKRIRXLKLNRYTSRT

SEQ ID NO: 270802 - protein, 42 aa, Zea mays
  Clone ID: MRT4577_178569C.1.pep
ATIDNINRCLMDVASRSRQTHSFYIHGFRVICRETGRLERRT

SEQ ID NO: 270803 - protein, 87 aa, Zea mays
  unsure (1)..(87): unsure at all Xaa locations
  Clone ID: MRT4577_17856C.1.pep
KKKKKKKKKKKKKKKKKKKKKKKKKKKKKKKKKKKKKKKKTKQRNNETKKXLKGNKKVHRFRRRAREGEGRNPPQFNWINSRMPFPF

SEQ ID NO: 270804 - protein, 500 aa, Zea mays
  Clone ID: MRT4577_178570C.1.pep
MHPSSGAGDYAPYYPPYPSPAAPPPAAYPSVSAPASAPPYSSYPADFAPAPSYPAYPPADLPHYAPPPAAPAPPQPYYPYEPAPAPPLPPSPHNPVPSPYPSLDRAGSYGYGSGPGSGYGQELYPPKPAGGWSDDGAYAYNGGDAPEPYGSRGTAPRPGSGSALFDDYGRSIGSAADRGGRGGSAASPKVVRAVPKAETSEDVRGGVQKFRVKLLPEGAGSPMDVLCQVGLDGIRMLDPNTGRTLRIYPLETVTRCDVLDSSIFAFWSKSSVDVEGKRIRLKSNSYTSNTILDTVTAATVQFKEMGESSISRSRAIADASKPAEQQNERKKNFLDWRNLMKPMNEEKDHWVPDEAVSKCTACAADFSAFNRRHHCRNCGDIFCDKCTQGRTPLTTDADAQPVRVCDRCMAEVTQRLNNAREVANRPIVHSHEDLAKKLQEAMDINKRSSSGTRSSDVSGKRMREVACPTCTVHLQVEVPASGSETIECGVCQNPFLVSAR

SEQ ID NO: 270805 - protein, 69 aa, Zea mays
  Clone ID: MRT4577_178571C.1.pep
AKQLHISFKKKKKKNEDPRRPAQVPVIHPPWFPASAALPKRHDTYIYIRVPSCCCSTTLLVHYIVRVHA

SEQ ID NO: 270806 - protein, 181 aa, Zea mays
  unsure (1)..(181): unsure at all Xaa locations
  Clone ID: MRT4577_178572C.1.pep
FFLETXPGWSRLAXXXRSSGAQCYYWIYWYHRAQQPARKEKVIALSHRXPRSTXTGRGAXXLXXAPGLXLLSXRGRXRVGTPXXYRXXVXXQRXVVLIVYXXCPLXLAPRXXVAPRAPLVRFSPRLAPPAGXXGFPRXXLHSXERXXRHXXGSPRLKGAXPLLPFRXKSKYXXVVAPGGRR

SEQ ID NO: 270807 - protein, 165 aa, Zea mays
  Clone ID: MRT4577_178573C.1.pep
PYAPLPGVDGHSQYGPPPVEVYVGEERDPDPPWYGKGSVPPCDGVVRYLQPPRWHGVGELDPPSDGVTGVIAVSGRSVPRETSCGVSSSGTAVPVFYQCTSLFCSTLLSLGRGPWTSDALANQGSCIEPGSAETTNAARMEMIFPLPTMCSMRAACPAVSFFSLL

SEQ ID NO: 270808 - protein, 57 aa, Zea mays
  Clone ID: MRT4577_178574C.1.pep
MYRRSFSFLTSVCRSWKPSPSLYFFFFRFCFVNFLFLLVLMKSRGDYYYYNYYYRPQ

SEQ ID NO: 270809 - protein, 41 aa, Zea mays
  Clone ID: MRT4577_178575C.1.pep
LSTGGLVSMSVHSALSVLSRPPPRSRLRMYMLSNLRRTRGR

SEQ ID NO: 270810 - protein, 121 aa, Zea mays
  Clone ID: MRT4577_178576C.1.pep
PLVDRERRRVASSSSSSMSMEVRSSRHHQEEATGNLMRPGSGSDYPPVMQRGGAPAAAAHRRQFQPIPAPFMSFRPPLADTPAPHHQGQLRFHGHGGPRPFHRPPPPPGSFPGAADGTAST

SEQ ID NO: 270811 - protein, 46 aa, Zea mays
  Clone ID: MRT4577_178577C.1.pep
TRSNDIVVLALRIRLLGNQRYLCLPAFNFHVFSLGEVPPYGRLPRH

SEQ ID NO: 270812 - protein, 64 aa, Zea mays
  Clone ID: MRT4577_178578C.1.pep
VEVPRDRDRDEDREGQATDSSLRSSPLICLNDATAAAHALLAIPTTYSLRIYLSTHNIEALPTR

SEQ ID NO: 270813 - protein, 105 aa, Zea mays
  Clone ID: MRT4577_178579C.1.pep
PNSRPRRLSFAVPIDSVIKIVDNFNKNGRVVRPWLGLKMLDLNPMIIAQLKEKSSTFPDVRKGVLVPMVTPASPAEQAGFRPGDVVVEFGGKPVESIKEVTKDNY

SEQ ID NO: 270814 - protein, 201 aa, Zea mays
  Clone ID: MRT4577_17857C.1.pep
MAGSAVTDDSAASTTGMRDDERSLSGESFSEWRSCERADSDTPSTSPPFWDSDGDDDDPGPKPSELFGRYTWRIENFSKEKKREMKSEPFEAGGYKWYILVYPQGCDVSNHLSLFLCVANHDKLLPGWSHFAQFTIAVANIDPKKMKYSDTLHRFWKKEHDWGWKKFMELSKIQDGFLVDDVLEIIAQVQVIRWLISFCSD

SEQ ID NO: 270815 - protein, 141 aa, Zea mays
  Clone ID: MRT4577_178580C.1.pep
SLTMTRGITASEAVRTVAPVLASRGTLRQRGRTYEEARVRRSTTADTAAATTTSTMTTTPATAPRLQISVPYKDINTCSLWRIMSVGRVFARQCYLITTAHRISTPNHDCLERLCLTVDVTRLHSCVVNVRLPTQILDESP

SEQ ID NO: 270816 - protein, 44 aa, Zea mays
  Clone ID: MRT4577_178581C.1.pep
LSYLLPILIYIQTSLCKQCSLQYKTVILGKSWIDCCRQFYKKQL

SEQ ID NO: 270817 - protein, 199 aa, Zea mays
  unsure (1)..(199): unsure at all Xaa locations
  Clone ID: MRT4577_178583C.1.pep
SFSCRYAAEIPIIRSSDRLIVRPIVHGSFVRSSDRSIVRPFVRPNNLFPAVMLPKFRSFVRSFDHSIVHRSFIVHIHRSSFVHTNYSPSLFTVTIYRYYLPLLLSLLFTVTFYHYYSPLLFTVTFYRYYLPLLFTVTIYRYFLPLLFTVTVYCYFLPLLFTVTIYRYFLPLLFTVSIHRYYSSIIRSPQISTTXSSCCP

SEQ ID NO: 270818 - protein, 61 aa, Zea mays
  unsure (1)..(61): unsure at all Xaa locations
  Clone ID: MRT4577_178584C.1.pep
VGRTXXQYVPRHPRVIGAGRPGLGGPLPPSLSRFLQLEQQALARAHGRPLSRHIGVSPYFL

SEQ ID NO: 270819 - protein, 97 aa, Zea mays
  Clone ID: MRT4577_178585C.1.pep
PSVLWGPAPQEGALQRCLPLVRVGVLIKTGFLTPPGRGGEFRKKKWGGRRAPFLVLPGQGFFWAPGGFLSPPPPVFGGKEVFFFFIKGKVEKGGRPF

SEQ ID NO: 270820 - protein, 81 aa, Zea mays
  Clone ID: MRT4577_178586C.1.pep
IPDKSKSIIIYFKILSNPCEIGITEQNLRLFRLAPDHVWIIVDCVGSNPNQIKILPNYFQSLLIHVRSRGLDEIKKSYGII

SEQ ID NO: 270821 - protein, 210 aa, Zea mays
  unsure (1)..(210): unsure at all Xaa locations
  Clone ID: MRT4577_178587C.1.pep
GRXKKKKKKKKKKKKKKKKKRGKKKKKKKKKKKKKKKKAQKAHTPRRTRGGAKPQPGGSPAPNLNPPPPETAKGGGCPHKRRPNFKKKTLLKAGKNPPTRGSQFGANKANPPGGSSAEKGPNKKTWGKRPAEVPWTDRNRFPSFGEKTAGLKDQGTKLLGFNEAENPDNRMGEGGLGGNQGQRKKKGVGGNLQKFQNFKEFGDKTRDHPK

SEQ ID NO: 270822 - protein, 42 aa, Zea mays
  Clone ID: MRT4577_178588C.1.pep
GFPPLALMMAPHIPALGGVFQDQVPRFRPHPCGVSAALPPHY

SEQ ID NO: 270823 - protein, 62 aa, Zea mays
  Clone ID: MRT4577_178589C.1.pep
GSLSPCSVLSQLRERPREARCISEVVEFIRYAPISRSDTPNPPNNYEARHSSGWSTGVKSTS

SEQ ID NO: 270824 - protein, 61 aa, Zea mays
  Clone ID: MRT4577_17858C.1.pep
LFFFFFRVETTCISHSCFIIQVEQTGSASPGVLLSLLLGFAREGVRRRAQGLKAPPSSVAA

SEQ ID NO: 270825 - protein, 275 aa, Zea mays
  unsure (1)..(275): unsure at all Xaa locations
  Clone ID: MRT4577_178590C.1.pep
GRLAVDVLLRQFWMRSGGVPDDQSXLGIXLEPVAAVYAVDGARVVAADFELSFTDLLHSPAGAVRLSLALRTGLVNTCEPFEAVVLGLGPAPMAVDLDHSRIEFTDLRVRVEQEKSASSDGDGSTSRNAAASTASTVSEEDRAFSSSAEAAQQPPDVEEATTASAPVSRRSPDTPTSRGGKAKAKADVDVLPSPAGDIVDVEAEQSAMQRQIMEMYVKSMQQFSESLAKMQLPVALGGGGGVVEKEETPDDKKVIERQQGKKDGARVFYGSRAFF

SEQ ID NO: 270826 - protein, 64 aa, Zea mays
  Clone ID: MRT4577_178591C.1.pep
NFYFFYFFLFYIFYFFKFFIILYIYLFLIFIVHTGNFISKIKVTRPSKNKDIHYLTRYELMEIK

SEQ ID NO: 270827 - protein, 58 aa, Zea mays
  Clone ID: MRT4577_178592C.1.pep
YNKYSFKLYSERLMTLTGLYWVWKYLIILDRLETLHYIEMVYALKYQILASQDSLFFY

SEQ ID NO: 270828 - protein, 36 aa, Zea mays
  Clone ID: MRT4577_178593C.1.pep
GSGGQNCCLGAITPVLLQVKSSCAPIMLTHVYAAAH

SEQ ID NO: 270829 - protein, 150 aa, Zea mays
  unsure (1)..(150): unsure at all Xaa locations
  Clone ID: MRT4577_178594C.1.pep
MDSESEEQGSSPETESDPPPSPSQLPLLLNPAYARCKSVVHDELRSFRVFLQWCALDHSTCAGRAASYAVFVALALLVPAAVSLSLRADTALSRASAFVIALPRVAXAPAXGLAVVSFAXLAAFFRRFGGLRXLLFLXGALRAPAFGRFA

SEQ ID NO: 270830 - protein, 46 aa, Zea mays
  Clone ID: MRT4577_178595C.1.pep
LSGVIIEKVDGNIDFRHVSFKYPSRPDIQVLSNCTLAIPSRKVLFA

SEQ ID NO: 270831 - protein, 452 aa, Zea mays
  Clone ID: MRT4577_178596C.1.pep
MATSPAASSSSAPTASAVAAATMAVEATDGPVLSVVSKRLRALRKKYNRITQMEESLAAGKTLNREQEEVLRSKPVVAALIDELERLRPPLASALAEELSSRPAPAPSAASSSDSDSSVQDLLALVYFGSLFDVKQQSDFVSLVYTRELERSSCLTYDYVGDDPEDSLAETDLNAVSALASLAALRPPAAAGVSHRDALQACAHHARLWLCRADEPIHPDSTITYAGVRAKLDRIMASGYFTAQLEMRTPLDLAAAVASFGAGGVQVQESMVVSPQAPEAVEESQAVEGHKNEKEDSQATEIYNDHPVVDSEHVEDEVLVHPTDEVPPAETEQEQETFDADVKDQEQKDQQFIQRRSYQNQRGGGRGGSRRGYPNGRGGRGGRGGGYQNGRGGYQNGRGGAGGYYYESGYYQPRNYNRGRGGRSGGGNSYYNSHGGGAQGHHPGSVELGANA

SEQ ID NO: 270832 - protein, 50 aa, Zea mays
  Clone ID: MRT4577_178597C.1.pep
TLYVLLQTTKGERRCNTSLLGYQNRNADGAWSTIISYIVISSKKKKKACP

SEQ ID NO: 270833 - protein, 61 aa, Zea mays
  Clone ID: MRT4577_178598C.1.pep
VSACHCAPETIGPFFFLPIGSGATQTRWFIKSELPGFLPGQSPPISLYYRCISAAYGARLL

SEQ ID NO: 270834 - protein, 136 aa, Zea mays
  Clone ID: MRT4577_178599C.1.pep
TREFAGSAWEALRHIRQAVDFLVISLKPMRTLREIHTDVCPALSIQQLERIVSMYWDDVNGTNTISAEFTSSLKSAVRDESNMATSFSILLDDDSSIPFSLDDITKTLPVIEVADDDFVPFVHENPSFAFLLQRGE

SEQ ID NO: 270835 - protein, 77 aa, Zea mays
  Clone ID: MRT4577_17859C.1.pep
FVGEQDWCCFLWALAEVVAFIPFCRRGLPQAGRSFHSDLGTVLHARGLSRCFSKVCFFIQFPSGFFSPIEITRPLFL

SEQ ID NO: 270836 - protein, 75 aa, Zea mays
  Clone ID: MRT4577_1785C.1.pep
CRRSHTYCHVVYPLAFTPQSASRNSVSMLTCNKRFLIMIMSMVLLPKRSLQHVSPIIVICPCVLAQSRHTQDQGQ

SEQ ID NO: 270837 - protein, 187 aa, Zea mays
  Clone ID: MRT4577_178600C.1.pep
VDRARVCMPRLMLVTFGSICVQGKAAIPVLPTWSLRVATQAVRRGCGMRPHCRARCGKRECTTGGLGGGTGEESETAFDPRRRRRTSHRVWASRSARGSSPCCSPESRMWCALVFAFSRNPSSLPRPGKRSAVINPPWPGPGEQSMVRTGRRRKAGVMYRHGARSNRQGHGDCTLTTESVCFLVLHP

SEQ ID NO: 270838 - protein, 66 aa, Zea mays
  Clone ID: MRT4577_178601C.1.pep
PRIRIPYVRVTDSPRSPFVCRNNWQGTQCVPNRSWQRTMLRTTERAGTNNERHQHEQDHDDVLQEH

SEQ ID NO: 270839 - protein, 125 aa, Zea mays
  unsure (1)..(125): unsure at all Xaa locations
  Clone ID: MRT4577_178602C.1.pep
IYSSYGHLRGTREQPLAPKIFHLFMVIGISEGAGTATIIGQCSQGPIATLIASNLSPTVSSVCENPILEPYRIQQGIEAGILPLSLLLLQQXSALLQELPLVHLLGQNIRAHQLQQLVLANLAGY

SEQ ID NO: 270840 - protein, 51 aa, Zea mays
  Clone ID: MRT4577_178603C.1.pep
SLQHRKDNCVSTMAGQIFWLPILPGLSGRAWSGTIFPQWSQAPIASFFSPY

SEQ ID NO: 270841 - protein, 35 aa, Zea mays
  Clone ID: MRT4577_178604C.1.pep
VTYGVANPCQSCHVPVDLTALVISASRVLQSAPVA

SEQ ID NO: 270842 - protein, 87 aa, Zea mays
  Clone ID: MRT4577_178605C.1.pep
AQVLGLPVAQAPTAMVTIMLLLMSMLMLLPPVAPPLETSPPEPWRSQIVGVLLNAMGNRQSYFLLPYQSPNSSIFFFFKTRTLFSLL

SEQ ID NO: 270843 - protein, 53 aa, Zea mays
  Clone ID: MRT4577_178606C.1.pep
LLCYYNETLRDLILNEGVHVRAKHAYILFCRGGGCLHCDEAYHVSRKKCSFFF

SEQ ID NO: 270844 - protein, 52 aa, Zea mays
  Clone ID: MRT4577_178607C.1.pep
KHGIQAVLFLVSQPLFLTVANGCGNCPTPTPPAEPPTTPTEVTRTRSLTGLC

SEQ ID NO: 270845 - protein, 107 aa, Zea mays
  Clone ID: MRT4577_178608C.1.pep
FRFWFTIKYIWTMMAIMSDIEDLLIAWNLLDGSMDGWINKRAGHQNSNAHRSVRGADSGSRCDSRDRDGASGACARGTGASIVQQEMHTLDAARGGSRCWVLAMAVA

SEQ ID NO: 270846 - protein, 67 aa, Zea mays
  Clone ID: MRT4577_178609C.1.pep
IEGHVDKNSLLLYSSSHNFWIQVSSMHEDLRWSVLKSICDSRQHFYQSKSISKSQGLRINVIKGMQP

SEQ ID NO: 270847 - protein, 89 aa, Zea mays
  Clone ID: MRT4577_17860C.1.pep
AAFSVLDNANGVTTPRTGRYSADGAGGDASVELTRPCRHAAAALGDLIFVYDGLRGGQGIPSLCLHGPRKCRFKNDASDGGLSGQGISS

SEQ ID NO: 270848 - protein, 58 aa, Zea mays
  Clone ID: MRT4577_178610C.1.pep
HVSVAIEITIRTKRHAISLTTGVDACAIDGGSRECVPDGSDQHRPPLSDKGPVMPIPM

SEQ ID NO: 270849 - protein, 207 aa, Zea mays
  Clone ID: MRT4577_178611C.1.pep
MDVRPSQLVCDAVEAARAAAVAASEARCAAVIAEKEAKAAVEFAAVAVNKVEAVKVSSNLENVDFKYHVNIKNSLRYSIQEMRRQCTMLQSVKKLCSTIPEVEGGKVGKVCGHLEHVCKMLENTSIVCEQDLETKNPTWDLYDNPSVDDEHPLDDDEIGDGYSTEDPELWEMVFDDLKWEENKANVSFEEHYRVINYRFEEINDRNM

SEQ ID NO: 270850 - protein, 69 aa, Zea mays
  Clone ID: MRT4577_178612C.1.pep
QHRKHNSVPTVADKRFSLLMPFGLSVSAVTVTIIPQCLQAPIAFLIPPYLPPTLHRAPENPGGDPYCIH

SEQ ID NO: 270851 - protein, 117 aa, Zea mays
  Clone ID: MRT4577_178613C.1.pep
TKQNFRCFIELELPRLIYKTKTQTSQGVKYVYGVQCASYTTSNASSNWRVDSQPVPPTSERKILHAKMAILITKNALMPLGKNLILPSSWMRGYGPFGLHGLHTRTRKYIHQAPCPC

SEQ ID NO: 270852 - protein, 67 aa, Zea mays
  unsure (1)..(67): unsure at all Xaa locations
  Clone ID: MRT4577_178614C.1.pep
GQVSRNELNHKGREGETVIHIRTGGKSIXAHKHMAEGRIRLCLTHIEELVHQWHSXMGKKGGLSTTD

SEQ ID NO: 270853 - protein, 29 aa, Zea mays
  Clone ID: MRT4577_178615C.1.pep
GFQVRTVLVRCNVPLCVLKIPSWSCIMVR

SEQ ID NO: 270854 - protein, 97 aa, Zea mays
  Clone ID: MRT4577_178616C.1.pep
KYQNTVIWGTTKCIVICTFTLPANPRRGAEPHTKILIFSCETGLQRPGLLMTMIVFFFTRVFTYMEPFVPNGWDFKWNNHIWDLPGHDAINGFFAEP

SEQ ID NO: 270855 - protein, 186 aa, Zea mays
  Clone ID: MRT4577_178617C.1.pep
ARNSARVFSCEQVLLRMLPAYYKHVRFFENTLITKFFGLHCVNVKLTGAIQKKVRFVIMGNLFCSSYAIHRRFDLKGSSHGRMTDKPIDQISEHTTLKDLDLNFIFRLPGTWFEEFCRQVDKDCELLEAERIMDYSLLVGIHFKDRCKDSSNGDNGTSQNAEDSEENRKGPLRLGICMPSRVENVV

SEQ ID NO: 270856 - protein, 75 aa, Zea mays
  Clone ID: MRT4577_178618C.1.pep
QLQLPLSCSSDISSCRLSQSIGTPCLSYSMVIRLSFRAAGRCLSAVCTNYLANMCRAGVAGSLCLQEAWGSCCRK

SEQ ID NO: 270857 - protein, 74 aa, Zea mays
  Clone ID: MRT4577_178619C.1.pep
AYHARPGGKDKSIPSTSLCGRSLTIMASMLEYMMIVSISACSKEEEDGDRHQDAPRLSGLVQGERRGRTGHATY

SEQ ID NO: 270858 - protein, 228 aa, Zea mays
  unsure (1)..(228): unsure at all Xaa locations
  Clone ID: MRT4577_17861C.1.pep
GANGGMXMMEIDRVLRPGGYWVLSGPPINWKTNXKAWERTEGDLSAEQQRIEEYAAMLCWEKVTEIREIGIWRKQLDPSAACPDRPPVRTCDDANSDDVWYKNMETCITPPAAAVAGELQPFPARLTAVPPRISAGAVPGFTAESYEEENRRWERHVAAYKKVNYRLNSERYRNIMDMNAGVGGFAXXIFSPKSWVMNVVPTAXEISTLGVXYERGLXXIYHDWXEAF

SEQ ID NO: 270859 - protein, 138 aa, Zea mays
  Clone ID: MRT4577_178620C.1.pep
GPRLFSGCSWVWGLCVGVSFRLVGVWGGLLLSAGPVVCVCPLSLVLVFLVRAGPASVVFVSVCVVFVFVSRAPLPGFPSLCFWAVSSLVCFLGCSPLVLLPLLCSVGAPAFLFLVPPPCLPPVGVIIRGGRPLLWVLR

SEQ ID NO: 270860 - protein, 342 aa, Zea mays
  unsure (1)..(342): unsure at all Xaa locations
  Clone ID: MRT4577_178621C.1.pep
MGARATMGCSPLLPFQALWLTAAVVAALALAAGAQPSPSLSPGFYDATCPGLQPIVRRGVARAVRAEPRMGASLLRLFFHDCFVNGCDASVLLDDVPGNFTGEKNAGPNANSLRGYEVIDAIKAQVEASCKATVSCADILALAARDAVNLLGGPRWAVPLGRRDARDASAGAANANLPPPDASLPALLSAFGAKGLDARDLTALSGAHTVGRARCAVFRAHIYNDTATTDASFAAGLRGAVCPYTGGDANLAPLEPQAPDAFDNGYFRDLVARRVLLRSDQALYGSGGDGGNTTDALVRAYAANGTAFAADFAAAMVRMGNLGPXRGERGXPEVRLNCRRVN

SEQ ID NO: 270861 - protein, 159 aa, Zea mays
  unsure (1)..(159): unsure at all Xaa locations
  Clone ID: MRT4577_178622C.1.pep
MGARATMGCSPLLPFQALWLTAAVVAALALAAGAQPSPSLSPGFYDATCPXLQPIVRRGVARAVRAEPRMGASLXRLFFHDCFVNVRRRARGSGAVTHFASRLSVGLCWSSPDVCPCVWMDMDXGCDASVLLDDVPGNFTXEKNAXPNANSLRGYEVID

SEQ ID NO: 270862 - protein, 53 aa, Zea mays
  Clone ID: MRT4577_178623C.1.pep
VRRLGIRLEPDRNQDFIFMDVSIWTIGGTSSIAAECIEQAESGIKTNNQFDLY

SEQ ID NO: 270863 - protein, 34 aa, Zea mays
  Clone ID: MRT4577_178624C.1.pep
SCARTRIHIFLDGICRMSTHAYRASDKRFAEALS

SEQ ID NO: 270864 - protein, 104 aa, Zea mays
  unsure (1)..(104): unsure at all Xaa locations
  Clone ID: MRT4577_178625C.1.pep
MPGTRRTARTPAXGKDPRKHVAARGARKSAPTXTAAGTNGHRYRPATGALRAIPRYGRSRSLMSRKLPXFERLXEKLADDFKNGCGFQSHAXVLPSSYGSEAYH

SEQ ID NO: 270865 - protein, 69 aa, Zea mays
  Clone ID: MRT4577_178626C.1.pep
AATRYNKVVIPLHQLRAANPSVSKVNPAEKYIQVVSVEGHEFWFMGFLMYDKAAASLQEALASARELQP

SEQ ID NO: 270866 - protein, 157 aa, Zea mays
  Clone ID: MRT4577_178627C.1.pep
MGLENIPVNEILRAKGEAEAGTVFWCSPPHLVHKTVQHKAAPNVGAFVVFKSGDMNQLPGIVTKKNFSKKILLPGGPSQQTRVKDFMPKKAKVIPGSGCTNILRAMEVMTTKGIRHVPVFDAKVVGMISPGDVVKTIVGHQPQKVKQLKKFIKGGFF

SEQ ID NO: 270867 - protein, 401 aa, Zea mays
  Clone ID: MRT4577_178628C.1.pep
MQAAVNTTTVGAHPHPTKSSFLRPSPPCRVYFHASPRPNLRAIAMASKSQLQEQLIITRPDDWHLHLREGGVLEAVVPHSARHFGRAIIMPNLKPPVTTTARAVEYREEIMRALPPGSSFEPLMTLYLTDNTSPEEIKLARKSGIIFAVKLYPAGATTNSQDGVTDIFGKCLPVLEEMVRQEMPLLVHGEVTDPHVDTFDREKVFIDKILAPLVQKLPQLKIVMEHITTMDAVNFIESCEEGHVAATVTPQHLLLNRNALFQGGLQPHNYCLPVLKRETHRQAIVSAVTNGSRRYFLGTDSAPHDKRNKECSCGCAGIYSAPVALSLYVKVFEEAGALDKLEAFTSFNGPDFYGLPRNTSKIILRKNAWKVPATYKHSSGEIVPMFNGSTLEWLPSDQPKE

SEQ ID NO: 270868 - protein, 41 aa, Zea mays
  Clone ID: MRT4577_178629C.1.pep
VSKHTQLALGNSSTLCHLGLQTHPALAWSPCHLRNHGCYGF

SEQ ID NO: 270869 - protein, 68 aa, Zea mays
  Clone ID: MRT4577_17862C.1.pep
IAGPLLRAGRAGCPSSSSADRVSHITYVQEREEQRRPGSLWRAPDHGRNCAQAPTHPGPGLRHRPDPD

SEQ ID NO: 270870 - protein, 307 aa, Zea mays
  Clone ID: MRT4577_178630C.1.pep
MQAAVNTTTVGAHPHPTKSSFLRPSPPCRVYFHASPRPNLRAIAMASKSQLQEQLIITRPDDWHLHLREGGVLEAVVPHSARHFGRAIIMPNLKPPVTTTARAVEYREEIMRALPAGSSFEPLMTLYLTDNTSPEEIKLARKSGIIFAVKLYPAGATTNSQDGVTDIFGKCLPVLEEMVRQEMPLLVHGEVTDPHVDTFDREKVFIDKILAPLVQKLPQLKIVMEHITTMDAVNFIESCEEGHVAATVTPQHLLLNRNALFQGGLQPHNYCLPVLKRETHSMLRWPPIRNATICYKNAESYSFWFTK

SEQ ID NO: 270871 - protein, 120 aa, Zea mays
  unsure (1)..(120): unsure at all Xaa locations
  Clone ID: MRT4577_178631C.1.pep
TAIVSAVXKGSRRYFLGTDSAPHDKRNKECSCGCAGIYSAPVALSLYVKVFEEAGALDKLEAFTSFNGPDFYGLPRNTSKIILRKNAWKVPATYKHSSGEIVPMFNGSTLEWLPSDQPKE

SEQ ID NO: 270872 - protein, 151 aa, Zea mays
  Clone ID: MRT4577_178632C.1.pep
MPSSSSSADTTPPAAASSEETLSSLMVEELRAGDSVDFGVSRMTSAHVEDMQRLGYFGGGVARAPGTEEVPEPEVAEEDADEGALRCAAGQSSGRDLVEEFVAYGVWPLAHGWALGERVDEDVCGPGGKDVFARAPGVFGSDAKGYLGLLA

SEQ ID NO: 270873 - protein, 63 aa, Zea mays
  Clone ID: MRT4577_178633C.1.pep
FGSFCCTFVGHENGGNLVRKKKKKKKKKKKKKKKKKKKKKKKKKKKKKKKKKKKKKKKKGGAL

SEQ ID NO: 270874 - protein, 575 aa, Zea mays
  unsure (1)..(575): unsure at all Xaa locations
  Clone ID: MRT4577_178634C.1.pep
MQDSVEVLFLDGVGEVAVTIGRNGLSARPLHPELISSCWSSITLQPKLDSKINFSDVYAIEMLDKGPICGPWNTKTAIQGKKNIEMHRFVVHGITRRRKNPSPWVPCEYIFGHKDLKICKDWFQRLISCINNESGRPKNLMVXCCISFLLLTTIALQQTCYVYSAFLLLDNSSTHYXFVHPLCGKGRGVSNWETVSPLFARAKIKTKVIVTERAGHAYDTLSSLSDIELKAFDGVVAXDSTEEPCIGDQDNPVSFPNDWFRLGIIPSGSTDAIVLSTTGERDPVTSALLIILGRKVSLDIAQVVRWKTSPAAEVLPTVRYAASFAGYGFYGEVIRESEKYRWMGPARYDFSGTMVFLKHRXNGCTIVACCXKLTISGHFXSYGAKVAFLDTPYTHSLTASAQDDITGAQPLQSRWKKPRKIICRTNCFVCKEASTSGQNPDDVADNSRTICENQKWVWSEGHFLSVGAAVISCRNERAPDGLVADAHLSDGFLHLLLIRDCPLPLYLWHLTQFTKKGSDPLSFKFVEHHKTQAFTFISSHDESVWNLDGEMFQACEVSVQACRGLVNFFASGPEL

SEQ ID NO: 270875 - protein, 1034 aa, Zea mays
  Clone ID: MRT4577_178636C.1.pep
MPSSSSSSDTTPPAAASSEETLSSVMVEELRAGDSVDFGVSRMTSARVEDMQRLGYFGGGVARAPGTEEVPEPEGELVIFEAFFAAGLRLPAHRFVGEVLRRFNVQIHQLTPNAMVALAKYVWATTSYGGQPSVEVFAKNYCLHWQKRMVGDGVAQFGSCTFTPKTGKTTMPVVELVPCARNKWGNWNEFWFYVAEGTVEGHKGLPVSEMCSHYYSTYPPFEVAEEDADEGALRCAAGQSSGRDLVEEFVAYGVWPLAHGWVLGEVCPRQMPFHGGRVVRSPAFALNLRNRDPAAFVRDAEDGAVRLVGRYVPRTEGQRSFDIRGSNDRLNRVFELNQLPYDGYPGQDEADRRGKKPAVETGDDPAPAAAPPSKKRKLGTAMGGIGVSDSFARDLMRTCAAPGERMSSPELRESSARMLRVIGGCWPRNVPIPCAAEEDCFTSRMVHRWRVFPYGRNIGAVVWTVMDKDRQGAAQKRQATVRIHEARPKRPRGTAKAVASGGGKPPLAAKAGTSAPSKAPEATAGAGGSKSAKVVPPASGVAEASKAARALPLAGKRVADFGTDITVDDYLGGSDEGQLAIVAPAAAIATAAQAPKARGEILGARGEVPALALVRDEAGAATRRLKGVTEALSQAMEALSQVADFTSRTVSGALTTALSAEVERLRTQHADAVREKSASDSKCRNLTDKVAALEREKVDLRRQLAAERREANEAIAKEQAAQADAKLARAEGNLAKELSRAKEAEAAMRAEAERTRTQLMDTYRELGARTGDFEVPDREPGLRCLQWAQEELLELPTVVGGLMSYASLVTCEGAMNALSREGCRHFEAFDQVDEDFERDIYKVEDPVVKESAGALYDRMWGLYGREVVRERAEAARAQVQEFGPAHATAATEFLAASTAEGGNEYGGPVSEFFDFTDSGSSVEWTEESSEEDLDYFAALDVAAAEASPHTADASNVPGPSTGRRRRRAVAKRRVSAEEGARLRVSRAGRQELLSSPAAAGVGEGELRSLFAGEELRIMLFNYREMGIIPKIEPM

SEQ ID NO: 270876 - protein, 109 aa, Zea mays
  unsure (1)..(109): unsure at all Xaa locations
  Clone ID: MRT4577_178637C.1.pep
MPPAKALALQEPPPLAPPRPLPQFPPPPXAEPSALGTAAAGASGSPSPVAADXGQPSRSLRSPGLAPGRPQSQPPRGSTPDLAARCPEPRSRPPARRAPPEPSQPRRAP

SEQ ID NO: 270877 - protein, 60 aa, Zea mays
  unsure (1)..(60): unsure at all Xaa locations
  Clone ID: MRT4577_178638C.1.pep
PPAGSCACLVVPRRVAAAFFPSLFCPSCWFVPCLVSLVACWSPPLCHHXPPFVCACKFII

SEQ ID NO: 270878 - protein, 534 aa, Zea mays
  Clone ID: MRT4577_178639C.1.pep
MPSSSSSAASTPPAAASSEETLSSSMVEELRAGDSVDFGVSRMTSARVEDMRRLGYFGGGVARAPGTEEVPEPEGELVVFEAFFAASLRLPAHRFVGEVLRRFNVQIHQLTPNAVVALSKYVWATTLYGGQPSVEVFAKYYCLHWQKRMIGDEVAQFGSCTFTPKTGKTTMQVVELVPCARNKWGNWNEFWFYVAEATVEGHEGLPVSEMCSHYYSAYPPFEVAEEDADEGALRCAAGREVRSPAFALNLRNRDPAAFVRDAEDGAVRLVGRYVARTEGQRSFDIRGSNDRLNRVFELNQLPYDGYPGQDEADRRGKKTAVETGGDPALAAAPSSKKRKLGTAMGGLGVSDRFARELMRTRAAPGERMSSPELRESSARMLRVTGGCWPRNVPIPCAAGEDCFTSRMVRQWRVFPYGRNIGAVVWAVMDKDRQGAAQKRQATVRLHEARPKRHRGAAKAAASGGGKPPLAAKAGASAPSKAPEATAGAGGSKSTKVVPPAIGVAEASKAARALPLSGKRVADFGTDITVDDYLG

SEQ ID NO: 270879 - protein, 114 aa, Zea mays
  unsure (1)..(114): unsure at all Xaa locations
  Clone ID: MRT4577_17863C.1.pep
ALLXKTPNHPHHXYATHIYIPTRQGASTTANPLQKDPSRGNRCSLPEASTKASGHLTKTRYMRPLHLLHAFRAAQTYYLHADFPDHYPMTAPQEHGWSMHCRRSHTSTRTGTSD

SEQ ID NO: 270880 - protein, 55 aa, Zea mays
  unsure (1)..(55): unsure at all Xaa locations
  Clone ID: MRT4577_178640C.1.pep
MGPDLSELAAAVEGRGAYLAGDGGGVLLPGSFLPADESACVRDNXLLTDIRQMPQ

SEQ ID NO: 270881 - protein, 224 aa, Zea mays
  Clone ID: MRT4577_178641C.1.pep
MSASAAPEKAAGFGGELLYCGATNFDAINRKLAGGMQGNLVSPTRLRSLMGVDIVSVASGCTACHCVALGADGRCYTWGRNEKGQLGHGDTLQRNLPTVVSELSKYKIIKASVGKNHTVVVTDDGKSFAFGHNKFGQLGTGSLKNEIEASPVPCLVTEVTGVACGGDFTVWLSSVEGSTILSAGLPQYGQLGHGNDNEYNTKDSSVKLSYDPQPRPRAIAALSE

SEQ ID NO: 270882 - protein, 268 aa, Zea mays
  Clone ID: MRT4577_178642C.1.pep
MGPARYDFSGTMVFLKHRSYGAKVAFLDTPYTHSLTASAQDDITGAQPLQSRWKKPRKIICRTNCFVCKEASTSGQNPEDVADNSRTICENQKWVWSEGHFLSVGAAVISCRNERAPDGLVADAHLSDGFLHLLLIRDCPLPLYLCSLFANSLPNNDLIGPVLSKSSSFSRKNKQFTILIVFDGIVLHLTQFTKKGSDPLSFKFVEHHKLCGMETTTHLCYRIEEQKVLIELMNPKNQTRLSETHLTGEPGITFNSVASLEGQIWRHI

SEQ ID NO: 270883 - protein, 228 aa, Zea mays
  unsure (1)..(228): unsure at all Xaa locations
  Clone ID: MRT4577_178643C.1.pep
GYLEAGRDSHPSFLLSPSPVATAPARALPNHRDLIPFHQTRACELLRRDPPLLPLSLLLQVLLASASIAIRTAMDDHVLDGVKKNIVVTNNAESDGLDRFAVDEYKCELLGTGHGGHQVQVPQADQEGASLPLSQSTRASSRSPMRSLEDKVEQWKIFLGMSRLLRGRHWVGRRRRRHXFARRPSPHPLQQLRQDDWRILPFAPRTRRRSPTAKSPFPATSSSTEAHV

SEQ ID NO: 270884 - protein, 106 aa, Zea mays
  Clone ID: MRT4577_178644C.1.pep
TCEGPDAAGASAVGSAAASAVVSAATAAGSSALGTAAAGASGAPSATFGGRSSPATADVGAAVAVAAVSGVGSRATPVTASARVGSGSGSALFRAPKSSTRSPRSA

SEQ ID NO: 270885 - protein, 114 aa, Zea mays
  Clone ID: MRT4577_178645C.1.pep
TGCVRRPKILNATCEGPAAVGASAVGSAAASATTAAGSSALGAAAAGASGAPSATFGGRSSPAAADVGAPGASSAVSGVGSRATPVAASAGVGSGSGSALFSAPKSSTRSPRSA

SEQ ID NO: 270886 - protein, 45 aa, Zea mays
  Clone ID: MRT4577_178646C.1.pep
KKVVKAWKNLKENIDRVNQKVNTILNWGFQNRKKYFSNKKDRLSS

SEQ ID NO: 270887 - protein, 99 aa, Zea mays
  unsure (1)..(99): unsure at all Xaa locations
  Clone ID: MRT4577_178647C.1.pep
FIRHECAAAGDYCSAGVTHQSVGDRVKLEPVISCWRCRHCKGGRYNLCEDMKFFVTPPVHRSLANQEVHPADLCFKLPYRVSLQEGAMCXPLSVGFHAC

SEQ ID NO: 270888 - protein, 116 aa, Zea mays
  Clone ID: MRT4577_178648C.1.pep
AERASVQPPHASRSRPPSRGCPGRQAALADVRRAPWQDCPPPAPVWPPPAQPAPWRWPRSPPSSPPPVGAGGQPFPSPGRPPCPTAYGTCCRRPISHGQRQHVVSEVSRLRQTQLP

SEQ ID NO: 270889 - protein, 33 aa, Zea mays
  Clone ID: MRT4577_178649C.1.pep
GRARRGRHRLYIFLISLYDESTTLVNYNYLFFT

SEQ ID NO: 270890 - protein, 125 aa, Zea mays
  Clone ID: MRT4577_17864C.1.pep
MTRLAREQEILAQERSMAASRDAAVLSFIQKITGQTIPMPSIAAPTINAMPPPSHPKPPPPPQPHPTPIASVSPAPPPPQPPASQTPPPQQQKSPMPATPQTPAPQRQSTDIVMTPAETTPHADT

SEQ ID NO: 270891 - protein, 220 aa, Zea mays
  unsure (1)..(220): unsure at all Xaa locations
  Clone ID: MRT4577_178650C.1.pep
MGRRPARCYRQIKNKPYPKSRYCRGVPDPKIRIYDVGMKRKGVDEFPYCVHLVSWEKENVSSEALEAARIACNKYMTKSAGKDAFHLRVRVHPFHVLRINKMLSCAGADRLQTGMRGAFGKPQGTCARVDIGQVLLSVRCKDNNAAHASEALRRAKFKFPGRQKIIESRKWGFTKFSRADYLKYKSEGRIVPDGVNAKLLGNHGRLEKRAPGKAFLEXVA

SEQ ID NO: 270892 - protein, 217 aa, Zea mays
  unsure (1)..(217): unsure at all Xaa locations
  Clone ID: MRT4577_178651C.1.pep
MGRRPARCYRQIKNKPYPKSRYCRGVPDPKIRIYDVGMKRKGVDEFPYCVHLVSWEKENVSSEALEAXCNKYMTKSAGKDAFHLRVRVHPFHVLRINKMLSCAGADRLQTGMRGAFGKPQGTCARVDIGQVLLSVRCKDNNAAHASEALRRAKFKFPGRQKIIESRKWGFTKFSRADYLKYKSEGRIVPDGVNAKLLGNHGRLEKRAPGKAFLDAVA

SEQ ID NO: 270893 - protein, 192 aa, Zea mays
  unsure (1)..(192): unsure at all Xaa locations
  Clone ID: MRT4577_178652C.1.pep
MGRRPARCYRQIKNKPYPKSRYCRGVPDPKIRIYDVGMKRKGVDEFPYCVHLVSWEKENVSSEALEAARIACNKYMTKSAGKDAFHLRVRVHPFHVLRINKMLSCAGADRLQTGMRGAFGKPQGTCARVDIGQVLLSVRCKDNNAXKFSRADYLKYKSEGRIVPDGVNAKLLGNHGRLEKRAPGKAFLEAVA

SEQ ID NO: 270894 - protein, 113 aa, Zea mays
  Clone ID: MRT4577_178653C.1.pep
MGRRPARCYRQIKNKPYPKSRYCRGVPDPKIRIYDVGMKRKGVDEFPYCVHLVSWEKENVSSEALDACLIGFNKYFSYFARKDAFHLLVLVHPFHVLRINKMLSCAGADRLHT

SEQ ID NO: 270895 - protein, 214 aa, Zea mays
  unsure (1)..(214): unsure at all Xaa locations
  Clone ID: MRT4577_178654C.1.pep
MGRRPAICYRQIKNKSYPKSRYCRGVPDPKIRIYDVGMKRKGVDEFPYCVHLVSWEKDNGSSEALDAARIACNKYYRPSTAGKXAFHLKIRVHPFHVLRINXMLSSAGADRFHTGMMGAFGKPQGTCARVDIGQVLLFVRCKDNYAAHASEVLRRAKLRIPGRQKIIESRKXAYTKFSRADYLKYKSEGRIVPDGVNAKVQLSHILLHLDISLN

SEQ ID NO: 270896 - protein, 190 aa, Zea mays
  Clone ID: MRT4577_178655C.1.pep
RPGDVISMSPLRSYVKQPPSPSSSPARTAPLLDPAWGSGRQPRRSPYLLSLSSLSLVESLSALVSPRSAPAARPDRARLCSLQSSPSWFSAARAPLHGRPGLFPMLADPISNSEGRRLYSSSHGDLAFTASIFSPSRCPLPLIFLSAAAPSAFIFPAMDTSVLLLLLPHGCAPLCSNPSATPSTLGEVLF

SEQ ID NO: 270897 - protein, 192 aa, Zea mays
  unsure (1)..(192): unsure at all Xaa locations
  Clone ID: MRT4577_178656C.1.pep
MGRRPARCYRQIKNKPYPKSRYCRGVPDPKIRIYDVGMKRKGVDEFPYCVHLVSWEKENVSSEALEAARIACNKYMTKSAXERMPSTFGPFGKPQGTCARVDIGQVLLSVRCKDNNAAHASEALRRAKFKFPGRQKIIESRKWGFTKFSRADYLKYKSEGRIVPDGVNAKLLGNHGRLEKRAPGKAFLEAVA

SEQ ID NO: 270898 - protein, 46 aa, Zea mays
  Clone ID: MRT4577_178657C.1.pep
RFSNFRLFLRDPHEKISIAQRFLFLFKKKKKKKKKKKKKKKKKKKK

SEQ ID NO: 270899 - protein, 220 aa, Zea mays
  Clone ID: MRT4577_178658C.1.pep
MGKRPAKCYPQIKNKPYPKSRNCRGVPDPKIRIYNVGMKKKGVDEFPYWGHLVSWKKENVSREALEAARIACNKNMTKSAGKDAFHLRVRVHPFHVLRINKMLSCAGADRLQTGMRGAFGKPQGTCARVDIGQVLLSVRCKDNNAAHASEALRRAKFKFPGRQKIIESRKWGFTKFSRADYLKYKSEGRIVPDGVNAKLLGNHGRLEKRAPGKAFLEAVA

SEQ ID NO: 270900 - protein, 220 aa, Zea mays
  Clone ID: MRT4577_178659C.1.pep
MGRRPARCYRQIKNKPYPKSRYCRGVPDPKIRIYDVGMKRKGVDEFPYCVHLVSWEKENVSSEALEAARIACNKYMTKSAGKDAFHLRVRVHPFHVLRINKMLSCAGADRLQTGMRGAFGKPQGTCARVDIGQVLLSVRCKDNNAAHASEALRRAKFKFPGRQKIIESRKWGFTKFSRADYLKYKSEGRIVPDGVNAKLLGNHGRLEKRAPGKAFLDAVA

SEQ ID NO: 270901 - protein, 72 aa, Zea mays
  Clone ID: MRT4577_17865C.1.pep
EVGMPGEGGHSQRMEKTQNYPSAHEPFLLLGEIFSTLIYKKWTVPFLLCIPSTFIFSKPNIQHFVTKEWHTV

SEQ ID NO: 270902 - protein, 220 aa, Zea mays
  Clone ID: MRT4577_178660C.1.pep
MGRRPARCYRQIKNKPYPKSRYCRGVPDPKIRIYDVGMKRKGVDEFPYCVHLVSWEKENVSSEALEAARIACNKYMTKSAGKDAFHLRVRVHPFHVLRINKMLSCAGADRLQTGMRGAFGKPQGTCARVDIGQVLLSVRCKDNNAAHASEALRRAKFKFPGRQKIIESRKWGFTKFSRADYLKYKSEGRIVPDGVNAKLLGNHGRLEKRAPGKAFLEAVA

SEQ ID NO: 270903 - protein, 133 aa, Zea mays
  Clone ID: MRT4577_178661C.1.pep
QLMAPPLFGIHGKKYNQWGSSFQLQKTLANRSGSGNKTTGIKRNRTKNNKNSQDRAIKEKLAPTNKKKWDRTTEKYRKRATRPIGSINSKRHWPKNGNTDQRSGIQGEASRLKNGAKGLAGIRGEKFPEGKTQ

SEQ ID NO: 270904 - protein, 153 aa, Zea mays
  Clone ID: MRT4577_178662C.1.pep
MEIIGHKVWLSDNIETEYGLSKNASEDPRSEQLMKLPMVQCTEISQGSVPLAAVNPRARIRADRRDLCLACRGYSQGAKLRQVVGNTRVHPLFALSPWAGRFRAPIVQLIEGKRFFGVELGVNQFRALVMAYSDQSELAVVPAPPLHVVDRAL

SEQ ID NO: 270905 - protein, 69 aa, Zea mays
  unsure (1)..(69): unsure at all Xaa locations
  Clone ID: MRT4577_178663C.1.pep
MSREENVYMANLAEQAERYEEMVEYMEKGAXTVDVEKLTGEEPDLLSGAYKNGNGACRASWGIGSFIEQ

SEQ ID NO: 270906 - protein, 81 aa, Zea mays
  Clone ID: MRT4577_178664C.1.pep
SSYTTAGCLLIRCLATARRMIQPSLSCYMLMMLQLHRMWRAPMISEASTSCSRWEQLEPIENRKKIKVWELLTGYQTRWRG

SEQ ID NO: 270907 - protein, 53 aa, Zea mays
  Clone ID: MRT4577_178665C.1.pep
ARRFVGGEDNVRIYCYVDERVIGTVRNGDVCLEVNMSRDEYQHLIQDMRHSNS

SEQ ID NO: 270908 - protein, 55 aa, Zea mays
  Clone ID: MRT4577_178666C.1.pep
GICTTLSPSISLSIDVSASHRLLLSPDSGIRKWTPLLDGRAPKPHCILLLLYAHL

SEQ ID NO: 270909 - protein, 83 aa, Zea mays
  unsure (1)..(83): unsure at all Xaa locations
  Clone ID: MRT4577_178667C.1.pep
NQPGRKMLIKVKTLTGKEIEIDIEPTDKVERIKERVEEKEGIPPQQQRIIYSGKQMNDEKTAADYQILGGSXLHLVLALRGGG

SEQ ID NO: 270910 - protein, 57 aa, Zea mays
  Clone ID: MRT4577_178668C.1.pep
IAYALQVAIPYGQCMPTTSALITSSRLSLGIATQHICKILSAPAWLEPPLHTRVHEP

SEQ ID NO: 270911 - protein, 152 aa, Zea mays
  Clone ID: MRT4577_178669C.1.pep
MASAPAPPPRRVVVCGGGVVGACTAYFLSTHPASPTVPTLVEKSSPACAASGKAGGFLALDWSDSTPALSALARASFGLHRRLAAALDGANAYGFRPVHTLSICLPSQPAEPLSPHPLLPSWVDPSASAAPPRQLGTPDTIAQGHPGLFSKG

SEQ ID NO: 270912 - protein, 54 aa, Zea mays
  Clone ID: MRT4577_17866C.1.pep
SRARALGGREERPPDRPRQGQHQGDGCGRRRRRVIREGGGDKKETRGESATPAR

SEQ ID NO: 270913 - protein, 86 aa, Zea mays
  Clone ID: MRT4577_178670C.1.pep
TVVGDLTTGMFNVYNYRETHIDIERERDRMRRIWLASLLIIGKKETKAANETGSSFRFCSHRCDIGSLYKLLQRIYIYRQMNMVIY

SEQ ID NO: 270914 - protein, 76 aa, Zea mays
  Clone ID: MRT4577_178671C.1.pep
TARIIPGSTQPTMRRRLFFFLGGKQKPGEFFFSPFYRGSILCEQQDSNSQSKGRTYSNSEKEATGTSFVTWITHRA

SEQ ID NO: 270915 - protein, 146 aa, Zea mays
  unsure (1)..(146): unsure at all Xaa locations
  Clone ID: MRT4577_178672C.1.pep
MAGQVIPRRNKPAAEXRAVKRPAGEPRRGSGSSLSSPSAGGGGGQPWQDSMGKKSVVTFRIYIFEVLDHVLPVIGVSSKALSIMNSFINDIFEKLAGEAAXLARFLLKPTITSREIQTFVRLVLPGELAQHAVSGWPKGVTNFTCF

SEQ ID NO: 270916 - protein, 68 aa, Zea mays
  Clone ID: MRT4577_178673C.1.pep
KNTRGAYFYSSYKKYAIKSSTLGMKRGKKRYCLLHSHWAIGDPVYIWGCKKQIVLDAFTLVGGISGSP

SEQ ID NO: 270917 - protein, 208 aa, Zea mays
  unsure (1)..(208): unsure at all Xaa locations
  Clone ID: MRT4577_178674C.1.pep
KPIPCAPLPPPPLSLPWRARPSARPSSARPPPLSPLSLLAGPACQPRRPRVTXPPSCARPPSPRPRRAWSSQPHRPWPXSPEPHSPSPPPSFAHQQTPLPPPPRCARARAPPPXPRRPELGSPSPXAPPRPXPXAPPRRPQPGTRPXPSPPPYFSLPALTRRPPCSRGGPPPSPRATVAPLPPPRSPRSPPXXEPLPPPPNPCIAFCH

SEQ ID NO: 270918 - protein, 61 aa, Zea mays
  Clone ID: MRT4577_178675C.1.pep
CTHPELTARPTHSERGHGAPTIQRVFTTSRTGFTSGDVSIDPCTCENARVYLMNLGVLAPV

SEQ ID NO: 270919 - protein, 55 aa, Zea mays
  Clone ID: MRT4577_178676C.1.pep
VSSEFGSRTDPCGGLISLASDNTRWWSYGMPSRRYSYGAWTSRRSLPRHAMLVET

SEQ ID NO: 270920 - protein, 256 aa, Zea mays
  Clone ID: MRT4577_178677C.1.pep
KQISAISCRISSTASSLSSIRQLPGRSSLPVIISSRRWQLGTPLCFLSCSPRSGVLQLLLGRRFPCSPRCSISTLCRRPSCSPQHNGFLFGAQPSLCFPPSPCRAVLRLAGVLPLRARSARRSLPQLQSSLPSPSVVASRPSSGSDRSSALPARVLLRPGPFLRAQIYFPQPILLFASLRVVPLCSLSARVVLDVLLWRSMLLCWPRRGACALGPAYFVVFCFSPRSAQRLGTRIALFVSSLPCYCLRCGAICVCR

SEQ ID NO: 270921 - protein, 127 aa, Zea mays
  Clone ID: MRT4577_178678C.1.pep
GKGTGAPGETRQPPQGKTPRKGGGPNAQKRGPQKGKATRRRPHGDPNRRQGGGGSEKEPSGKPRERARPHGCKHRAGTGYSPPHPARGGPCGTILSPPPLNCSSRSLLTLTQPPMVMRNTKLINHHR

SEQ ID NO: 270922 - protein, 411 aa, Zea mays
  Clone ID: MRT4577_178679C.1.pep
MMSRAAVLLCLLCCLAAAGEAASVVGEGEAAELAVSVDPSWRFPSQRLRDAYVALQTWKQQAIFSDPRGFTADWVGPGVCNYTGVFCAPLPRGVPGAGELAVAGLDLNHGDIAGYLPPELGLLADLSLLHLNSNRFCGLVPATLRRLQLLVELDLSNNRLVGAFPAVVLELPALKFLDLRFNDFEGAIPPELFDRPLDAIFLNHNRLRSPLPDNFGNSPASVIVLADNSFGGCLPASLGNMSGTLNEILLINNGLDSCVPPEVGLLREVTVFDVSFNSLVGPLPQQVAGMRKVEQLDVAHNRLSGAVPEAICALPRLKNLTISYNFFTGEPPSCARVVPSDGDRRNCLPNRPTQRTPQQCAAFYSQPPVDCAAFQCKPFVPVPPPPPSYPGPLPPVYPMPYASPPPPAQYR

SEQ ID NO: 270923 - protein, 756 aa, Zea mays
  unsure (1)..(756): unsure at all Xaa locations
  Clone ID: MRT4577_17867C.1.pep
FYGDDDPKERLRILSEYLDQFVANPAPNESKVWPQRLFKEPVRVIEKYPAGQEGDLXEKYMVCINWLLSEVPLIVETELALGFLDHLLLGTPASPLRMXIVKXGSGDGIAAASMDAKLIAAXDFGTXMGGVSYLEYLRDLETKIDQDWDSISSSLEEMRKSLFSKNGCLINLTSDGKNLEKSRQHIAKFRDSLPSSPFXELKYEQPLQQLKARIADRDQKLXFSPLIEKFILKNSHRVTVEMQPDPEKASRDEAAEKEILKQVKASMTQEDLAELARSTKELKEKQETPDPPEALKAVPSLSLQDIPKKPIHVPVEVGEINGVKVLQHDLFTNDVIYSEVVFDMGSMKKEHLQLLPLFCQSLLEMGTKDMDFVQLNQLIGRKTGGISVYPFTSSVRGKEDPLTRIIVRGKAMAPRVEDLFNLMYIILQDVQFTEQQRFKQFVSQSKARMENRLRGSGHGIAAARMDAKLNAAGWISEQMGGVSYLEYLRDLETKIDQDWDSISSSLEEMRKSLFSKNGCLINLTSDGKNLEKSRQHIAKFLDSLPSSPSIGSDPWLSRLPSVNEAIVVPTQVNYVGKAGNLYQSGYQLNGSAYVISKHISNTWLWDRVRVSGGAYGGFCDFDTHSGVFSYLSYRDPNLLKTLEVYDETARFLRELELDDDALTKAIIGTIGDVDAYQLPDAKGYSSLMRYLLGITDEERQQRREEILATSPKDFKEFADAVETIKDNGVVVAVASIDDVEAANKENPVFPEVKKCL

SEQ ID NO: 270924 - protein, 414 aa, Zea mays
  unsure (1)..(414): unsure at all Xaa locations
  Clone ID: MRT4577_178680C.1.pep
MMTREAVLLSLLFCLAAAGEAVSLVSQXGGGAGGXSVDPSWRFPSQRLRDAYLALQTWKQQAIFSDPRGFTADWVGPGVCNYTGVFCAPLPRGVPGAGELSVAGVDLNHGDIAGYLPTELGLLADLSLLHLNSNRFCGLVPATLRRLRLLVELDLSNNRLVGPFPAVVLDLPALKFLDLRFNEFEGAIPPELFDRPLDAIFLNHNRLRSPLPDNLGDSPASVIVLADNSFGGCLPASIGNMSGTLNEILLINDGLDSCVPPEVGLLREVTVFDVSFNSLVGPLPQQVAGMRKVEQLDVAHNRLSGSVPEAICDLPRLKNLTIAYNFFTGEPPSCARVVPRGGDTKNCLPSRPAQRTPQQCAAFYSQPPVDCASFQCKPFVPVPPLPPPPPSYPGPLPPVYPMPYASPPPPAHYR

SEQ ID NO: 270925 - protein, 104 aa, Zea mays
  Clone ID: MRT4577_178681C.1.pep
GRVKGTVFSWILQCVILYGGAQAQQQLELAPATYMQASQPSGTQSGGQPRSLCARRTRRCSGRVCLCSLRDAVRSKELAVPDVTCRRPLCMLGAALVESWAVIQ

SEQ ID NO: 270926 - protein, 106 aa, Zea mays
  Clone ID: MRT4577_178682C.1.pep
QISLDMHPCIMSLQRSLEGFVHASDATKKLARDAFCSWVRAYTAHRGELKKIFMVKKLHLGHVARSFGLKEQPSLVGRSHQVSLKKRKKEQKRERPAKRRKLPSKK

SEQ ID NO: 270927 - protein, 116 aa, Zea mays
  Clone ID: MRT4577_178683C.1.pep
KTWRGGQGFLLASLHHRPDPSRAINDRASKHPHASRELGRRRRPPGALVYGRVASSGRLKIPPPSKQVNKNRSSTSGRWVAAFHRGHAGTVKSQAALKPPGTTPYNYQKTRHYGRY

SEQ ID NO: 270928 - protein, 42 aa, Zea mays
  unsure (1)..(42): unsure at all Xaa locations
  Clone ID: MRT4577_178684C.1.pep
MDPTKFRPSSSHDTTVTTTNAGVPVWNDNXALTVGPLGPIQL

SEQ ID NO: 270929 - protein, 64 aa, Zea mays
  unsure (1)..(64): unsure at all Xaa locations
  Clone ID: MRT4577_178685C.1.pep
ECMISFMTLGFWPCLSGLLLPDNRSDPHCCSCALLPPFPVFXLDSPARMAGHSAGDDSPCSCIH

SEQ ID NO: 270930 - protein, 54 aa, Zea mays
  Clone ID: MRT4577_178686C.1.pep
RRMARTTQTVGKSRGGKAPREHAATKEATHPAPTTGDVRTSHRYRPRTVTLPEI

SEQ ID NO: 270931 - protein, 107 aa, Zea mays
  Clone ID: MRT4577_178687C.1.pep
TGTNPQKFFHEQDLKFFKPRRSGRKKMPLWFLGGALPKRKKNPKLSVGLTMKSKRGGFGWVKQRGGRPGAPALNCHPGLPMPGGIPLMGINNASGTLGLLFLGGTLG

SEQ ID NO: 270932 - protein, 153 aa, Zea mays
  unsure (1)..(153): unsure at all Xaa locations
  Clone ID: MRT4577_178688C.1.pep
FGSRAMNESIALSDTEKQLRHEKHYRYICSHDVAYWSKSYIQDFERSCRDHFRRKCWGIGLGFGFRVVALDRNFKKLTVDSIVADYKKSKSRIILLDYDGTLVPQTTIDKTPSETVVNMMNTLCSDKNNVVFIVSGRARDSLEXWFYPCQSLA

SEQ ID NO: 270933 - protein, 171 aa, Zea mays
  Clone ID: MRT4577_178689C.1.pep
MAGDWQELGQAAAIGRLFAFLVAKLISTVIAFKEDNLRITRSPPTSPTAAAAAAPPVPSHDGSTDGGSGSDSDSDWEGVESTELDEEFSAASAFIAASAASGTSVPEEAQLRLYGLYKIATEGPCTAPQPSALKLKARAKWNAWHKLGAMPTEEAMQGYITIVQELFPNWD

SEQ ID NO: 270934 - protein, 65 aa, Zea mays
  Clone ID: MRT4577_17868C.1.pep
GCKFFPQPLTPRARFPSLFLGPISRYPQRLAVVVTKCLTYLPRKWVFSAFPPENYIYFWRMRGLI

SEQ ID NO: 270935 - protein, 328 aa, Zea mays
  unsure (1)..(328): unsure at all Xaa locations
  Clone ID: MRT4577_178690C.1.pep
MAGDWQELGQAAAIGLLFAFLVAKLISTVIAFKEDNLRITRSPPTSPTAAAASRASRPLPLXGSTDGGSGSDSDWEGVESTELDEEFSAASAFIAASAASGTSVPEEAQLRLYGLYKIATEGPCTAPQPSALKLKARAKWNAWHKLGAMPTEEAMQGYITIVQDLFPNWDAGASAKRKDEDSIASASASKGPMGPVFSSLMYEEDEGNESELGDIHVSAREGATDDIVKLLAAGVEVNVRDTEGRSPLHWAVDRGHLSAVEVLANANADLNAKDNEGQTALHYAAVCEREDIAELLVKHHADLRIKDEDGNTAHDLCPSSWSFMNQAN

SEQ ID NO: 270936 - protein, 324 aa, Zea mays
  unsure (1)..(324): unsure at all Xaa locations
  Clone ID: MRT4577_178691C.1.pep
MAGDWQDLGQAAAIGLLFAFLLAKLISTVIAFKEDNLRITRSPPSSPTAAAPAPATSPLPSQHDAAIGSGSDSDWEGVESTELDEEFSAASAFVAASAASGTSVPEEAQLRLYGLYKIATEGPCTGPQPSALKLKARAKWNAWHKLGAMPTEEAMQEYITIVQELFPNWDAGTSAKRKDEESITSASASKGPMGPVFSSLMYEEDEGNDSELADIHVLAREGATEDIVKFLAAGVXVNMRDTEGRSPLHWAVDRGHLSAVEVLANANADLNAKDNEGQTALHYAAVCEREDIAELLVKHHADLRITDEDGNTAHDLCPSRAGLL

SEQ ID NO: 270937 - protein, 99 aa, Zea mays
  Clone ID: MRT4577_178692C.1.pep
NGNSQNYSKKPGGKGGEKKTLTKKGGGNHTILQKKHTKHGGGGNPREITGKGQHTGPRRGKKKTFLELGTLGAIPALMEPRANLLGVLLERPRVPRGLK

SEQ ID NO: 270938 - protein, 112 aa, Zea mays
  Clone ID: MRT4577_178693C.1.pep
TPRPPPWGAPIYSMNLTKIWAKNLPWGRALEGPFASLNLDFLKTGFRGVKGPFSPSFNFWGRACLALAPYKPIILTFSREKGVLLTPPNKLGGGGPEKNGLPSWGTLLGPWK

SEQ ID NO: 270939 - protein, 98 aa, Zea mays
  unsure (1)..(98): unsure at all Xaa locations
  Clone ID: MRT4577_178694C.1.pep
MSNVQDKPLNELLSRSMVDIYVGPENTHWILHEKLLCHHSPFFRKIFXPNPRPRRARNPLASPMKKTSPSRPLSAGSTRLACPCPARKPTSAQPSICT

SEQ ID NO: 270940 - protein, 370 aa, Zea mays
  Clone ID: MRT4577_178695C.1.pep
RHSSPTGDAAQRLAHCFADGLEARLAGTGSRLYQSLMLRRTSVADFLRAYRLYMTTCCCKRVAFAFANKTIHDAFALAGRRRRLHIVDYGLGYGFQWPGLLRGLAAREGGPPELVRITGIDLPQPGFRPAQQIEDTGRRLSDCARQLGVPFEFRGIAAKREAVSPEDLGIDPAAEVLVVISLCHFRLLTDEIEVEISSSAAAAGPSGRRRPTARDQVLCNIRRMRPDVFIHGVVSGGYGTTYFPTIRHEAMFHYSAQFDLLDATVPRDSPERLLLERDIFGRAAMNVIACEGADRVERPETYRQWQARNRRAGLKQLQLQADVVKVVRDKVKDKYHRDFGIDEDQGWLLHTWKGRVLYGLSTWVAQHADP

SEQ ID NO: 270941 - protein, 70 aa, Zea mays
  unsure (1)..(70): unsure at all Xaa locations
  Clone ID: MRT4577_178696C.1.pep
MPINRIALGNQHKVYHTXALKASIXEYISTLIFDFAGQGSGITVSKLTGCYTTTPTGLIAAAVAHAFALF

SEQ ID NO: 270942 - protein, 103 aa, Zea mays
  Clone ID: MRT4577_178697C.1.pep
TLVLHCSSLLVKRFLRDPLVRALRVPVRLCNTAPTTQPQPCPGNPDRHRPTPRPGLPAPAQQRQESRPRAPCQPDPERPASPTATPAPRHPATKPRQTPRWTP

SEQ ID NO: 270943 - protein, 62 aa, Zea mays
  Clone ID: MRT4577_178698C.1.pep
SLCWFKTLCCMYPTSRQSAHFFGSWTKYYSPVWCKSYPVKPPRVVLYQRKFGAGQKKTGFSS

SEQ ID NO: 270944 - protein, 58 aa, Zea mays
  Clone ID: MRT4577_178699C.1.pep
ALIIFFLPCSFFGGVFFGSGGNLHFFLRINLKQNPDRGNRFHRTTKPTLVMQGSAGAL

SEQ ID NO: 270945 - protein, 40 aa, Zea mays
  unsure (1)..(40): unsure at all Xaa locations
  Clone ID: MRT4577_17869C.1.pep
MADQANQPTVLYKLGGQFHLRSIIXEGERGXNIFPFVXSY

SEQ ID NO: 270946 - protein, 54 aa, Zea mays
  Clone ID: MRT4577_1786C.1.pep
EKSPERSRGDRQRGDDRGIEERSESKRSRHDRDSGGRYERRSDEEEERYRKSRR

SEQ ID NO: 270947 - protein, 38 aa, Zea mays
  Clone ID: MRT4577_178700C.1.pep
VADLVGHPIFSFNESLPPPPHLLLEHFSLANNFLARYM

SEQ ID NO: 270948 - protein, 145 aa, Zea mays
  Clone ID: MRT4577_178701C.1.pep
GPKRETGPFKKKKKRKGEKKTRGAGFKKPKIGGKSPKGGEMGKKKPKNHGGGNPWALSKRGGKGFKKLGKKQAKKNPPTFQKWEIPKGLGPKGRENFFRGPMGRAKGLKKPSGKCLRGAKETPFGGKGNKNFSSPGEPRKPGGGL

SEQ ID NO: 270949 - protein, 139 aa, Zea mays
  unsure (1)..(139): unsure at all Xaa locations
  Clone ID: MRT4577_178702C.1.pep
THASEVVKVSKDDITMQNPATGDISVPYGMAVWSTGXNRRVLATDEWLRVRECDGVYAIGDCATINQRKVMEDISEIFRVADKDKSGTLTVKEIQDILDDIYVRYPQVQLYLKSKQMNGIADLVRSAKGDAEKESVELN

SEQ ID NO: 270950 - protein, 666 aa, Zea mays
  Clone ID: MRT4577_178703C.1.pep
MASRVRCLRYRRGTAVGGALALASLKAPLFLPPYRSLLFLCRCGAACLPFSSRAFFLHASLPQRGWVVVCCLFRDHRSQPASHSQPESEMRWSAFLWETASGRRPGVSNLLLVVAAASSGGLVAYADSGSDAAVEQPQLPPRKKVVVLGTGWGGTTFLRNLDSRLYDVQVISPRNYFAFTPLLPSVTSGTVEPRSIVEPIRRVLEKKGGEIKFWEAECFKIDPQSKKIHCRSNVGTSLEGNGEFLVDYDYLVVAVGARTNTFNTPGVVENCHFLKEVEDAQKIRRSVMDCFERASLPFLNEEERKKNLHFVVVGGGPTGVEFAASLHDFVTEDLSKLYPSIQHLVKISLIEAADHILTMFDKRITNFAEDKFGRDGIDVKTGYKVVKVSKDDITMQNPATGDISVPYGMAVWSTGIGTRPFVVEFMKQIGQANRRVLATDEWLRVRECDGVYAIGDCATINQRKVMEDISEIFRVADKDKSGTLTVKEIQDILDDIYVRYPQVQLYLKSKQMNGIADLVRSAKGDAEKESVELNIEEFKKALSLVDSQVKFLPATAQVASQQGQYLARCFNKMKDAEENPEGPIRIRGEGRHRFRPFRYRHLGQFAPLGGEQTAAQLPGDWISIGHSSQWLWYSVYATKQISWRTRMLVVSDWTRRFIFGRDSSCI

SEQ ID NO: 270951 - protein, 166 aa, Zea mays
  unsure (1)..(166): unsure at all Xaa locations
  Clone ID: MRT4577_178704C.1.pep
SQSFSYPLQRSREAGVMDTVSAVVVTTICVRAAIARINALGLSVLRETIDRVRCIYAEDAHNAVPVTTNGAGASLLAAAPEVTASSXTAVSLVDERMSTEVIGMSLLLSNNLHAVHPHWESSDSSVPSTPSTPLSSTRTRSSPALSLLDPLSPVNDLNSNMEAAHR

SEQ ID NO: 270952 - protein, 126 aa, Zea mays
  Clone ID: MRT4577_178705C.1.pep
ERDNVLNQFRTGRASVLVATDVAARGLDIKDIRVVINYDFPTGIEDYVHRIGRTGRAGATGVSYTFFSEQDWKYACDLVKLLQGANQLVPPQLQDMAARSASGGPRNQASGMSRWDGPGGRGFEPG

SEQ ID NO: 270953 - protein, 219 aa, Zea mays
  Clone ID: MRT4577_178706C.1.pep
MADDQQPPTQRIWFPYWTAPAPAHGPRPAARPQLSRRESRPAPQASPPPTTASTGAGGGVPAPPAQPTPLSSRPSPPPARAPPLSPIGEPNARAPEPSPVPVAKQHRPPSPLRPNYIARDVPKQKDIVVPQEKTIQEPALVASKTPAKAPEKEKEDKEKREEEKTKEKDKGHKMKKEKDHEEKQEKDKEKEGGQPHKELKAGVADMVRKLGTPAPSSGG

SEQ ID NO: 270954 - protein, 110 aa, Zea mays
  Clone ID: MRT4577_178707C.1.pep
FYASALGFADEVVEERVADDELLYIKGCRAVNVHSLVLRGANMFMLDEMERSLHDAMCIVKRVLESGEVVPGGGAVETALSVHLENYATSVGSREQLAIAEFADALLVIP

SEQ ID NO: 270955 - protein, 40 aa, Zea mays
  Clone ID: MRT4577_178708C.1.pep
VWPLSIEALPGLFQQRCSNLSLNWRLRCKKKTKYRTKSKA

SEQ ID NO: 270956 - protein, 158 aa, Zea mays
  Clone ID: MRT4577_178709C.1.pep
MSHSASSSGIKWCENNVIWSSLSSSLVRHGKEAMKQRDMELQAVLDGLLEASASEKLIKCLSKYSELHSDKDDDPKEVISRFLKFSQELDHAIFIAQSQARLRHPKACCSNSTPSASPRAATKAALDRKQSAISWVRAAIEADLSPFSSHTTRGASES

SEQ ID NO: 270957 - protein, 47 aa, Zea mays
  unsure (1)..(47): unsure at all Xaa locations
  Clone ID: MRT4577_17870C.1.pep
EQNISYKSTFCVRXPKLPNAILLTHSGNNINPYSTTHLSKHGCKPIP

SEQ ID NO: 270958 - protein, 88 aa, Zea mays
  unsure (1)..(88): unsure at all Xaa locations
  Clone ID: MRT4577_178710C.1.pep
SYHLAHSLQIGGLDTLKVLIAALALLAIAASTTCSTSGCYRXQTQPPHLPYMLYMPYLSYLPPQQQSQSWNYPTQPPQLNQCQYFGSC

SEQ ID NO: 270959 - protein, 73 aa, Zea mays
  unsure (1)..(73): unsure at all Xaa locations
  Clone ID: MRT4577_178711C.1.pep
GWGVFFGGGVPXLAXQXTNKNCGAMFSSSPIPNPLSKSLFMVKTVHNPGGIILDSGVKLNKTCVVRYKGNSCF

SEQ ID NO: 270960 - protein, 103 aa, Zea mays
  unsure (1)..(103): unsure at all Xaa locations
  Clone ID: MRT4577_178712C.1.pep
MAYVELACTCSALILSDHGIDITVGKIGTSDKAVNINVEYYXPGLFDKLLNKRNVDDTILSVGAXGXTATVADAETDSSADAAADQAVKNKKEYVIEESDDYM

SEQ ID NO: 270961 - protein, 323 aa, Zea mays
  Clone ID: MRT4577_178713C.1.pep
MKAMAGPKLLVVHASSNKALNGMAPTSPASPGWSRCLWLVVFLALFTCVSLLTVLSTARASAGAPACQAASLTASAAGATEAGLPRHVFDALVQYAAAAGNLSSSMPEPDVRAIASVLRRRAPCNLLVFGLGAETPLWRALNHGGRTVFLDENPYYVAHLEGKHPGLEAYDVAYATAVRELPDLLDAARAARAAECRPVQNLLFSECRLAINDLPNQLYDVAWDVILVDGPRGFMEGSPGRMSAIYSAAVMARTKGAETEVMVHDYEREVERACGREFLCDENRVTATSTPSLGHFLVHGGAAANREAFCGPPAGAAQKSKPS

SEQ ID NO: 270962 - protein, 102 aa, Zea mays
  unsure (1)..(102): unsure at all Xaa locations
  Clone ID: MRT4577_178714C.1.pep
PRRGGPRRTNAEYRADPDASNTYPHRAGXTIRNNGHVLTKERPCNVAQESTARTGKQAHAWRHAXGRDGITGKKLQDSVPSSHRRDVPHGAHSDYQLRDTTD

SEQ ID NO: 270963 - protein, 732 aa, Zea mays
  Clone ID: MRT4577_178715C.1.pep
MDLASFITSVLTSFLIFVALVLLFTWLSRRPGNAPVYYPNLLLRGLDPWAGRGRGTRSPVGWLRDAISASEPDVVAAGGVDAAVYLVFLSSVLSILVYSGIVLLPVLLPVAATGGALSTIPIPTNKSAQSAQNFSSIERLGMGNVAEKSMRLWAFLLSVYWVSFVTYFVLWKSYKHVSNLRATARSAPDVKPEEFAVLVRDIPRPSPDETIKDSVDSYFRALHPNTFYRSMVVTDHTKADKIYQEIEGHKQKIARAEVVYANSKTESNTEGTRPTHRTGFLGLIGTKVDTIEYCSEQIKELLPKLEAEQKTTLHEKQQRAAIVVFNSRSAAAFASQTLHAQVYDKWTVMEAPEPRQIIWSNLPRKLYDRQIRQCVVYGIVFLIVVFYIVPLTAIAAVTTLENLEAKLPFLKPVVEQPAIKTVLEAYLPQIALIVFLALLPTLLMFLSKQEGIPSQGHAVRAASGKYFYFIVFNVFLCYTLGSTLFKSLTTIINHPAEIVNMLAKSLPGSATFFLTFVALKFLVGYGLELSRLVPLIIFHLKRKYLCKTEEEVRAAWAPVDLGYNTRVPNDMLIATVVLCYSVIAPLIIPFGVAYFALGWLIARNQILRVYVPSYESYGRMWPHMHTRIIAALMVYQTTMIGFISLKKFAYASVLVPLLPASIIFAYVCHMRFYPAFAKTPLEVVVRHDLKETPNMEAIYTAYIPPCLKPDKLEDLDAFEDAQSRATSRVPSI

SEQ ID NO: 270964 - protein, 267 aa, Zea mays
  unsure (1)..(267): unsure at all Xaa locations
  Clone ID: MRT4577_178716C.1.pep
MDLASFITSVLTSFLIFVALVLLFTWLSRRPGNAPVYYPNLLLRGLDPWAGRGRGTRSPVGWLRDAISASEPDVVAAGGVDAAVYLVFLSSVLSILVYSGIVLLPVLLPVAATGGALSTIPIPTNKSAQSAQNFSSIERLGMGNVAEKSMRLWAFLLSVYWVSFVTYFVLWKSYKHVSNLRATARSAPDVKPEXFAVLVRDIPRPSPDETIKDSVDSYFRALHPNTFYRSMVVTDHTKVLLLLIYRERDRFSLVLLLCFSCLLVRYV

SEQ ID NO: 270965 - protein, 129 aa, Zea mays
  Clone ID: MRT4577_178717C.1.pep
MHILRVYVPSYESYGRMWPHMHTRIIAALMVYQTTMIGFISLKKFAYASVLVPLLPASIIFAYVCHMRFYPAFAKTPLEVVVRHDLKETPNMEAIYTAYIPPCLKPDKLEDLDAFEDAQSRATSRVPSI

SEQ ID NO: 270966 - protein, 208 aa, Zea mays
  Clone ID: MRT4577_178718C.1.pep
MVVRRLGGTGRALLTLPNIRRRASNSWAAVCDTFFSTKQVFESHRIVFTVGTSIASVLTAWAGYSLRHVQQLKIERRLESIESSLKDNHKVEHEEIKKIVTSSNISAPGCVATAMTTMVVGYALGWRGGAWYARRAFRREQQKLMMGHMKSSQNRWHRRPFNRLRNSRLAASKNKSADAHPSVGQSTEALSTSCSGASANVGSAAGSA

SEQ ID NO: 270967 - protein, 78 aa, Zea mays
  unsure (1)..(78): unsure at all Xaa locations
  Clone ID: MRT4577_178719C.1.pep
FPVANKMFKFARLSLACSWIQQAVKKVDLFGNIGIYAYFELPEEFGGKXRXYWXVGGQAATKNQPSXXEXPHAWADAW

SEQ ID NO: 270968 - protein, 59 aa, Zea mays
  Clone ID: MRT4577_17871C.1.pep
TPNKGGETNLPDPGFQQPFLPKANFFNLNSFLTGPRHRGGGEMVNPCRLFYIHPQRYLH

SEQ ID NO: 270969 - protein, 61 aa, Zea mays
  Clone ID: MRT4577_178720C.1.pep
PKPPKARGGLKLKGRTPPPPPGDPAGFTLPNTLALGPVGPIPGVGFVLGLKNPGALAQIMG

SEQ ID NO: 270970 - protein, 203 aa, Zea mays
  unsure (1)..(203): unsure at all Xaa locations
  Clone ID: MRT4577_178721C.1.pep
GKKKQEGGGERKKGKKKGGGGXGGEKGEAEGGRRGEGGGRGGTGXKGEGKGKQGGGGAGGGGGGGGDERRGKKGKGGGGGRGKKGGGARKKGGRGEKGGRGGERGPGKKKKKKGKGGERRKGXKRGKGRGSEGKGGEKGGQRKGKGNTKGGRGGXKGGPRGRQGEGNGQKKKKSRGEQRRGLFGFRRNERDAGIEMLEKKFYG

SEQ ID NO: 270971 - protein, 146 aa, Zea mays
  Clone ID: MRT4577_178722C.1.pep
PPRTAAARAPDAARAPAAPPRAGTAAAAAPTPAPPPPPPGTETLTPTQTPTLMPTASWTRSRTPKPTAGGCAAAASAGARGAGRRARAPCWPRRPSPAIARSPPPPLATSVAAARRHHLEIRAGESERTSGRPREETHSHGGGEDG

SEQ ID NO: 270972 - protein, 77 aa, Zea mays
  Clone ID: MRT4577_178723C.1.pep
PRSGIYCSDTIWTEKLYFSSDAAFLGYSLILAILRTLNLRDEASRVMVAAPILAFVTTHILYLNFYELDKGNLGHDR

SEQ ID NO: 270973 - protein, 155 aa, Zea mays
  unsure (1)..(155): unsure at all Xaa locations
  Clone ID: MRT4577_178724C.1.pep
HPSDFPKFKYPNQPKCVTPLPPLRSPLPPLPSPSTVTDPPRSLSQLTLSTLPFLPPPPLPSTRPTPSRPPPRRFPSTLLRSPSPSPPRPPSTPLSRSPPRPLSTRPTPLRPPPRRFPSTLLRSPSPAXPRPLSTPSDRSPPRSPRLPSRFLRSPC

SEQ ID NO: 270974 - protein, 94 aa, Zea mays
  Clone ID: MRT4577_178725C.1.pep
LISQLLKGSGKTGLKDWGTPKLNKTVITIWKMHPRKCFFQSPGSGTLGFFFFFQGQKNQYFILKPVYIANNRSLMLRSQVSKLRFKMVCFYTLG

SEQ ID NO: 270975 - protein, 149 aa, Zea mays
  Clone ID: MRT4577_178726C.1.pep
MAMSLSRFSQWIWPGSRTRNPRGREPPAGSTALTEGLFPDSPSGFRDPDPGSGAAQRRKGKSRRRGGRVEAKVDGEHGMVIVQSDGDGCLSDSDSDGSDWSIGWLEPLAPDLQSDVDSEGSFAVLVRCYRRGHADRPDRSDGKFPAPGG

SEQ ID NO: 270976 - protein, 224 aa, Zea mays
  Clone ID: MRT4577_178727C.1.pep
RVSTIELGAAKSSKEGGGGGGGEANELKEQIACLRAALARKDGDHESIRSTQSSPDIYRMGTGNASPASRHPIEDGIIENDSALGDLAEHSQFGSSNSLPELGPEATQDLAFYQRSNSEQQWSWSGSVATEDSDDFEVATNCSLELDCVRPSSAPKASGLSNGGGTAVKKIQVKGSKGSDVRGVNPGRRSSPLQKKPSGPSPTLIKKGGGEGRKTPNGKTGTKK

SEQ ID NO: 270977 - protein, 97 aa, Zea mays
  Clone ID: MRT4577_178728C.1.pep
DKSPTATGSPRSAVLWRESRGDGMFMGSVTIHGVCPPGAILVVHHRISSGSSRGRYLLSFASQSCSGLRERRGWRGGRTPRVWSLTVSGGRLSPARR

SEQ ID NO: 270978 - protein, 57 aa, Zea mays
  Clone ID: MRT4577_178729C.1.pep
TSDPFCSDRTALHREIQYLSGAEQSRRGEDIAEDHHRTALEREGWGRLRDLHQEEGQ

SEQ ID NO: 270979 - protein, 57 aa, Zea mays
  Clone ID: MRT4577_17872C.1.pep
NLGGHKNLYYPILSIFIFQILILLTYSSIYYTFLYIFIYHFNYFLSFFYTIYKNKIY

SEQ ID NO: 270980 - protein, 75 aa, Zea mays
  Clone ID: MRT4577_178730C.1.pep
LIPLCREIKPPPPALFFRLQMIGFGQWGPQNGMCFLKIIIIVGALFFVAKKDVIQKKSFLNKERDPPQKKKKKSG

SEQ ID NO: 270981 - protein, 60 aa, Zea mays
  Clone ID: MRT4577_178731C.1.pep
PLGGQRPLPPPPRQESRKKKKKKKKKKKKKKKKKKKKKKKKKKKKKKKKKKKKKKKKKKK

SEQ ID NO: 270982 - protein, 41 aa, Zea mays
  Clone ID: MRT4577_178732C.1.pep
RWLYRRWSCSSRMVTYNSRRSSALAISIIGRRRRRSELVNN

SEQ ID NO: 270983 - protein, 95 aa, Zea mays
  unsure (1)..(95): unsure at all Xaa locations
  Clone ID: MRT4577_178733C.1.pep
GLAWXXXXXXXXXXYXXXXXXHPDYXXXPPSVTFHSIIXFLCLNHXTWVGEGRKFGLLANWQRDCTRENILTQLKKEMAASPNRKLVQPPEGALF

SEQ ID NO: 270984 - protein, 39 aa, Zea mays
  Clone ID: MRT4577_178734C.1.pep
CVLSLRESCEKSHGEMISGKRSPGRRVGPTLFWESLPRP

SEQ ID NO: 270985 - protein, 239 aa, Zea mays
  Clone ID: MRT4577_178735C.1.pep
MDGPPLASLSLTHVHYDPTSKVSHACAYLALVPQALCITYATLIWSSREMEILLMFAGQMGCEALNWVLKRYIREDRPTQMMGKGYGMPSSHAQFVAYFAVYLGLWVVVRHDPWKTNESKTHVPTPMWQRVGLALAALGGAVAVAQSRIYLNYHTPRQVYAGFAVGTLCGVAWFVATSIGRHYGLLDHLLDFGPVRWLRMRDLLVNENLVDAGWERWENGRLRVRGLSARTINTCINCS

SEQ ID NO: 270986 - protein, 76 aa, Zea mays
  Clone ID: MRT4577_178736C.1.pep
IDINENPDVRTMVMRPRLLQNAPRCTHDSTSFGTHSFFRTSQLYVSLGGIRRDRVPEISSRPAAPGAEGLGGGRII

SEQ ID NO: 270987 - protein, 60 aa, Zea mays
  Clone ID: MRT4577_178737C.1.pep
VGTMTLDTLERQCLRSFCQNMIRALCHTPTPTSPCCLLLSPVDHGISAHHRIRVVSDPCW

SEQ ID NO: 270988 - protein, 39 aa, Zea mays
  Clone ID: MRT4577_178738C.1.pep
LNPFMCHRSTGKGSTHWLFSWLGGSGSTENNQCVEPFPV

SEQ ID NO: 270989 - protein, 61 aa, Zea mays
  unsure (1)..(61): unsure at all Xaa locations
  Clone ID: MRT4577_178739C.1.pep
RPTRPIHSFPFSFLFFPRDYSYXRGGFLYLVCSXLLVSKVPTPSALSLLSTFHIKIPLPSP

SEQ ID NO: 270990 - protein, 215 aa, Zea mays
  unsure (1)..(215): unsure at all Xaa locations
  Clone ID: MRT4577_17873C.1.pep
MGSTSRCKFVILVHGVTVMTTFVKRHLTGVLENKYEPTIAVELQPLDFNTNCAETDLYCWDTVGXEKNDVLRDGYYINEAXAIIMVDVTSXCIIIENVPTCHRHLYQTCEXDPTLVXGNEADDQNREDKGKQDTFHRKNKLQHYEISAKRNYNFEKPLLYLARKLPSSXSFTLVEAAALKPPEVQIDMALQXENEADVAAAAAQPTPDDDDDLIE

SEQ ID NO: 270991 - protein, 59 aa, Zea mays
  Clone ID: MRT4577_178740C.1.pep
PPLFQLHVATHEPIPNHHNLIMARLPIIINMPPLLLLLASRRPHLRLPVFLFLASALTS

SEQ ID NO: 270992 - protein, 88 aa, Zea mays
  Clone ID: MRT4577_178741C.1.pep
PYHTVGVYSPHTQRMNDRRPETRGADHGHRGLHPQRTNAAAGPFTIAVCAPKPNLLQTPVTGKTLEGIDCLRAVHRLWLSPCVHTRPM

SEQ ID NO: 270993 - protein, 80 aa, Zea mays
  Clone ID: MRT4577_178742C.1.pep
VCRTSKRPRFCAIVLSSVQSVSITHECSCIRAPLIMSVWIARGWELESVYLTSELTLLDLDMAGFCPSPHRLGPGAVRRE

SEQ ID NO: 270994 - protein, 151 aa, Zea mays
  Clone ID: MRT4577_178743C.1.pep
PCLPNREGILAPPLCFSQCFSLMGYPQFNITILGHGEGSWAQMGEGLGLGEISPKPNGHSLLKEGGFWALLINFKDPDLPGPHSYLGFRAVFGSPPAVFYPPGGGGNLGIPAWPKGNQNWGRVLPCFKRGNFRSLGGKGFLAKGPFPGQGF

SEQ ID NO: 270995 - protein, 67 aa, Zea mays
  Clone ID: MRT4577_178744C.1.pep
GPDADVTRCYLIATEVRQSKAIIMLRIKVIHGSLDASRIGFTSYMGTHSNPEGLTGLTELFPFINPY

SEQ ID NO: 270996 - protein, 76 aa, Zea mays
  Clone ID: MRT4577_178745C.1.pep
INCAHTGRIISAKKMTKLCAVHQIISISLRGTKNTIRKSKREEWDLFDQVQPFETNPFDHFPFMLSSNPSRVHHGP

SEQ ID NO: 270997 - protein, 71 aa, Zea mays
  Clone ID: MRT4577_178746C.1.pep
GRVGSVTTMVLSLIIPVLTMGMVWPWTGPAASATLAPYLVGLVVQFAFEQYARHRKSPSWPVIPIIFKFVI

SEQ ID NO: 270998 - protein, 214 aa, Zea mays
  Clone ID: MRT4577_178747C.1.pep
CPHVSGVIALLKAARPEWSPAAMRSAIMTTARTQDNTGAPMRDHDGKEANAFAYGAGNVHPNRAVDPGLVYDAGPDDYFTFLCAMGISAADMKRLSAGKFACPANSAKEAPAMEDLNYPSIVVPSLRGTQTVTRRLKNVGRPAKYLASWRAPVGITMEVKPRVLEFSKVGEEKEFKVTVTSQQDKLGMGYVFGRLVWTDGTHYVRSPVVVNALA

SEQ ID NO: 270999 - protein, 38 aa, Zea mays
  Clone ID: MRT4577_178748C.1.pep
YWCLIYFNEEMWTRMLGRHISVVSPNDKASVLLRREQK

SEQ ID NO: 271000 - protein, 53 aa, Zea mays
  Clone ID: MRT4577_178749C.1.pep
CQLATRYSVVAHASLIFFLLFLPLLLNWIILIEMELVSDMLASSFSRFYFYQP

SEQ ID NO: 271001 - protein, 99 aa, Zea mays
  unsure (1)..(99): unsure at all Xaa locations
  Clone ID: MRT4577_17874C.1.pep
ATRGQLVLFGPAWSGPGVSPLLLAPQGVKGLWWPEPNPNHFSVSFGPCIIKTNSCNLDTVQGGLSVLAVLASIILKTPQSFTVFLNKKXKEGAPSRGYP

SEQ ID NO: 271002 - protein, 123 aa, Zea mays
  unsure (1)..(123): unsure at all Xaa locations
  Clone ID: MRT4577_178750C.1.pep
HLLVIKKVNRDRYNDGSIKHSLLKQSSLDLLTIETPGLKKNDNFSRWMSXNXEEVVDLGIKSTFDAFWSSIETVKVPDGSNVLTNEQLDAYVVNPSLSQDQLFSILDVSPSCAYIGTNTKVQE

SEQ ID NO: 271003 - protein, 87 aa, Zea mays
  unsure (1)..(87): unsure at all Xaa locations
  Clone ID: MRT4577_178751C.1.pep
MAMSRRGDWVYENNGGTCVAXLAGPDFFXVAEDTRLSVGYSILTRDHSKTCELCDKCVLGSFGSXGDIKALQKNVXATESLRQHRHT

SEQ ID NO: 271004 - protein, 92 aa, Zea mays
  Clone ID: MRT4577_178752C.1.pep
LLWPPGLRVAFSRKSVSQLLRNVNVNLGWSQEMWAFMFNVMVCRRFVHLSGKKVPPCCPEDMVFRMSCGLCDERSCSQVPTHRKGRPPTDKL

SEQ ID NO: 271005 - protein, 44 aa, Zea mays
  Clone ID: MRT4577_178753C.1.pep
RPFFFFFLAGKARIHLYSKTRAPELRFPLQSGGVYESSMLSTGL

SEQ ID NO: 271006 - protein, 80 aa, Zea mays
  unsure (1)..(80): unsure at all Xaa locations
  Clone ID: MRT4577_178754C.1.pep
NVQFIFNNRTTTAARIYYRLSLLPLSPCNTNATILTQCXQSPIAPILPPYLPSIIASLYENPALXPYSLQHAISPSNIPL

SEQ ID NO: 271007 - protein, 56 aa, Zea mays
  Clone ID: MRT4577_178755C.1.pep
MLEEMRNLKRAKVLTVFLYAHPLVLRFLRGYMGKRYSSFTCYMFCDCNKLIRSDEL

SEQ ID NO: 271008 - protein, 82 aa, Zea mays
  Clone ID: MRT4577_178756C.1.pep
KKTCVGAFKLPQKTFKKVQTKKPLTCHGTHVPNGAIVSILTNTPIFYPPLLIKIYRTQVVIVLQVLKNTETYCSRLIGLIQN

SEQ ID NO: 271009 - protein, 154 aa, Zea mays
  Clone ID: MRT4577_178757C.1.pep
MDHGFDGALQLPPGFRFHPTDEELVMYYLCRKCGGLPIAAPVIAEVDLYKFEPWRLPEKAAGGGPDAKEWYFFSPRDRKYPNGSRPNRAAGTGYWKATGADKPVGSPRPVAIKKALVFYAGKPPKGVKTNWIMHEYRLADVDRSAAARKKSNNA

SEQ ID NO: 271010 - protein, 128 aa, Zea mays
  Clone ID: MRT4577_178758C.1.pep
FLLRVIFLPFNPSKHQFLWSEMVYIRSRTFCCCIPVRFGVFILSLAGVILSTLIAAAGWVQVAQIKTHKPSTSDAIALWLHSGVFTLLAILSLFGFIGSLARSRNSVAAYSWGLIVFLLLSICSGAYT

SEQ ID NO: 271011 - protein, 52 aa, Zea mays
  Clone ID: MRT4577_178759C.1.pep
RQLCTVKELYGISIYCVLARIKDLFIPPTLVVPPPNNRAIPYCRILNNQASR

SEQ ID NO: 271012 - protein, 59 aa, Zea mays
  Clone ID: MRT4577_17875C.1.pep
MTSCAPCRNRARRNERVVQNTSRRAPFVLASHNWTSILCLLVPNLCFLSTNIRKVGLMS

SEQ ID NO: 271013 - protein, 49 aa, Zea mays
  Clone ID: MRT4577_178760C.1.pep
ARAKMFVESTTLWGPLIRGRHAKRSLPALIYNAVTATTHGATLDNGMSS

SEQ ID NO: 271014 - protein, 545 aa, Zea mays
  Clone ID: MRT4577_178761C.1.pep
MEATALASHSSPFAVHRSTGKPAFAYPHRGGPSMVSSVHLRTSRTPARSAAWRRRRRGTGLVVRAEMFGQLTTGLESAWNKLRGVGVLTKENIAEPMRDIRRALLEADVSLPVVRRFVSSVSDKALGANAIRGVRPDQQLVKIVHDELVQLMGGEVSDIVFAKSGPTVILLAGLQGVGKTTVCAKLAFYLKKLGKSCMLVAADIYRPAAIDQLTILGKQVGVPVYSEGTEAKPTQITKNAMEEAKSKNIDAIVVDTAGRLQIDRSMMDELTEVKKAVNPTEVLLVVDAMTGQEAAALVTTFNIEIGITGAILTKLDGDSRGGAALSVKEVSGRPIKFVGRGERLEDLELFYPDRMAQRVLGMGEVLSFVEKTQEVMRQEEAIELQKKIMSAKFDFNDFLKQSQNVAKMGSMSRIIGMMPGMNKITPAQIREAEKRLAFVESMINAMTAEEREKPELLAESRERRIRVAEESGKTEQEVSQLVAQLFQMRAQMQKLMGMVQGQEAIAGMGDLKDSLKPEEKAPPGTARRKRRNNTSKQRDLDAVLS

SEQ ID NO: 271015 - protein, 128 aa, Zea mays
  Clone ID: MRT4577_178762C.1.pep
MGFVSFVGRVLFVAAFLLSAYQEFNEFGADGGPAAKALRPKFNVFVKNVSAHLGVAVPHIELLYLALITPIIHDFYNYDMEKAEFAGLFAKFTQDLALIGALLFFLGMKNSIPKRQGGKKKAPKAKTN

SEQ ID NO: 271016 - protein, 48 aa, Zea mays
  Clone ID: MRT4577_178763C.1.pep
VFMCIGLKRNTLVRQFLFNVYSSFQKKVAINELLFKKKHPKKNHPLYN

SEQ ID NO: 271017 - protein, 133 aa, Zea mays
  unsure (1)..(133): unsure at all Xaa locations
  Clone ID: MRT4577_178764C.1.pep
MGFVSFVGRVLFVAGFLLSAYQEFNEFGADGGPAVNALRPKFNXMCEEHIAATISEAFXLSSRCYLLLLYLALITIIHDFYNYDMEKAEFAGLFAKFTQDLALIGALLFFLGMKNSIPKRQGGKKKAPKAKTN

SEQ ID NO: 271018 - protein, 158 aa, Zea mays
  Clone ID: MRT4577_178765C.1.pep
MGFVSFVGRVLFVAAFLLSAYQEFNEFGADGGPAAKALRPKFNVFVKNVSAHLGVAVPHIELKHVIAATIGLKGLGSLLFILSSSLGAYLLLLYLALITPIIHDFYNYDMEKAEFAGLFAKFTQDLALIGALLFFLGMKNSIPKRQGGKKKAPKAKTN

SEQ ID NO: 271019 - protein, 60 aa, Zea mays
  Clone ID: MRT4577_178766C.1.pep
RTNTPTTNIYNTIIQPTILIPNSTPTIHNPNNTSYALPLPHVKPLLPSYILNPVLNLLSP

SEQ ID NO: 271020 - protein, 72 aa, Zea mays
  Clone ID: MRT4577_178767C.1.pep
KLTEAHSPLRLTLGHAHQTCQRPQQLHVTTLYSTTDLQRHHYAWRWMSHPNHNFAMKLESMAEYTPREPRHH

SEQ ID NO: 271021 - protein, 75 aa, Zea mays
  unsure (1)..(75): unsure at all Xaa locations
  Clone ID: MRT4577_178768C.1.pep
IVLVQDRTAKRXISGARRRGLAIPWVAFQCNHHRPQRRRVAAGHRHSYPSHPLTHVLALRAQVVPEAMNRIYDDE

SEQ ID NO: 271022 - protein, 226 aa, Zea mays
  Clone ID: MRT4577_178769C.1.pep
QWWEGSVFSMLCILSFPLAWSWQQWRMIKKLQKLREFVRSEYDHSCLRSCRSRALYEGLKVAATPDLMLGYLDFFLGGDEKRTDLPPRLHQRFPMSLIFGGDGSYMAPFSLHSDRVVTTLISQAVPSSIWHRLVAGLNAQLRLVRRGNLNTSLLPVLKWLESHANPELNTYRVRVDLAWFQTTALGYLQFGLVLHASRGVVAAELQDGCTSKTDQHLVNQNTCPDF

SEQ ID NO: 271023 - protein, 64 aa, Zea mays
  Clone ID: MRT4577_17876C.1.pep
VPFVALAQYNVTLILFRFRVSELPLKVSQIIMSDIRLLILLESARPSWVIFFQSYPVLSHLYRQ

SEQ ID NO: 271024 - protein, 93 aa, Zea mays
  Clone ID: MRT4577_178770C.1.pep
FWTPSLFFPAPPLLCYIIRLALPCKTLPNGCFSWGLYPSSFFKSALLGPPRCVFFVRFVSTLFLCRPIIKKSRFTQCVIFKIRKKKKNPPTFF

SEQ ID NO: 271025 - protein, 153 aa, Zea mays
  unsure (1)..(153): unsure at all Xaa locations
  Clone ID: MRT4577_178771C.1.pep
GALPSGPAPVAPPPPPPRAGGAPPGTKTPWRSPPGAKVPRGGPPRGPPRTPPPPPATSGWGAPRAPRGPAGSXVFEGGHPPAPXPPGPRGPRMPRPRGLGPPRPSDSGGHPLGGPPPPWVLGKGFVSPGNLLETKGGIGYVRALLMQIRAGAF

SEQ ID NO: 271026 - protein, 346 aa, Zea mays
  Clone ID: MRT4577_178772C.1.pep
MEDEMESKNANKVWDLEIIPKGAKTVGCKWVYRTKLDSKGNIERHKARLVAKGFTQREGIDYNETFSPVSCKDSFRIIMALVAHYDLELHQMDVKMTFLNGDLEEIVYMAQPKGFVVKEKEGMGCRLKKSIYGLKQASRQWHLKFDRTIKNFGFKENVEDNCVYAKFKNGNASPAPIVKGDRYGDFQCPRNQYELDQMKVVPYASAVGSLQYAQVCGAISWKSSKQTVTTSSIVYAKFVACFEASGQLNWLKKSIPGLKVVDNIHKPLKLYYDNAPAVHYAHNNRSSGAAKHIDIKYYVVKDKVRDQIICLEHIRTEKMLANPLTKGLPPKVFKEHVADMGLRERL

SEQ ID NO: 271027 - protein, 71 aa, Zea mays
  Clone ID: MRT4577_178773C.1.pep
NPYVKVTLGPFVLCSNKCPEGIFVSRSRKLYESLSAPLTLGHSHTWHLQVSWTDSTNIPREEESRVSLRDR

SEQ ID NO: 271028 - protein, 162 aa, Zea mays
  Clone ID: MRT4577_178774C.1.pep
MAAAAARLLAVALSAAIFVVAVGGRGVFRVSGAERPSVERDLDAARAAIRRAARRHGNNASSAPGTWFRGDDVEYALLSRVYRNPAAFHRSYVEMERRFKVYVYEEGEPPLLHLGLCKDIYTIEGRFIEQLELLVPPLPFSTTNDILVKGLPEFLFLSEEDQ

SEQ ID NO: 271029 - protein, 81 aa, Zea mays
  Clone ID: MRT4577_178775C.1.pep
SITSGRINGVFHYILSSGHPSVLVSADVGRVEAVVRTGQSPIGDVIGVQNEGVKVHRIIWPPLPLVPPVPQEELAVEEPLD

SEQ ID NO: 271030 - protein, 94 aa, Zea mays
  unsure (1)..(94): unsure at all Xaa locations
  Clone ID: MRT4577_178776C.1.pep
TRTKDTNKHNSGTASNFYCLRTVLKRLHRQFLSLACLVKLPPASLNSYPGEPCTLNSTKQNVNKACXXXTPQXTVQYRANRSQPLLVHSPLKQT

SEQ ID NO: 271031 - protein, 90 aa, Zea mays
  unsure (1)..(90): unsure at all Xaa locations
  Clone ID: MRT4577_178777C.1.pep
METMIFSLLMLRALSTCVANATILPXCSQASIASLFSPYLSSIIAXVCENPALYPYRLXQAILAGNIPLSPLLCQQSTALSLVHLLAQTI

SEQ ID NO: 271032 - protein, 100 aa, Zea mays
  Clone ID: MRT4577_178778C.1.pep
TLWPPFHVHVRSFRDTFISFLENAALSCGSVILLQTLVHDSLAMHGSSASDRLSPYAVESTSICLSPGLVQSFDLAQSQPTHSVLQIPHRGTELPGHVKI

SEQ ID NO: 271033 - protein, 70 aa, Zea mays
  Clone ID: MRT4577_178779C.1.pep
LADSRFCNEPILQKISQCQVHCHVVEPPTGAPKYFWIGRLRRSPRFRCSQGGKRIMCKMSAAAPSERFSR

SEQ ID NO: 271034 - protein, 378 aa, Zea mays
  Clone ID: MRT4577_17877C.1.pep
MAASSGTRSVRLLVLLLCLLGFCVALSHQESAADSCARAKVAVASLVPFDSTSFRCTAAWKQQDFVLRYKNTGPSEWSFILSAPDRGSYVAVGFSGKGAMVGSSAVVGWAANGRGTVKQYYLGGKSPEECAPNRGLLKLVRNRTAVASRSGRLYLAFQLSTDYPQPYLIYAVGPDGSLPQSDSLRLPAHQNMASRSFNYTSGLSYNVAGSGDAAFPPERKHGLLGMMGWGVLMPIGMITARYFRQLDPCWFYTHMAIQVAGYAVGIAGIVLGFRLSEDGLRNVDVHKALGIAILAMASLQVMAILARPDKTSKVRRFWNWYHHNIGRAAILLAIGNIFLGLSIAQETSAYIVSYGVFVAVWVLAVAAFEMKRCYADDD

SEQ ID NO: 271035 - protein, 70 aa, Zea mays
  Clone ID: MRT4577_178780C.1.pep
IHVMATEPSKDATQAEEPKTLPDAWRSGGSGRHGGSVGHGGSCRHCLSIRHVDMLGTWHEYMAYDANATV

SEQ ID NO: 271036 - protein, 113 aa, Zea mays
  unsure (1)..(113): unsure at all Xaa locations
  Clone ID: MRT4577_178781C.1.pep
AWILYPLLGGFLDSDDVXDVKPLNXDRLLIKDAESEEQTAGXKLSTHATNEKPSDGSMVFGGPWPLGKDRSLIPLLITPGNIVMSSKYAESDFIGHDREYIPLKASDVIAALS

SEQ ID NO: 271037 - protein, 61 aa, Zea mays
  Clone ID: MRT4577_178782C.1.pep
FPARPTRAGHQSRVGCSMSVVIIGSSVAASVENPDHPIYDMFAHPSLHGTSSSDTPYSLTT

SEQ ID NO: 271038 - protein, 135 aa, Zea mays
  unsure (1)..(135): unsure at all Xaa locations
  Clone ID: MRT4577_178783C.1.pep
TESSXAGGLDCEDTGLTLTLRPGGLRAXPPPTARVPCTSTSGRAAAXDPDRKRACYDAGPRIDPPQVGAFYDAEPAPKDGVAGWPPVRSYRKKRSXRRGLQKAVKVAKEASDGAPYLRKEDLQAYAGYDQMHRAL

SEQ ID NO: 271039 - protein, 98 aa, Zea mays
  Clone ID: MRT4577_178784C.1.pep
VGTTREPPYKIQGGLDREHSQDMTVNRNRRQERNWDRYGEQELEQGTGNRMATQPDRNRNVGHLANTGTGTGRPLGLTGTGEQEQEQVTGERGRGREI

SEQ ID NO: 271040 - protein, 196 aa, Zea mays
  Clone ID: MRT4577_178785C.1.pep
TQHRRPAPSPSSIRDLRISKKGPRQATARDGVLDTVNSNLQNRHRHQGPFAEAAPLRGRPCRRQARHPRARRRGACLRPPAHCRGPAGSGRGQRRLEPGAPRLSRRQRRRKRWRCGALAPVRRCPMRRCYPYRLGKESPSEGCSCFSSCCDSSVLPVALQISIHVSLPRWSVSSPSRRHSSSAGPRPRKSGHDNDM

SEQ ID NO: 271041 - protein, 100 aa, Zea mays
  Clone ID: MRT4577_178786C.1.pep
DMVKGLLGKLLAPFPQGLFYSNALGGVKFFENPKPKVPPVPPQKKKIFGAPFKVVEGFFFLRGVPLLFFIRGRGLGDTKLWTWVVGVKKWVGTNHGFSNR

SEQ ID NO: 271042 - protein, 169 aa, Zea mays
  Clone ID: MRT4577_178787C.1.pep
MATTTTQASLLLQKQLRDLAKHPVDGFSAGLVDDSNVFEWQVTIIGPPDTLYDGGYFNAIMSFPQNYPNSPPSVRFTSEMWHPNVYPDGRVCISILHPPGEDPNGYELASERWTPVHTVESIVLSIISMLSSPNDESPANIEAAKEWREQREDFKKKVRRIVRKSQEMF

SEQ ID NO: 271043 - protein, 133 aa, Zea mays
  Clone ID: MRT4577_178788C.1.pep
YFIYLLTNTLITKLCSDGGYFNAIMSFPQNYPNSPPSVRFTSEMWHPNVYPDGRVCISILHPPGEDPNGYELASERWTPVHTVESIVLSIISMLSSPNDEPPANIEAAKEWREQREDFKKKVRRIVRKSQEMF

SEQ ID NO: 271044 - protein, 61 aa, Zea mays
  Clone ID: MRT4577_178789C.1.pep
HRIVVYTLVRPVPSFISTVRDNYLHMLSHMDQCVYRCFVSGSHRLMQLISLSHRTLGSRWW

SEQ ID NO: 271045 - protein, 50 aa, Zea mays
  unsure (1)..(50): unsure at all Xaa locations
  Clone ID: MRT4577_17878C.1.pep
KKKKKKKLKKKKKKKKNREKKKXKKKKKKKKKKKKNKKKIKKKKKSVISF

SEQ ID NO: 271046 - protein, 169 aa, Zea mays; identical to SEQ ID NO: 271042
  Clone ID: MRT4577_178790C.1.pep

SEQ ID NO: 271047 - protein, 52 aa, Zea mays
  Clone ID: MRT4577_178791C.1.pep
SDETVSRKRKGTCGWLASKHKIYLSPQPWFLRKTQAVTSRQAQRGLDARRRP

SEQ ID NO: 271048 - protein, 169 aa, Zea mays; identical to SEQ ID NO: 271042
  Clone ID: MRT4577_178792C.1.pep

SEQ ID NO: 271049 - protein, 74 aa, Zea mays
  Clone ID: MRT4577_178793C.1.pep
HYPFITRSEPHPMHVGHSNTSLRMAPATHSQPRPQWHTHTHCLFLSQSRWCYLHFFSHRSPGLASASACARAPS

SEQ ID NO: 271050 - protein, 95 aa, Zea mays
  Clone ID: MRT4577_178794C.1.pep
SARQVRSSKRATPARSSPPRRGRLPVPGAPAPRAGPPGSKPGPAKAPPPPRGGRRCFKRWGSRSAQGGRGASALGLSLSPRARRTRGGSRNKVKK

SEQ ID NO: 271051 - protein, 99 aa, Zea mays
  Clone ID: MRT4577_178795C.1.pep
AGWPVTLLCWAKGLLRSEKHSRSLCSFWLLQSVLCPSLNFLTTVGDICMHVRSFKSACSELQCCYSNTIAVFYSTLGLRCRFKCSGPSIFCIRLLIAFQ

SEQ ID NO: 271052 - protein, 53 aa, Zea mays
  Clone ID: MRT4577_178796C.1.pep
SGREDPFLLLTIYTKLITVLDLHKQQNHPYMHKTLYLLTILTNNTHPRERSYT

SEQ ID NO: 271053 - protein, 134 aa, Zea mays
  Clone ID: MRT4577_178797C.1.pep
MAGAGDEYYYGGPGQGQGPRGAPHGLLLAVVVGLVVAGPLFLGDGGEALTEAVAELLSPVGLLLLPVCLLFLIRLLSSDRGAAALADVFAFGGSPDAVHRVGGSPVGVALMLLLILALLYYRSSLFGGGGDDDE

SEQ ID NO: 271054 - protein, 63 aa, Zea mays
  Clone ID: MRT4577_178798C.1.pep
CLNDGNSDKPFEQESDAVHRRLGRDDSYNKVACQSFNMTKIVILFREDHNEVHVDYVLLVYET

SEQ ID NO: 271055 - protein, 130 aa, Zea mays
  Clone ID: MRT4577_178799C.1.pep
MAGAGDEYYYGGPGQRGAPHGLLLAVVVGLVVAGPLFLGGGGEALTEAVAELLSPVGLLLLPVCLLFLIRLLSSDRGAAALADAFAFGGSPDAVHRVGGSPVGVAFLLLLILALLYYRSSLFGGDGGDDE

SEQ ID NO: 271056 - protein, 55 aa, Zea mays
  Clone ID: MRT4577_17879C.1.pep
FCSAYRPPLPCKFHLTGHHSTCITCVYEASVSKKKKKKPPPSRRSHPGKKKTRPN

SEQ ID NO: 271057 - protein, 70 aa, Zea mays
  unsure (1)..(70): unsure at all Xaa locations
  Clone ID: MRT4577_1787C.1.pep
MHVALAVETKKGLVLLDFWVSPFGQRCRIELAEIGIGYXYSEHDLMGGAKSDILLRSNPVLKKIPVLLHD

SEQ ID NO: 271058 - protein, 78 aa, Zea mays
  Clone ID: MRT4577_178800C.1.pep
RRLRTPCRSAVVTHRIEVAGRAAVFSLFRFLRKARRRMARVSGRLSYVVFLLLSLSRQWEPIDAINGSSHAHACLDNG

SEQ ID NO: 271059 - protein, 141 aa, Zea mays
  unsure (1)..(141): unsure at all Xaa locations
  Clone ID: MRT4577_178801C.1.pep
AWXSGLCPFSLPGLPNXLRXVVRNWKVWFFQKEVCPMHHKQSGASXHLVRXTQQRIGXATVMHGAECCTFESQTVSNVVLLXLQXXRRVTNARRGFQXRGLVPYCWRKFSCSSFSMLILRTAAXXEHIHRAKVGLRXXITV

SEQ ID NO: 271060 - protein, 153 aa, Zea mays
  unsure (1)..(153): unsure at all Xaa locations
  Clone ID: MRT4577_178802C.1.pep
PSTEAYNVKRVLAAHSQQXMPPSKAKSANEXGTTEEYYIXNAVRGFICKGAGSLHIAXXSIASLQCPSFSDSKRYRVLFVLVPRDCFXVHNRMECQAXXRYPKDGCPKSRGXTVPRXXPRGSWDTEDSXWFILLWCIALILSXXTHPTECGPR

SEQ ID NO: 271061 - protein, 153 aa, Zea mays
  Clone ID: MRT4577_178803C.1.pep
GGFFFFFFFFFFFFFFFFFFFFFFFPFLPFKKHKGRGPGPGTSPGAQQNGGGGGGASPKKGRGGQTPKRGPKTKRGTQAADPEQKQGATAKPKGEPETKKPQRGRGGAKAGGSETPKKGGRPRGPGPQGKGPPQGPQGEKGRPGGDLTGPPPA

SEQ ID NO: 271062 - protein, 75 aa, Zea mays
  Clone ID: MRT4577_178804C.1.pep
FGSRFRCLHLFCPPGTTTTHPVVYTRRGAHNKAAGRHGTTTQTPQGCPEDDFEHFTHRGACDNRHEPSCSTRDTG

SEQ ID NO: 271063 - protein, 112 aa, Zea mays
  unsure (1)..(112): unsure at all Xaa locations
  Clone ID: MRT4577_178805C.1.pep
FEIISYLTGLXGRATTYLEYFTKHXFXXLIVHIQNAILQPNPDHFPKYQXQPPVIPHCFTPNIAYHLHHTFNSPQSSTIHCATTHTTAVTNNSFLKKQXTXPFTFLQNPPFT

SEQ ID NO: 271064 - protein, 63 aa, Zea mays
  unsure (1)..(63): unsure at all Xaa locations
  Clone ID: MRT4577_178806C.1.pep
RAVDQNLHQVSREVSQNQVAPAPCGSASPDTLGPGQPSFPVVSEQGGYYKNQNYPGFLGRPXS

SEQ ID NO: 271065 - protein, 454 aa, Zea mays
  unsure (1)..(454): unsure at all Xaa locations
  Clone ID: MRT4577_178807C.1.pep
MVQIVEHRDFIPEDFSMEEEAASSMPRASNRPALXTSRAPSRAAPGALSAXASPGAMKQWCDDVDRVLGMAHSGSARPRPQSFWRQHEASASVRSPSMKAAPTEDLRVELNRWHAGEDASISPERPDDLQKELNRRRAGEDARVSLESARERRLNFEGRNLDQDFAPHAPQTPRGARTQTGVPLVGVGCTALADHLHAATWPPKFRPHLPEKYDVNFASAYQQHGVEAHLHVVRQEPGETLQAFIARFTKAPERARQAPTATGRQQWVMPCAPQQSPQGLGMPRDHQAREVRGASECREIIKLAKRVSERRDRLPKMARHLVADLARRRSMKSPEGVLKDVFTEDSDSGDNNDRRKKLYVMYGGSWELTSRRNVKSLRREVLSAVLGVPKAAPHQRWRSTTISFGASDCPDNMAGADILPLITAPVIANMRLHHVLIDGGAGLNVISHAAFKQL

SEQ ID NO: 271066 - protein, 238 aa, Zea mays
  unsure (1)..(238): unsure at all Xaa locations
  Clone ID: MRT4577_178808C.1.pep
MATSVPEGLLGEPSSPWKVQQLLPLCAVLAVVVAWCAARAAEWAWLKPRRLERALRAQGIRGTAYSPLAGDAPLSDRLAREARSRPPLPPGCHAIVPRAMPLVHHAMNEHGKTSVTWFGPTPRVIITEPELVRQVLSNKFGHFEKAGFGQLTRLLHYGVSTHEGSKWAKHRGIINPAFHFEKLKRMLPAFASCCADLVSTWERLVVAADEXPCEVDIWPEMQRLTGDVISRVAFGSSY

SEQ ID NO: 271067 - protein, 70 aa, Zea mays
  unsure (1)..(70): unsure at all Xaa locations
  Clone ID: MRT4577_178809C.1.pep
GGFYTDTFRDDSIKLTTSQLPPHYXQNTADSTAIYFLLPRSREYRLHRIPCDEHCHFYMEETSTLLRASR

SEQ ID NO: 271068 - protein, 88 aa, Zea mays
  Clone ID: MRT4577_17880C.1.pep
RELGITSWSGRPFFFLFVHFFWVGESKQKLNNLTGKLGYLLAGLRGSAYILLRNSMFRVAPGCASMEHVCSFTHEPSNLSGPPPSKLP

SEQ ID NO: 271069 - protein, 73 aa, Zea mays
  unsure (1)..(73): unsure at all Xaa locations
  Clone ID: MRT4577_178811C.1.pep
PKARLGGGPPGRSNRKNGFAXPERPTXASFGKGAVNGGAYLGKGNLQGKGGYNKFLRGFKNKFFSHFTIRNFP

SEQ ID NO: 271070 - protein, 104 aa, Zea mays
  unsure (1)..(104): unsure at all Xaa locations
  Clone ID: MRT4577_178812C.1.pep
MTDKRTYIPGTRLCWQAELLNKAGRVVHVQFVMTARVIYLXTALALDLPAWAFKSIDKLRKAFRWRGGKEAKXAWPKVACPKELGGLCVLDLKNMNWALRNRWL

SEQ ID NO: 271071 - protein, 77 aa, Zea mays
  Clone ID: MRT4577_178813C.1.pep
TKFFYSVFTNNPPSPQKSLKNRGGRGHPITTLNNFGGRAGLKKTAGPLTVLKIFLSSYVLGGPPGSLNCARGGSQPK

SEQ ID NO: 271072 - protein, 125 aa, Zea mays
  Clone ID: MRT4577_178814C.1.pep
KRPPFPWGAGRTMKPWRPARGPGTWRGSSPKEGSPFFSSRSPSARTPTCSWPALWPSLPGPALLFCGLVGGAPRDPASGPPLRFKFWPCGQVSPPENWSCLIFFWAKCGPEVLNLFFYKPPFSPP

SEQ ID NO: 271073 - protein, 103 aa, Zea mays
  Clone ID: MRT4577_178815C.1.pep
NLYYYIKIVESTSTLWLPSPDPAPSHARTWKQPTSPHRAPPPRPHRHRPPSPPPRISPPLRIPRWLCAGVLAAPSSGWTPPKRPPPKATRLLRLRARGPSPRT

SEQ ID NO: 271074 - protein, 241 aa, Zea mays
  Clone ID: MRT4577_178816C.1.pep
GTSRPAGLRAQREWESRHCSLVSILQPQLGFFCHLPAELPARAAARPSARPPSSSLARLTAPLLPLPSRASSLLAQLGLRPTSSAAVVLSALHARSSPPSSSLPRSCSAPISMCSVRARPYPLLLRRRGFPASASRPSSLAKTPSEAPWLDSAQFVPCSPLRRALSLLSPMALSPRSASGSGTVPSSLAIAPMSARACSAAVSSRLPAALVLAAAPSRSPFPASSSLLAASYRAPISRARA

SEQ ID NO: 271075 - protein, 68 aa, Zea mays
  Clone ID: MRT4577_178817C.1.pep
ILGKPIMAAKCFLRSGSCRFPPCFRFFPPAILFFAPPILVPRAGGAPCFFRRPLFCYTLVINDGPACS

SEQ ID NO: 271076 - protein, 88 aa, Zea mays
  Clone ID: MRT4577_178818C.1.pep
LLEVESLRNEKVYDENTKCFGLARIGQPTQKIVSGTFAELRNVDFGPPLHSFVIPGEMHPLEEEMFSYFQFKAENEKFIQKAEESEDS

SEQ ID NO: 271077 - protein, 75 aa, Zea mays
  Clone ID: MRT4577_178819C.1.pep
MAATPADAKTEAAKMDLLEDDDEFEEFEIDQEWDEKEEGNEAVQQWEDDWDDDDVNDDFSLQLRKELEGNNAQKS

SEQ ID NO: 271078 - protein, 240 aa, Zea mays
  Clone ID: MRT4577_17881C.1.pep
MDFDEYEYLEKTVEAFAAPANGSSPPGSGYKDKERSSRRRSTGGDEERDNVERRSKRSRPEEGRDRDRERHRYRDGDRHRSSRERRDRDRDVKEKEQGRENDKDRRSRDREREKEEREKDRQRRSRSRSERRRDDEERDRYRERDVRRRKEEVAEPEVDPERDQRTVFAYQLSLKADERDVYEFFSRAGKVRDVRLIMDRNSRRSKGVGNIEFYDALPGYLPITKIGQLIFGQLLMSMPS

SEQ ID NO: 271079 - protein, 75 aa, Zea mays
  Clone ID: MRT4577_178820C.1.pep
MAATPADAKTEAAKMDLLEDDDEFEEFEIDQEWDEKEEGNEAVQQWEDDWDDDDVNDDFSLQLRKELEGSNAQKS

SEQ ID NO: 271080 - protein, 78 aa, Zea mays
  Clone ID: MRT4577_178821C.1.pep
HVTFFLATALNVEFSMNLNEQQGFCNKGNQITYHKPPREEGKTHPHTSEEGGHIQKKNPGRADTQNGSNNKKTKGGDP

SEQ ID NO: 271081 - protein, 75 aa, Zea mays; identical to SEQ ID NO: 271077
  Clone ID: MRT4577_178822C.1.pep

SEQ ID NO: 271082 - protein, 75 aa, Zea mays; identical to SEQ ID NO: 271079
  Clone ID: MRT4577_178823C.1.pep

SEQ ID NO: 271083 - protein, 58 aa, Zea mays
  Clone ID: MRT4577_178824C.1.pep
HSMPEPCDLKRTYQSKSDWTLDPNLKQICRSNYSHPSNGCELLARVRRSNYSHPSNGC

SEQ ID NO: 271084 - protein, 96 aa, Zea mays
  Clone ID: MRT4577_178825C.1.pep
PPPQKSKEFPAGDGFVSRDWFLSRVEPPVCPPRRGGCWDFPVCPRGYIPPFQWGDGGDLSPPPSKGGKLGGWAPPPPRGLKVFPGYFGPKGPPWVR

SEQ ID NO: 271085 - protein, 75 aa, Zea mays; identical to SEQ ID NO: 271077
  Clone ID: MRT4577_178826C.1.pep

SEQ ID NO: 271086 - protein, 99 aa, Zea mays
  Clone ID: MRT4577_178827C.1.pep
EDKFLFYYFFWSFVFTCNFFTLCQILQQRCINADFCTLKGNRLYTPLASYIERINLINSKKERIYRREQKPSPLYDTQPPRVPAKRTWETSDNAQDKVH

SEQ ID NO: 271087 - protein, 86 aa, Zea mays
  unsure (1)..(86): unsure at all Xaa locations
  Clone ID: MRT4577_178828C.1.pep
XMLSGRAIAQPWPGELDGVDPQRPQPRLLLRASVPFRPALRRLLRHQRRIRALSARASSRRYGPAHLALPLAAGAGPVSVGLPPRQ

SEQ ID NO: 271088 - protein, 68 aa, Zea mays
  Clone ID: MRT4577_178829C.1.pep
KTTTSQLEKLPKKRAKAGPNRRKDPPTRHEGRKSQKTPPWRVVSYLRTYFFFFFLFFFFFFFFFFFFF

SEQ ID NO: 271089 - protein, 88 aa, Zea mays
  Clone ID: MRT4577_17882C.1.pep
LHDFDINLKDLFLLGATTLCWSLWLCRNDLSSKKECIFVYEGYPFYGEALTARVPFVKQKTKFIHEPLQSRSSKQLTLSNMSSLRTRG

SEQ ID NO: 271090 - protein, 24 aa, Zea mays
  Clone ID: MRT4577_178830C.1.pep
CYNISNLLMESKIFSLSYLIWSFC

SEQ ID NO: 271091 - protein, 162 aa, Zea mays
  Clone ID: MRT4577_178831C.1.pep
MTPPPPRSFAGGRRPSRLGASSRSRPTPGSFNLRRRLGISPPIPHPHPRRRLGRSPPLPLGKPLCARPTRVASPPAPAQQLTGPTRIASPPARGSAGHCSAPETRCRPVGSKLLDDARWTAEAQSPPSLHPVELHMPPEAPSPPSLKWHRDSAVRAAAHPQR

SEQ ID NO: 271092 - protein, 156 aa, Zea mays
  unsure (1)..(156): unsure at all Xaa locations
  Clone ID: MRT4577_178832C.1.pep
LLPTLRSSSSRYHTTPESPTPHQTSIFNIILDGKTMSLQAESXDTIYYAQDMIHHXEGMPPEHVLLMSAGNDMEDGRTLADYLLHQESXLRLVLRLRTGISYTSMRALSPKHRHKTICXRYCYAXLHPRCGCCRKKKXGHRNQLKLEKDAELRCCS

SEQ ID NO: 271093 - protein, 56 aa, Zea mays
  Clone ID: MRT4577_178833C.1.pep
LSPSTNAQWADTPRMSVEPVWQNEDLVTGEDGRPPAMAHHQLVPRKIDVVVAGATA

SEQ ID NO: 271094 - protein, 140 aa, Zea mays
  unsure (1)..(140): unsure at all Xaa locations
  Clone ID: MRT4577_178834C.1.pep
HAVPKKKKKKKKKKKKKKKKKKKKKKKKKKKKNNKHKKXKKLKYNIKKNGVPFSGVPFSPPLSWGGGWLFFFGPLYSISPALRFTTVFALGNPLAFPPLNPFAPFLFSGARFLAKSPPPLVFPFLSPPLLELAPPFLPVF

SEQ ID NO: 271095 - protein, 64 aa, Zea mays
  Clone ID: MRT4577_178835C.1.pep
FASLFSSYFIPVRNLDLLLEVIELLLPNVIAGPHIGGSVFVVSIFYLGPYPPLKINPGLLLGLR

SEQ ID NO: 271096 - protein, 68 aa, Zea mays
  Clone ID: MRT4577_178836C.1.pep
PRVRQDHCSKEGGSHGVNGQARYGYLLLPESLAGCFVTRLWSPWVGMWLVQLLHAYFMCELLLFMLSS

SEQ ID NO: 271097 - protein, 81 aa, Zea mays
  unsure (1)..(81): unsure at all Xaa locations
  Clone ID: MRT4577_178837C.1.pep
MGMEWKQKVSLFDVIDETSVPTKLGHAASNGVAATATWGNSYVNRWNGXAPHERHFEILEKHRALPIWQQEDLFTWELNFA

SEQ ID NO: 271098 - protein, 71 aa, Zea mays
  Clone ID: MRT4577_178838C.1.pep
ICSGHRIGTAEVESALVSHPQCAEAAVVGVEHEVKGQGIYAFVTLVDGVPYSEELRKSLIMTVRNQVFCLF

SEQ ID NO: 271099 - protein, 96 aa, Zea mays
  unsure (1)..(96): unsure at all Xaa locations
  Clone ID: MRT4577_178839C.1.pep
LIGTAEVESALVSHPQCAEAAVVGVEHEVXWGYFLSPFSSLIIFGILPYMIHNYXYLQVKGQGIYAFVTLVDGVPYSEELRKSLIMTVRNQVFCLF

SEQ ID NO: 271100 - protein, 178 aa, Zea mays
  Clone ID: MRT4577_17883C.1.pep
RRSSSSTAAREVPLQPSLGEGEGEEARVQVKEATERLGGEYSGSLHPKCTHLVVQSFAGRKFEHALKHGPRNGLFLVTLGWFVDCVRRNMRLDESLYAIKSIGENGVPPGEFSRLVGVPVNEKSCLPPLIFQDKACSDMTQKHSLQTPGNGGGHDGLVFMNDTIYIDPGISDEMRKKI

SEQ ID NO: 271101 - protein, 281 aa, Zea mays
  unsure (1)..(281): unsure at all Xaa locations
  Clone ID: MRT4577_178840C.1.pep
MEAAAAAVLHRTVEANGISMHVAESGPDGDGAPAVVFLHGFPELWYSWRHQMAHLAARGYRCVAPDLRGYGGTAAPPDVASYSAFHVVGDVVALLDALGIHNKVFVVGHDWGAIIAWYLCLXRPDRVAALVNISVAFMPRRPRVKPLEYFRAAYGDEYYVCRFQEPGLEAEFATFDLKSFFTLALTLRATGSSAMDLRKMQTYRAKVQVPTKFIVGDGDLAYHHPGVKRYIHKGGFKRDVPMLEEXVVVIKGAGHFIQQERAQEISEHIHDYIKKXEACGL

SEQ ID NO: 271102 - protein, 108 aa, Zea mays
  unsure (1)..(108): unsure at all Xaa locations
  Clone ID: MRT4577_178841C.1.pep
HNRLPTRGGNIYCLLMLLAICAXAATATIYPQCSQATISYIFPSYLIPSISDLCKNPKLKPYSIQQATTDGIIPLSPLILQQSSVLLHMLPLVNVTYQNITSQSLTST

SEQ ID NO: 271103 - protein, 88 aa, Zea mays
  unsure (1)..(88): unsure at all Xaa locations
  Clone ID: MRT4577_178842C.1.pep
SSXVAPSGVPXSWPLGSWWXGPGXFXWVPLPLASXSXPARPXCXCASVLRFLFXXPSVAXRRLFPSAVVLFLSSAGPXRRRPXAVELS

SEQ ID NO: 271104 - protein, 354 aa, Zea mays
  Clone ID: MRT4577_178843C.1.pep
VGIDHPPRSRSTAAARSTTPTRAMAAVRHRQLEANGISMHVAEAGPVNASAPAVLFVHGFPELWYSWRHQMGYLAARGYRCVAPDLRGYGGTTAPPEPNSYTVFHIVGDIVALLDALHLPQVFVVGHDWGAIVSWNLCLLRPDRVRALVNLSVAFMPRRPGVKPLEYFRAAYGDEYYVCRFQEPGLEAEFATFDLKSFFTLALTLRATGSSAMDLRKMQTYSKQMVLPSWLSEEDVSYLASVYSKTGFAGGVNYYRCLDLNWELMAPWTGAKVQVPTKFIVGDGDLAYHHPGVKRYIHKGGFKRDVPMLEEVVVIKGAGHFIQQERAQEISEHIHDYIKKFEACGLPPLRVSKL

SEQ ID NO: 271105 - protein, 234 aa, Zea mays
  Clone ID: MRT4577_178844C.1.pep
MVVGAFGEATPPPDLPPSRVSVSSPSPHPRRRCALASRFQEPAAPRRHAWVSLQGRLIGADEASCAASAAPGLLPDEAVAWELFSPLHRVLLVATVAAASSRSHAARRIEQLQRSIHLRDEVLESMQQKLDDLLVEMSSLQQQYVKCDSYISEEREINEIETGSKTIGYGEESRCCVCTKLEAATPQKAKDLRGTDDARSDMGDCSSLVFMDHEERLSDLSTSGRSGVSSVDTR

SEQ ID NO: 271106 - protein, 163 aa, Zea mays
  Clone ID: MRT4577_178845C.1.pep
PGLRSSAAAPRRAPIDLVTVLDVSQGMMGEKLQMLKRGMRLVVASLGPADRLSIVAFSGAAKRLLPLRRMTRTGQRSARQIVDRLVVCAAAATTATATQGQQSACMGDALRKATKVLEDRRDRNPVATVMLLSDTQQQQQQSAAPENSSRKQVGRSAVAPATR

SEQ ID NO: 271107 - protein, 83 aa, Zea mays
  unsure (1)..(83): unsure at all Xaa locations
  Clone ID: MRT4577_178847C.1.pep
EPHSXPFETPSATQXXLPYRSPRPRXPXANEWATHRKAXXVATAXXPNXVVXXXAPRKGXXXSLXQXXKMGRXRXXXMFXGLP

SEQ ID NO: 271108 - protein, 351 aa, Zea mays
  Clone ID: MRT4577_178848C.1.pep
MSGSKRSLPPWMSFSKDGEDDSRKKKHAGTSQKAQKGPDFSKLLDGVVFVLSGFVNPERSTLRSQALDMGAEYRADWTSDCTLLVCAFVNTPKFRQVQADNGTIISKDWIFESHKQRKLVDIEPFLMHAGKPWRKNKEPIKTDQDEKETCKEHQKQVQRSRVKPSTSDAMEAGNLESANKCFSPSKIKQWAMDDLAQTMSWLDSQEEKPEPSELKAIASEGVITCLQDAIESLEQGNDIKGVAEQWSFVPHVVNELLKLDGGGKGAALPKEQLRQLAGKCKKIYQAEFARADMGDKNKGRHQNDPHVTEHRRKTNTKSEDDHYDSDATIEMTEEEIDFACRRLPGLYADDT

SEQ ID NO: 271109 - protein, 72 aa, Zea mays
  Clone ID: MRT4577_178849C.1.pep
SARGPVLQHYSADIVKHHSLSHEPWEAEPAALIADRDAQQMTCLCGLQLHKSRASASGSLARRAYYRRNSTQ

SEQ ID NO: 271110 - protein, 80 aa, Zea mays
  Clone ID: MRT4577_17884C.1.pep
MVLGPFFPYLEKRCFIFISLCHCPGFCGRFLTECFDFFWPGHPVGSFFFLWPPCPFVQKGMLPPFIKREKVVFLGGFLPP

SEQ ID NO: 271111 - protein, 113 aa, Zea mays
  unsure (1)..(113): unsure at all Xaa locations
  Clone ID: MRT4577_178850C.1.pep
DPDEACDDSYSPRNSSDQDGGYDGDLVFGSGSWXWGLXSGCLDYRNSLPFVTMDYSSGRIEGPRDPRAALSAGSHAQPPVLQNRSGPLRVKKKLAASYRSRGSVSEHGHLPRH

SEQ ID NO: 271112 - protein, 85 aa, Zea mays
  unsure (1)..(85): unsure at all Xaa locations
  Clone ID: MRT4577_178851C.1.pep
LLCSSLXPSARAPSSLRRVPSXATAMAELSSATPLLSPPNTDAFPTHQWRSRRRLTASLRGXPPHHRVLAEPTPLATISSSPFPL

SEQ ID NO: 271113 - protein, 73 aa, Zea mays
  Clone ID: MRT4577_178852C.1.pep
SVHKFVNNLFNRKFKFRCCSFVITSIKRKQSFQDPRQCHCLLFGLPTEIWEINELNPWFSLCFFPLFLGVVSP

SEQ ID NO: 271114 - protein, 68 aa, Zea mays
  Clone ID: MRT4577_178853C.1.pep
EQRGGHHQPDSLSHDQSVGRTATGSVLLLVPVLVIAPHNSRVGAAGGRRSRGGSIVGGCEGRRLGVGG

SEQ ID NO: 271115 - protein, 70 aa, Zea mays
  unsure (1)..(70): unsure at all Xaa locations
  Clone ID: MRT4577_178854C.1.pep
MATVLGXPRAPALLFGKYSLRAAPAPTDVELTAAKVGIMGSSERRRCRLSAQANYNVKLITQEGEVELQV

SEQ ID NO: 271116 - protein, 636 aa, Zea mays
  unsure (1)..(636): unsure at all Xaa locations
  Clone ID: MRT4577_178855C.1.pep
MKFMKLGSKPDAFQTDGGGGDARYVLSDLPSDIVVHVDDARFYLHKFPLLSKSGLLQRLIVEASQNGSDEVAIQDVPGGAKTFEICAKFCYGMVVTLNAYNVVAARCAAEYLGMTEDVEKSNLVFKIEVFLSSGIFRSWKDSIIALQTTDALLPWSEELKLVGRCVDSVAAKATVSASNVVWSYTYNRKSASSDEIVEARRSSQAVPKDWWVEDLCELDVDLYRRVMVAVKSRGRIPSDAIGEALKAYAARWLPECCDALVDDAYSGAYKHLLETIVWLLPSDKGSSGISCRFFLKLLKFTVLVGAGELLKEELMDRTVLQLHKASVSDLLIPSRPPAQTVYDVQLVQTLIGRYMSHAGVSQGGIFLNDLDQEMFETNVDGESLLALCKLVDRYLAEVASDPNLSVSSFVDLATSMPETARPTHDGLYTAIDVYLKLHPGLPKMEKRKISNLMDVRKLSKGACIHAAQNDRLPLRVVVQVLFFEQLRAAGAAAAAGTPSASVARCIARLAEQEEEEXLERRPRAAGAPDPRRAEEAAGEPEAAGRPPPGRGRRRAAPGGAQQXVANQSSRMSLSSRSRRIFDRLWVGGAKLPGEAAAAGKGSSDTSGSSQSPRSSAKPPESKSSSSSSRNRRYSVS

SEQ ID NO: 271117 - protein, 79 aa, Zea mays
  Clone ID: MRT4577_178856C.1.pep
QHFLAQSVCSDDTVYLPCSGELLVSTALEREPMATSDLLTGTLSILIRSAYGTSGTDGADVDPIYKLPGQSDLNFCSYW

SEQ ID NO: 271118 - protein, 199 aa, Zea mays
  unsure (1)..(199): unsure at all Xaa locations
  Clone ID: MRT4577_178857C.1.pep
LCYDSRDSRGIWSREINLEVEPHNFIAFDYNKERGVSLPDNCSSVCIEGTLIQTNSLSHCWKTKGLKSLNKLEKHKSSYGSISRDSNPEQEVEASDEASGPTCCVRCFTDLPAVLVYEVLARLDAKDLGIVSCVSTLLHTLATDHQGWKKLYCERWGLPYLPTTLNGPFLPGGGALDGKSWKTFFVEREXFRXKSFMGR

SEQ ID NO: 271119 - protein, 83 aa, Zea mays
  unsure (1)..(83): unsure at all Xaa locations
  Clone ID: MRT4577_178858C.1.pep
HASAELRLXFPGSGSPDRRVVVATATTLDLLPAKGAKRGFSDEAPPASTVATAGKGKXGRRGVRLXKKVAATPEPGDKAQVVG

SEQ ID NO: 271120 - protein, 26 aa, Zea mays
  Clone ID: MRT4577_178859C.1.pep
NVQIQTRLTNSICYTLYVSMNRKLRL

SEQ ID NO: 271121 - protein, 128 aa, Zea mays
  unsure (1)..(128): unsure at all Xaa locations
  Clone ID: MRT4577_17885C.1.pep
SLGILCLAMCLEGRAPCLMFPLQNPAQLGFLAVSLGYSEALMSCSGTSSGIFMPPXVCARPGISPGXLFRMSVGHPGALEQPWAQFGRALALLLSPRAGGHLKQAASVFFWSCNRHQPPLRAFCPCAS

SEQ ID NO: 271122 - protein, 153 aa, Zea mays
  unsure (1)..(153): unsure at all Xaa locations
  Clone ID: MRT4577_178860C.1.pep
RSVGNASSHALRLSVLTAYTDSAERGTTKNRGRTKRFGGTRGCVLMMLCSSATLAPAEDPDLYLXRNATHSTNTVLGVRPQGXRIYGELLGPRITXYCNTHNRCNVDNELDQSLCITXSGKRHKTNYWMDGMPITHCAILPSSNFDDKRRPKD

SEQ ID NO: 271123 - protein, 78 aa, Zea mays
  Clone ID: MRT4577_178861C.1.pep
YINLLGGLVSYSHFTPPNHRKHPCAMLVDDAQHTRTSTRNNTTYLSTADGVSYTYCTCHDDYVYLHLLPRTLRCYHCF

SEQ ID NO: 271124 - protein, 111 aa, Zea mays
  Clone ID: MRT4577_178862C.1.pep
GLGGGQKSGWLNTPIQTHPWDLGNYNPLLHDPCGPKGFWIWVPFSLNLKGGACKLLLLKWLAFLGAATLKIFRPKPPWAQKPPSPTLRRPPQALSPPPSRGSPNWPNHFIQ

SEQ ID NO: 271125 - protein, 106 aa, Zea mays
  Clone ID: MRT4577_178863C.1.pep
HPHGAQCGPKGGPLGLPHGGVLPRQDLAQPQGPPRGCGGRRHPRRALIGMGPQRAQRGFFFCLTPLKLSLPFFPSSPDVCMLGQEHFCCGLRRFECHPPFIQGAFM

SEQ ID NO: 271126 - protein, 159 aa, Zea mays
  Clone ID: MRT4577_178864C.1.pep
QAQLGLCIIHHFPVVSQRQAITLTQQDSKYLSREQHQQRSFIPSSYQPFRSHDGRRGSPRGLPANGGGRPLGPVAAATGSSSATRRRVRSGPVEPGPGPHPTGRTRPSRFRWCRREKGSPPDSDRPASCHGRPASCPCSCSRVCSSALLARPGIRTGLR

SEQ ID NO: 271127 - protein, 37 aa, Zea mays
  Clone ID: MRT4577_178865C.1.pep
SIGSVSWCAWLHTMFMRPDDSVFVSCMHRGYLLVCTA

SEQ ID NO: 271128 - protein, 69 aa, Zea mays
  unsure (1)..(69): unsure at all Xaa locations
  Clone ID: MRT4577_178866C.1.pep
DRLAWWSKKNRSKKRALCPLSLVTFPWPCGHLKPFQIFVPCHANINQNSFCFPWCTEKFSPRGKNALXP

SEQ ID NO: 271129 - protein, 57 aa, Zea mays
  Clone ID: MRT4577_178867C.1.pep
GRFFFFFFDFKNFASNNLWGHSLGPGQMKNMSARQCYEVRRHKGPSWPDACRQRSIK

SEQ ID NO: 271130 - protein, 192 aa, Zea mays
  unsure (1)..(192): unsure at all Xaa locations
  Clone ID: MRT4577_178868C.1.pep
YQQSSYPVAVLTFTVTNSGHTGADVTLLCTWANSVGGKSELTGYHSNSSMIEKDGVHGILLHHRTADGQPHVTFVIAAHEKEDILISECPYFVISGSSASDAFTAKDMWNSVKEHGSFDHLDPIKTSMCSRPGSSIGAAIAASVKLAPXATQDISFSLACACPEVKFSSGRTYHKRYTKFYGTDGDAAAAHA

SEQ ID NO: 271131 - protein, 93 aa, Zea mays
  Clone ID: MRT4577_178869C.1.pep
SCFLHSFFIHVLFHSSHLLPPYLCEVLLMFAVLLVFSYCVVVSHYVSLDVTHYLFLTVNSPLPINLYSPTFLPPLLGGGGGGGERGGGKQRPR

SEQ ID NO: 271132 - protein, 138 aa, Zea mays
  Clone ID: MRT4577_17886C.1.pep
KSKLVLPGKAPPAAEAPSPALGPEAGGPSAGGDSGAGGSSSRAPSKSPNPPVPPAGVSAPALLALALVGFLAPVWLRVNGGPLIPPKVAPPAWGQKIALFSFYWGSFLSFVFAREIKKVPVLVDLLFGRVIVPIFFSS

SEQ ID NO: 271133 - protein, 50 aa, Zea mays
  Clone ID: MRT4577_178870C.1.pep
IHQYTEKYLSLQYTLNNTAKLKKCKLISIFISISLLRSDYTHLYDKLNSY

SEQ ID NO: 271134 - protein, 156 aa, Zea mays
  unsure (1)..(156): unsure at all Xaa locations
  Clone ID: MRT4577_178871C.1.pep
LENKTSPFNFADXLSXLHHTDTMRDRKGLCAGTHXPGTTERERPGAQKGHDTEEHYKTRKTKPINAHTSRIACFAMSQEGRLIVTATTKGTLVRINNAREGNLLHEVMRGADKAXIYSLSFSNDLQYLACLSDKGTIHVFNLKKNVGETANDKPMP

SEQ ID NO: 271135 - protein, 50 aa, Zea mays
  Clone ID: MRT4577_178872C.1.pep
FYRAAVHGALADILLRGSNLITDVQGMASLTGVLPPDVPFAQAFAAVLTA

SEQ ID NO: 271136 - protein, 412 aa, Zea mays
  unsure (1)..(412): unsure at all Xaa locations
  Clone ID: MRT4577_178873C.1.pep
MILSVSFGPSFCLEQTLGPRIGYLPLLIPVIRAHFSNALPPGVDTVWFEYKGLPLKWYVPIGVLFDLLCADPERPWNLIVHFRGYPSEILSPCEGEDSVKWSYMNSLKEATFIITGNSKSVMNMSHADQVALWESVMKGNLDGYKNISTRLKLGPFEDDVLVRTASVERQRQQNSDEPESPGSSKPCMLFCSGTFILSSMLKVHVLTRVQYGNPYLLSFRRVSVXLSDITLSDAMLRYTRRPQTLLAXSINLWLGRVPVRLYVRNVQEDLEYIEHAVPVSDWENVSYINRPFETRKAEGRSYITLEHALQTLLPEFFSSKPPGSADGSQHAGAMDAAADSSDATNSSSRSQEAEQALASPAEAGSAKRAKVKLVRVQGVELDMDIPFLWVADHLKNPEYYVHICVYVGTRKQ

SEQ ID NO: 271137 - protein, 91 aa, Zea mays
  Clone ID: MRT4577_178874C.1.pep
SRETMTTENMSRPPPCTRENEGRGVLAESSIVETAESVREKLEANNTSAWRRLVPLYGVTRPWCLTLAWATICVGAPTRISWHLAWFEIPQ

SEQ ID NO: 271138 - protein, 320 aa, Zea mays
  unsure (1)..(320): unsure at all Xaa locations
  Clone ID: MRT4577_178875C.1.pep
SFLTLRYVPIGVLFDLLCADPERPWNLIVHFRGYPSEILSPCEGEDSVKWSYMNSLKEXVLRIKITTMFYHKGTYSILSLSLSLXATFIITGNSKSVMNMSHADQVALWESVMKGNLDGYKNISTRLKLGPFEDDVLVRTASVERQRQQNSDEPESPGSSKPCRVPVRLYVRNVQEDLEYIEDAVPVSDWENVSYINRPFETRKAEGRSYITLEHALQTLLPEFFSSKPPGSADGSQHAGAMDAAADSSDATNSSSRSQEAEQALASPPEAGSAKRAKVKLVRVQGVELDMDIPFLWVADHLKNPEYYVHICVYVGTRKQ

SEQ ID NO: 271139 - protein, 184 aa, Zea mays
  Clone ID: MRT4577_178876C.1.pep
FHAGARELPWLPPWCPLAPALPLAATLSAQCAEASREQPLTTPTPCASGERRSSSSRGCLPHQQQGRPVSSPSSSPNKQPLPYPSSSTLRAPLSLQLASPSRPWDPHLPKRPASPTRHRSGTWNRGASALPSRHPFPSGSMVLGGSPPRPALQPGIFPLVWPFRTGACSISASLQTWSVSPSAP

SEQ ID NO: 271140 - protein, 44 aa, Zea mays
  Clone ID: MRT4577_178877C.1.pep
EGAAGCRSLKRTTTYGHSTHLNLCEQVEPKRMNITAVCKSAQQE

SEQ ID NO: 271141 - protein, 98 aa, Zea mays
  Clone ID: MRT4577_178878C.1.pep
LLILPLFFFFFLGDFKDISPLSPFLFPLLKLKTFFREKNPPKREGGQIIAEKGVWGPGKKGTFPGAPWEGKGPSPKNAYRALAAVSPPKYTKGHPQQT

SEQ ID NO: 271142 - protein, 203 aa, Zea mays
  Clone ID: MRT4577_178879C.1.pep
MATLIAASSATMLFLMLSLLAVLDMTSSSTDYGALPSSLQVPSLCPCNCPKENETRLHMYLHQYPAWPNVPKPNEVGVIISSQPIGFGQTYVDDWFLTSGPDPNQNIIGRAHSYHIQAGQTVTRWHTSHIFVFENNDDWFAGSTLQVLGIVSTNPSGQWSIIGGTGAFANAHGTINFSCSLSSTGTDVICTLDIHVFYTQESN

SEQ ID NO: 271143 - protein, 167 aa, Zea mays
  Clone ID: MRT4577_17887C.1.pep
DIKKEGVVPPKKGHGFLFGDTFLGLLNPFIKCWFPRGWNTGLGPPFGPGKCFYFFGPQNCHARGAFFPPPPPRFFSLWGGFFHWDEQGFFRVCGHPLFLFFLRGKFFCSPQRFSPFLFGPVFALFFFFKRPFGRPSHKEKKKEKKKREEKEEPNQEREEKKKKKKGK

SEQ ID NO: 271144 - protein, 418 aa, Zea mays
  Clone ID: MRT4577_178880C.1.pep
MARAAASRLAAVANSSSTRELFARHLAAAAASAWTAPPRLPEPGRERRSPGWWCPSRSFHATRQVYTRDYYDVLGVSKDASAPDIKKAYYALAKSRYPNPETTHASEKTWFKVNRAYEVLKDNDKREIYDQLGPEAYERQASGGDPGGPGFPRGNPFGDIFGDIFDNAYRGGQDVKVSVELSFMEAVQGCRKTITYEADTFCGTCNGSGVPPGTVPKTCKTCRGSGVIYMQKGIFTVECTCSLCNGSGKIVKSFCKTCKGEQVVKGKTSVKLDIAAGSDDNDIMKIFGKGGADVDRTKPGDLYVTIKVREDPTFRREGIHVHVDSVLSIAQAVLGGTVTVPTLTGNVTVKVRQGTQPGEKVVLRGKGIKARNSPVFGNQYVHFNIRVPTEVTQRQRELIDEFDKEECADRERPAVASG

SEQ ID NO: 271145 - protein, 68 aa, Zea mays
  Clone ID: MRT4577_178881C.1.pep
LQGRFVSVVSNVFILGFSRPRHLKSMDRGSMNNVTPVRIYSPYLPRKKWCFPPPPKKHRIKNPKKKKK

SEQ ID NO: 271146 - protein, 129 aa, Zea mays
  Clone ID: MRT4577_178882C.1.pep
PRVRKASLLGDAITYITDLQKKLKEMETERERLLESGMVDPRERAPRPEVDIQVVQDEVLVRVMSPMENHPVKKVFQAFEEAEVRLGESKVTGNNNNGTVVHSFIIKCPGTEQQTREKVIAAMSRAMSS

SEQ ID NO: 271147 - protein, 905 aa, Zea mays
  unsure (1)..(905): unsure at all Xaa locations
  Clone ID: MRT4577_178883C.1.pep
MAASAPPIYFCAAPAFCPCRPHAKPDSKDVDEARVTMAPTTPICLRVAPAPRPCRVRVGRGRGGQRQQSGRDGLDTFMLFYTVFSVIDPKCDARDSHVPMSTNQRYRLFPRRQFHNTLHLLNDSRLLRDLRFRFFIAKCPHPHWPLPLCQGHGREEPISSAWSKHRQDPIQEGQSIGVIANDVDKNGKPHKVRLYSIASSANGDFGNSRQVLPSLAGLPDLLCRFSCHLICFSVLLAFLLELYVFLKLTPVKRRLFNRGCKEQHCESYSCIIAIVSVVHPDGWRSKWQIKLCYVPTLPGCHVFIRGKGSIKDPGKILGYSLNEAHQLLQECRQQQMNLDELLEKKCSTLANRGDGGSDQSGTAPSSPPHVFGSATPLRAGTSGQWHTHHKDEDLNQDEKWEQLVHLLKGIAVETEKFQATPLSQEVLIVWGDHDQLFPVEKAFAVHSSFKDSSECCCFPVTKKIPRNHFLSSSTGCLSSCSKTIAVLQVVVAAPTPASAIGFEGYEKRLEISFYEAPIFADPNGRGLNRLAGVAAGLPHDLGLASQTRHKAERSPGLAKIFRKDLNLGRPSVGLVVGVSKXDERTWEQRSAVGGTSLLPSVQKGLQNFSWSQARGLNSHQQKFGNGVLIVSNNEAAHRNNGAVDSPSTAQFQLQKVPQLQKLQLQKLPVVQKTPQLGNQQPMQTQVPRQIDFSAGSSSKPGVLVTRAAVLDGESAEVDGLCKEEGAPPVIEDRRPRKRGRKPANGREEPLNHVEAERQRREKLNQRFYALRAVVPNISKMDKASLLGDAITYITDLQKKLKEMETERERLLESGMVDPRERAPRPEVDIQVVQDEVLVRVMSPMENHPVKKVFQAFEEAEVRVGESKVTGNNXGTVVHSFIIKCPGTEQQTREKVIAAMSRAMSS

SEQ ID NO: 271148 - protein, 144 aa, Zea mays
  unsure (1)..(144): unsure at all Xaa locations
  Clone ID: MRT4577_178884C.1.pep
MGMCSNKKRSSPGVAVWCVVLGLALLVAVDAAGKEGRGRAGHLAEEHGDAAYCSALCNGRSQSDFGACYNECLYGRVTGQEEARGGGGVGGPAGLLEMPTKRVGREEEQNTKQGDATVRLSDPACCYDAXRELPELYYNQCCPV

SEQ ID NO: 271149 - protein, 106 aa, Zea mays
  Clone ID: MRT4577_178885C.1.pep
PFFGGILNETSSLFIQRFSLYKQIELFQGTQAFMRDKIGKAAADKFFGEGYYVVAMGRCDHEHDYLPSGYCYSWTYNGDTFVKYMVSTLEAQLRLLHALGARRLTF

SEQ ID NO: 271150 - protein, 175 aa, Zea mays
  unsure (1)..(175): unsure at all Xaa locations
  Clone ID: MRT4577_178886C.1.pep
TASCHFYILECGAKPRYQGVHVVVFNISRHCQICYQRSCEAKESAHESVLRVLYQPPESSTISHQNLREKNKYASRNSPPTRYFQRVQQTQTKKGIRDVVFSSPSMATTLAICTRRPTSLCPWSSXSHSNLLLTPEEYLITMLNQKTDHHAFTDHQKMYLFYWAVISRLQKINFS

SEQ ID NO: 271151 - protein, 111 aa, Zea mays
  Clone ID: MRT4577_178887C.1.pep
RPPPCRDSCASSCCWAWPLAVSAQGPTARANDYHAHYEEPPRRPPPRPRPATSRVVLVKVRVADLLHPFALVHVRVVADRQPARPPARERPSCCFSSTDTAFQSLSSCTFT

SEQ ID NO: 271152 - protein, 79 aa, Zea mays
  unsure (1)..(79): unsure at all Xaa locations
  Clone ID: MRT4577_178888C.1.pep
VLWVSEFVARWDWQDCCVAGLGGHGSVGFRGGAKQGFVGSLVLWLGEQFLVLGPCLPRRCXGXXSHTKINDPTLALEHL

SEQ ID NO: 271153 - protein, 71 aa, Zea mays
  Clone ID: MRT4577_178889C.1.pep
VRDPWPYALPHSSVSCFPCRRRRAEPGADRRRVHGGGQLRSKDKEHFKNMEFMREKLEDEYDLDCVTPNVT

SEQ ID NO: 271154 - protein, 127 aa, Zea mays
  Clone ID: MRT4577_17888C.1.pep
GDWVSRGRPGPSWLANEGEGVGRRTFNSAMALFGLRWWHGGASHDREDHAQGLFMGSMARGMVNSSPEVGHRCEPIVHRGQHTARHNHRAAAPLRSCCEERDEGQSGDLSMNGPDYRSRISLCTIVS

SEQ ID NO: 271155 - protein, 128 aa, Zea mays
  unsure (1)..(128): unsure at all Xaa locations
  Clone ID: MRT4577_178890C.1.pep
MDCTMQTAGKSTGEKAPSKQMATNAARKTARATGGVKKPNRWRPETVGLXREMRKDQKRTXLLIRNLPFQRLVXRDIAQDCKTDLRSQSSARKTLQEADEAYLGWLLXDTNLRALHTKRVTIMPNVIH

SEQ ID NO: 271156 - protein, 106 aa, Zea mays
  unsure (1)..(106): unsure at all Xaa locations
  Clone ID: MRT4577_178891C.1.pep
KTGHVPAFXRAEGVFNSRPGPWGAGPITIGHGGNPXSLAPRVRNPKPGWSVFKETNFWPGELKIFNPPPAPWAWAKKTPEKPVRTQNGGINSLSGSGGPPEGPPAP

SEQ ID NO: 271157 - protein, 115 aa, Zea mays
  Clone ID: MRT4577_178892C.1.pep
LAHNISLTWFFTLNYQNIIEMTQGHISLSIFPYLVIYADTSKSNDYHATLIELEDQRVYDFKSAYLDHTLPPLGLLMQIKFIYLYLSQTHLCGHKERYSKCEIVQDPKTPPFFHN

SEQ ID NO: 271158 - protein, 47 aa, Zea mays
  Clone ID: MRT4577_178893C.1.pep
FKEVASGGADALSPRDKKVEACKAPKGGLEERFKTGKNRWFFSKPRF

SEQ ID NO: 271159 - protein, 152 aa, Zea mays
  Clone ID: MRT4577_178894C.1.pep
PPPGARNRGPGKLPGSTLLGVRGALPQRDRKQPRRKPFGRGPPAFWAKAVPASPEVELRNKSKNASFSPVKGPPRIGGLKIGVYLGGGSIYLDLKWDLWFGNPPLFFFFFFPGGPLLIVFFGTKPLLGRGNWSPPPFFVCLPPPPKKRFVFF

SEQ ID NO: 271160 - protein, 122 aa, Zea mays
  Clone ID: MRT4577_178895C.1.pep
LWFLGGTKSLCAASSALSYVILLAHVVIRSDAVDPILRHDRVRPGLVVGLCVLPPLILIISLGVVTSICNVVRHGGVPNVCFDGRDWEREVGLEEECTSGGRGRWRGTGGEGGLQRCRGGGR

SEQ ID NO: 271161 - protein, 129 aa, Zea mays
  unsure (1)..(129): unsure at all Xaa locations
  Clone ID: MRT4577_178896C.1.pep
LKLXSSISPSLXLIFFTKDSPHTGLSFKIKRDHPLLLISTYSFFYTNFITCFTMGFDLTITYSLYTTHLKSFPFSFIHLSSPSLLVLFKIIFFNPSSNQTYFYFSLLYHSFHFSISIIFTFQHFNPSNP

SEQ ID NO: 271162 - protein, 222 aa, Zea mays
  Clone ID: MRT4577_178897C.1.pep
MAALAPTKMLGTRLNFAGSSRYATAAPTAGAQKIVSLFDRFKKKPAPKPKPAPVATSSVGIDDELAKWYGPDRRIYLPNGLLDRSEVPEYLNGEVPGDYGYDPFGLGKKPEDFAKYQAFELIHARWAMLGAAGFIIPEALNKFGANCGPEAVWFKTGALLLDGNTLNYFGNSIPINLILAVVAEVVLVGGAEYYRITHGLEFDDKLHPGGPFDPLGLGTDPD

SEQ ID NO: 271163 - protein, 77 aa, Zea mays
  Clone ID: MRT4577_178898C.1.pep
MRAPRHGSMRAHVALAFGALVLAGDALHTALAGRCSFDYKDALSKTIIFLEAQRSGKLPCSNRVKWPGNLGLNNGKL

SEQ ID NO: 271164 - protein, 67 aa, Zea mays
  unsure (1)..(67): unsure at all Xaa locations
  Clone ID: MRT4577_178899C.1.pep
VRIKRYGXTGMVSNNFDWFTNLDAYDTTTMNIKRDGRRYISTACLLTQDSPYNIKCPNSIDLQNLKS

SEQ ID NO: 271165 - protein, 73 aa, Zea mays
  unsure (1)..(73): unsure at all Xaa locations
  Clone ID: MRT4577_17889C.1.pep
MDRTQQMAVVATAVVALVLLAEATSEAAITCGQVAYAIAPCICYARGQGXRPSGGCCSGVKSLNNAGRTTDDR

SEQ ID NO: 271166 - protein, 90 aa, Zea mays
  Clone ID: MRT4577_1788C.1.pep
MQIRVQWACRESSCPEWAVVELHGVVQTQASFAGDIRGLHIGRLCSSPCPASVSSKAGFTFTVGYHELVGAKVTLKKPLLVLRKKNVNAG

SEQ ID NO: 271167 - protein, 87 aa, Zea mays
  Clone ID: MRT4577_178900C.1.pep
SSLVGGRPFLFFFLFGNLSFLWRHLIAFSFFLLPKTGWGERFNLVKGCDAPLKGPLHIFSRGGELFHGFNKDTGTEPKLYKGGRDTP

SEQ ID NO: 271168 - protein, 63 aa, Zea mays
  unsure (1)..(63): unsure at all Xaa locations
  Clone ID: MRT4577_178901C.1.pep
QRRDAGYQLKLCVKKKKKKKKKKKKKKKKKKKKKKKKKKKKKKKXXKKKKKKKKKRGGGFSHC

SEQ ID NO: 271169 - protein, 79 aa, Zea mays
  Clone ID: MRT4577_178902C.1.pep
MGVYKYVSALWRRQQSDVMRFVQRVRCWEYRQQPAIVRLTRPTRPDKARRLGFKAKQGYVPYRVRVPRGPRKRPVPKVL

SEQ ID NO: 271170 - protein, 93 aa, Zea mays
  Clone ID: MRT4577_178903C.1.pep
RAYSRSSRQYGRCATQPIHLGCRHDKQSFQQVRQSSITEPLLGMGYHVTQTMEARMTCHRGTTLQAMRFELGLLKTELDTVLWPPETTWFYEW

SEQ ID NO: 271171 - protein, 103 aa, Zea mays
  unsure (1)..(103): unsure at all Xaa locations
  Clone ID: MRT4577_178904C.1.pep
PFFAWLGXALVSWFAAWVVLFPAGPAAGLXXAXLLGVPGGAFFSLLGCXVCLFGSLFGPPLALALFARGGVFFPPRVLFLGSLLFCXWGSFCCCXGGFVAXFF

SEQ ID NO: 271172 - protein, 73 aa, Zea mays
  Clone ID: MRT4577_178905C.1.pep
LTGLTKAPRNFGGGSPDVSPFFWGDQVLNFLGMHEGESQIFSFLKGADHSPPMGNLVQGPPANAPIGTQGKVF

SEQ ID NO: 271173 - protein, 94 aa, Zea mays
  Clone ID: MRT4577_178906C.1.pep
RWGLPDRDTRPTVEATDSDLGSVATLAPSEAAAEEARSGRSLPWQKTSSATHMSVPALSPAGTMPPDDRMQNSKSSADPRRGTLPLPWLMCFLS

SEQ ID NO: 271174 - protein, 64 aa, Zea mays
  Clone ID: MRT4577_178907C.1.pep
ITFPQDRKGTGRGFWLMTNQFVRDPCKKLGKPRKKVLVGPKARPHCASVFLKGGVKEPFGGFQG

SEQ ID NO: 271175 - protein, 46 aa, Zea mays
  Clone ID: MRT4577_178908C.1.pep
RLLQRPGMQLWHASLVHISYYSSIPCISLHHRWSIVGYTYRIARTY

SEQ ID NO: 271176 - protein, 79 aa, Zea mays
  Clone ID: MRT4577_178909C.1.pep
ELAYRTRQPSRWSRFENSTPSSSSLSKHSLLASLHRERRERESRRWRGNRDAPHLSLPNPSVYLRWRRCPSPYPSVLCS

SEQ ID NO: 271177 - protein, 175 aa, Zea mays
  Clone ID: MRT4577_17890C.1.pep
MEVEVDVDDDTGGTPASIAQQETHVEAPGGTSIKESVQDVVLGGGQHVVKDVALTISQAIGPVEKGVGKIQEKFHHISLKPGDKKEPQVAVEEHVTENVVDGKPAVAVNAEVEVQQKAQDRRGEEEGVQLKRTEKEGRLSHLRVPWWKMQRKREQVQEQAESKAEAVRGPDGEQG

SEQ ID NO: 271178 - protein, 353 aa, Zea mays
  Clone ID: MRT4577_178910C.1.pep
MESGSTFYGGEGLSIDPKWFIDPKLLFVGPRIGEGAHAKVYEGKYKNQNVAIKIVHKGDTPEEMTKREGRFLREVTMLSRVQHKNLVKFIGACLEPVMVVVTELLVGGSLRKYLVSLRPRSLEPRVAVGFALDIARAMECLHAHGIIHRDLKPENLLLTADQRTVKLVDLGLAREETLTEMMTAETGTYRWMAPELYSTVTLRHGEKKHYNHKVDVYSFAIVLWELLHNKLPFEGMSNLQAAYAAAFKNIRPSADNLPEELSEILTSCWKEDPNDRPNFTQIIQMLLHYLSTLSPQETLAGPRRTFSSENTILPPESPGTSSLMASRGDLGDTPKGKKEDKPRGFFFCFSECY

SEQ ID NO: 271179 - protein, 48 aa, Zea mays
  Clone ID: MRT4577_178911C.1.pep
LSSARQTGITCLSQKKKKKKKKKKKKKKKKKKKKKKKKKKGGRRSKLR

SEQ ID NO: 271180 - protein, 113 aa, Zea mays
  Clone ID: MRT4577_178912C.1.pep
TLNPVVYLQQQLFPFGQVGIAYFHQQKLFPFNQLAALTLAVYLHQQIFFPFSQLVAATRVSFLTQQQLLPFYQQFGANPPPLLQIQQLLPFVHLVLTNPAAPSQQHIIGGAPF

SEQ ID NO: 271181 - protein, 95 aa, Zea mays
  Clone ID: MRT4577_178913C.1.pep
LFRVATPVESQRHSMDSTTIPNEIYDQDCYRRWTGRPRSRTTLYLARPLWMVFVLTFQWLCRGKEAKHSGAGSGPDYKTLHGYASDWSYTTKFHL

SEQ ID NO: 271182 - protein, 106 aa, Zea mays
  Clone ID: MRT4577_178914C.1.pep
SSPTSADAAHAAQVAELVEVDAVVVEVVAGAVDTVALAVKAAVLLDVKVELLSEVWRGSTDLDVCSNLQQLASRDDRSSCTGPGAWLFISSSADAWASFVFLVMNI

SEQ ID NO: 271183 - protein, 44 aa, Zea mays
  Clone ID: MRT4577_178915C.1.pep
LAASRSAHDCDWSWSGAKLSSGGVGCEGEEEMCHGSVFIYPAGS

SEQ ID NO: 271184 - protein, 55 aa, Zea mays
  Clone ID: MRT4577_178916C.1.pep
GSCVGNAFAARHLCTVKCFNDTKGFGVISSEDGSEDLFVHHSCIKSEGFRSFAEG

SEQ ID NO: 271185 - protein, 111 aa, Zea mays
  Clone ID: MRT4577_178917C.1.pep
NTTTVFDLKKRCPPPWHAPTLAGGRAHFPKRRRGNATNARTNTGGSIHPKINTEGGSTARFGQTRVQVLFFFTDFLPSLLFFLGFFYLMLRGRGLPAHSLGHSSMGSTSLP

SEQ ID NO: 271186 - protein, 113 aa, Zea mays
  Clone ID: MRT4577_178918C.1.pep
LNTTTVFDLKKRCPPPWDAPTLAGGRAHFPKKRRSYATHARTHTGRSIQPKINNEEGSTARFGQTRVQVLFFFTDFLPSLLFFLGVFYLMLMGRGLPPHFLRHSSMGSTSLPW

SEQ ID NO: 271187 - protein, 47 aa, Zea mays
  unsure (1)..(47): unsure at all Xaa locations
  Clone ID: MRT4577_178919C.1.pep
YNPTDXXTRTSLFSQGEDNQLLFYLLCPSFDSIAXGPKGKVTSQPSH

SEQ ID NO: 271188 - protein, 527 aa, Zea mays
  unsure (1)..(527): unsure at all Xaa locations
  Clone ID: MRT4577_17891C.1.pep
MNGTAARGVLHASSASQASFLSFSPPSSCPHPAVQAVAVDRRSPLQLRLLCYRAQEKSLVQTALDWMWNEAMASDGSSSSTFRGLYGSVHGPAVLTGAAFALVALLISLXLILQHLRSYSDPAEQKWIIAVLFMVPVYACESIISLWNSKLSLACDILRNCYEAFALYAFGRYMATTLXGGERQVFRLLESRKRDELSQELLDKARARNRGGAYSFFCDPDALGENLYTIIKFGLVQYMILKTLCALLALVLEPFGAYGDGEFKWNYGYPYIAAVINFSQTWALYCLVKFYNATHEKLQAIRPLAKFISFKAIVFATWWQGVGIAIICQTGLLPKEGKVQNALQDFLICIEMAIAAVAHAYVFTVEPYQHVPALPPDHGEVMCQESKMEVEVDVDDDTGGTPATIAQQETHVEAPGGTSIKESVQDVVLGGGQHVVKDVALTISQAIGPVEKGVGKIQEKFHHISLKPGDKKEPQVAVEEHVTENVVDAKPAVAVNAEVEVQQKAQDRRGEEEGVQLKRTEKDDCHT

SEQ ID NO: 271189 - protein, 68 aa, Zea mays
  Clone ID: MRT4577_178920C.1.pep
KKRIPLENLSPPPTGVTCCLKVCFKGVPFLKIRPVFGWVPVILNFRSKIFYLRPGFSNLRFDPSKQPA

SEQ ID NO: 271190 - protein, 64 aa, Zea mays
  Clone ID: MRT4577_178921C.1.pep
RAATEQLNSMMDLGSDVQVRAAGGLLAILDNERLLDTIEQMEGGASIAIDSVVQISFYPLMEIN

SEQ ID NO: 271191 - protein, 107 aa, Zea mays
  unsure (1)..(107): unsure at all Xaa locations
  Clone ID: MRT4577_178922C.1.pep
PRVRSHVPPPILGFRLNALKGRSPMRGGPLGGPWXNYRERGFFDXYTVSRGYDVHRWERRNELSTSGVGARLDPDHCAPYVNALKRIIDSTYXQSTSRAKPLVASPG

SEQ ID NO: 271192 - protein, 133 aa, Zea mays
  unsure (1)..(133): unsure at all Xaa locations
  Clone ID: MRT4577_178923C.1.pep
TSCLITLLLCYNDTMLINADYLITNRNLIFLDHNDYHQSIRIPRSKNYKTLSNIPPHGSFQLMTYILRSQIIPIIWFXTHIVTQFITRINLILNAPNHFLKRITLPNVNIEMXIIYXASIPNIRSLHISASYA

SEQ ID NO: 271193 - protein, 199 aa, Zea mays
  Clone ID: MRT4577_178924C.1.pep
SLFLPLRRVRVLILSTTSMRGGVPAWFGNMTSLTDLELSGNFLTGRIPESLARLTNLRFLELYYNELEGGVPAELANLTQLTDIDLSENRLTGPIPESLCALRGLRVLQLYTNRLTGPIPAVLGNSAQLRILSLYRNQLTGGIPADLGRYSDLNVIEVSENQLTGPLPPYACANGHLQYILVLSNLLTGPIPPGVRRVH

SEQ ID NO: 271194 - protein, 174 aa, Zea mays
  unsure (1)..(174): unsure at all Xaa locations
  Clone ID: MRT4577_178925C.1.pep
MARAPSMPAATAVGIVVVMLLAAGFRGAEGKSCTNAFPGLTSHTERAAAQLRPGPPATVLQPIIHHHRHGREQHLTPTDESTWMSLMPRRALRCEEAFDWLMLYRELXGGGGSARPGVAAGAFLXEASLHDVRLEPXSMYWRAQQTNLXYLLLLXDVDXLXWSFRKQAGLTAPG

SEQ ID NO: 271195 - protein, 170 aa, Zea mays
  unsure (1)..(170): unsure at all Xaa locations
  Clone ID: MRT4577_178926C.1.pep
METIQEAEVPGSSSAAAADHRTYSNPAFQVSGTGSIEEAWYDSLAMSESDAEDDFHSVQDDAFSLNGFENEAALSMRDGNGGSFNGAAQSGXSTIKSQSXSELSKGSSENGVRTSISHEDAVSVSGADTTHGGGRILDDCGLLPNNCLPCIASAVGVNEKKKLPRALLIQ

SEQ ID NO: 271196 - protein, 57 aa, Zea mays
  unsure (1)..(57): unsure at all Xaa locations
  Clone ID: MRT4577_178927C.1.pep
SFSVNVSVCYHMCFLCFSVSRHPRAVSVSYIPPLCLMPPPYPSIIPTTQRPLIRQXT

SEQ ID NO: 271197 - protein, 65 aa, Zea mays
  Clone ID: MRT4577_178928C.1.pep
PFPQIKMKVKLSAQMDPNESEMHFLRSYLNKVFINGPINQGYIMARSKPIGIKPIPFLNFPPVGA

SEQ ID NO: 271198 - protein, 55 aa, Zea mays
  Clone ID: MRT4577_178929C.1.pep
AFTYILSQRLLAPVLVCVLHPHLDHIYTPPARRPPSPLAIGRITRDLPVAVDHQI

SEQ ID NO: 271199 - protein, 73 aa, Zea mays
  Clone ID: MRT4577_17892C.1.pep
GVFGGSGPALGACERCCHRVAFSPPVDGAGGVGGGFLLVAVCCSVVAPGFFFLCCVLATAWVAPGFRGGSRGG

SEQ ID NO: 271200 - protein, 61 aa, Zea mays
  unsure (1)..(61): unsure at all Xaa locations
  Clone ID: MRT4577_178930C.1.pep
IXFFFLFLPRHHSSLRSINRLTQLQPYSKNPWLSKLAASTPISNVLIPSSHVPVINSQKRH

SEQ ID NO: 271201 - protein, 38 aa, Zea mays
  Clone ID: MRT4577_178931C.1.pep
VYLLRKVQFMISGELLGNLKSRNVNKDLNNRKPKIFQQ

SEQ ID NO: 271202 - protein, 95 aa, Zea mays
  Clone ID: MRT4577_178932C.1.pep
KPYLLEFYHLFRPIGMGPPRNCSQDHRGPALGDMSMPLIFGKTHSVSLPLFGGIWGEGAHLKLISLALLVNQGTFNLRGPLATFFRARGTPSRQF

SEQ ID NO: 271203 - protein, 71 aa, Zea mays
  Clone ID: MRT4577_178933C.1.pep
QPSMAAGRFNDGWTVSCLGPAKKLMARFNQRLVLPGNRVKRRPEKAPLRPTKTKRTQSKWRSLWRPARKKN

SEQ ID NO: 271204 - protein, 44 aa, Zea mays
  Clone ID: MRT4577_178934C.1.pep
WSGKQVILDYAGGKRHLELFERVRVNPVWVAVPACLCSCTLIQK

SEQ ID NO: 271205 - protein, 72 aa, Zea mays
  Clone ID: MRT4577_178935C.1.pep
LWKVDSVVLHLSTRLGESLWKHSFLTDRDTHPTRRACSTGGYLVTDLYERGVLAAPVDRPRRRTHLSPSGGM

SEQ ID NO: 271206 - protein, 115 aa, Zea mays
  Clone ID: MRT4577_178936C.1.pep
YLSPENSREGGGEKKRRLGDIREHTKQGEDESNKCEEGQTHKGDNARGHHAETTGKKAASHNKHHKRADGALNKEPPKHEGGPRALGRAGDAITNNREQNLKEKVAARRNKSQQA

SEQ ID NO: 271207 - protein, 76 aa, Zea mays
  Clone ID: MRT4577_178937C.1.pep
PPGLLSPRPTNQSKFRKIGALGNMPRGSYSCQSRWQTESLIGLPILSKLTIFRHRGPICCTTIPDLFMPFGPVFTF

SEQ ID NO: 271208 - protein, 112 aa, Zea mays
  Clone ID: MRT4577_178938C.1.pep
MMQLPQHHKPSAHSCCPSWIRRSPPSPPPPPHKKLGGGRSRYACRLVPLLVLTVYSVVTVLRIPSASLVVSTADSERVDRREDLEALKTHLPSNQNSLEAREETRSVGSLPC

SEQ ID NO: 271209 - protein, 38 aa, Zea mays
  Clone ID: MRT4577_178939C.1.pep
TPFFGAPHKKKKKKKKKKKKKKKKKKKKKKKKKKKKKK

SEQ ID NO: 271210 - protein, 58 aa, Zea mays
  Clone ID: MRT4577_17893C.1.pep
AAEQAAPAFKLELLDVVLALEYGDLNVWDNDLDESPLASCPVPQGKVVEDGPVHLLEI

SEQ ID NO: 271211 - protein, 140 aa, Zea mays
  Clone ID: MRT4577_178940C.1.pep
KAPLGPNTQTPSLCVLANFFMQVALSVFSFGRGLWGPLIFFGFALFFGPPGFSLFASGCFFVCYFGRLTLSPWASRLPFLWHCLPPLFPAGVGFLQGPVRVSRGAPRVRKENKKVKEKIKKEKKKEKTKKKKKKKNTPPQ

SEQ ID NO: 271212 - protein, 380 aa, Zea mays
  Clone ID: MRT4577_178941C.1.pep
MATPRSPSPRAEAPLDSAPLLGGASGGGSRRRGGALRRPSLRGAARLLRRGGRRAMREPSVLVREAAAEHLEERQADWAYSRPVVALDLLWNLAFITVAAVVLVLSRDEDSPMPLRTWVAGYALQCVIHMVCVAIEYRMRHGQRGGAGAAPADEERGSDGSSSSSDEDDRELDRHGRRTDYASIAKHLESANTMFSFIWWIIGFYWISAGGEEVIRDAPQLYWLCIVFLAFDVFFVVFCVALACIIGIAVCCCLPCIIAILYAVSDQEGASEDDIRQIPRYKFRRTDEPEKQDVDPMGPFGGIMTECGTNQPIEKVLAAEDAECCICLSAYDDGAELRELPCGHHFHCTCIDKWLHINATCPLCKYNIRKSNSSSGSEEV

SEQ ID NO: 271213 - protein, 38 aa, Zea mays
  Clone ID: MRT4577_178942C.1.pep
SGRYDPGSVAGTLTRPDVSLHRILITRWSRHDSEVNCI

SEQ ID NO: 271214 - protein, 80 aa, Zea mays
  unsure (1)..(80): unsure at all Xaa locations
  Clone ID: MRT4577_178943C.1.pep
GGIMIECGTNQPIEKVLAAEDAECCIXVSAYDDSAELRELPCGHHFHCTCIDKWLHINATCPLMNAVRLTMPICFNFCSV

SEQ ID NO: 271215 - protein, 382 aa, Zea mays
  Clone ID: MRT4577_178944C.1.pep
MATPRSPSPSAAARLDSAPLLGGASGGGSRRRGGALRRPSLRGAARLLRRGGRRAMREPSVLVREAAAEHLEERQADWAYSRPVVALDLLWNLAFITVAAVVLVLSRDEDSPMPLRTWVAGYALQCVVHMICVAIEYRMRHGQRGGAGAGAAPADVERGSDASSSSSDEDDRELDLHGRRTDYASIAKHLESANTMFSFIWWIIGFYWISAGGEEVIRDAPQLYWLCIVFLAFDVFFVVFCVALACIIGIAVCCCLPCIIAILYAVSDQEGASEDDIRQIPRYKFRRTDEPEKQDVDPMGPFGGIMIECGTNQPIEKVLAAEDAECCICLSAYDDSAELRELPCGHHFHCTCIDKWLHINATCPLCKYNIRKSSSSSGSEEV

SEQ ID NO: 271216 - protein, 62 aa, Zea mays
  Clone ID: MRT4577_178945C.1.pep
SALSIPLYISPLQKLQKPTNQMSTIVYTSSKCTQINPTVITNEQDQLKPFISLTHSNPTINL

SEQ ID NO: 271217 - protein, 45 aa, Zea mays
  Clone ID: MRT4577_178946C.1.pep
DRCCEASQHSMHFQRLISRVLDLIHTVASAEPLTRRAPVISPLRT

SEQ ID NO: 271218 - protein, 200 aa, Zea mays
  unsure (1)..(200): unsure at all Xaa locations
  Clone ID: MRT4577_178947C.1.pep
KELDNEKKXIFIHVTRDGGRQKISIFDLLVGDIVHLSIGDQVPADGLFIHGYSLLIDESSLSGESEPVYTSQDKPFILAGTKVQDGSAKMIVTAVGMRTEWGRLMSTLSEGGEDETPLQVKLNGVATIIGKIGLVFATLTFVVLMTRFLIDKGLTVGLSNWYSTDALTIVNYFATAVTIIVVAVPEGLPLXVTLSLAFAM

SEQ ID NO: 271219 - protein, 84 aa, Zea mays
  Clone ID: MRT4577_178948C.1.pep
RVNVTCNTKQTKGQTFFFCTDYRATPDMSANHPITQYRRRRKNKYMNNSTYKQPINMYRQPCRHVVPTRTEQGNSTTSHYCRAY

SEQ ID NO: 271220 - protein, 82 aa, Zea mays
  unsure (1)..(82): unsure at all Xaa locations
  Clone ID: MRT4577_178949C.1.pep
YHLLLHLRYPGPHDMALSLSLVAPXPPECTKALSLDAPRTTVVRSLGITVAQLSKTRTRGSDTVQIPVRLRAAASAILILIR

SEQ ID NO: 271221 - protein, 155 aa, Zea mays
  unsure (1)..(155): unsure at all Xaa locations
  Clone ID: MRT4577_17894C.1.pep
MXYWLVGDALAVGWEPPDFPSICESCLGYNPYLRMLRAGGGKXCTICTRPLAGLRRRPVRDAWFNMTEICQTCRTLRNGCQVCLLDLEYGLSAQVXGSALSLSSNVALPMSDVNREXFAREHDWRAIAGLDYDSSYGKGWPNATFLNLXKTAPFY

SEQ ID NO: 271222 - protein, 67 aa, Zea mays
  unsure (1)..(67): unsure at all Xaa locations
  Clone ID: MRT4577_178950C.1.pep
KSIKXKNTSEEGETKSKHKKHKKRSKEENQTSQVIEKEDSSYLAEEIEKRDYAEIHEINQVPAVVES

SEQ ID NO: 271223 - protein, 126 aa, Zea mays
  unsure (1)..(126): unsure at all Xaa locations
  Clone ID: MRT4577_178951C.1.pep
APFRGCPPPVVWPLFAAPCWLVVRAFRCPVVWSCLCPVVCCRGSLSLFSLRLSFVLLVFRVLVGPLVRLPLRARVRVAVRGRVAGCWAACSLRCLVGPRGLGGCGVLLAVGVALTXXXAALCRWPP

SEQ ID NO: 271224 - protein, 86 aa, Zea mays
  Clone ID: MRT4577_178952C.1.pep
DTNPRIWADEGWPWPPNQNDSGSCYGPLHWIETKGCHCETCFSKGSHSWSCSRYHKGKEPTNVPSGLPATPTCSAFPHQGNRPARS

SEQ ID NO: 271225 - protein, 73 aa, Zea mays
  Clone ID: MRT4577_178953C.1.pep
SGYNPDTAASAARPRRYTLGRSRYKGPPQWLRPCGRRAAAGPLGAPFSTDVRAKSSADDLKPDTGLDLSLVPN

SEQ ID NO: 271226 - protein, 131 aa, Zea mays
  Clone ID: MRT4577_178954C.1.pep
MMVPAVAPINSSVPSPCIAQVDQEIEQVPAMDYYRETYGGYGMATPGYAAPVPYGMSQVNIDGNYGGRPMPPQPTVKIYCRANPNYAMSVRNGKVVLAPANPKDDYQHWIKDMRWSTSIKDEEGYPAFAMV

SEQ ID NO: 271227 - protein, 54 aa, Zea mays
  Clone ID: MRT4577_178955C.1.pep
GGGDDEDGDPSGPSSAARPPTHNGPGQDEQPAALRPRSKRQKKLSIKGLYMLDK

SEQ ID NO: 271228 - protein, 317 aa, Zea mays
  unsure (1)..(317): unsure at all Xaa locations
  Clone ID: MRT4577_178956C.1.pep
PHEQQAGRPAPLSRTSSKASAAINQYTFFRKQAGLFGGEVVXRPSHLIGRTSGGDWLQPSAVDHPEIQEFARRIVSQCMSSSGCERNWSTFALVHTKLRNRLSYDKLHKLVYVHYNLKLRIQHYETDMESFEQMKNSKDRNIDPCSIMIDVAMYDEGNPIMEWLCSSRSESVPTLDENDEPESPNRPSGFVLEELGGLNEEEMVLLNSRIGSGRKNGRKRNVVEEDIGDDFLSDSSEGGGSPTYNESGDSDSNDGGGDDEXVNLVVHVXARTQPKLATDQYNGPGQDEQAAPLRPRSKRQKKLSIKGLYMLQKVKYI

SEQ ID NO: 271229 - protein, 130 aa, Zea mays
  unsure (1)..(130): unsure at all Xaa locations
  Clone ID: MRT4577_178957C.1.pep
PDDSSGSPAVXSQSSPDIWRSDKLIQVYVLLATTVGLFLPLAHVLGRFTRGDXAVVPSETPHLFLLSCQXLTENVVGSLGALSPSRMALEPLLYTVRHVFFILDWAYDAWSYNAHDSSWVWIGRCLCVGN

SEQ ID NO: 271230 - protein, 75 aa, Zea mays
  Clone ID: MRT4577_178958C.1.pep
LATMESRQPEGSRGCVGADSLLQVVLAPTTGTARTPAGGRPAPCVGCTSSRGEFGHTVRGILLGRNLWLPTMIIP

SEQ ID NO: 271231 - protein, 71 aa, Zea mays
  Clone ID: MRT4577_178959C.1.pep
NFTGNKRFQKGINAPPPPPNKKGINFFFSKKKKNKKKKKKKKKKKKKKKKKNTKKKKKKKKKKLVPARPPA

SEQ ID NO: 271232 - protein, 72 aa, Zea mays
  Clone ID: MRT4577_17895C.1.pep
AWCTTLRMSSSRQKPYFSWCTHQCKHLLCHPHLRVRLEPTRILPPRERWKAGAPSQSSCFGPSVLLLVSGRV

SEQ ID NO: 271233 - protein, 107 aa, Zea mays
  unsure (1)..(107): unsure at all Xaa locations
  Clone ID: MRT4577_178960C.1.pep
FGSRVDQLILXSLHPSALERRLLSIVHQRHATHGSHRFVSRAISFRKPAGDHELRGHHSHGHRTYPQWNCTRALTIPRAYGDSHLEERVGRAGLSDAARGDAAGLDD

SEQ ID NO: 271234 - protein, 94 aa, Zea mays
  unsure (1)..(94): unsure at all Xaa locations
  Clone ID: MRT4577_178961C.1.pep
GLGPSRPAGNVIIHNIHINDIVSSNKDGGYVRDSPDHFGWRTVSDGDGITVFGSTNVWVDHLSLSNXQDGLIDVIAKSTGVTISNCHLTNHQAG

SEQ ID NO: 271235 - protein, 73 aa, Zea mays
  Clone ID: MRT4577_178962C.1.pep
PSGCGASFRDRAELDARHRYCMSATTIWGLTATMHSGTQSAEFHDGRIDGCQCRGRRSMSCVQAYVRPVNGRC

SEQ ID NO: 271236 - protein, 451 aa, Zea mays
  Clone ID: MRT4577_178963C.1.pep
MVDGFRWIRPGSFVLYLVFFFLSAALSEANIGDFDEYWQQRKLMADAAAEATYKHDPVEVANQLNRAVHRSVEKEDIGTRREMMGTTTRKSKFSGPCRATNPIDRCWRCRQDWATDRKRLARCAKGFGRNTTGGLAGKFYVVTDGTDDDVVNPRPGTLRWGVIQIEPLWITFAKTMIITLKEELIIRGDKTIDGRGVQVRITNGAQLTLQFVNNVIIHNIHINDIVSSNKDGGYVRDSPDHFGWRTVSDGDGITVFGSTNVWLDHLSLSNCQDGLIDVIAKSTGVTISNCHLTNHNDVMLFSSSDKHPEDQIMQITVAFNHFGRGLVQRMPRCRWGFFHVVNNDYTHWLMYAIGGSKAPTIISQGNRYIAPPNLAAKQVTKQHDTPESVWKNWVWHSENDLFMEGAYFTVTGGQINRQFNKKDLIKPRNGSYVTRLTRYAGSLACTPGKPC

SEQ ID NO: 271237 - protein, 73 aa, Zea mays
  unsure (1)..(73): unsure at all Xaa locations
  Clone ID: MRT4577_178964C.1.pep
WKTLHLDTDCYSXRGEXVTHITHILNLVYYASNNELVRTQTLIKKSMXQVDADPFKQWYLTHYGVDINRNNKT

SEQ ID NO: 271238 - protein, 252 aa, Zea mays
  Clone ID: MRT4577_178965C.1.pep
ITDMVKEMETERPLVGQCLPLWEDLRGKVRGWCRKFNVDEAIAMSVLERRFRRSYHPAWSAAFILDPLYLIKDVSGRYLPPFKYLTPEHEKDLRNDDDRDAEPAGADLAMMELMKWRSMGVDPLYAQAVQVRQPDPTTGKMKIANKQSSRLVWETCLSEFKSLGKVAVRLIFLHATARGFRCTPTMARWLTAPAPGSRGIARAQRLVFVVANSKLERKDLRNDDDRDAELLMEGDDDMLTDPTTAIVVPSSV

SEQ ID NO: 271239 - protein, 129 aa, Zea mays
  Clone ID: MRT4577_178966C.1.pep
MQIFVKTLTGKTITLEVESSDTIDNVKAKIQDKEGIPPDQQRLIFAGKQLEDGRTLADYNIQKESTLHLVLRLRGGIIEPSLQALARKYNQDKMICRKCYARLHPRAVNCRKKKCGHSNQLRAKKKIKN

SEQ ID NO: 271240 - protein, 477 aa, Zea mays
  Clone ID: MRT4577_178967C.1.pep
MADKKRVDSALACFYEAMERTNVEKITNEMLALLSGDSSNSESFNVESENEDAKDWPWSASHVVFGKSIVKQGKIEAMKGRYFHDISIVRAGGESTIPLPEADEVVIFKSFMKARLHFPLHKMLVKVLKTFEIYLHQLTPEALVKVGVFIWVMRSQGLEPDAKCFCNIHELSYQMKAIGKEQYHNNFGCYSLVHHSDVRYHVPTFQKKWPGSWMKQWFYVKNDLSERDDVMGIIQCPIPSRLGIRRPSIASGNKVWPLINEWEMLKETDAGSSEGGLVYLRHTYRYRSQFDEPNDDWLEAIEATSDELLGAYTKVGLHRSEVQVLERKLDELTENLNVEQTKCEISDAERLRVQKHVEELREAKEECYNVAMGCCNKLKNSFAKVGAFSTEQNFIRGDPDGVIRWISGEAEAFNEILSDRGDFCAFAGARGAVSLLEKAGCEHAKAVIQPEFSVSANNIKNPSIEATALSRKFYSEV

SEQ ID NO: 271241 - protein, 132 aa, Zea mays
  unsure (1)..(132): unsure at all Xaa locations
  Clone ID: MRT4577_178968C.1.pep
ASRGRAVAVVVLGRRSSLLVEPAAGRAGSTAATRSTAEGTASSKGPGAAAAAAAXQQPPAGLSRYESQKRRDWNTFLQYLRNHKPPLTLARCSGAHVIEFLRYLDQFGKTKVHAEGCAYFGQPNPXAPCTCP

SEQ ID NO: 271242 - protein, 85 aa, Zea mays
  Clone ID: MRT4577_178969C.1.pep
RVKKRAIGRKKMTQTTYERRWQPEKVAPKVCGATKVVHSIDEYIKIGKSFTLKCLKLLCTCIISCFSKEYSHRPIIIKKKKKKAA

SEQ ID NO: 271243 - protein, 80 aa, Zea mays
  Clone ID: MRT4577_17896C.1.pep
PPCEKKKKVFLTTQVGWVSLRPRGLTFFEGVHSGVFSLQEGVLFFVSLHKKVIWGPLLVKNRSAVKAGFGWVWYGRKNPP

SEQ ID NO: 271244 - protein, 89 aa, Zea mays
  Clone ID: MRT4577_178970C.1.pep
GARRNVIAGVPCIHERAQVLEDPSYVREKAYESLQSDKKALQEVVILVVKFPQLFMSKMTPWGASLWYGPAGTEMSHWEHDAPDDADTT

SEQ ID NO: 271245 - protein, 171 aa, Zea mays
  Clone ID: MRT4577_178971C.1.pep
MVMENLINKSSERKVDAVAEVHSKINADQTKSIKERAEVVGPIDLNNLGTLHGDKASRSIHITSFENLGSVKVVEASSSSDKNMACDPSGTAGMPVSEVPDPALQVNARRHGTRNRPPTVKALEAVAFGLLGSGKRKGDMKNRATSRPSQRARKAAKDSVPVASCGDAKVR

SEQ ID NO: 271246 - protein, 162 aa, Zea mays
  Clone ID: MRT4577_178972C.1.pep
CERWSPSCKTTPHPLWPCRRRRLSQRPRVRDAARLNFPDNAESRAPLDPAVDAKLQAICATIAAASSSSKNSKAKSKAMPINASVLEAAAASPSNSSSDEGSGSGFGSDDEMSSSSPTPVVAPPVADMGQLDFSEVPWDEDESFVLRKYPSYEIDWDALLSN

SEQ ID NO: 271247 - protein, 280 aa, Zea mays
  Clone ID: MRT4577_178973C.1.pep
MAAAINLPGPSEDLMRAMESFMQDDTTHPLQQTHRTPRQPENTAHGAQYPATHLSPAQMQFIQAQLHLQRNPGLGPRAQPMKPAVPVPPAPAPQRPVKLYRGVRQRHWGKWVAEIRLPRNRTRLWLGTFDTAEQAALAYDQAAYRLRGDAARLNFPDNAESRAPLDPAVDAKLQAICATIAAASSSSKNSKAKSKAMPINASVLEAAAASPSNSSSDEGSGSGFGSDDEMSSSSPTPVVAPPVADMGQLDFSEVPWDEDESFVLRKYPSYEIDWDALLSN

SEQ ID NO: 271248 - protein, 119 aa, Zea mays
  Clone ID: MRT4577_178974C.1.pep
LARSLALRTDRCEEYAVAVANEEEAGARLGGPVVVAPPREQEIIVVVVAGGAVAADGRATQGDPDPDSDPGPGEEAGAALARRAGALLRPPLLLIDAIRRGPAGGHRIVRIEICRDVRA

SEQ ID NO: 271249 - protein, 107 aa, Zea mays
  unsure (1)..(107): unsure at all Xaa locations
  Clone ID: MRT4577_178975C.1.pep
MQRPYSFFWGAPFSISLARRFSIVWDWXETPGVPPLFRLAALPPFAGWRNPLQARPVPLCQRGRSLNGDWAPPCFGALAPPVGVVSPPVTAPFAGALAPVFCAFFLS

SEQ ID NO: 271250 - protein, 121 aa, Zea mays
  unsure (1)..(121): unsure at all Xaa locations
  Clone ID: MRT4577_178976C.1.pep
RENRSQAPIASLLPPYLSPALSSVCENPILQPYWIQLAITAGLLPXSPSFRRQCXAVCHQLPLVHLLAQNIMAHQLQLLVLANLAGYAQQQVFPLVQLLAQIYRAQQLQQLXVLAKLAGYS

SEQ ID NO: 271251 - protein, 114 aa, Zea mays
  Clone ID: MRT4577_178977C.1.pep
LQRVRNEASTTEGGKGIRRSLGWCRGSRGERRRLRPLLQGGLRSQRGPPQEEQHQHSHSLSHLTRHNPPRMTGLRKTRKSALLEDTQLDRPPPLSTPSPLNVPDRRSDITPLWR

SEQ ID NO: 271252 - protein, 76 aa, Zea mays
  Clone ID: MRT4577_178978C.1.pep
LTLSMYKFYAILFMQRVEIMELSSTHSHDEGSEENPLHDHMHTAKTLIYPLTLHIYQQMPKWLLPMHSESCTKQTI

SEQ ID NO: 271253 - protein, 79 aa, Zea mays
  Clone ID: MRT4577_178979C.1.pep
QGDPKKWMLDPKGQGGFKRFGGGFPKIKKRVVPMNGGPPLKNQKGPAGFPYPVFYPNPSDPKGDPPGFPPKGISNSISL

SEQ ID NO: 271254 - protein, 343 aa, Zea mays
  unsure (1)..(343): unsure at all Xaa locations
  Clone ID: MRT4577_17897C.1.pep
MGSVGVGCGSPDEEQQTEGSGPLPPPAVCVTGSTGYVGSWLVRTLLRRGYRVHATARDTGKALQVLRPSWKKXDRLRVSGPDMXEEGSFDAAVTGCVALFHVAASMDLLVSPAHQDNLEEHVRSSMLEPATRGTINVLRSCVRAGTVRRVVFTSSVSTLTAVDAVGRRKAVLDESCLRALDDVWRTKPVGWVYILSKRLTEEAAFRFARENGVHLVSLVLPTVAGPFLTTSVPTSIQLLLSPITGDPKLYSVLASVHARFGCVPLAHVQDVCDAHVLLMEAPRAEGRYLCAAGGYAAAQLARLLASRYLPAGDRLSKDFDDVSCSPPVVSPRRLLDLGFRFRH

SEQ ID NO: 271255 - protein, 49 aa, Zea mays
  Clone ID: MRT4577_178980C.1.pep
DASKHMWPGDINALLDTLHNLNSNWFPEGSKPFIYHEVIDLGGEPIKTV

SEQ ID NO: 271256 - protein, 167 aa, Zea mays
  Clone ID: MRT4577_178981C.1.pep
MMHDWFGIVLQTNFLGYILCFVGSVNLLMVIFGCSIFDSGNTDFGDSKIPNTTEIKTKPDGWETTSRGQDGNIWDISQREDDILIQEFERRIAFSKQQIASFIKTHIFSRRRPIDGWKYMIEEIGPNARKGKGSVQRLPSVSDPATQPYREETPAIASSSSFRGNRP

SEQ ID NO: 271257 - protein, 89 aa, Zea mays
  unsure (1)..(89): unsure at all Xaa locations
  Clone ID: MRT4577_178982C.1.pep
APRGSTIAAAEDGADSIDALYRKDEALAELQAEVMQALQEQVRSLDEDNXMFAAPGARINLDSRPGAYVPKHNGKLSQLGQASGKTRNF

SEQ ID NO: 271258 - protein, 40 aa, Zea mays
  Clone ID: MRT4577_178983C.1.pep
CHTFAQPPIGVYNAWRGRPRPISYDIIWVPTNASPHYANF

SEQ ID NO: 271259 - protein, 40 aa, Zea mays
  Clone ID: MRT4577_178984C.1.pep
HLERHAAANSDCLCCTHISCKQKLRLICRESNWTSIFAYR

SEQ ID NO: 271260 - protein, 34 aa, Zea mays
  Clone ID: MRT4577_178985C.1.pep
SMPLFKVIVNSDQIYCSTFYRYHWRLRIDLNSVS

SEQ ID NO: 271261 - protein, 65 aa, Zea mays
  Clone ID: MRT4577_178986C.1.pep
EYFPTVRPQTVFVNASGCFTHSECKLVRFVYPPKLNRFSEIYTSIDRFQPPFPIVTMSHGFAPFK

SEQ ID NO: 271262 - protein, 377 aa, Zea mays
  Clone ID: MRT4577_178987C.1.pep
MSSAAAAANVAVIGGGISGSVCASLLAARGVAVTLFDSGRGAGGRMAQRREVMEDGSELRFDHGAPYFTVTNGEVARVVGGWEARGIVAEWKATFACFDLATGKFTDFEKEGTAKKYVGVPAMNSICKSLCLEDGVVAKFGVTVGKMDWLQDRSSWSLASLDGKDLGYFDYVVATDKNIASPAFSGLTGRPPPLDLSSFPRLPTALQDIPVRPCFALMVAFSEPLATVPVHGFSFNNSNSLSWAFCNSSKPGRACVPPNRQSWVLHSTTEYASKVINNIGPRKPSAEALAKVAEELFREFQATGLSIPQPIFMKAHRWGAAFPAIAISGDDKCVWDKSTNLAICGDFCTSPSVEGAVLSATRGVSKILECLRCPSSI

SEQ ID NO: 271263 - protein, 85 aa, Zea mays
  Clone ID: MRT4577_178988C.1.pep
PTDPHTKVAQAEETQSTRDHNQGQAKEKEGTAKGKTPMGEQRGPLTTNPALLMGRGALRNLGGHVLPKTPQDQGRFSHSPAPRKQ

SEQ ID NO: 271264 - protein, 249 aa, Zea mays
  Clone ID: MRT4577_178989C.1.pep
LSMECVDPGVLLCSIKSGSYPSKVARDGRNGFVDIAHLYADEEKDILLSVTIPKSCEQTSLLRVACAYKDPVSNETIKIQGDEVKIKRPASTVSVPVSIEVDRERNRIRATNSMESAWAAAERGALSEAVTILEDCRRALSQCVASQNGDRLCMALVAELREMQERMANRQLYEASGRAYMLSGLSSHSWQRATARGDSTDSTTLVHSYQTPSMVQMLEHSQNFGSLPQGRRPQVQGAGSVLEKPSKGR

SEQ ID NO: 271265 - protein, 145 aa, Zea mays
  unsure (1)..(145): unsure at all Xaa locations
  Clone ID: MRT4577_17898C.1.pep
TEGSGPLPPPAVCVTGSTGYVGSWLVRTLLRRGYRVHATARDTXDAGGVARAVHRCRWCCTHAGKALQVLAVVEEGRDRLRVFRADMGEEGSFDAAVTGCVALFHVAASMDLHVSPAHQDNLEEHVRSSMLEPATRGTINVLRSC

SEQ ID NO: 271266 - protein, 60 aa, Zea mays
  Clone ID: MRT4577_178990C.1.pep
PSQNKGAKKKSQPRGDTFITLLPRGVNRGAIQCIWGKERVKKKKPSSCAVLCGMGRHAPT

SEQ ID NO: 271267 - protein, 210 aa, Zea mays
  Clone ID: MRT4577_178991C.1.pep
MGAAGGRAVAVAAMVAVAAALPLLACGGYAECYDYCFKDCISKDKSMRDYCSYACDKTCAPDARRRRPAVVPMNCQLACVRESCHRRRAADGDDDTKTKACYGQCYDDRGCETSAALPRPLRAGGGAGVVGRPGPAESPDHPFHERQDAHGPAAASPDHPFHVKQKQDALGPAAAASPGHPFHKMHGAVKPAGEPDPGYVVYPAWGPAVH

SEQ ID NO: 271268 - protein, 78 aa, Zea mays
  Clone ID: MRT4577_178992C.1.pep
GGGGGGGRKGIKQDRDMWSVIPHYSSYLEYKSRNLNILKELAFLNMSRKMLDNLVTRKVKRKNKAIGDAKYIALLLRR

SEQ ID NO: 271269 - protein, 223 aa, Zea mays
  Clone ID: MRT4577_178993C.1.pep
MVAVAAALPLLACGGYAECYDYCFKDCISKDKSMRDYCSYACDKTCAPDARPRLRDQCRPAEASARRRRCWRCRAARASGVTGPPIPREAGRSRTGGGVARPSIPREAEAGRSRPGGGGVAWPPVPQDARRGQAGRGAGSRIRRVSGMGPRRPLIVVRRRRRSAANDGECHMPMLSCGPRTLLSATSTRESVRVMCVTQCRLINDAHFRADPGMLSAESRALF

SEQ ID NO: 271270 - protein, 70 aa, Zea mays
  Clone ID: MRT4577_178994C.1.pep
RFGTTDDDPERRQGGEGLARPTDTREAAPVLGFLPRGERQLHGQSSDAKKQNQKNARRNQLVRTPFEASS

SEQ ID NO: 271271 - protein, 87 aa, Zea mays
  Clone ID: MRT4577_178995C.1.pep
PSPAPFEGGASLSQPLSRGGARRGSNLRSIFGTFVLILPLSLPLSIAYLIGYGMDIDGGGEFPSLVRNPNLNRWDFQLQQNLRGRSI

SEQ ID NO: 271272 - protein, 237 aa, Zea mays
  Clone ID: MRT4577_178996C.1.pep
MAAAGGRAVAVAAMVAVAAALPLLACGGYAECYDYCFKDCISKDKSMRDYCSYACDKTCAPDARRPAVVPMNCQLACVRESCHRRRAADGDDDTKTKACYGQCYDDRGCETSAALPRPLRAGGVAGVVGRPAESPDHPFHERQDAHGPAAASPDHPFHVKQKQDALGPAAAASPGHPFPRCTARSSRQGSRIQDTSCIRHGAPPSTNRRVRGRRQLRRHDGSAVPTCLCSRVGPVRY

SEQ ID NO: 271273 - protein, 53 aa, Zea mays
  Clone ID: MRT4577_178997C.1.pep
KQLKNTMLFQVFSPEEKLFEGLVPEYIDYGVAILQYVDDTILCIQESVFKSSD

SEQ ID NO: 271274 - protein, 57 aa, Zea mays
  Clone ID: MRT4577_178998C.1.pep
TTINLSKSLTKDNHISGVNKTKRYLGTYINLTQPTSPYFFTKSKQLLFFPPTVSDYH

SEQ ID NO: 271275 - protein, 154 aa, Zea mays
  Clone ID: MRT4577_178999C.1.pep
MISPRPALSPSFLAFRSGSPAASPPSSPRLHAPPPLSASFSTVATAAPGHAAASSFYDVLGLRPGASAREIKAAYRRLALAVHPDAAPHPTSSAEDFIRVHAAYSTLSDPDKRADYDRRLLLSGATVRRTVALGRSPSFPAHRSRRTWETDQCW

SEQ ID NO: 271276 - protein, 119 aa, Zea mays
  Clone ID: MRT4577_17899C.1.pep
GLVSLVLPTVAGPFLTTSIPTSIQLLLSPITGDPKLYSVLASVHARFGCVPLAHVQDVCDAHVLLMEAPRAEGRYLCAAGGYAVAQLARLLASRYLPFRAGDRHVVSAMATSGLFRCAF

SEQ ID NO: 271277 - protein, 41 aa, Zea mays
  Clone ID: MRT4577_1789C.1.pep
LNERFPSKVTLRDQSKLGMPPFWLRPQAIGQNSKTLVRVNR

SEQ ID NO: 271278 - protein, 82 aa, Zea mays
  Clone ID: MRT4577_178C.1.pep
IKQERHWGYIFFFGEKDCYPHPTPLFGGVTCFSQQFSHTRKGGKRTSFSFPRFAPPTGVLCRVSTVVGPPPLGTGHRDPKPF

SEQ ID NO: 271279 - protein, 95 aa, Zea mays
  Clone ID: MRT4577_179000C.1.pep
LGLRPGARGGGGRGAYRRLALAVHPDAAPHPTSSAEDFIRVHAGYSTLSDPDKRADYDRRLLLSGATVRRTVALGRSPSFPAHRSRRTWETDQCW

SEQ ID NO: 271280 - protein, 90 aa, Zea mays
  Clone ID: MRT4577_179001C.1.pep
EGEDATLRSRPSSPRCTNGGKMTGAAHPSSSSLQDEGLRRSLSIPRPHPTWRPTWDSAHCNRPRTEKRVTYPICNSFSVMIVYNPPLWEY

SEQ ID NO: 271281 - protein, 43 aa, Zea mays
  Clone ID: MRT4577_179002C.1.pep
MARVQAESAAAAEAGVKAVDEKVMRSSSGKKVPWANNDGYEEC

SEQ ID NO: 271282 - protein, 437 aa, Zea mays
  unsure (1)..(437): unsure at all Xaa locations
  Clone ID: MRT4577_179003C.1.pep
MDPKGKGXVVNDNEKESIFNEPRDDKVNDSGLSQKQKDGKKKRRIRKVVYYDSDESSSSQKDDEYEEKKKTVNSNFSFDYSRIPHNSNAHLLSILLGKPPHFDGEDYGFWSHKMRSHLFSLHPSIWEIVENGMQFDSSDNSMFINEQIHKNAQATTVLLASLCREEYNKVSGLDNAKQIWDTLKISHEGNDVTMLTKMELVEGELGRLKTLVNKIRSYGSTRWTDHDVVRLMLRSFTVLDPHLVNSIRENPWYIKMTPEQILGKFVSGRMMIKEARYVDEALNGPIHEPQAIALKATSSRETLPSKVAQIEAAGLNEDEMALIIKRFKTALKGRKEHPNKSKMKGKRSCFKCGKVGHFIANCPDNDSDQDQEKRREKKKTYKKAKGEAHLSKEWDSDCSSSDSDDEGLAASAFNKSALFPNEHHTCLMAKEKKLKEY

SEQ ID NO: 271283 - protein, 188 aa, Zea mays
  Clone ID: MRT4577_179004C.1.pep
MTPEEILGKFVSGRMMIKEARYVDDALNGPIHEPQTVALKATRSREALPSKVAQVEAAGLNEEEMALVIKRFNTALKGRKEHPNKSKTKGKRSCFKCGKDQEKKREKKKTYKKAKGEAHLGKEWNSDCSSSDSDDEGLAASAFNKSSLFPNEHHTCLMANEKKVSTRNNATYASLSDDEIDYACLFKG

SEQ ID NO: 271284 - protein, 66 aa, Zea mays
  unsure (1)..(66): unsure at all Xaa locations
  Clone ID: MRT4577_179005C.1.pep
MASADVECACFFSGLAXNPPTTNLXNAFSSYCEILYFKVITYSETGRSPFFXFFTFSIQNSMLYSF

SEQ ID NO: 271285 - protein, 196 aa, Zea mays
  unsure (1)..(196): unsure at all Xaa locations
  Clone ID: MRT4577_179006C.1.pep
MAPAIGIDLGTTYSCVGIFRDDRIEXIANDQGNRTTPSFVAFTDTERLIGDSAKNQVAMNPVNTVFDAKRLIGRKFADAEVQADMKHFPFKVIDKGGKPVIQVEFKGEEKTFTPEEISSMVLTKMRETAESYLGGTVNNAVVTVPAYFNDSQRQATKDAGLIAGLNVLRIINEPTAAAIAYGLDKKAEGERNVLIF

SEQ ID NO: 271286 - protein, 1062 aa, Zea mays
  Clone ID: MRT4577_179007C.1.pep
MDPKGKGMVVNDNEKESIFNEPRDDKVNDSSSSQKKKDGKKKRRIRKVVYYDSDESSSSQKDDEYEEKKKMVNSNFSFDYSRILHNSNAHLLSIPLGKPPHFDGEDYGFWSHKMRSHLFSLHPSIWKIVENRMQFDSSDNSMFINEQIHKNAQATTVLLTSLCREEYNKVSDLDNAKQIWDTLKISHEGNDVTMLTKMELVEGELGRFAMIRGEEPTQTYNRLKTLVNKIRSYGSTRWTDHDVVRLMLRSFTILDPHLVNSIRENPRYTKMTPEEILGKFVSGRMMIKEARYVDDALNGPIHEPQTIALKATRSREALPSKVAQVEAAGLNEEEMALIIKCFKTALKGRKEHPNKSKTKGKRSYFKCGKVGHFIANCPNNDSDQDQEKKREKKKTYKKAKGEAHLGKEWNSDCSSSDSDDEGLAASAFNKSSLFPNEHHTCLMAKEKKVSTRNNTTYASSSDDESSDDEIDYACLFKGLDRTKIDKINELIDALNEKNRLLEKQEDLLYEEHDKFVSVQNSLALEVKRNEMLSRELSTCHESISSLKSINDDLNAKLEIANKSTSYEEHVVICNRCKDFNVDACSEHLVAISKLSNEVTSLNAQLKTSKNEFDKLKFVRDAYTIGRHPSIKDGLGFKREAKNLTSHKAPIPAKEKGKAPMANSAQKNHAFIYDRKFSRNVHHDRSCNAYDSNAMFASSSSYVHGRDMPKKNVIHHMPRRNVAQDPRKIVNEPSTIYHACNASFVICRKDKKVYASGGSSWIIDSGCTNHMTGEKKMFTSYVKNKDSQDSIIFGDGNQGKVKGLGKIAISSEHSISIVFLVESLGYNLLSVSQLCNMGYNCLFTNVDVSVFRRSDGSLAFKGVLDVKLYLVDFAKEEAGLDACLIAKTSMGWLWHRRLAHVGMKNLHKHLKGEHVLGLTNVTFEKDRPCAACQAGKQVGNAHHSKNVMTTSRPLELLHMDLFGPVAYLSIGGSKYGLVIVDDFSRFTWVFFLQDKSKTQGTLKRFLRRAQNEYELKVKKIRSDNGYEFKNLQAEEYCHTQVSGAPRPGREHNHQVCWDQVSHI

SEQ ID NO: 271287 - protein, 128 aa, Zea mays
  Clone ID: MRT4577_179008C.1.pep
GGDESSFLMVWYLCYSFLLNCTHILTYITWNVQSCNHALREQPQRKIKRHGLFTSVMPMTVRRACRPTPLPFSPSRVIPPVSIPRYKAPPLAPDYRQRRDCQKVRSPAQYHVATRQHLSQGQVVGRAV

SEQ ID NO: 271288 - protein, 91 aa, Zea mays
  unsure (1)..(91): unsure at all Xaa locations
  Clone ID: MRT4577_179009C.1.pep
KHTNGSQFFIXVLHRALQSTTKPAPHLDGVHVVFGLVISGFEVIEQIENLKTDAASRPYADVRVLDCGVXLATKSIKDVFEKQRKKPTHSE

SEQ ID NO: 271289 - protein, 59 aa, Zea mays
  Clone ID: MRT4577_17900C.1.pep
VLDRERPPFFFIFFDYLKYEDCFTFNKQRGAQISAFIYIYALGNGHYYTAMALDDLKLH

SEQ ID NO: 271290 - protein, 76 aa, Zea mays
  Clone ID: MRT4577_179010C.1.pep
LKCTTRAGISKYTPNVCGLRAIVNIILMSMSWRFLLQGPERTSMYSVYPQCTMYHQNWFFSPVSRVVLNPQYICHV

SEQ ID NO: 271291 - protein, 59 aa, Zea mays
  Clone ID: MRT4577_179011C.1.pep
RRHSRLPCLITLTRIFLQIFPSNRLGKSIGNYRYTDRWVVFGVSFVVCGGPIHSRKQNA

SEQ ID NO: 271292 - protein, 55 aa, Zea mays
  Clone ID: MRT4577_179012C.1.pep
LNYLSTTCLCPRPFFLCCIYVVPIQRKSLFYFLFISNYIVSCIDKVCIEQMACGV

SEQ ID NO: 271293 - protein, 66 aa, Zea mays
  Clone ID: MRT4577_179013C.1.pep
LHSYHIQLADLIDSLPKRLLVLVTHHHQDHIEGLSVVQRCNPDAVLLTHQSTMDRIGKGTWQIDYT

SEQ ID NO: 271294 - protein, 65 aa, Zea mays
  unsure (1)..(65): unsure at all Xaa locations
  Clone ID: MRT4577_179014C.1.pep
GTRRGGGGLXRREDXIXFSFLCSNDGTRFFSCIMCKSLRYVFLIHGCATCSASESTQAKTYAGAY

SEQ ID NO: 271295 - protein, 122 aa, Zea mays
  Clone ID: MRT4577_179015C.1.pep
MVSGHRSDVGASAPTTALSSVPPPPLSLLGADDQEKEEGQATAGGHDIPVCAVRLVQQGRQLVKQSLSLEHLSLFSLPMPIKSNPIHNQTMASDGNGVVMVYVTLHYWSRLSNPSRRLSLSR

SEQ ID NO: 271296 - protein, 101 aa, Zea mays
  Clone ID: MRT4577_179016C.1.pep
EADLVLLAMGFLGPEASIAEKLGLEKDNRSNFKAQFGDFATSVDGVFAAGDCRRGQSLVVWAITEGRQAAAAVDKYISRHDQNVAGDITPFGAGLVQPVGA

SEQ ID NO: 271297 - protein, 433 aa, Zea mays
  Clone ID: MRT4577_179017C.1.pep
MQMMMLSDLSSDDHEATGSSSYGGDMASYALSPLFLAPAASATAPLPPPPQPPAEELTNKQAAGGGKRKRSQPGNPDPGAEVIALSPRTLVATNRFVCEICNKGFQRDQNLQLHRRGHNLPWKLRQRSSLVAPSSAAAGSGGRQQQQGEAAPPRKRVYVCPEPTCVHHDPARALGDLTGIKKHFSRKHGEKRWCCERCGKRYAVQSDWKAHVKGCGTREYRCDCGILFSRKDSLLTHRAFCDALAEESARLLAAAANNGSTITTTTSSSNNNDLLNASNNITPLFLPFASSPPPVVVAAAQNPNNTLFFLHQELSPFLQPRVTMQQQPSPYLDLHMHVDASIVTTTGGLADGTPVSFGLALDGSVATVGHRRLTRDFLGVDGGGRQVEELQLPLCATAAAAGASRTASCATDLTRQCLGGRLPPVNETWSHNF

SEQ ID NO: 271298 - protein, 115 aa, Zea mays
  Clone ID: MRT4577_179018C.1.pep
KISGTKFSNPTMLPKTLKIFTEPQKKQAPQNHHPLKNQNPKTTFGPSLLGPRGNFFYFKIPQIQNSWAPNTEIFSKSFSKGKNFSKKRGDWPLTQQNKIPNLKLPKRRKIFKKKH

SEQ ID NO: 271299 - protein, 103 aa, Zea mays
  Clone ID: MRT4577_179019C.1.pep
AVRSPSTDAFVPYIFGCDAGEAETDNRIRRQGEREEIGLTFTKLVRLVLAKKGMRILMVGLDADGETTILYKLKLGEIVTIILTIGFNVETVEYKNIIFTVWD

SEQ ID NO: 271300 - protein, 159 aa, Zea mays
  unsure (1)..(159): unsure at all Xaa locations
  Clone ID: MRT4577_17901C.1.pep
AGVANKKRLSKQLSMKETTREVKWEKRKRQIQRXEHHAPERSRRQSSSAERVATGITDGDLDELRGSMDLGFRFDEQKGGQDLCDTLPALDFYFGVNRQVSEPRMSFPTSTSSGPSLSATKFSANLCGTPSPGSPGAHSSNALESWKICNPGDNPLLVK

SEQ ID NO: 271301 - protein, 75 aa, Zea mays
  Clone ID: MRT4577_179020C.1.pep
GLPKGFGGTVLPSWARGPPTFFPLVGMVPDIVAARRPTHWDFLTYYKNYNGLVLTHFFHLPVVRKTKGGRLSSIL

SEQ ID NO: 271302 - protein, 60 aa, Zea mays
  Clone ID: MRT4577_179021C.1.pep
RPTGGAPCLILPLTGASVSSLARSDRPSTEMLTLSLTGPLCETGHLNPNLIYFGSPEFQI

SEQ ID NO: 271303 - protein, 59 aa, Zea mays
  Clone ID: MRT4577_179022C.1.pep
NVQGGRPGSTGPNARAVKVQEKSYHRCHLLIAQVFSLTVDQSWCPVLCIQNKTPPSART

SEQ ID NO: 271304 - protein, 161 aa, Zea mays
  Clone ID: MRT4577_179023C.1.pep
GNYNTPGRANSPLMRKTRPGWGNHPPPRGKAKKDPRAPGFPKIKRFKENLRKAFPRKREAPRGALKTGAGPFPKGIRESGWNPLNRFFRKNLGAGYLTGKKLKPPGEEGKRGFRAPRGGKFFNPWFNGLRGGKGNPLPFGWGGGGRPPRGPKGKTPKGGKG

SEQ ID NO: 271305 - protein, 68 aa, Zea mays
  Clone ID: MRT4577_179024C.1.pep
YGRRQDTEVAERVCHALHLPTVLFHGEIHLRELMELGVEVECPHSPPTTRIVLLRCSLGHALCLAARL

SEQ ID NO: 271306 - protein, 115 aa, Zea mays
  Clone ID: MRT4577_179025C.1.pep
GPQGGGQEETALTAVLQLTHPGMVFVPVGYTFGAGMFYMDEVRFFSPYGAGTFSGADGRNRFPNDAELQMAAPQGSYFSAFAKKLKAGAAVVALACLSSAFSSLPIDASCFCFRK

SEQ ID NO: 271307 - protein, 101 aa, Zea mays
  Clone ID: MRT4577_179026C.1.pep
MLFVLRPSFCWRDGLLLSGGVAPFFFFGPKGKQKDGNRRKKKDDRLAVFVLVVLWDDVFPAPHLKIIEQKKKKKKKKKKKKKKKKKKKKKKKKRKKKKKKR

SEQ ID NO: 271308 - protein, 131 aa, Zea mays
  Clone ID: MRT4577_179027C.1.pep
VFVQALMGGCTLCCVATESLPEVERKGSYLSAGVYHCAVPLFIMYMFGLFVSPGISLWRLLQQDYGDTARNNSMANLKPTLIVLYSLAAPGRAILLQGHMFFGGATTGEASGPSVCAGCGRRGTWIHFRLS

SEQ ID NO: 271309 - protein, 299 aa, Zea mays
  Clone ID: MRT4577_179028C.1.pep
MDVRPANAADDSSLGDLFPHQPAGLESDESNTEWLSGYVEDCFSSSTSYTNPVSAMASEGVGKPKLPPPPSSNGRRKKRSLASVMTNGDYQQFVLPLYVEPPLILIDQKHWMAESELIHPKKDDDDREVCQQQGQEQEKGVRRLVKMCSNCLSSQTPRWRDGPSGRQMMCSACGMRLKPETRLSAEQQCGQEEPTRKEQEPDRKRKKAAKKTCYESSDAPPSSDQQEKRCAHCLSSKTPQWRAGPLGPKTLCNACGVRFKSGRLLPEYRPANSPTFVSCLHSNSHKKVMQMRQAVAQQQ

SEQ ID NO: 271310 - protein, 152 aa, Zea mays
  unsure (1)..(152): unsure at all Xaa locations
  Clone ID: MRT4577_17902C.1.pep
MADKIFRLLMLLGICASXAATATIFPXCSQAPIAPLVPPYLPPAVCSVWENPILQLYRIQQXATTPGIPPLSPLFLQXQSLALLQQVXPLVEFIGXNIRAXQQLTQVXVLANPLXAYXQHHQDYFHLNQXLAAIGSLASLITQQATTLPIQA

SEQ ID NO: 271311 - protein, 56 aa, Zea mays
  Clone ID: MRT4577_179030C.1.pep
IILFMLMTPLFVAPASGGKGRRAFYYYPLNKGKKTHWGDVTFGDPDAGFLQKNNDR

SEQ ID NO: 271312 - protein, 221 aa, Zea mays
  unsure (1)..(221): unsure at all Xaa locations
  Clone ID: MRT4577_179031C.1.pep
PGXTHAVRQTAQHAIXLKHALXXTSYVSXRRAICIXLLFPWXVQPTPNQTKGXQTXTSPLFVLGXPSHFTILXXQFIRFLPRSCLNQGXWTSSNISRTSNXSDGFRGSRAFHKATAIDRSYFAPXCSXVGLLXSEQWRRXXRIMXSSPQMRSHSTSRTMPXKPVAPSCLSPSVSMLXMKKTQQVIIVEKSMEXEEMELMKXKYTKLLLGEDMSGSGKGVCT

SEQ ID NO: 271313 - protein, 132 aa, Zea mays
  unsure (1)..(132): unsure at all Xaa locations
  Clone ID: MRT4577_179032C.1.pep
SRIKVRSQPPVEALGSRLVFAIRVPGFPNLKSVKELIYKKGRGXXXXXXXXXXXXXXXXXXLGDHGIICLEDLVHEIATVGPHFREASRFLMPFQLKCPERRLQMKRKPYKDGGDSGNRGDKVNERLSLLNP

SEQ ID NO: 271314 - protein, 262 aa, Zea mays
  Clone ID: MRT4577_179033C.1.pep
MGAGGEEAPRIIVPMAVEGTPNQLAFVEESKLQKRKENVDWAVRNRERRAAKRQRIRDEHKVAVRRPEEFVTAFRNKERDFLRMRTRIKVRSQPPVEALGSRLVFAIRIPGSVDLHPHIRKVLRKLRLTKVLTGVFLRATELTLKRLLVVEPFVTYGFPNLKSVKELIYKKGRGFFDMEPFPLTSNDLIEKALGDHGIICLEDLVYEIATVGPHFREASRFLMPFQLKCPERRLQMKRKPYRDGGDSGNRGDKVNELIEKLN

SEQ ID NO: 271315 - protein, 321 aa, Zea mays
  unsure (1)..(321): unsure at all Xaa locations
  Clone ID: MRT4577_179034C.1.pep
PGCRRHEPDGSWSSHTVRPRPHSALNSPATSSSKNLHDLETLTSSLPPRRRHRRKEKKNGCRWGRSVADSRANGGGGDLGAAGVXVEESKLQKRKENADWAVRNRERRAVKRQRIRDEHKVTVRRPEDFVAAFRNKERDFLRMRTRLKVRKQPPAEALSSKLVFAIRIPGSVDLHPHIRKVLRKLRLTTVLTGVFLRATELTLKRLLVVEPFVTYGFPNLKNVKELIYKKGRGFFDKEPFPLTSNDLIEKALGDHGIICLEDVVHEIATVGPHFREASRFLMPFRLKCPERRLQMKRKPYKDGGDSGDRGDKINELIEKLN

SEQ ID NO: 271316 - protein, 106 aa, Zea mays
  Clone ID: MRT4577_179035C.1.pep
SARLRFLRPPSFFFVGTWRLMFTTNGMLVLMFAGLSKLIRLSWWWLVLSSLFLYLRCRLSLVMSYAYARELMVVILFSSAPGILFEIKFVIKVFLHECFRLLVVFF

SEQ ID NO: 271317 - protein, 28 aa, Zea mays
  unsure (1)..(28): unsure at all Xaa locations
  Clone ID: MRT4577_179036C.1.pep
TISVLYKHLXSLPSPTRYSVMAIYSWCY

SEQ ID NO: 271318 - protein, 73 aa, Zea mays
  unsure (1)..(73): unsure at all Xaa locations
  Clone ID: MRT4577_179037C.1.pep
VSVLICASSEIHMGKSLKKXLSVPFHKRKIHKSALVFSEKSVSTLELLKVSWSKEWLLMKRNSFVFGIKIVQL

SEQ ID NO: 271319 - protein, 70 aa, Zea mays
  Clone ID: MRT4577_179038C.1.pep
LSSKHYRKCIHTLPSFLVRPTKHTIRIHIGSCLDTITPFCKAATSFGFIEIHQVEQHQNHSRLELKAYKP

SEQ ID NO: 271320 - protein, 206 aa, Zea mays
  unsure (1)..(206): unsure at all Xaa locations
  Clone ID: MRT4577_179039C.1.pep
MAALLAPSTPPNPSTNRVFYGGVDDTLVYDGSSXPRHSGHAYPQRRSGSKPRARXPPRFYKLEFPTYDSATDPLHWLNQCEPFFQGQRTMALDRTWLASYHLTGTAQTWYYALEQDEGMPSWERFRELCSLRFGPTMRGTRLSEMAHLPFTSMVQDYADHLTQCSXHSRNLSAXQKAKLFVGXAPDHIHIDVELHEPXDLQSTMYL

SEQ ID NO: 271321 - protein, 242 aa, Zea mays
  Clone ID: MRT4577_17903C.1.pep
MGSNGRDHRRGVPRPPPLPLYRDWEEEEVVKAGRRRQSPLAQSSTSPAAAAGVANKKRLSKQLSMKETTREVKWEKRKRQIQRQRSSMRLSEADDRAGGSTAVCPVDGEASSSAERVATGITDGDLDELRGSMDLGFRFDEQKGGQDLCDTLPALDFYFAVNRQVSEPRMSFPTSTSSGPSLSATKSSPNLCGTPSPGSPGAHSSNALESWKICNPGDNPLLVKTRLRHWAQVVACSVKHSS

SEQ ID NO: 271322 - protein, 129 aa, Zea mays
  unsure (1)..(129): unsure at all Xaa locations
  Clone ID: MRT4577_179040C.1.pep
FRKLPPLFYTPEALPPRLDPSKVGGGFFRLTAGKVGPPFSLAPKIGPFGFSPKKIGGAIAKEPAKDXKGFRLTVKLTVQNRQAKVSVVPSAGGFVIKALKGPKRNPRKVKTLKPRGTISLNNLYKIART

SEQ ID NO: 271323 - protein, 116 aa, Zea mays
  Clone ID: MRT4577_179041C.1.pep
EVIHLFVKEKHLLTLEKHEETNQPPRNHIQGIELGKQKATKYTLNFFQVTNDQQMVYGITTTEQNGGKHRDLLIPQAPLPPSGQRIYSQNKICSSRQTEHIQHSMKSVHFPILTIS

SEQ ID NO: 271324 - protein, 188 aa, Zea mays
  Clone ID: MRT4577_179042C.1.pep
KCKDRLPRRRPPPRPCWTLATLSASAPAMGTASVFPPPSITPAPSSSPSSPAPGSLEVSCRRTSPAPPPHAAAPVPSSSLASVDSALSRVCSSPRLRASTRSISMTASGPRVFPCRARPARSGGLPPLAARSPVPLPPSIVSWRKRRGSRQRLCLPAIPWSNAFLPHHDRPPAPAGNPGAKPQASMFH

SEQ ID NO: 271325 - protein, 61 aa, Zea mays
  Clone ID: MRT4577_179043C.1.pep
FIFIIYFFFFFLFLNNYNFIFFTVSQVNIALHNGIILHYTAEQVHHMTEWICLVRLRYCYY

SEQ ID NO: 271326 - protein, 100 aa, Zea mays
  Clone ID: MRT4577_179044C.1.pep
FLYYSLIRDIPARPARLLATDLGAVLLAIRRSCEADRSCASMNEIPIYMCASPARVLLGTCPSWRAACAHSPWPRARTPLRLSSHDDARHGPPTLIYGSV

SEQ ID NO: 271327 - protein, 92 aa, Zea mays
  unsure (1)..(92): unsure at all Xaa locations
  Clone ID: MRT4577_179045C.1.pep
RFFWSLRHRRIAYHLVQAKSDQQLDRKRMALKQISSNKCFGGLQKVFEHDSVELNCKMKFAVYLPPKAETGKCPAXCIGSXGLTCTEXKFYI

SEQ ID NO: 271328 - protein, 83 aa, Zea mays
  Clone ID: MRT4577_179046C.1.pep
ECRLELQDKKDDELVLLALPPERSPILFLISNMRRSSGLELVVFCISLFGWERKEVIANRAYTISYTATLLVKLSSDLHTGTL

SEQ ID NO: 271329 - protein, 57 aa, Zea mays
  unsure (1)..(57): unsure at all Xaa locations
  Clone ID: MRT4577_179047C.1.pep
ILFIHFFSLLRKKISKLDITLIIAVRGHRILGVVPVAKQEHFFXRGGTYRTRPHHFF

SEQ ID NO: 271330 - protein, 100 aa, Zea mays
  Clone ID: MRT4577_179048C.1.pep
AGLFKRGQPALHYPIVRHLTTASYTRRESRYGPRNTRLTTDSKMDGLRMNFDEVDVMAVALMATNVTGEAPAPVTTTDAVSDLILTVVSLISDDFKYLLC

SEQ ID NO: 271331 - protein, 90 aa, Zea mays
  Clone ID: MRT4577_179049C.1.pep
QGGTTITEDRSIDCHQPYSSSTNAGADHRWVGQQSSRSWRWPAQATETALFYQGTIIHLWIVALAPLTTARCWRSRVSREPYSPVHMHGS

SEQ ID NO: 271332 - protein, 173 aa, Zea mays
  unsure (1)..(173): unsure at all Xaa locations
  Clone ID: MRT4577_17904C.1.pep
MATYAGGGNTEENNQTVLSTLPKELPLDFLRTITDQFSDQRILGTGAFGTVYTGVMPDSQRIAVKKLAESAPVARDKAFTNEVQNIMALHHKNVVKLVGYCHEGQKKVVQNNGRYIGCRXVYESLLCYEYLPMGSLQRNLFDKPINMAWDARFKIIKGICDGLLFLHRIPIIH

SEQ ID NO: 271333 - protein, 114 aa, Zea mays
  Clone ID: MRT4577_179050C.1.pep
LGRGRLVPRSRGGLPPPCPRGCRGVHVFVGVFPVPGLFVPGLFYLYRGFRVGGPNILVWGSMLFSRRVPLSPCAPAPNRLGVLSVSLDVEFQGAVSGAYATPCYNIRQRKKMFF

SEQ ID NO: 271334 - protein, 99 aa, Zea mays
  Clone ID: MRT4577_179051C.1.pep
MELYVDEKWKFSKKSRNNGSRRVPGSGGGDSLLKRSSSMRDVAAIGRRGTGGAGAAAAGGCAPQPSFSSRCAGLVKEQRARFYIMRRCVTMLVCWKDCS

SEQ ID NO: 271335 - protein, 62 aa, Zea mays
  Clone ID: MRT4577_179052C.1.pep
VLLFHELILQLLQTAGYLFIYHAGYLRKLSIPSSMNLLLKLTYLLYVNMRMYARVFLYHAPA

SEQ ID NO: 271336 - protein, 55 aa, Zea mays
  Clone ID: MRT4577_179053C.1.pep
SFHLFVRRYVRWIRPSILATMQSPVSLHIIKPILTIHVKKLAARHSLDKHMLPPN

SEQ ID NO: 271337 - protein, 80 aa, Zea mays
  unsure (1)..(80): unsure at all Xaa locations
  Clone ID: MRT4577_179054C.1.pep
CVHSRTHARGHTLSLSHALFMSHTRARXTXSSXXYSERRSHTLSRAVSLSHTHTHTHRGGDTHTTHTHINTHTHTHTHTH

SEQ ID NO: 271338 - protein, 100 aa, Zea mays
  unsure (1)..(100): unsure at all Xaa locations
  Clone ID: MRT4577_179055C.1.pep
KCQGLKKKFSHKIRRVDPLPRYQAKXGVVLQSFFKKKPKGELGALMGAKEAQKFRVFWGLKLKKPGPFPXEKKLGGVFFFGEILFCSKNEREPFTSSLAG

SEQ ID NO: 271339 - protein, 284 aa, Zea mays
  Clone ID: MRT4577_179056C.1.pep
SRSLSPVHTGMYLGSVTGLAFSPLLIHKFGWPSVFFSFGSLGLVWFTTWATKAYSSPLEDPGISAAEKKLIASQSTAGEPVKTIPWRLILSKPPVWALIVSHFCHNWGTFILLTWMPTYYNQVLKFNLMESGLICVLPWFTMAVSANVGGWIADTLVSRGVSVTTVRKIMQSIGFLGPAFFLTQLSHVNSPAMAVLCMACSQGTDAFSQSGLYSNHQDIGPRYAGVLLGLSNTAGVLAGVFGTAATGYILQHGSWDNVFELSVVLYLVGTLVWNVFSTGEKILD

SEQ ID NO: 271340 - protein, 85 aa, Zea mays
  Clone ID: MRT4577_179057C.1.pep
VPQSPFFLRFWSSLSPPPKFGFAVNVSPPLCSIGAYFFPLLCSFVLMSFFFMASSVFTFVHRPRSLYVFLCCPHPQSVCVAMLTS

SEQ ID NO: 271341 - protein, 114 aa, Zea mays
  Clone ID: MRT4577_179058C.1.pep
MAATASLSAVAAPLSVAGLRKPLGASSFRPLQPRAAARMTAVRASSSVKEKAAAGLTAAALAAALVVPDVAEAAQSLTPSLKNFLLSIVSGGVVLVAIVGAVVAVSNFDPVKRA

SEQ ID NO: 271342 - protein, 170 aa, Zea mays
  unsure (1)..(170): unsure at all Xaa locations
  Clone ID: MRT4577_179059C.1.pep
ARNSARETAMQVFTDKSLGMMTSELLNASQGGPTMLPHIENECGPQSKELGAASQAYVNWARKTADGSGTGVPRVMSKEDDSPDPMINACHGFYCEGSSANKPWKSTMQTEPRIRYATEXAGTIQQRPAEDQALAAARYXQKAGAHINHYMCYGGTNFARIAGGPVNTQA

SEQ ID NO: 271343 - protein, 128 aa, Zea mays
  unsure (1)..(128): unsure at all Xaa locations
  Clone ID: MRT4577_17905C.1.pep
WRWHTTADTPMLSHVMNSIPAHSRPMGLSGXALTRTRPRLRVVKVAIEPENATGDGRPPINGDPYIGSLETPETCSPLVVCYLSNLPDDRTDVSPLLRVAEVGLPHGYLLGGPFTLTGPVQHTPVHGQ

SEQ ID NO: 271344 - protein, 339 aa, Zea mays
  Clone ID: MRT4577_179060C.1.pep
MADHRISIYFHLQVQLSCEESMLLITMARIRCTARKSVIPFLPSHLAERPLCRTVSGQSSHLERLHRRLHVEQERRHQEQEQQDSSPSPQREVESERPPSPAPQPEMPPAPPQGISAAGGDPDGDGDDDDAGGSSSHDTERSEEPEPEGWIARPITRDAARKCHFHDALDTLLRQAFDRHTWSIEYHCVVYQHRRGLYLDQWEATCLAFSEHYSITERDTVEAAMQDAARQAISQYCSLFSGVADGLDLKYYPRRSTGSAGGVIISPVGEGNPRLSSMVNLAIVLNTELDHTLDELGKVRAEVAELRAECTARHYLDGGSPTPVGIQHPYRSPPGGHFD

SEQ ID NO: 271345 - protein, 68 aa, Zea mays
  Clone ID: MRT4577_179061C.1.pep
GGRAGLLVTWRGPELTPALAPPLAISPALIIWPARRRQRHAAAQPPRSLPTVRVATVATRATRGRPES

SEQ ID NO: 271346 - protein, 129 aa, Zea mays
  Clone ID: MRT4577_179062C.1.pep
MQDAARRALSQYCSLFSGVADGLDLKYYPRRSTGSAGGVIVSPVGEGNPRLSSMVNLATVLNTELDHALDELGKVRAEVAELRAKCAARHYLDGGSPAPVGIQHPYHSPPRGRFDYGTLDCRTRIDMDP

SEQ ID NO: 271347 - protein, 172 aa, Zea mays
  unsure (1)..(172): unsure at all Xaa locations
  Clone ID: MRT4577_179063C.1.pep
EETHQAKHGSNNPTTXXTKXXAXRAPXAPXASATKAXKXPQGXXXPXXKXTQXXPPXXXKGXEHPAXQAXRXQQAXAASXXQQPXXQXQQQAXAQXTXQTSATQQQQQXQPAXSHRAXENXAANXQQQRXATNPXAXANXEANQPQQQXQQKGPAHRQPAXENXADNQQQQQ

SEQ ID NO: 271348 - protein, 121 aa, Zea mays
  unsure (1)..(121): unsure at all Xaa locations
  Clone ID: MRT4577_179064C.1.pep
SLCSFCGRRPFVPGCPVFPVLCAPPLSLARVCRGLPVPVLCVRWSLAGPLLFPSCVLWFLLCSLSVVLLVCLRCFGCLAVCARGLSFVPRRVGALIVFVSLAAAXFPFTHQRVLLSVRRVS

SEQ ID NO: 271349 - protein, 61 aa, Zea mays
  Clone ID: MRT4577_179065C.1.pep
SCRWWAWVRAWTRSIRCMAGEDSWGSRAGPGRAYIAAVWSRVPWGGIVCAVSAVAAGVGLL

SEQ ID NO: 271350 - protein, 102 aa, Zea mays
  unsure (1)..(102): unsure at all Xaa locations
  Clone ID: MRT4577_179066C.1.pep
HYFHNIQGLSFFVDINGRFRVVEATHELLRILNEDDXRDAVLLVLASQQFVLKAISVAEIIAKLVFRSLRAPXXYFQSSCATPGKGLKEGLVPLPSNFFFKA

SEQ ID NO: 271351 - protein, 44 aa, Zea mays
  Clone ID: MRT4577_179067C.1.pep
IEFGPFHAVSELGCSRSRYAVSRGILVSVLSSAHPYLSVSSQVL

SEQ ID NO: 271352 - protein, 48 aa, Zea mays
  Clone ID: MRT4577_179068C.1.pep
YIRKAHMKFLLLFKHFYLKKYNVQRLAIFLSNFDATCFFLISETDDVY

SEQ ID NO: 271353 - protein, 87 aa, Zea mays
  Clone ID: MRT4577_179069C.1.pep
GYSTRIGQTSGPRFLHKPPLVVNLMAKTKNLGDSLITSRWVEHKGTLHLDHKGQREKALAYWQIIKEERLFHPLVCLWPLDKRTLRA

SEQ ID NO: 271354 - protein, 60 aa, Zea mays
  Clone ID: MRT4577_17906C.1.pep
CAIRNSIYKLRHRGCIRFWSFSAKQSPDFQHMVLKLEMGLGVHPHLHNKVPIGLRVRHAQ

SEQ ID NO: 271355 - protein, 69 aa, Zea mays
  Clone ID: MRT4577_179070C.1.pep
FPPINFKGGALINCFIALPNPKSSRLPPSGYSYRLLSPGYVFLCRFVNKKFVLCTKVFVNSLSFKIFVP

SEQ ID NO: 271356 - protein, 365 aa, Zea mays
  Clone ID: MRT4577_179071C.1.pep
MSVKFEDLYGFMVEGNVDDVNVLNEVRERIREQGRVWWALEASKGANWYLQPKISSNEGVISVTSLKLSVLTNTITLRRLIRKGVPPVLRPKIWLSVSGAAKKRSTVPETYYDELIRATEGKTTPATRQIDHDLPRTFPCHPWLNSDKGQASLRRVLVGYSFRDSEVGYCQGLNYVAALLLLVMKTEEDAFWMLAVLLENVLVSDCYTDTLSGCHVEQRVFKDLLAKKCPRIAAHLEAMGFDVSLVATEWFLCLFSKSLPSETTLRVWDILFNEGANVLFRVALAIFKMREDDLLRIQHIGDVIDILQTTTHHLYDPDELLTFAFDKIGSMPTNTITKERKKQETVVLAELDQRTRRLSSLKMDG

SEQ ID NO: 271357 - protein, 121 aa, Zea mays
  unsure (1)..(121): unsure at all Xaa locations
  Clone ID: MRT4577_179072C.1.pep
SFFISLIQHIGPPISRSQAAITSVLLSKEEIDNMFQDAHKYKSDDDDHNINVEANNSLENYFYNMRNTINDYNIASKLPTDDNNKIYDSIDSAITWLDSNHXLGSTNSSDIMNELYNLCNP

SEQ ID NO: 271358 - protein, 117 aa, Zea mays
  unsure (1)..(117): unsure at all Xaa locations
  Clone ID: MRT4577_179073C.1.pep
CRIAAHLEAMGFDVSLDATEWFXCLFSKSLPSEXHRSSISINISVIPCMIFSXYLMFFAHLCSLMXQTTLRVWDILFNEGANVLFRVALAIFKMREDDLLRIQHIGDVIDILQTTTH

SEQ ID NO: 271359 - protein, 65 aa, Zea mays
  Clone ID: MRT4577_179074C.1.pep
RVLCHPLQTGTIATSFFTSRSQEFREICSTMWCLFHTQLMLRTALPSTRSTASSSSNFAQALRSW

SEQ ID NO: 271360 - protein, 52 aa, Zea mays
  unsure (1)..(52): unsure at all Xaa locations
  Clone ID: MRT4577_179075C.1.pep
LSPSKSLRNLALLVQTYSLTPLLSIQQAVFVYXYAKCTDFWSGSCDFYCSFC

SEQ ID NO: 271361 - protein, 264 aa, Zea mays
  Clone ID: MRT4577_179076C.1.pep
SLVSLSGFRDLAPEYLPTIATVAANLTSMDLSYAPVNPDQVLLFIGQCRSLETLWVLDSVRDEGLQAVAMCCKKLQVLRVLPLDAHEDADELVSEVGLTAISEGCRDLRSILYFCQRMTNAAVISMSHNCPEMKVFRLCIMGRHRPDHVTGEPMDEGFGAIVRNCSKLTRLSTSGHLTDRAFEYIGKYGSSLRTLSVAFAGDSDLALQHILQGCSKLEKLEIRDCPFGDAGLLSGMHHFYNMRFVWMSGCSLTLQGCQEVARQL

SEQ ID NO: 271362 - protein, 112 aa, Zea mays
  unsure (1)..(112): unsure at all Xaa locations
  Clone ID: MRT4577_179077C.1.pep
PSKGTKPEGVVKWGSSRFATTSTRSVKSHKKNEDSSVVRRKSTSDAEDESKEEEXEINKXEEENXNGDPPKXGDVTPEKSESEDKSDSGSESEDTKEKKKPSKTSSTKKESA

SEQ ID NO: 271363 - protein, 58 aa, Zea mays
  Clone ID: MRT4577_179078C.1.pep
PTRGKMPLWVVPKLGGVKFFKFGGVKIPGFSQLYFVGGGVFGILAVRFFFYPGISSLL

SEQ ID NO: 271364 - protein, 54 aa, Zea mays
  Clone ID: MRT4577_179079C.1.pep
IRLEVKSSSQFFVVDLTDDHKNMLSTRVAPAYLSAHTTCRCMPKEWLIPFARIW

SEQ ID NO: 271365 - protein, 248 aa, Zea mays
  Clone ID: MRT4577_17907C.1.pep
EFGTRDPFAEGSSHLLSPRPSSRLARRLNSSCLRPISPLRSPRRNPERRPRSVEHPLGQRPRDQLRRGVRPQQPGCPRERLRRGRHTARQELHDLRRKNSALQMQRFVGEEKNDLLDYLRSLTPEKVAELSESSCPGVQEAIHSVVHGLLATLSPKIHSKVPPPLDNTSGGVLNLGGEDDDCAELVENASLPFQPLISVPRDYLARLLFWCMLLGHYIRGLEYRLELAQLLRISSDVGSFSGGDDHVV

SEQ ID NO: 271366 - protein, 89 aa, Zea mays
  Clone ID: MRT4577_179080C.1.pep
VPLLFLISSSYHLMQIKITYFNSQFTNTTNPYCGTTHKHPNHHNSPKIMLKVHPPPPCRKSPPPFYCTTLRTFFDFCHLPPIRQIICTY

SEQ ID NO: 271367 - protein, 174 aa, Zea mays
  unsure (1)..(174): unsure at all Xaa locations
  Clone ID: MRT4577_179081C.1.pep
RSTCTAIFATXKDRCDCPXYYFKIGVCQHDXRCSRLXNRPAISPTLVLANXHQRPDXMTPGADAXGQPVDPENMRRXHFEGHSSDXYYDDAXKHSDIDNVKVCGNLADHMQENVEVQXRDENEHCALHHALQWRLHSGRPIHHAYSXVTDFLRXACTTHAQIMCGRGGYCNFMH

SEQ ID NO: 271368 - protein, 304 aa, Zea mays
  unsure (1)..(304): unsure at all Xaa locations
  Clone ID: MRT4577_179082C.1.pep
LNITLVDLPGITKVPVGDQPTDIEARIRTMIMSYIKHKTCIILAVSPANADLANSDALAWARVADPDGSRTIGVITKLDIMDRGTDARNFLLGNVIPLKLGYVGVVNRSQQDINSDLSIKDALAREEKFFRTQPAYHGIAQYCGIPQLAKKLNQILVQHIKTVLPGLKSRISSQLTAVAKELAVYGDPVDSKAGQGAKLLNILAKYCEAFSSMVEGKNEDISTIELSGGARIHYIFQSIFVKSLEEVDPCEDVTDEDIRMAIQNATGPRSALFVPEVXFEVLVRRQISRLLDPXLQCAQFIYDE

SEQ ID NO: 271369 - protein, 74 aa, Zea mays
  Clone ID: MRT4577_179083C.1.pep
ALHPVLRLHAADRSRPHSPRLWFTPATIRPSLLNLRSFLLDCDHGDSGIPRHVEGGLLSARLARGGHAGVHIGH

SEQ ID NO: 271370 - protein, 38 aa, Zea mays
  Clone ID: MRT4577_179084C.1.pep
PPLGGVNVTPVVWLGLVNFPNKILVGPKGLLVLLSYER

SEQ ID NO: 271371 - protein, 128 aa, Zea mays
  unsure (1)..(128): unsure at all Xaa locations
  Clone ID: MRT4577_179085C.1.pep
PATPPKPTTPTYTPVPTPHEPTPKPTPTPPTYTATPKAATPKRTAPTHTPGPKPPTARVVLSTRQYTPSPXKPPTPKPTAAYXTPMPKPXPANKAAMPKANAPTHTLSLKPLMPKATXTTYTPCRQGS

SEQ ID NO: 271372 - protein, 87 aa, Zea mays
  Clone ID: MRT4577_179086C.1.pep
LCDDLAAENTHTHQAKGEGGREIHLIFRRRTEKSYPPLHIWRLDWTGKMAPSTDGRAPVYVYLASFYLPISLPAFRFSRSSNSSSSL

SEQ ID NO: 271373 - protein, 59 aa, Zea mays
  Clone ID: MRT4577_179087C.1.pep
YQFLFGSFYFYLFKFFFFFIFYIPPKKKGPSTIHYKKKEPLRQNTPLTPHHSNKFKKTR

SEQ ID NO: 271374 - protein, 51 aa, Zea mays
  unsure (1)..(51): unsure at all Xaa locations
  Clone ID: MRT4577_179088C.1.pep
KNNIGDGMFYKLPIHXTKIENLGNLLYKNYCTTIAGLRAICYSLNYYEYHS

SEQ ID NO: 271375 - protein, 302 aa, Zea mays
  unsure (1)..(302): unsure at all Xaa locations
  Clone ID: MRT4577_179089C.1.pep
KKDPDWASASDDSDGGCSAETADGPLCKQEHEDYPERPECPFLLRFGNCKFASSCQYYHPKDKFSSTYHPEDKFQSRYHQKEKSSRHHPKKEPALSGELMVYPDRPSEPDCPFYVKTGSCKFGANCKFHHPKDITPNMQGPASPKRSVAAKEHHAAARATLQDQMYQQQKFPERPGQPDCRYYMQFGKCKFQSACIFNHSKDILSSGWHPAECPFYMKTRTCQFGXLVSFITQKIGAXRGGVIDGTDYGHDFATKSRNVLQELAIYPERPDELECSHYMKHGYCKYKMNCKFHHPRDRLPKK

SEQ ID NO: 271376 - protein, 122 aa, Zea mays
  Clone ID: MRT4577_17908C.1.pep
MDPDSVSKAFVQHYYHTFDSNRAALVGLYQDGSMLTFEGEKFGGPAAIAGKLGSLPFQQCQHKIDTVDCQPSGPQGGVLVFVSGTITTGPGEHPLKFSQMFHLLPAGGSFYVQNDMFRLNYG

SEQ ID NO: 271377 - protein, 75 aa, Zea mays
  Clone ID: MRT4577_179090C.1.pep
MELAAAAVKCVLSKLASLLKDEYNLQKGVRGEIRFLTEEMKRMQAALDDLSKQPEDSVSHLQKEWARDLKELSYD

SEQ ID NO: 271378 - protein, 88 aa, Zea mays
  Clone ID: MRT4577_179091C.1.pep
SHETRTCQFGSACEFYHPKDRCSGRGGVIDGTDYGHDFATKSRKPGRELAIYPERPDELECSHYMKHGYCKYKMNCKFHHPRDRLPKK

SEQ ID NO: 271379 - protein, 147 aa, Zea mays
  Clone ID: MRT4577_179092C.1.pep
PAGATNSRGRRVVELPPSFSRPGRSFHLASQCIEVVRHQAEEESEIIKARVGGKRVKSSRGMPPSLFVTCVLVLGPIGSARASPRSLVLACGISRHDRGSSSLRLLAGAHTPPRIRPSSWLELSPTRPSVKNRYRRMRRMEDVVTSS

SEQ ID NO: 271380 - protein, 125 aa, Zea mays
  unsure (1)..(125): unsure at all Xaa locations
  Clone ID: MRT4577_179093C.1.pep
SALAAHGVHYLYRPCPTLHDLGYMILTQLDIEWGYISETLLTFGFMISDSCTLHPFILITTRXYTVLIWRIQLRYLXPLTLLQLISLYAHHAFAPTHHCNEGSPMALLQQCANAIEDVTLTVAAP

SEQ ID NO: 271381 - protein, 106 aa, Zea mays
  Clone ID: MRT4577_179094C.1.pep
LRGVQFFLFTLAPLLFGLCDRGGGGLPLARARARSRKKRKLSVIARQMLTSSFTIWGVTDSFYALAFGSFFVVAAGPCVSGPLLDEASVLRLAELRHSVSFGASSF

SEQ ID NO: 271382 - protein, 227 aa, Zea mays
  unsure (1)..(227): unsure at all Xaa locations
  Clone ID: MRT4577_179095C.1.pep
SHPPHPRTSRRFKGRRRPSAHHGPVSAFLLSAAAAGRRPVCFSALYYSARAFDSVHFVTGPCGDATXRAIDIANASYSKGRHAAIMGXLRVRXVIPLTPYGNGRTTANVRMTVLTPGSHGLHHHESGDTTNVCLSTGPHFNPCNLTLDATEEEVRRAXSTXNIVAHAEGIGEETSDVMQIRLTGSYSEGENLLXHEMEDEVWIWDHDISLSTGNASXKLQCAVVVLT

SEQ ID NO: 271383 - protein, 89 aa, Zea mays
  unsure (1)..(89): unsure at all Xaa locations
  Clone ID: MRT4577_179096C.1.pep
PVQDPQKMTEIIVKALEITGQXRGIINKGWGGLGTLAEPKDFVYLLDNCPHDWLFLQCKAVVHHGGAGTTAAGLKAAVSALSMPYFNVK

SEQ ID NO: 271384 - protein, 120 aa, Zea mays
  unsure (1)..(120): unsure at all Xaa locations
  Clone ID: MRT4577_179097C.1.pep
LGEEETVQIIRLFQELAERLWRALADTRRRSYRPFVGAAEAAAVRXIREKESEAWEAVRCRADLEDRVPRLMAEAVAWQAKXLADHFTAVGLXHAQLSSARGKGTDAEEGGNSVDDAGSC

SEQ ID NO: 271385 - protein, 218 aa, Zea mays
  unsure (1)..(218): unsure at all Xaa locations
  Clone ID: MRT4577_179098C.1.pep
MATTAQYLPRGPGGGAGGTGPLMHPDAAAAAAAAAAAERLHAGAAYREVQKLMHHEWLGAGAGHPVGLAHPQWLPTGGGGGGDWAGGPHLEHGKAGGGGTGRADDGGGGGGFHARLVHQGAAHAGAAWAQGGTAHHLGPAMSPSPGAGGGHQPQPLGLYAQAAYPGGGGGGLAGMLAAGGGGAGPGLHHALHEDXHEAQLEPSPPPHLGAHGHAHGHA

SEQ ID NO: 271386 - protein, 42 aa, Zea mays
  Clone ID: MRT4577_179099C.1.pep
HDCLVKNIRFLVIRLSDFGLFCPARCFKISPGKRVDGGENIN

SEQ ID NO: 271387 - protein, 61 aa, Zea mays
  Clone ID: MRT4577_17909C.1.pep
NLLAQGLLLGGNCDPLFSGSYGTIFKSCSNNVGNSAGGKKSVTLPWLAVYYLIGGRFLLFP

SEQ ID NO: 271388 - protein, 170 aa, Zea mays
  unsure (1)..(170): unsure at all Xaa locations
  Clone ID: MRT4577_1790C.1.pep
GPGGERRNKGGTKGQRHGAENGEQHEQAEEAADAARRGPADRGGGEGNFFFAASTPRPAPRGGAPRPPPPDXXXHGXQRRXRPXPPKRSAGRXXAAATGAPGXRSPXHXRPTGRRPXXXGPRXPXAAPPPGXXXXTGPEQEGXXSSRGRPXARSPXPAPPPPXXQPPPTA

SEQ ID NO: 271389 - protein, 57 aa, Zea mays
  Clone ID: MRT4577_179100C.1.pep
LVLFGAGSSTQPHPNPSRSSSPPQGMAILSPSHLFCWCHSPSLLDWRVSVSRCFSSR

SEQ ID NO: 271390 - protein, 70 aa, Zea mays
  Clone ID: MRT4577_179101C.1.pep
LQFMTSDHQYISRKHEEDKVIVFEKGDLVFVFNFHCNNSYFDYRIGCRKPGVYKVCIYLAFPMLKVHFFS

SEQ ID NO: 271391 - protein, 86 aa, Zea mays
  Clone ID: MRT4577_179102C.1.pep
LFPGRGLWSGSSGGCCSQPSLGRRAHPWVRSASVIYVGVPCFQKGVRRPGKRSPAGSLQGCADKYIRGRARGCGTSRQFWPGGAGV

SEQ ID NO: 271392 - protein, 323 aa, Zea mays
  Clone ID: MRT4577_179103C.1.pep
MGAEAGEPSSILSLASAFSYGVASMAMVFVNKAVLMQYVHSMTLLTLQQIATALLIHFGQVLGMSKRKDFSWITAKKLLPVSIFYNANVGFALASLKGVNIPMYIAIKRITPLAVLVAGCMRGKGKPPTQVILSVICTATGVLIAALGDFSFDLYGYCMALTSVFFQTMYLILVEKSGAEDGLSSVDLMFYNSILSLPFLFFLIIATGEFPHSLTVLSAKAASLTFGVILVISLVMGIVLNFTMFWCTIVNSALTTTIVGVLKGVGSTTLGFVLLGGVEVHALNVTGLVINTFGGVWYSYAKYKQKRKTPRKIQHDVESHAHK

SEQ ID NO: 271393 - protein, 62 aa, Zea mays
  Clone ID: MRT4577_179104C.1.pep
MQTMYLILVEKSGAEDGLSSVDLMFYNSILSLPFLFFLIIATGEFPHSLTVLSAKVSDTNAV

SEQ ID NO: 271394 - protein, 104 aa, Zea mays
  Clone ID: MRT4577_179105C.1.pep
RASFARYPLFTPALPSFVVSRAGSEPSRRRAHCVAHPLRCTAPTTRAQDDVCGVGWSGFACWTLAALCLKLKTLWSTTSSLPDRIWFWARRMTSYNLSYQPCYV

SEQ ID NO: 271395 - protein, 79 aa, Zea mays
  Clone ID: MRT4577_179106C.1.pep
DPGVLRVDGAAVSPASPTLIQRLLDAAGGHHAPRRRGGRAVRLAPCFFYLCQPILVSMAIDRYIIMGQPASQGAYAPVR

SEQ ID NO: 271396 - protein, 98 aa, Zea mays
  unsure (1)..(98): unsure at all Xaa locations
  Clone ID: MRT4577_179107C.1.pep
GTQPRTRGGRHTGGGGERTSKAAAAGKAPAQXXAXNXXXXAXASAXXGNXPTPTPXTGGTXTPTPAPNGKXPRDAXKXGXXANXXGXXKAKGGXPPTE

SEQ ID NO: 271397 - protein, 66 aa, Zea mays
  Clone ID: MRT4577_179108C.1.pep
RTDGDGEDGKQQPHLVLANKLYRLAHSDVDDLDKVDLRASVFDGIQSGDMAALYESLAADGELKRK

SEQ ID NO: 271398 - protein, 102 aa, Zea mays
  Clone ID: MRT4577_179109C.1.pep
RLFLSPLARLLGDALRRHQRWGPPVVADLSKLRRVPPSLVAEVLTARPSPPAPLALPFLLWAGRQKGLRHCLPALHALASLLSAVGLPVKADQVPDLMRTQR

SEQ ID NO: 271399 - protein, 94 aa, Zea mays
  Clone ID: MRT4577_17910C.1.pep
PRVRGRVGSLLRLYGGDEHHPCDAPTTPSSQYLSIKNNNAHLKGYNAQLRMTLHESNDNTKNTSLFDTNSVSLRPDVTRHHTKCSFADPIRTCP

SEQ ID NO: 271400 - protein, 70 aa, Zea mays
  unsure (1)..(70): unsure at all Xaa locations
  Clone ID: MRT4577_179110C.1.pep
RXRGXSRASSDQPVALAFLSPFSQXXPFLPFRPLSTLGPALLRPLVGGALFWGACGMFSTLVPSCRRGVP

SEQ ID NO: 271401 - protein, 69 aa, Zea mays
  Clone ID: MRT4577_179111C.1.pep
SVSFSAIWFVNSSTQLMYELILYLKFYAKFEKTFQRLNVKKVVHNVLTFYRFNNHVTQCGMVYGVQKSY

SEQ ID NO: 271402 - protein, 108 aa, Zea mays
  Clone ID: MRT4577_179112C.1.pep
VRICERVSLFHRNQVIQVLLLNSDHRPRMTLVLLLQMCDICVQTRQSCPLGLFYIISVQILSSCELGTLVVFRIIHVLFCSSLRRVETLLPLQPVHCYTLVQVALLAT

SEQ ID NO: 271403 - protein, 79 aa, Zea mays
  Clone ID: MRT4577_179113C.1.pep
ITRGFLLYGFFLGSLTTKGAQGCCFQLLMCGTNHRIHYHILMVRQFPTPWPHSQQVGECSVPPRIDMELTCVIFGDLYM

SEQ ID NO: 271404 - protein, 82 aa, Zea mays
  unsure (1)..(82): unsure at all Xaa locations
  Clone ID: MRT4577_179114C.1.pep
FFRLGKESPEGGPGGNIIGPLGACLPPTWSVSPKERGAFHRFQGMGFTRXLVLKVFFACPKGEGLSPPSLLGHGPEFYEPPQ

SEQ ID NO: 271405 - protein, 126 aa, Zea mays
  unsure (1)..(126): unsure at all Xaa locations
  Clone ID: MRT4577_179115C.1.pep
IEDETEEMAESDVXYRCFVGGIDWATVDHSFNNSFNTYGXVIMSNIMMHRXTHRCCGFCFMTYSTHDAMHSVIEGMNGKELISRNITDNEAQSRGGRGGCGGGYRDGRRYGGGYGGLGGGYGGCRG

SEQ ID NO: 271406 - protein, 23 aa, Zea mays
  Clone ID: MRT4577_179116C.1.pep
PVFSGPGIPGPLGTFYLVCRYAS

SEQ ID NO: 271407 - protein, 130 aa, Zea mays
  Clone ID: MRT4577_179117C.1.pep
LHQAEVLPQAEVLPQADNKPEDNEPEAKDDEPEAEEYYSNDNNHLQHNAHPYYPYQPQFMYIPGYPAAYIQPPSLRQKITVETSENVTIINASALDLTIRINGVVVTLKAEMPTDYNFNIPSKSTSESSE

SEQ ID NO: 271408 - protein, 133 aa, Zea mays
  Clone ID: MRT4577_179118C.1.pep
CVQAAHPGANQLRQELQLQHGHSAQDKDQGACSPLALATGLLEPMTPYSFASGADFPLFSPTGLDGQLRSSHGAGIGVELETLFEELLHQCYGALPMGPLCRQLDRWNGLCMLSMQPYMYVHVSGNRISFGLD

SEQ ID NO: 271409 - protein, 40 aa, Zea mays
  Clone ID: MRT4577_179119C.1.pep
FDCNLDLFGTVYQMIIVKKKKKKKKKKKKKKKKKKKKKKF

SEQ ID NO: 271410 - protein, 573 aa, Zea mays
  Clone ID: MRT4577_17911C.1.pep
MAKSVGPHRVGRGSDTDFGHRQPRGLKKIDFGLSEDDDEVGEVDEEDEPSGFEDDLFEDEGDKEDVGHIIGNKSGSSMLPEDEPAKNESVQGRSAGGGDSYLSQKRFDECPLSPLSLKGVKAAGYEQMTAVQEATLPIILQGKDVLAKAKTGTGKTVAFLLPAIEVISKLPPVDRDLKKPPISVVVVCPTRELADQAAAEANKLLKFHPSIGVQLVIGGTRMALEQKRMHTNPCQILVATPGRLRDHMENTPGFATRLLGVKVLILDEADRLLDMGFRSDIEKIVAALPKQRQTLLFSATVPDEVRQVCHIAMKRDLEFVNTVQEGSEETHSQVKQMHLIAPLDKQFSNLYGLLTDHISENVDYKVIVFCTTAKVTSLVAELLSELKLNVREIHSRKPQSYRTRISKEFKESKGLILVSSDVSARGVDYPNVTLVVQLGVPTDREQYIHRLGRTGRRGNEGTGVLLLAPWEEYFLRSINDLPITEATQPLIDLDTKKKVDKALAHVEVKDKESAYQAWLGYYNSNKVIGRDKYQLVSLANEFSRSMGLNNPPAVSKLALRKMGLNNIPGLRSK

SEQ ID NO: 271411 - protein, 188 aa, Zea mays
  unsure (1)..(188): unsure at all Xaa locations
  Clone ID: MRT4577_179120C.1.pep
GLYSVAIIDADGADLGLYRKXHIPDGPGYQEKFYFNPGDTGFXGICWDQWFPECARAMALLGAEILFYPTAIGSEPQDCNLDSREHWKRVMQGHAGANLVPLVASNRIGRETVDTEHGKSSITFYGNSFIAGPTGEIVKLANDKDEEVLVAEFDLDEIKSIRHGWGIFRDRRPELYKVLLTLDGEKQS

SEQ ID NO: 271412 - protein, 55 aa, Zea mays
  Clone ID: MRT4577_179121C.1.pep
KYDEAKAWASGIVDGMSTPILHNWGQMNIKTGLGLKQFGTFNEEWNCTSHKSGSF

SEQ ID NO: 271413 - protein, 308 aa, Zea mays
  Clone ID: MRT4577_179122C.1.pep
MPGQWEFQVGPSVGISSGDQVWVARYILERITEIATAERLIREAHKKGAKIVLVQELFEGHYFCQAQRLDFFRRAKPYKGNPTIIRMQQLAKELEVVIPVSFFEEANNAHYNSVAIIDADGADLGLYRKSHIPDGPGYQEKFYFNPGDTGFKAFKTKYATIGVGICWDQWFPECARAMALLGAEILFYPTAIGSEPQDCNLDSREHWKRVMQGHAGANLVPLVASNRIGRETVDTEHGKSSITFYGNSFIAGPTGEIVKLANDKDEEVLVAEFDLDEIKSIRHGWGIFRDRRPELYKVLLTLDGEKQS

SEQ ID NO: 271414 - protein, 48 aa, Zea mays
  Clone ID: MRT4577_179123C.1.pep
ELTWVDQNNYGDSTGANSSAPANPHLFTLSRETGVSQYLLSLSASEKV

SEQ ID NO: 271415 - protein, 55 aa, Zea mays
  unsure (1)..(55): unsure at all Xaa locations
  Clone ID: MRT4577_179124C.1.pep
MRYSLHIQVVQCGNQIGTKFWDGVCYXHGIDPTGLYVGTCDLQLERVNIYYIDDY

SEQ ID NO: 271416 - protein, 51 aa, Zea mays
  Clone ID: MRT4577_179125C.1.pep
RPGLLAGREARRPPLPRSKLAAAATMGSCSPWLRALAAPWNLNVDSSSLHV

SEQ ID NO: 271417 - protein, 59 aa, Zea mays
  Clone ID: MRT4577_179126C.1.pep
FWPRGEWGVFVAWAVWEKIIFKIKVFFKKKFLNPKFRKKFFRFRKRSQRKPKFRGLKTI

SEQ ID NO: 271418 - protein, 147 aa, Zea mays
  unsure (1)..(147): unsure at all Xaa locations
  Clone ID: MRT4577_179127C.1.pep
AYRRSCRFYRQCDVPSCSVSASLIHIGQAVLQEDNAXLKARXLEPEIHADGQXMPXDKSLCEDDXALDTFFTETGAVKQVPRAAHDDLDPTDIADARADPYRLMFDADEVITGTDDAXANDFPRWHXTIIQAMADLCLDGMRKLGDL

SEQ ID NO: 271419 - protein, 124 aa, Zea mays
  Clone ID: MRT4577_179128C.1.pep
GWVQQQTIPFWKLDWGHSQWGTMAITNPPLLAVPHFCRVRSSKSKFLLHQKRFFRGLNRALGPALFSSDGCIRNWLPPPGSYGLTPPFFKKKKNFCTLECLSITRRQCFFNYKQKNGGMLEFFF

SEQ ID NO: 271420 - protein, 136 aa, Zea mays
  unsure (1)..(136): unsure at all Xaa locations
  Clone ID: MRT4577_179129C.1.pep
LPVLRAASSCRSRRRQQGPGEWEXEARRGRAVSRVLGGGLFMGRPGGSGESEWEGGSPSPPGQICKTCVCERGKTRLRVRTLARPHAFCSGGVPSSVCVCVRARPRAHRAACAGWARPRLCCVLAAALDSCRAELS

SEQ ID NO: 271421 - protein, 79 aa, Zea mays
  Clone ID: MRT4577_17912C.1.pep
CLFGLHGHKQLLSVAWESESFFTKRHREAYFQFPTFRYSFLSKSYLVHCESSDLPPEPAIYEYASVINAAAHEKERFTS

SEQ ID NO: 271422 - protein, 359 aa, Zea mays
  Clone ID: MRT4577_179130C.1.pep
SSRPFSVSEHPTIAGIADEAEILNSLQKPKKVVFLGSDGVERPFLCKPKDDLRKDSRMMEFNAMINRLLSKVPESRRRKLYIRTFAVVPLTEDCGMVEWVPNTRGLRHILQDIYITLGKFDRVKTNSQIKKIYDTCHGKMPDDVMLKTKILPMFPPVFHKWFLMRFSEPAAWFRARVAYAHTTAVWSMVGHIVGLGDRHGENILFDSTTGDCVHVDFSCLFDRGLLLDKPEVVPFRLTQNMIDGLGITGYEGVFLKVCEITLSVLRTHKETLMTVLETFIHDPLVEWTKVNKSSGGEVQNPHAQRAITNINARLQGVVVGVKASPSLPLSVEGQARRLIAEAVSLNNLGKMYIWWMPWF

SEQ ID NO: 271423 - protein, 145 aa, Zea mays
  Clone ID: MRT4577_179131C.1.pep
WIAQLLGSVVACLILKFATGGLAVPAFGLSAGVGVLNAFVFEIVMTFGLVYTVYATAIDPKNGSLGTIAPIAIGFIVGANILAGGAFSGASMNPAVAFGPAVVSWTWTNHWVYWAGPLVGGGIAGLIYEVFFINTTHEQLPTTDY

SEQ ID NO: 271424 - protein, 121 aa, Zea mays
  Clone ID: MRT4577_179132C.1.pep
VPRGRPGTKYQRRVRWTLFVCRSAAPVRSRTPPPSDERIPAPPAILGAGSPAATSDRALGSRCTGEPPTLARAVLRSGPGISPMSCNGATAHRLEQAEGSFSSLLPLSIHFVLPCCLTRCP

SEQ ID NO: 271425 - protein, 75 aa, Zea mays
  Clone ID: MRT4577_179133C.1.pep
WSLIGDVVVLRFGSAHVDMAPPSTSCRAKDADEHAITAASPRHLARLQPLSGSPNPGGHLHLSILLNKGTTGEKK

SEQ ID NO: 271426 - protein, 148 aa, Zea mays
  Clone ID: MRT4577_179134C.1.pep
LLPGCGVAAEPTSGAFVVFQMQHSGGSYASVTGSPVGLSHQISSEARPQPCSGGEDLRGAVLVRARDSRRPLSRGYVCYAVPPQNDGDSWNRNQVFVPHHLTYRVPNSRWREATLLLRIRLTGIPVARNLPNLCYDERHWFPTECTPS

SEQ ID NO: 271427 - protein, 269 aa, Zea mays
  unsure (1)..(269): unsure at all Xaa locations
  Clone ID: MRT4577_179135C.1.pep
MAAATPSPHSARVAVVTGGNKGIGLEVCRQLASNGITVVLTARDEKRGAAAVEELADAGLSGVVFHQLEVTDAQSIARLAGFLKARFGKLDILIKGMDAFQMAELMRKSCRETNDTAKAGVQTNYYGVKNVTEALLPLLLQASSSGGGRVVNVSSDFGLLRYLRNEEVKHELDDIEGLTEERLDELLSTFLRDFEAGALEARGWPTEFAAYKVAKAALNSYSRVLARRHPELRVNCAHPGYVKTDMTRQTGLLXPAQGAANVVKVALLP

SEQ ID NO: 271428 - protein, 307 aa, Zea mays
  Clone ID: MRT4577_179136C.1.pep
MAAATPSPHSARVAVVTGGNKGIGLEVCRQLASNGITVVLTARDEKRGAAAVEELADAGLSGVVFHQLEVTDAQSIARLAGFLKARFGKLDILVNNAAIGGVQSLPVENVGEKIKGMDAFQMAELMRKSCRETNDTAKAGVQTNYYGVKNVTEALLPLLLQASSSGGGRVVNVSSDFGLLRYLRNEEVKHELDDIEGLTEERLDELLSTFLRDFEAGALEARGWPTEFAAYKVAKAALNSYSRVLARRHPELRVNCAHPGYVKTDMTRQTGLLKPAQGAANVVKVALLPEGGPTGAFFALGKEAPFV

SEQ ID NO: 271429 - protein, 167 aa, Zea mays
  Clone ID: MRT4577_179137C.1.pep
MHACSDFFFRSYPKPRSDETVYMVVRRARGIMEQIKGMDAFQMAELMRKSCRETNDTAKAGVQTNYYGVKNVTEALLPLLLQASSSGGGRVVNVSSDFGLLRVSKLFRYLIIPFQIPFLSFDQRQQLLLLDLRDFEAGALKSRGWPTEFAAYKVAKAALTPLEFPGQ

SEQ ID NO: 271430 - protein, 107 aa, Zea mays
  Clone ID: MRT4577_179138C.1.pep
VGANMPSRAELTARKSDCEPRMIGEPTGECYDVILYFGIIDILQDYDISKRLEHAYKSFQHDPTSMSAVDPRQYSRRFKEFVYRVFQEDGCAAADALRLWRCRSLHV

SEQ ID NO: 271431 - protein, 353 aa, Zea mays
  Clone ID: MRT4577_179139C.1.pep
MPSNSAVVVVIAIFLVVILGASHAVTGARVGTMMIRQPSSSSSVLMFREAPAFRNGPDCGADGRVDIAMTLDANYLRGTMAAVLSILQHTACPESVAFHFLTADADADGHGLSAALRASFPFLDLRVYRFDPSRVRDRISRSVRQELDQPLNYARVYLADTLPRDVRRVTYLDSDVVVVDDVRTLASVDLAGHVVAAPEYCHANFSNYFTDAFWSHPALNGTFHGRRPCYFNTGVMVMDVDKWRAGGYTRRVEEWMAVQKRRRIYHLGSLPPFLLVFAGHIRAVDHRWNQHGLGGDNVEGRCRGLHPGPISLLHWSGKGKPWLRLDARRPCSVDYLWAPYDLYRYSSPVIDEW

SEQ ID NO: 271432 - protein, 62 aa, Zea mays
  Clone ID: MRT4577_17913C.1.pep
ILLEIFCLLHNGEMRSKGQVRTASPEGGSYRSRNRRTRRPAPARSRSPGRCSHGARKGSRPR

SEQ ID NO: 271433 - protein, 78 aa, Zea mays
  unsure (1)..(78): unsure at all Xaa locations
  Clone ID: MRT4577_179140C.1.pep
PWLTCSQVRRGKRFMRSPGNPRPDXSETRHCDDEDSGIPPPLLGKQVSWLAWNYWVRMLIPAQKVGAIIGHKGERVRR

SEQ ID NO: 271434 - protein, 63 aa, Zea mays
  Clone ID: MRT4577_179141C.1.pep
VSHIYARSGSISSDSLLHILVRSPSSAYVCVCRQLHRWVETSPSILKKPTNLWGGRRKVRIVD

SEQ ID NO: 271435 - protein, 131 aa, Zea mays
  unsure (1)..(131): unsure at all Xaa locations
  Clone ID: MRT4577_179142C.1.pep
FGTRYGMSCKENIIKECEEEAGITRXLSTNATSVGAVSYMDIEGFRYKRDVLFCYDLQLPADFVPNNEDGEVDSFRLVPVIHAANIIRRTDFFKPNCNLVIIDFLFRHGYINPDSRCYLDLLQSLRSGDCS

SEQ ID NO: 271436 - protein, 75 aa, Zea mays
  Clone ID: MRT4577_179143C.1.pep
EKVPKGFIPILIGQGEERERILVHMEQFKQSYFLELLDLAAQEFGYEQQGILRIPCTTEAFRSVVIGAVVRKPKS

SEQ ID NO: 271437 - protein, 207 aa, Zea mays
  Clone ID: MRT4577_179144C.1.pep
RVHNVAGEMVGASLYGSRRSKSTAIVDQMYNDRNIFNDPEARGNLLGYQLEVANLVRSDIQYIGENRLQAQHPSVPLPCSVVQLRYYYILCGMGRSQWKDFVAVRFSKTTTINWEYFGLSIEPNGHCDNFFIAGFCQKHFEDVHPRMSKKHFFYPKVGNVSWVWSPGMVLGHGSFFLYVSPGLQNVSWVWSPGMVLGHGSFFVRLYH

SEQ ID NO: 271438 - protein, 112 aa, Zea mays
  unsure (1)..(112): unsure at all Xaa locations
  Clone ID: MRT4577_179145C.1.pep
TLRSNKINIKREKMRTQLFINNEYVDAQNKETLAVYSPHDESLVTDQLQVAGQEDVDKAVAAARAAFHGECSQWIPAXRSTVMLQFADLVDQHADELALWESTCMGQISTTK

SEQ ID NO: 271439 - protein, 182 aa, Zea mays
  Clone ID: MRT4577_179146C.1.pep
MELVVGASGATMKSVMGKLGGLLAQEYTLIRGVNGDLQYINDELASMQSFLRDLTAVGTGRAQSHGHRMKDWMKQIRDITYDIEDCIDDSAHRLHGLRSDMCCYYFANSVYEILTWWPRRDVATKISVLKMRAQQIGERRERYGVNNPEAAGGSEGSHAGNGTTAGFDAADNQEASLELVAM

SEQ ID NO: 271440 - protein, 101 aa, Zea mays
  Clone ID: MRT4577_179147C.1.pep
SLPGPPMWVYGSIWDASEWATDDGRHRADYRYQPFVARLDRLVVAGCSASAPPACRPVPASPAGAGLTPRQYAAMRWAQQGHMVYYYCNDFRRDHSLTPEC

SEQ ID NO: 271441 - protein, 71 aa, Zea mays
  Clone ID: MRT4577_179148C.1.pep
ARLPRAPTTAWAIVTASSLLCVCLMHCGSSLSSVICRECPPCVTGHSSRLGPTPPISAPHKQHGHPRLCVC

SEQ ID NO: 271442 - protein, 231 aa, Zea mays
  unsure (1)..(231): unsure at all Xaa locations
  Clone ID: MRT4577_179149C.1.pep
EASGSGKHADGGKADREAIQLPGLFPPVFGGGVQPPHLRATPPTQVFHAQQPKQGGAAVGPQPPAPRPKVRARRGQATDPHSIAERLRRERIAXRMRALQELVGTRNKTDRAVMLDEILDYVKFLRLQVKVLSMSRLGGAGAVAQLVADIPLSVKGEASDSGSKQQIWEKWSTDGTERQIAKLMEEDIGAAMQFLQSKALCMMPISLAMAIYDTQHSQDGQPVKPEPNTPS

SEQ ID NO: 271443 - protein, 78 aa, Zea mays
  Clone ID: MRT4577_17914C.1.pep
YYKCMELYENADAFKVMILVKGLVLFHAKDDNSNYFRRAIGYTVFSSGLWTIEDRSNLGLLLLLCPRTCPYLQNQCML

SEQ ID NO: 271444 - protein, 102 aa, Zea mays
  unsure (1)..(102): unsure at all Xaa locations
  Clone ID: MRT4577_179150C.1.pep
QKSRPSQXPHXTXXXAXDGPARPGXRAKRGAXAPXPTHGXXKKRXGGGGXHXRPRXPXEAXPGKAXHKGGPEASXTGXXXPAXXAKPXPXXXXXXGXXQGQX

SEQ ID NO: 271445 - protein, 64 aa, Zea mays
  Clone ID: MRT4577_179151C.1.pep
AEKLSTAQSAVLMATGFIWSRYSLVIIPKNWSLFAVNFFVGAAGASQLFRIWRYNQELKAKAHK

SEQ ID NO: 271446 - protein, 85 aa, Zea mays
  Clone ID: MRT4577_179152C.1.pep
RTCDAPTAGCWRRPTPSHSGGRYTHECAPPVRGYVTGVAVRSDLALVDRKSTAVRAQPVARSGTSERQAWVFYVDETALSVLGPS

SEQ ID NO: 271447 - protein, 307 aa, Zea mays
  unsure (1)..(307): unsure at all Xaa locations
  Clone ID: MRT4577_179153C.1.pep
RPAGFRLPPTPNPPLLPXWSSPSPAXPSPNLPYLGLXKSKSPHPTPSSPAHPTXPSPTPXSPTPSKKPPIPXLSRPPPPVGRANMSATPEXPGGAVPXPRRSPSRPPSSSXPXPPTPERPDXTPTTSSSPTSPRCSWRRTSTTSSSXPVPRPPGAPXPPSSPTRRSYPTPPPPPPPPLRPTPPTPPAAVAPRGPAATPPSRPLPTPPPAGPTTTHSXLPPAPLPDIPCYSHDGGRPRRLRRTLDAATGPRRSPAAAIFPRRALGWRGRRGREHQGRGHHNVSGWRRRPRRPGLGLLRRPERGGHGHA

SEQ ID NO: 271448 - protein, 161 aa, Zea mays
  unsure (1)..(161): unsure at all Xaa locations
  Clone ID: MRT4577_179154C.1.pep
TTPXHGDXRPGRRHLPLLFPTXHPXXFSSXSLVKNXGLPXSLRAXXXGXXRXASRLRXHRVGAAVAKLPTTNXEVXSGEKKXXWXXRXVGXFXMXEXEXRKMRDPXXXTEXVLMXXXXXGXRGXXXLLRVNGTTILRVRRGGSECIWEIRKVLPLRHMFVQ

SEQ ID NO: 271449 - protein, 99 aa, Zea mays
  unsure (1)..(99): unsure at all Xaa locations
  Clone ID: MRT4577_179155C.1.pep
MSWQTYLNEHLMCKIKGDYLTSAAIFRHDSPVXRTSTXFRQTRTGYMTNIMKDSYEPGLLAPTGLFLGPTKYMVIQGEPGAVIRGKKGSGGITVKNTGQ

SEQ ID NO: 271450 - protein, 62 aa, Zea mays
  Clone ID: MRT4577_179156C.1.pep
ILGLFQVLHRLVVFDLNYTLWPFYCQCRSKTDTPSLFRHTTGIMYALNEIPIDIAIASRFPT

SEQ ID NO: 271451 - protein, 70 aa, Zea mays
  Clone ID: MRT4577_179157C.1.pep
CINGSAVSYLMVGQTHINRPLIAVECPSIILYSTITPASFYMGINIVQARNPFLIKVFYMCIPAFKQIIS

SEQ ID NO: 271452 - protein, 80 aa, Zea mays
  Clone ID: MRT4577_179158C.1.pep
GAPKNFFTHLNFLSRRAFGFPTPQWGFSRAKSLMFSLRGVWFKKIYFFVKTKNSLGVPPTKFKIVPVQKKGGGNLKFFFF

SEQ ID NO: 271453 - protein, 134 aa, Zea mays
  Clone ID: MRT4577_179159C.1.pep
GGWPTDEPAARLSGAPIRHWALRRGELSSETCARPWATKKARALATCSAERILGANLAPWNLGQSSVLAEGVAPARLGKRHGAGEETQGAGGDLGWRPEIEQRRGAGELQGSPGALESFDDRPLDSDTVAVLPT

SEQ ID NO: 271454 - protein, 51 aa, Zea mays
  Clone ID: MRT4577_17915C.1.pep
TNYSIPVLPTFSILPSISKFLKCPHWEAFHRSQLWTYIGVAANTDCDLCSV

SEQ ID NO: 271455 - protein, 219 aa, Zea mays
  Clone ID: MRT4577_179160C.1.pep
PSSSFFFFFFFFFFFFFFFFFFFFLRPPTFFLFQGREKKRKVGKCPCRDPHPTHGSPNTRTKYHAHPLLVTTHDIHRGAIKPPGFCSPSMDAPLGPGGQPTSPSKSIEQQPDQPKKGGFFFPSPGGGDFFFSPGFSGGFLAFFLGGGSGNAKPPLPRGATGATPFLILGRWACSGSFFAWGLLYWMGGAGRSCLLAHGRHERCARDTKKWAKVTLGRIP

SEQ ID NO: 271456 - protein, 120 aa, Zea mays
  unsure (1)..(120): unsure at all Xaa locations
  Clone ID: MRT4577_179161C.1.pep
LILQRERFYPXPFSLSFFFFPHPPTQKPTFNILLLLGAALFFLLFFSKLFLTLLSSFFFHPFFGFCFYFFYFLLVVFHATVKTPPFFQSFLFPPFFSSLYFPPCIFLLLSFSPFPLPPFP

SEQ ID NO: 271457 - protein, 42 aa, Zea mays
  Clone ID: MRT4577_179162C.1.pep
CHIDATLHASLSKAYVLYQIIVISLHVYVCACERYVPIYICA

SEQ ID NO: 271458 - protein, 49 aa, Zea mays
  Clone ID: MRT4577_179163C.1.pep
FVNPMNMWCFRIPLLIKCGMSIPNLCISVAKTRMPRGGAVNKQWPRAAL

SEQ ID NO: 271459 - protein, 94 aa, Zea mays
  Clone ID: MRT4577_179164C.1.pep
LQVNAHVVGGQSKRKRWMKFLLPTQKYRAVFLLTRGRGWTRHLIHPEAAFFDLAGYLNELEPVVHWPAWVLSGKRPNRGGEAHTEIAQEVGGRN

SEQ ID NO: 271460 - protein, 53 aa, Zea mays
  Clone ID: MRT4577_179165C.1.pep
PSSSSSSGPSRDSPSHARVVVQARIRLPVLVVFSTSPTRGHLSVSNAGTCNGV

SEQ ID NO: 271461 - protein, 130 aa, Zea mays
  Clone ID: MRT4577_179166C.1.pep
YFFHFYTLHIPPLYFFFFFFFFFFFFFFFFFFFFFFFFTVRICSRTQSPRCVTNCRSNLQRDPRLCAERLVCVINRCCRRTKEARSGPHTAMCGGDRAAEAASHRHGSKILVKGKYEHTGICGRVGGRVG

SEQ ID NO: 271462 - protein, 57 aa, Zea mays
  Clone ID: MRT4577_179167C.1.pep
IGHCYNVMIRKRGLNGSKDKSVIKTKCRQCPTGYIGGARGNWANCQRPSTVTRKVTH

SEQ ID NO: 271463 - protein, 110 aa, Zea mays
  Clone ID: MRT4577_179168C.1.pep
FFGLSASCCAVGGAGSARVSRAFWTAGGLSLAVVAVGLCFLPPGLGGLLLALPLVDGLGAGPVVRFAGPPRPWGCVVLVLLVAPVPRAGPFGSVKVKVLGGVGAVPCLSP

SEQ ID NO: 271464 - protein, 76 aa, Zea mays
  Clone ID: MRT4577_179169C.1.pep
QSGNMRKFQHPEQTSCLWTQLVGVNGAGKAGSAASISGIAVTTSALSAVVRSSGRPNRFRRAFRRHRPIASPRMKP

SEQ ID NO: 271465 - protein, 121 aa, Zea mays
  unsure (1)..(121): unsure at all Xaa locations
  Clone ID: MRT4577_17916C.1.pep
MSSAVPSRVEPGVALVFLASRTWLGSAKVNHIKNITATYGKDWLDSKATCYGKPTGAAPDHNRGRXGYKDVNKPPFNSMGACGNIPILKDSLGCGYCFEIKCDKPVEGSSKPVWVHITDMN

SEQ ID NO: 271466 - protein, 84 aa, Zea mays
  unsure (1)..(84): unsure at all Xaa locations
  Clone ID: MRT4577_179170C.1.pep
DCRYRVDVVHKYVNAAEATIKNQRSXMFVNXCPSGYQVRNHXQPLSVVTGGDLAKVQRAVCMIIHTPPDGVEVLSRIDHKIYLT

SEQ ID NO: 271467 - protein, 92 aa, Zea mays
  unsure (1)..(92): unsure at all Xaa locations
  Clone ID: MRT4577_179171C.1.pep
KTCPYFHQLEANCISRKHLRSGGAAXAPPALAYQLSVNSSRHEIEGKNINDDKRNNGGSGGGTQVLPTSNGETAPTTTPAAFDTDTGMKKPE

SEQ ID NO: 271468 - protein, 42 aa, Zea mays
  Clone ID: MRT4577_179172C.1.pep
LSFKLELRFGCCIRTCYDGYDVVVLSWVACCMLPLALFHLAA

SEQ ID NO: 271469 - protein, 254 aa, Zea mays
  unsure (1)..(254): unsure at all Xaa locations
  Clone ID: MRT4577_179173C.1.pep
MYRAAGSHFRSLKNHGASRFASTSVVKQSSGGLFSWLLGGGSSQLPPLDVPLPGITIPPPLPDFVEQSKTKITTLPNGIKIASETSPGAAASVGLYIDCGSIYETPASSGASHLLERMAFRSTTNRSHLRLVREVEAIGGNVSASASREQMSYTYDALKSYAPEMVEVLVDSVRNPAFLEWEVKEQLQKIKSEISEVSSNPQGLLLEALHSAGYSGALAKPLMATESAINRLDISTLEEFIHENYXSSQMVLAV

SEQ ID NO: 271470 - protein, 381 aa, Zea mays
  Clone ID: MRT4577_179174C.1.pep
MDSAQQPTGELNNSFDTLMVSGGDQSRQPQDAGNETSFTNWKDLPMELLLRIISLVGDDRIVIVASGVCTGWRDTLGWGVANLSLSWCQDRMNDLVISLAHKFTKLQVLSLRQIRPQLEDSGVEAVANHCHDLRELDLSRSFRLSDRSLYALAHGCPQLTRLNISGCSSFSDVALVFLSSQCGNLRCLNLCGCVRAASDRALQAIACYCGQLQSLNLGWCDGITDKGVTSLASGCPELRAVDLCGCVLITDESVVALANGCLHLRSLGLYYCQNITDRAMYSLAANSRVRSRGRGWDATAKSGGGGKDRERDGLASLNISQCTALTPPAVQAVCDSFPALHTCPERHSLNISGCLSLTSVHCACALHPHRAGRVILSNHAY

SEQ ID NO: 271471 - protein, 43 aa, Zea mays
  Clone ID: MRT4577_179175C.1.pep
LGSIVLLYILLVRRKRDCESIAQQAKCGCGHFYFDYLFTHYFC

SEQ ID NO: 271472 - protein, 364 aa, Zea mays
  unsure (1)..(364): unsure at all Xaa locations
  Clone ID: MRT4577_179176C.1.pep
IQIFRCQDRMNDLVISLAHKFTKLQVLSLRQIRPQLEDSGVEAVANHCHDLRELDLSRSFRLSDRSLYALAHGCPQLTRLNISGCSSFSDVALVFLSSQCGNLRCLNLCGCVRAASDRALQXFRLLQPWSLELALIPAVLVVCPVLXAIACYCGQLQSLNLGWCDRTTDKGVTSLASGCPELRAVDLCGCVLITXSCFHVCWGSNSTSTELRWNLPDLTAILAGPTPVRSSCXDESVVALANGCLHLRSLGLYYCQNITDRAMYSLAANSRVRSRGRGWDATAKSGGGGKDRERDGLASLNISQCTALTPPAVQAVCDSFPALHTCPERHSLNISGCLSLTSVHCACALHPHRAGRVILSNHAY

SEQ ID NO: 271473 - protein, 99 aa, Zea mays
  Clone ID: MRT4577_179177C.1.pep
NPPLLPGFFSDPCPYGVFGPLGFFKGKPLVPWVLFWGPLVKKWFPRAPPPKKDFIKKSWGISPGEKKKKKKKKKKKKKKKKKKKKKKKKKKKKKKNPPP

SEQ ID NO: 271474 - protein, 86 aa, Zea mays
  Clone ID: MRT4577_179178C.1.pep
MQVLPHESRMHLSVRSSCYGGTASWSGEWSLRIPSWSESASCWSASPRVAAVARWFPPLVSAEPRVVPLIRENIKCSRRTRVSAPF

SEQ ID NO: 271475 - protein, 49 aa, Zea mays
  Clone ID: MRT4577_179179C.1.pep
NKILKMKINQNNDFNQIIINNNYVQVQLKCNKKLSKIKYKKCTISCKKI

SEQ ID NO: 271476 - protein, 177 aa, Zea mays
  unsure (1)..(177): unsure at all Xaa locations
  Clone ID: MRT4577_17917C.1.pep
HPDLYTHTRSRRASASPERERSAVKVDGPAIXIYLGTIYSCDCVWQDDRIEIIANDEGNRTTASNVTFTDSERLVVDTADNQVAMNPIIAGYGAKRLIGRMLTDATVQRDIKLWPFKVVAGPDDDPMIHVQYKGEEKQFAAEEISSMVLIEMREIAEAFLGTTVKNAAVPVPAYFND

SEQ ID NO: 271477 - protein, 34 aa, Zea mays
  Clone ID: MRT4577_179180C.1.pep
MEFDKPNDQVLDPDVIKKPATKRFQALEDSLFKN

SEQ ID NO: 271478 - protein, 59 aa, Zea mays
  Clone ID: MRT4577_179181C.1.pep
VIVMLRVYSVLARDERTSDRGPRILYDAQTILTYADLNSEVPTKESAEIIDYLKATYTV

SEQ ID NO: 271479 - protein, 62 aa, Zea mays
  Clone ID: MRT4577_179183C.1.pep
FLLFGLVCGYPFPPGNWFAPGFPPLFSGSPSGDPVFRLQVTVSENYPETNPRGPSLKQVLYI

SEQ ID NO: 271480 - protein, 94 aa, Zea mays
  unsure (1)..(94): unsure at all Xaa locations
  Clone ID: MRT4577_179184C.1.pep
QQQIIPALKELDEVNPVYYLQQQVLAYNXLVQANVAANQQQQQMQQFQIVTSXLNKVNPRRXLQQQQMLITSPNIVGNAPKYKQQQTMKQIEQL

SEQ ID NO: 271481 - protein, 60 aa, Zea mays
  unsure (1)..(60): unsure at all Xaa locations
  Clone ID: MRT4577_179185C.1.pep
MAKAVPSPLALALAAVAVAALLHLCRADESRSLPTLEDCGAAAGGGGNDSXTLPDARPVA

SEQ ID NO: 271482 - protein, 92 aa, Zea mays
  unsure (1)..(92): unsure at all Xaa locations
  Clone ID: MRT4577_179186C.1.pep
MSRRRQDGPIMYCRRTICEDATPELVRDXDAAMKMAXKGDPMLENWQFWGEFPSNGSYXVHWIKKCQMLSSDREYIGAGRIWESGKTYYWGT

SEQ ID NO: 271483 - protein, 93 aa, Zea mays
  unsure (1)..(93): unsure at all Xaa locations
  Clone ID: MRT4577_179187C.1.pep
TGTFLFQADINHLILLIINTFYSNIEIFLHELISNSYDALYNITFESLTDXSKLDAQSELFIHLVPYNATNTLSIIDNGFSMTKYYLVNNLGT

SEQ ID NO: 271484 - protein, 142 aa, Zea mays
  Clone ID: MRT4577_179188C.1.pep
EHNEHRRLLQEIDLFPGQTPAGAGAHTRTKDLCPPLPAFPHDLNTKHSHNPRRGRGLHSTQLHKKLIPPFTLCPPPLHPKESPALSLAPFQVPTPGSTLNRWLANSTRPCRRGEVPTWTGGLALQRSIEPTYRKASVGSDHW

SEQ ID NO: 271485 - protein, 65 aa, Zea mays
  Clone ID: MRT4577_179189C.1.pep
GRVGSHFWHAHRPADHARLLHPTRPVTVSSPIPHGGRHPLHCCNCKDHCCRHFPFMGDMASKDGR

SEQ ID NO: 271486 - protein, 94 aa, Zea mays
  unsure (1)..(94): unsure at all Xaa locations
  Clone ID: MRT4577_17918C.1.pep
STPTKLLQQMVPPLPHLPSPNGGAYXHQVLHSNQLPGPNFVSNLHHHHQCLIPLQTVNPWFDTFLQQQQQLLAYNPFFLMNPSFQQPIVEGPNF

SEQ ID NO: 271487 - protein, 55 aa, Zea mays
  Clone ID: MRT4577_179190C.1.pep
GILQMIPSLSLSTRPVSLCIVNLLIYTSLLRITKMYSIIPIVVVISPSMRPLTHV

SEQ ID NO: 271488 - protein, 126 aa, Zea mays
  unsure (1)..(126): unsure at all Xaa locations
  Clone ID: MRT4577_179191C.1.pep
NSGDVCADCRRWLYPPNVLDRDQTLSSXVFTFLINFFRNLTALKWDAPLDTDKTVAEMXMILWLLTDTLCTMRRPRMYTYRTFVGAPFARKPAYYRAVIRHAVLCLAAAHVTLTELKCTVMLDIIS

SEQ ID NO: 271489 - protein, 38 aa, Zea mays
  Clone ID: MRT4577_179192C.1.pep
RFLIATSYLVASQVSQQAALIIGCSDSDILLLTRCYAC

SEQ ID NO: 271490 - protein, 239 aa, Zea mays
  unsure (1)..(239): unsure at all Xaa locations
  Clone ID: MRT4577_179193C.1.pep
MSLALLEGYSSAEEEDGPAAGAGAELSESADSSAEEAGSDGDEGXLLRSRPSSPAADQTVXGDAGGGDGDSCLPSALEAFSDISGPPEFLRHRVAEPEEGTEALGVLDRRGKEGSKLPPPGAVVVAKPQLVTTIGANPPGSVTSGSVDGKRIIGAANPGPEDAADLLRMCLQCGVPKTYSHGKGMVCPQCGDRPALTKEPEKKKGSTVKDKEKIKRMRGQSSHASWKSETEMALRQHFD

SEQ ID NO: 271491 - protein, 70 aa, Zea mays
  unsure (1)..(70): unsure at all Xaa locations
  Clone ID: MRT4577_179194C.1.pep
KXPSSGKIFPFTSPWGEKLPHPHPHPLMEEFPTGSRKSGPHCHLYLQLITFLVSSATTRCQVLFLIAYQI

SEQ ID NO: 271492 - protein, 108 aa, Zea mays
  Clone ID: MRT4577_179195C.1.pep
VPLGFSAFFFFRGGGPPRFFSLPLALGSIVFKKPGPYLGRKPGLTLLPWGPLPKKGAPFWPPFWGEAIPGNGFSSRGFALFSLGLFFGEPQLFSPQGGPLWLAPLARG

SEQ ID NO: 271493 - protein, 50 aa, Zea mays
  Clone ID: MRT4577_179196C.1.pep
YIQENHTLNVSSHHMYRYMIVCSSPFYYEFVSTKSALMRRSPLSKSQFRL

SEQ ID NO: 271494 - protein, 107 aa, Zea mays
  Clone ID: MRT4577_179197C.1.pep
WQPPTSPFPDFSLPLLSLYKYRAPSPHGPWIRSPATQARPTSSPLSLLPPTPCSPTTGAAGAPSPSRTTKAPPLRTARSTPTTSLSSSRAPAPWLAPCSSISSLCKN

SEQ ID NO: 271495 - protein, 538 aa, Zea mays
  Clone ID: MRT4577_179198C.1.pep
NGSQPIDTKFRAKSLEDEETEALMRQFGLNEKSFQSSPPESRSGFGSPINLPPEQPLELPPLAEGLGPFIQTKDGGFLRSMNPALFKNAQNSCSLVMQASSPIVLPAEMGSGIMDVLHGLASVGIEKLSMQANKLMPLEDVNGKMMQQIAWEAAPALESAERYDALDYHGIDALVGGGGNAPSGKKTGRCADLSSLGGENASEYVSLEDLAPLAMEKIEALSIEGLRIQSGMSEEEAPSNISAKPIGEFSSLQGKCAENTWSLGLEGTAGLQLMDVKQSGEVDGLMGLSITLDEWMRLDSGVVDEEEQYSDRTSKILAAHHAKSMELVAENRNGDRKSRRSGRWGLLGNNFTVALMVQLRDPLRNYEPVGTPMFALIQVERVFVPPKPKIYSTVSDKGNSEQDDEEPKAEEVPDKALVTEEKAEELEDPVPQFKVTEVHVAGFKSEPEKTKPWGNQTQQQSGSRWLLAAGMGKGNKHPLMKSKAVVKPTKEAAGQAGDTLWSISSRVHGAGTRWSELAGNKSHSRNPNIMLQKDKRFR

SEQ ID NO: 271496 - protein, 160 aa, Zea mays
  Clone ID: MRT4577_179199C.1.pep
STQASTLIHHTFLPTHSCTLTRLRTLFPVTFVSLNHSRLPASLSVPQGSHINSLFAFTSPTLASIDHTARATASSNLVTLTSAHPKFSGYCTPAMASSTALSSSSPPVLAALARVLAQILTRSNISKSLGVYILYLLIKYRNTAFWVRPRSEITGPWSVP

SEQ ID NO: 271497 - protein, 129 aa, Zea mays
  unsure (1)..(129): unsure at all Xaa locations
  Clone ID: MRT4577_17919C.1.pep
KKKPKKKNTKKQKKNKKKKKKKTKQQKKTKNKKKKQTPTKKKQKKKKXKKKQKKKKKKQKRKKQKPTKQKKQKKQKTNNKQKQTXTKKRKQGKKKKPTQQKKKXKRERKTDTRYNHHRRQGRHPAPSHD

SEQ ID NO: 271498 - protein, 158 aa, Zea mays
  unsure (1)..(158): unsure at all Xaa locations
  Clone ID: MRT4577_1791C.1.pep
HGDKQTVGTLEQAFLIGNKVIERADLNILSRPPEYTDNARIRPCFPTXTDVLNKGAXVILATHLGLCKRGHPXFSWKPVGPRLSELLRAELVMAXDCIGEEAEKLSASLTKGGTLLLENVRFYREEEQNEPEFAKKLASAADLYVNDAFGTAHRAHAS

SEQ ID NO: 271499 - protein, 122 aa, Zea mays
  Clone ID: MRT4577_179200C.1.pep
SIVHISGACLGEPRSASIPRFRLRGGSPSCPQRAATGSPNSIRLYHASVVSVSRRICHRRGGSSTSVHAISLCSRRGCAAVASPNSRCFRRRSKPPCRSGQKYYVMSVDGLPSFGDFASRGR

SEQ ID NO: 271500 - protein, 114 aa, Zea mays
  Clone ID: MRT4577_179201C.1.pep
LEAGRDNHRYFITVSHSLHRCPLLVCIVSIVKRKTTGSIEERQDIPLRRRPSLAASGHGHRILDRDSDLDATWGHTKIHEYSATELHIQRLLRHTALQLQHPESKGGDPEDNSR

SEQ ID NO: 271501 - protein, 59 aa, Zea mays
  Clone ID: MRT4577_179202C.1.pep
IHAPQEIVMVHQRDYDRGLHLLSRLDMPREKTTGSLTMRLTRSFTYESQHRRHGRSLKS

SEQ ID NO: 271502 - protein, 117 aa, Zea mays
  Clone ID: MRT4577_179203C.1.pep
EGAQTGEFFIVGGVTGSPGAKGGIFYFVRRDFGACRIMREFFIIIPGLWGWFGFYVKHPNPPIFVEIVWLLGGAPPPSPRYGTLSLGKMSALGGPPGWPRMAKVGWQQYVVTPFVSQ

SEQ ID NO: 271503 - protein, 123 aa, Zea mays
  Clone ID: MRT4577_179204C.1.pep
GAIQSCLSRLSGEKPPWRGVRYPPLLSRWVVLFFNWAGRFGFSNADRSVSAIHLIWVTSFVWPPWLFTFPSRFFCCVVMGSHFHFPPPSALALVTPWFDSPSGKVGWLPGPVRSSLVGPPLPS

SEQ ID NO: 271504 - protein, 104 aa, Zea mays
  Clone ID: MRT4577_179205C.1.pep
CLTTVVCCASSEKLSASQSQEEASAGRVIEIAGMGASLSCFGSGAGGYYYADEPGYEQPRRSSRKVRPSDEDGLWYVGERDVDMKASAFIARFHASASSSASAS

SEQ ID NO: 271505 - protein, 76 aa, Zea mays
  Clone ID: MRT4577_179206C.1.pep
FPASGDPKGFPGGCQQLKGVRKWLVFIQRFRLGLPFLRGQCQPPPLGGAGVSFLSPWPVGLTMSRGLKRFPFIRRF

SEQ ID NO: 271506 - protein, 123 aa, Zea mays
  Clone ID: MRT4577_179207C.1.pep
MDHDTTVGSRQRQQQTASPAAADSRAMMADLDAPLHALGFEMDELSPSRLTGRLPITPICCQPFKVLHGSVSALAADALASMCAHMVYGYRRVAGMQLSINHFRSAALSDTVLAQAVHVHVGR

SEQ ID NO: 271507 - protein, 134 aa, Zea mays
  Clone ID: MRT4577_179208C.1.pep
PFPKGGFVNRRKRREKKLRENNGKKQTGGPPKEKKAGHKLRGNSNPMAGQTRGNKPRTKIGVKKGKPVTWAKELPPQNSKEQNRGAQKEKKLGGQRKELIHKNWGGNTARDPVEKTGQPTGIRNWPTRGERRTG

SEQ ID NO: 271508 - protein, 72 aa, Zea mays
  Clone ID: MRT4577_179209C.1.pep
LSLLSYSNQTPSLGDFLFLINKNRGYYAILFLLDFTIPYDRFLRFYSPFHLLYHHFPSNLLVVSILPSANAW

SEQ ID NO: 271509 - protein, 55 aa, Zea mays
  Clone ID: MRT4577_17920C.1.pep
IHLKDQVSHWFRHIINIFRLGDIQALLSGAHLFHQVVHLCMIYKLHDLSKKLWRN

SEQ ID NO: 271510 - protein, 46 aa, Zea mays
  Clone ID: MRT4577_179210C.1.pep
VRLVPRKRQRWLVPSTLLRSAWEARLRGSSLPAWLARKLCPHHWGL

SEQ ID NO: 271511 - protein, 95 aa, Zea mays
  Clone ID: MRT4577_179211C.1.pep
SETGARKFSLGFPYESACSFEARVGMWVIRPDLDFVRQYSAKRVGVLRYWRLFPSCILFLQARGGFPVVYLRACWGPHIYSVGSSGRLCPIDGRI

SEQ ID NO: 271512 - protein, 42 aa, Zea mays
  Clone ID: MRT4577_179212C.1.pep
HLSARIRRHPPCFLKLVYMLRDSCGATAHRFPNLSLGVLLTL

SEQ ID NO: 271513 - protein, 84 aa, Zea mays
  Clone ID: MRT4577_179213C.1.pep
PVGGNKVHGSIFHACRCMGLPKPRMNTALATDTQRPCLEKHCWATSNTARTYIHPLAYGLHDGCEQDSSVARAPPVLFSPSHQY

SEQ ID NO: 271514 - protein, 62 aa, Zea mays
  Clone ID: MRT4577_179214C.1.pep
TAYCVFSYNLKPFIRKININGPNWCFVMSARLTVVKKSFCKVRVKIIMMAKSYGLLKKHNYT

SEQ ID NO: 271515 - protein, 51 aa, Zea mays
  Clone ID: MRT4577_179215C.1.pep
SPQVHRLPQNWGWFLNQRLGLLFNHFTTVKGFPPGLVRRTPKKEHRGDGKN

SEQ ID NO: 271516 - protein, 69 aa, Zea mays
  Clone ID: MRT4577_179216C.1.pep
VLNYQRGCKSLPSPSAFFLIATSCPSAIFAQWVLRSKTRVKNKGGLPLIFHTMESLWKLSYLLESASLA

SEQ ID NO: 271517 - protein, 77 aa, Zea mays
  Clone ID: MRT4577_179217C.1.pep
TTGWKNQSPLHRTPELARAWYTRVVSGRGRPATERISSPHDDTYDISRLGAAGLGELVANVLGPGVLALGRCGTLAL

SEQ ID NO: 271518 - protein, 116 aa, Zea mays
  Clone ID: MRT4577_179218C.1.pep
APPLQDPLRPSRKVSASTAATPCLQLGMVWTLLRYHSPVILLDMRMSTIAGLASWTGSAAAAAFATLLLPALWMLVLLLSEAEAAAPGAPHTQGFLLASLLHKDINADNSWLHNLL

SEQ ID NO: 271519 - protein, 57 aa, Zea mays
  Clone ID: MRT4577_179219C.1.pep
RASTDLNHQRRSSNLGGACLEAMFWKSSADYVFWFSYSHTGQDNLCPSLTLAFDMIP

SEQ ID NO: 271520 - protein, 105 aa, Zea mays
  unsure (1)..(105): unsure at all Xaa locations
  Clone ID: MRT4577_17921C.1.pep
RVDRWSGARSAAVRASGGFVLDADXIGEQMARLXASLQGTRWADAVNDACRADPDSPXAVVQYTLPYELXGRVTVIXWMLLLGVTLDRLVLVYANCQCVASVAAL

SEQ ID NO: 271521 - protein, 102 aa, Zea mays
  Clone ID: MRT4577_179220C.1.pep
HPKKYSARYVCSLVADFHRTLIYGGVAMNPRDHLRLVYEANPLSFLAEQAGGRGSDGKNRILTIQPVKLHQRLPLFLGSMDDMLELESYGDVQQKVNPGYEV

SEQ ID NO: 271522 - protein, 64 aa, Zea mays
  Clone ID: MRT4577_179221C.1.pep
SLSRTSGICLHVVSEECHLDGLKLVRVAVPIYRGVPVIQDSIHFLCMRQKMCSILSKIGVMCGS

SEQ ID NO: 271523 - protein, 62 aa, Zea mays
  Clone ID: MRT4577_179222C.1.pep
VGGTREKTGCFKKCIRSVCPPFLYGHSKPVVALNSKFSLGPQSPCDLFGSKGRCCKPPSFWG

SEQ ID NO: 271524 - protein, 325 aa, Zea mays
  Clone ID: MRT4577_179223C.1.pep
MAAAVEGVRHRTLEANGVRLHVAEAGPEEGSAPVVLLLHGFPDLWYGWRHQMSALAARGYRAVAPDLRGYGDSDSPPDASSYTTFHVVGDLVALISDLGQRQVFVVGHDWGATVAWQLCLLRPDLVRALVNLSVVYHPRRPEMSPLQAIRAACGEDHYMCRFQEFGVAEAEFALYDIKWVFKKTFGMRKPAPLILPKDKSFFDSLDSDGTCPPWLSEEDISYYAEKFAKTGFTGGLNYYRCIDRSWELSAAWTGAPIKVPSKFIVGDLDITYNAPGVPDYIHKGGFKASVPNLEDVVVMEGVSHFINQEKPNEVSDHICEFFSKF

SEQ ID NO: 271525 - protein, 71 aa, Zea mays
  Clone ID: MRT4577_179224C.1.pep
SKNAPILSNSMPFDKCSVPMPRPPQSRENIFITPEGLLCSEYSLGVPAAGDIDLFSVTVDEICLLYTIFKN

SEQ ID NO: 271526 - protein, 79 aa, Zea mays
  unsure (1)..(79): unsure at all Xaa locations
  Clone ID: MRT4577_179225C.1.pep
NCXASVCVFXLHSPXSPCXERGGLTLQRGGLLSEXQRAVVGCWFWLHACACGCSFFLHRVLAACMARGLRRALLLCLGS

SEQ ID NO: 271527 - protein, 649 aa, Zea mays
  Clone ID: MRT4577_179226C.1.pep
MGGSHSREDLDLSDSDSDDAESRASDNSSDYGTPTPASASSKLASGAGAAATPASIDAIDRHLRQLHLKYNEPISPNPSPGPTLSANPAALNAVKLYLHIGGSSPSAKWIVSDSLAAASFVRTGDDEDDDAPAGGPWCLVVGSKIQARVGPELQLKTFPAQRRVDFVADGVWALKFRHADGFGDFCAKYHSCMFENSYGVAATDEGRAKVFGKDFAAWARPEDGDESIWEDATDGFFSPGPKSSPMPPRTPVLKPLLEDLREFEEPVEEGSGINSLALGALDNSFLVGDKGIEVVRNFEHGIHGKGMSVKFSGGSTNFSTPKKALLMRAETNMLLMSPATDGKPHAKGVHQLDIETGKVVSEWKFEKDGADINMRDITNDSKGAQLDSSESTFLGLDDNQLCRWDMRDRRGIVQKLASATESPVLQWTQGHQFSRGTNFQCFASTGDGSIVVGSLDGKIRLYSKSSMRMAKTAFPGLGSPITHVDVTYDGKWILGTTDAYLILICTIFIDKDGKEKTGFSGRMGNRIAAPRLLKLNPLDSHLAGANSRFREGRFSWVTENGKQERHLVATVGKYSVVWNFLQVKNSHHECYQYQEGLKTCYCYKVIPKDESIVASRFMHDRYSVSDSPEAPLVVATPMMVTSFSISSGH

SEQ ID NO: 271528 - protein, 237 aa, Zea mays
  unsure (1)..(237): unsure at all Xaa locations
  Clone ID: MRT4577_179227C.1.pep
GRPGKKKKKKKKKKKSGALPSNHRSKRSPSPLLSFSRDRQRSSIGSKXRRWGTRTLRHTTRACRTPSRRSASPSCPPSAWAGGSPPTRPPRGATPSSSSGSRSPSTVSSTSPRSTARASLRPPTLPPSAAPCSRRSSRRRSTPSSPLCSGTSXLPPXSSTPSASPRRSTTRPRRPSCSGSPRSASSSTAPTRRSRPRSGRRSTSVTRLLPPLRRPPTSRSTRPSSRHGRADPRRTRT

SEQ ID NO: 271529 - protein, 78 aa, Zea mays
  unsure (1)..(78): unsure at all Xaa locations
  Clone ID: MRT4577_179228C.1.pep
QYSQLHLHPHLQTHQSIHDASITVSNLMIPLPRGFITESFLSLCSSSNXYFSSTFRSLTLTIIHSSYGGNNRRSTSSR

SEQ ID NO: 271530 - protein, 108 aa, Zea mays
  Clone ID: MRT4577_179229C.1.pep
PTAAAAVTAASAAPATADPAALFRLRHACMPVTFFFTYCLLCACGVSRIKDGAIVWSGSPPCMLGVGSVVLVLVYGIVTRHASLCASVCDYVPVTIGSVIEYIYNPVP

SEQ ID NO: 271531 - protein, 97 aa, Zea mays
  Clone ID: MRT4577_17922C.1.pep
GGGPSQKKRWAPLLYNQEGAGQMALYKGSAWGGPTNYFLPVNQRGFYRGQGTSHPLAKGDPFKNPPPLCLEKSRVAPGKFGGKGHRSSRVLLKRLPP

SEQ ID NO: 271532 - protein, 53 aa, Zea mays
  Clone ID: MRT4577_179230C.1.pep
TVKEEEKGAHPNPSNPSTNDSTHSSDESPNKTSESKETEVETVNTAERECRFV

SEQ ID NO: 271533 - protein, 84 aa, Zea mays
  unsure (1)..(84): unsure at all Xaa locations
  Clone ID: MRT4577_179231C.1.pep
TSTPTAPSRSWSPXPCMHGSFRYGRTSLAAIMCYHPRSRLSSIYLDVERSCSSPVLERVQVFSTVRRILPVRAAYETSTAPEIA

SEQ ID NO: 271534 - protein, 151 aa, Zea mays
  Clone ID: MRT4577_179232C.1.pep
MEMGRAERHERGGEDILATGAMAKGKAELGPSQGHDTRREMNAGGEEDPKPAMRDGLGEHGRHGGAEAGAKTDGGVLERGGRDLQRSFARAEARLGAMGRRKREREREAGRSSAGGYLKNEQERLGVGRKKSAHQGEASGRLKNLSTTGKR

SEQ ID NO: 271535 - protein, 115 aa, Zea mays
  unsure (1)..(115): unsure at all Xaa locations
  Clone ID: MRT4577_179233C.1.pep
QDNKVHGRRARLLFVVDNMRLPVDYGQMAGVGRITYTFLSPPPNAHYAKFDWKPTCPVRGILTHGQEALGGKPNHRRLTQELSYCIVAEQLLLRTLYVQVMDXPNTDDQFDFDRL

SEQ ID NO: 271536 - protein, 166 aa, Zea mays
  unsure (1)..(166): unsure at all Xaa locations
  Clone ID: MRT4577_179234C.1.pep
EAPWSTNSGTQAIKISYVLRLLGMCGCGDHATVLLTCSHASIASLIPLYIGSMIVXTXENPTLQDYTLQQAMDASFIPLXPSTAEQSITVSSLQALVQTIKEQTIATLARAGINRXLLSKLAAYSIQPQGCTLHQLXSVTPAANQPNQRXPSRQIATVYSNNHQVL

SEQ ID NO: 271537 - protein, 99 aa, Zea mays
  Clone ID: MRT4577_179235C.1.pep
ITELCWKEGSSESGRQNILQTIDAYISDERVGLAEPAEGIELYLCPPHGKTVEILSRHLPKEHQEKPCCGWITLRFSVLLGMRIFLNLISLIRHTMLLM

SEQ ID NO: 271538 - protein, 222 aa, Zea mays
  unsure (1)..(222): unsure at all Xaa locations
  Clone ID: MRT4577_179236C.1.pep
PGQPIVFYISXEXSRLAEPAEGIELYLCPXLRENVEILSRHLPKEHQESLAVAGSSFIGVVVWRRPSISRAPTSHHNNRHDGSKRQSILGKPQVTNPAARPSLPPNSYGAPPGFTSQREEEDVTDDAPPGFGPGVARDEDDLPEFNFVKSSHHAANVTAHAYKGPWPHVPPPSARPAEQMRELVQWYGKRSSVQGAPRAWDDDDDDIPLGSRRHQLLPLPHR

SEQ ID NO: 271539 - protein, 331 aa, Zea mays
  Clone ID: MRT4577_179237C.1.pep
MQGLDSEPPFVDISVGTPQEDVNDSDELDTTMEPSDLPETEDNASAPEKTESKSDKSSTQVNSERRLESPGHIAVQNSDLTEPRDGELSKSSPSPDKDEAKKTTVDNASNSDSVHHNQAASLPMIRESIWEGAIQLTVSSLCNVVAIFKSGEKPSLKDWRSFIEIKGRVKLSAFQEFVDQLPKSKSRAIMITELCWKEGSSESGRQNILQTIDAYISDERVGLAEPAEGIELYLCPPHGKTVEILSRHLPKEHQESLAVAGSSFIGVVVWRRPSISRAPTSHHNNRHDGSKRQSILGKTQVTNPARSPYSHSYGAPPSFTSQRERERCTDD

SEQ ID NO: 271540 - protein, 93 aa, Zea mays
  Clone ID: MRT4577_179238C.1.pep
TAVRDAMNVEEEVGRLKEEIHRLGQQQPDGSYKVKFGVLFNDDRCANIFEALVGTLRAAKKRKILTYEGELLLQGVHDNVEITLLPPPAVASA

SEQ ID NO: 271541 - protein, 99 aa, Zea mays
  Clone ID: MRT4577_179239C.1.pep
GGLGSGRSPGCSSGPLRGRGPVGRPCGVVSRNTVCHPSEHSCPPPAFLGAAGCSPHRPLLAPVVRVVSSCVVMGVVHLPSASLCCLGAERHINTRRPPP

SEQ ID NO: 271542 - protein, 60 aa, Zea mays
  unsure (1)..(60): unsure at all Xaa locations
  Clone ID: MRT4577_17923C.1.pep
MGNVDDCMGWTMQLNQYRITDXALTNPGLLQLLRAIVFFYGRSILSIIDCPGTTCRLRQK

SEQ ID NO: 271543 - protein, 36 aa, Zea mays
  Clone ID: MRT4577_179240C.1.pep
HGCVQISFLLIEGSSSSIDVFFYLFDVSVIPQLMLY

SEQ ID NO: 271544 - protein, 50 aa, Zea mays
  Clone ID: MRT4577_179241C.1.pep
KPFKSQDIMALTPTWAVYGPKEGGFDPDQSRFKKERRHGCAPLKSLSCSY

SEQ ID NO: 271545 - protein, 80 aa, Zea mays
  Clone ID: MRT4577_179242C.1.pep
ILHGRPARPRTRWRTRGGKVRGFTFDISWGALESLELDSVGLSIVPSSLVCTYCLCVEDVLDIVFYTVVVHEDAVSRVQR

SEQ ID NO: 271546 - protein, 203 aa, Zea mays
  Clone ID: MRT4577_179243C.1.pep
EGHLVEMGTHDELLNLDGLYAELLRCEEATKLPKRMPTKNSRERKSLQAEDTSVSQYFQESSSPKMAKSPSLQRTHGMLQFWRSDANRNSHDSPKDLSPPSEQTMDNGIPMVAIETERTPSIKRQNSFEMKLPDLPKVDVHPIQRQSSKNSEPDSPISPLLTSDPKNERSHSQTFSRPQSEQDDTSSEHSELDEVQHQKPPSF

SEQ ID NO: 271547 - protein, 104 aa, Zea mays
  Clone ID: MRT4577_179245C.1.pep
ISFPPGDIHFDRLDTHDQIGAYSRRLNSEQSCRCHSEYLFDDTPGKTEHGSSALVLLGAELARLVYDDVAGIHGALVVEHSVLVAAEYVLVVSHGACSDTQRPL

SEQ ID NO: 271548 - protein, 54 aa, Zea mays
  Clone ID: MRT4577_179246C.1.pep
SPQQRGPKLALSLTRWGHTAFDANCSKPRASKNTTQGRVGSKKQQKILWAQALH

SEQ ID NO: 271549 - protein, 64 aa, Zea mays
  Clone ID: MRT4577_179247C.1.pep
ELLPIMLLKITCLKRTCGRGQWLAQLFKHHFGIKENCLNPVFFELILMKFLYHSCKIPVFQRSP

SEQ ID NO: 271550 - protein, 77 aa, Zea mays
  Clone ID: MRT4577_179248C.1.pep
CKDILFSLSFAFYPLFFVFSFCQKECLVVMDHADHFFFLEGKGCKAKLPVHRKNPTICPTTLHVASQGIHTLPCITS

SEQ ID NO: 271551 - protein, 111 aa, Zea mays
  Clone ID: MRT4577_179249C.1.pep
MRPADQLLLPFLLLADASVGAAAGSWENGYGSMLRLPSSSPRRFPRSAGVDLIHALNLHPGDASPPLSTAGVEGALAHAGTIRARTIRIELFWSGGGGTRGEARAHYSLNY

SEQ ID NO: 271552 - protein, 175 aa, Zea mays
  unsure (1)..(175): unsure at all Xaa locations
  Clone ID: MRT4577_17924C.1.pep
MYQVERGSRDERMLTMNVLKKNRREMWIHVLHSXRLYVDNHYQQKKXSSMTSPSXRCIKPIDIFEDDEHXSSTLPLDHYYWKNTHLGIEDLRIFLKLPGEVXVPSTSTRRARPXNPHFVYCPAGDRPKSPHRXFSXNRPKLGDXSGQIPPPQGHEGFLGGQRXXAPADLLAPFNG

SEQ ID NO: 271553 - protein, 148 aa, Zea mays
  Clone ID: MRT4577_179250C.1.pep
LPGVGLAPYGPSPVPRKVPGRNLYFGRGRNYLFVVIAGSAHKWIFFFFFPILGPCSCFVSATIRDFSPLGFVFNIFPRGIILEFFWPRARKIVGPPPPRLLYPFILVPVGAFFWGLVGLPLVVFPFKKKKKKKKKKKKKKIFLTPPPP

SEQ ID NO: 271554 - protein, 52 aa, Zea mays
  unsure (1)..(52): unsure at all Xaa locations
  Clone ID: MRT4577_179251C.1.pep
APMSKPGDLLEVPLVSQLRGDAXPPGLKGGXPGNDFTPWGLPGGPDPWNQIL

SEQ ID NO: 271555 - protein, 64 aa, Zea mays
  Clone ID: MRT4577_179252C.1.pep
RPGTLSAYSPVFSLEPSTPPNVRCVLNHPNLPNGSWRRDRRQAARRSNLSTCQLSDNIEPVPRS

SEQ ID NO: 271556 - protein, 83 aa, Zea mays
  Clone ID: MRT4577_179253C.1.pep
ASSATSFESKVPSQTSARLVRYRIFSANRPHTCFCTPLYNGTESHFAGHYKPPAVVVELLQTTRSRALSGAEMRPLPIGRYVG

SEQ ID NO: 271557 - protein, 48 aa, Zea mays
  Clone ID: MRT4577_179254C.1.pep
PYTNNRFRMWTDQRRNFNVGVLNTVTDTAASLNAATSQRGTRKNVATG

SEQ ID NO: 271558 - protein, 100 aa, Zea mays
  unsure (1)..(100): unsure at all Xaa locations
  Clone ID: MRT4577_179255C.1.pep
RGGLRRSGSLRAALSSLGAALSGAAPFLAWRSRWLASVRPGRRRGXWPRPPRGAXRXGRGPGGLAGGGPAXPPXRXXAAPXSXXGEXGWRAGCLEPGPAG

SEQ ID NO: 271559 - protein, 105 aa, Zea mays
  unsure (1)..(105): unsure at all Xaa locations
  Clone ID: MRT4577_179256C.1.pep
PNEIFGPGQPLLKFKPRGGPFKSAPPPKXGPPPGIVPKNLDSPTPMSRPLWAGIVWTPRYLPEGRGVPFGGYKKRGFGKNLGFQPLQKDFQVKLVVTPIPNSPGL

SEQ ID NO: 271560 - protein, 60 aa, Zea mays
  Clone ID: MRT4577_179257C.1.pep
KGITVSCLQYFQMKISSFKYSIRKSTKSTKVLTPLARNPNSFLRYGRVVIMTQVKDPDIF

SEQ ID NO: 271561 - protein, 87 aa, Zea mays
  unsure (1)..(87): unsure at all Xaa locations
  Clone ID: MRT4577_179258C.1.pep
MAFFPNFKTANGLNSLEVHFAGKTXVSGNSITKDDINVIPAVPSKPGAEFPNAARWYETVSXAVASRFPGKAVGVNQPAGSAPAVAA

SEQ ID NO: 271562 - protein, 46 aa, Zea mays
  Clone ID: MRT4577_179259C.1.pep
AFIFIVFIMITGLSLLWIPKHSYLNMVMICIKKHPQRMLINLYFSF

SEQ ID NO: 271563 - protein, 85 aa, Zea mays
  Clone ID: MRT4577_17925C.1.pep
GPLSPWYAQAPVRNHHLSHRPSPGPRRAGHYTKSDSCLLAIKGTHAPIINLFHSARGPSPRRRSRQHGQEASPLHDGQCRPPAPV

SEQ ID NO: 271564 - protein, 74 aa, Zea mays
  Clone ID: MRT4577_179260C.1.pep
QGNEKNIKGKLSAAAMTMDTEIGLNFDYYNMLWRAGYFFFCEFLQPGGTPPIRKVHWGAGWACFSPTQRPVKKG

SEQ ID NO: 271565 - protein, 88 aa, Zea mays
  Clone ID: MRT4577_179261C.1.pep
GVLGSPSDHRDVDLLAIVIGLGLPGHVQGCITGYLISVGGSHLVVKFHHVGDGVGAVGRSRQRREVVPCVGRCGFRRPRPTSGAMPTR

SEQ ID NO: 271566 - protein, 149 aa, Zea mays
  unsure (1)..(149): unsure at all Xaa locations
  Clone ID: MRT4577_179262C.1.pep
REKHLEWRTEAPFYTLGPLTTDMAPGYDHITXTIGAANITALGTELYCYVTPKDHLGXPNRDDVKTGVICYKISTHADYYANVYPYAHALHDALCMARDEXRMLDQLASSMDPXTAIDFHDEALPSHGAKVAHFCSMCGPKFCSMKITE

SEQ ID NO: 271567 - protein, 87 aa, Zea mays
  unsure (1)..(87): unsure at all Xaa locations
  Clone ID: MRT4577_179263C.1.pep
STPIRSTVLSLVWQPNNVLLAAGSCDFKCRIFSAYIKEVEERPAPTRETLHNXFGELMFESSSSCGWVHGVCFSASGSRVAXVSHDS

SEQ ID NO: 271568 - protein, 186 aa, Zea mays
  Clone ID: MRT4577_179264C.1.pep
MANINWRTINIDALDPDSPANFDLSSLTPAVQPVSTADVQNNAQQLRQLLRGGDNEGALLGALENPPYGADDKGKEAHLATVIEILQSIRASDMSPMLSRIYGAPGGTEALDVLMKYIYKGMAHATPATTKRDITPQPTGFSQVHTRGGGEGGGQAMSVLLSWHEKLVEIAGPGSISRVMSDRRTV

SEQ ID NO: 271569 - protein, 98 aa, Zea mays
  Clone ID: MRT4577_179265C.1.pep
MLPAKTVLGLPDAPRVAAFSSRGPSSVTPEILKPDVAAPGLNILAAWSPAKNGMRFNVLSGTSMACPHVTGVAALVKSVYPSWSPSGIKSAIMTTATV

SEQ ID NO: 271570 - protein, 91 aa, Zea mays
  Clone ID: MRT4577_179266C.1.pep
EPAGITSVIAKETEQLWFYLIAKPNGILSASASSGPSLVKKRGETLELAHGGRAPPGARGVDKDGVVLLSSPVSCNRFLSEPFGPHNGRGG

SEQ ID NO: 271571 - protein, 53 aa, Zea mays
  Clone ID: MRT4577_179267C.1.pep
VKQKKKKKKKKKKKKKKKKKKKKKKKKKKKKKKKKKKKKKRGGRFKESKLTNP

SEQ ID NO: 271572 - protein, 433 aa, Zea mays
  Clone ID: MRT4577_179268C.1.pep
MMRSVSGTGSAGSRSDPGGTGELSRFSVATTASSASQPSANGGARGISFLDAFRSCFVPPEARSLENSMSDESHPSHQLSQSLSSQGSNSGSVFGSKRSIKGMYSPMHKSSLDREIPGSTKFSLPQIQKATKNFSPNFKIGQGGSGTVYKGQLADGTLVAVKRAKKNVYDKHMGREFWNEIETLQRIEHLNLVRFHGYLEFGGEQLIIVEYVPNGNLREHLDCINGKILEFSLRLEIAIDVAHAITYLHTYSGFDLQMYIKDHPVIHRDIKSSNILLMNNCRAKVADFGFAKLAPTDSSHISTQVKGTAGYLDPEYLRTYQLNEKSDVYSFGVLLVELVTGRRPIEPKKAIIERVTTKWAMEKFVEGNAIQTLDPNLEATDAINLAVEKLYELALQCLAPTKRNRPSMKRCAEILWSIRKDYRELVVPTSAMN

SEQ ID NO: 271573 - protein, 77 aa, Zea mays
  Clone ID: MRT4577_179269C.1.pep
APARQAGRSGAAPQQHRTTLPPPASPGRLRRAQGVRRRGTRRVRQALQVNELPTGKSSSAMAAGTAKIRRPLPTLGD

SEQ ID NO: 271574 - protein, 50 aa, Zea mays
  Clone ID: MRT4577_17926C.1.pep
RSIQTNSAHRHASFLKPTPASGTPYATPHRVTFQASYPSTYQLHTTYEHA

SEQ ID NO: 271575 - protein, 123 aa, Zea mays
  Clone ID: MRT4577_179270C.1.pep
LAAANAGRLREGDGGSAPAHVVCWRTSSRSSIFSLMSAPLACRIVSDDSEADVGQVLTQFSPGETSFWRSFHSFPGSCSSGGFSPALVYSCVKLMDNAGAAHQGGLRRRPDTVEAEPDHVLHR

SEQ ID NO: 271576 - protein, 48 aa, Zea mays
  Clone ID: MRT4577_179271C.1.pep
KHTSEPTRAVNKPSLVILTDHDSKEQLEQTAYGKAGSNKRLRKKPRAS

SEQ ID NO: 271577 - protein, 68 aa, Zea mays
  Clone ID: MRT4577_179272C.1.pep
VRSGNYQNQTSWSHYPYYSSEMFSDKQQKFTSNHNSTAPNDKTKGQSRNQNTRQYPHLMVSFSVLNVH

SEQ ID NO: 271578 - protein, 64 aa, Zea mays
  unsure (1)..(64): unsure at all Xaa locations
  Clone ID: MRT4577_179273C.1.pep
LYHDNNERVRTELWNTDRSIYHSVRCLLNXYCLXDVTLQXLYLGRPGSLLGYFADQNRVHLIDN

SEQ ID NO: 271579 - protein, 52 aa, Zea mays
  Clone ID: MRT4577_179274C.1.pep
LFSTWHISAYYYYYCCLLVTFRGMHADMYRVTHLPPNSIDMSFQMPACLNPI

SEQ ID NO: 271580 - protein, 55 aa, Zea mays
  Clone ID: MRT4577_179275C.1.pep
GYANVGRVGSAVCHWISIFVNCCIHALYLFLTKHLTMDLIAFEPELSRIDLSLPA

SEQ ID NO: 271581 - protein, 577 aa, Zea mays
  Clone ID: MRT4577_179276C.1.pep
WVPPPLSSNRSPEREKESTFAAGRSRRVEVERTLTDSQRDEFEDMLRALTLERSQIKDAMGFALDNADAAGEIVEVLTESLTLKETSIPTKVARLMLVSDILHNSSAPVKNASAFRTKFEASLPDVMESFNDLYRSITGRITAEALKERVMKVLQVWADWFLFSDAFLNGLRATFLRSGNSGVVPFHSLCGDAPEIEKKGSSEDGNDGFKLNEDGALATGKAAATKELLGLPLAELERRCRHNGLSLCGGKEMMVARLLNLEEAEKERIYEKDVDMKYVQGEQHVVGREDSGVNAHSTSRFGEGSNGDELDVSRNSMRAGKGRSGGSASAELESFPSKKPKYDPVLPASKWSREDDISDDEDRKGGRGLGLSYSSGSDIADGLGKVDTTEASTDHTSHHHDTIVDEEHRQKLRQIEISVMQYRESLEEQGLRDLDEIERKVASHRRRLQSEYGLSTPADGANSRRSSERTSSSSERKERHGDAHDHPRKRRRSQSRSLSPPRKSQERDREHNRGRDRSHGNDVGRDRVRGKSASQGRDDHHDRSRDRERTGEKGGDRPENPRHHAPFALSEGPRSII

SEQ ID NO: 271582 - protein, 67 aa, Zea mays
  unsure (1)..(67): unsure at all Xaa locations
  Clone ID: MRT4577_179277C.1.pep
ADAWAGKYDHIDDMIHTTLCLDGGTGTQIMTGGFLTDKQASYGWMFNLNXWAHFYTYDVGLHSGSTA

SEQ ID NO: 271583 - protein, 140 aa, Zea mays
  Clone ID: MRT4577_179278C.1.pep
EHRQKLRQIEISVMQYRESLEEQGLRDLDEIERKVASHRRRLQSEYGLSTPTDGANSRRSSERTSSSSERKERHGDAHDHPRKRRRSQSRSCSPPRKSQERDREHNRSRDRDRVREKSASRGRDDHHDRSRDREDRRKGR

SEQ ID NO: 271584 - protein, 76 aa, Zea mays
  Clone ID: MRT4577_179279C.1.pep
RYSRIYYRVRVSTPNQGDGSVSLHVAVHKGHSIRCLWSSKDCTQSLCIYCILVKFKGSPSSYGVITLHLCVHIVAQ

SEQ ID NO: 271585 - protein, 116 aa, Zea mays
  Clone ID: MRT4577_17927C.1.pep
GDWDPRGRPGASHSNPTRRGYIAMLAVASDFRGHGIATTLVKKAIDAMTKRNADEIVLETEETNVAAMRLYEQLGFLRTKKLHRYYLNGNSAYRLVLPLKYIDLDAGPNDLEIINV

SEQ ID NO: 271586 - protein, 97 aa, Zea mays
  Clone ID: MRT4577_179280C.1.pep
CAALRRRFQFPLSGGGVPSVISWARYNFFLILYPLGVFSEMMMVYQALPYAKAIHPLYYYGLIAVALVYIPGFPVLFSHMLVQRKKYARGDLNKKKQ

SEQ ID NO: 271587 - protein, 116 aa, Zea mays
  Clone ID: MRT4577_179281C.1.pep
MAAAAATSNGGATAANGPAPGRLASLYSEGHTNRLLHALPLPSRLRSNLSVVDGPASSVADNPDEINKLFHNLLGQPSGRLEPFCKDLDSIPQMRNNRIVLTAEDLGTASILGVKL

SEQ ID NO: 271588 - protein, 73 aa, Zea mays
  Clone ID: MRT4577_179282C.1.pep
PRAFFLSLSSGDWAVSYRRRPTPSAEVFVDLELAQWKLSSMGYNRHRRGRRSSSSSSRRTKQEASCDDDLVTS

SEQ ID NO: 271589 - protein, 102 aa, Zea mays
  Clone ID: MRT4577_179283C.1.pep
RRTRPPPPTAKVGVLLRGVREPGAGHGVEQGGGALAQKRARAVRPRVVHRVLVCSLSLIQTTLSLDEAKNRSIHNYERPGTGSAHTLEHDLHQLRPKSIAVP

SEQ ID NO: 271590 - protein, 77 aa, Zea mays
  Clone ID: MRT4577_179284C.1.pep
LPTPCSIICFSIHHKLVLMRLVAWLLQGSYIYEANKTLNVIFCFYACNSFPFIAYSFHHKFVCMQPVADFYAVYRIA

SEQ ID NO: 271591 - protein, 139 aa, Zea mays
  unsure (1)..(139): unsure at all Xaa locations
  Clone ID: MRT4577_179285C.1.pep
MGKTRGMEAGRKIKTHRKNQQGDHKEXMKSQQDNECKKPLDETFHCKIIGMGNIAXKTGIQAKLSNCAIRKSARIQLGKNVTKIASFVPNDSCWNYIEENDEVLIARFGLKGHAVGDIPGGRGKGDYDLLPMIKSTSQG

SEQ ID NO: 271592 - protein, 330 aa, Zea mays
  Clone ID: MRT4577_179286C.1.pep
MIRKAEPNGAQIYNAHTFLSQYPPLDYKPSSSQSMQFPGFPPLNGAPPSNPLPHFPAGHMPFYDDAESTLLEEPEQFEDPCYDPDAIALLGPVSESLDNFPSDLDCGFFSSDVAKESHGRPSPIESPLSRSRTVEEKPIEPPHSSVARGPGGSILPESSSEQGTWQMWSTPLVQESLGLQGPQSQWLRQNTNQFNHSANLFSSGGGAISPLGTGLNDSDPWLQKAPFQQLPPDTPSLFLSHEMPGKLHNDLVFGSPNKSAREHPFGPPGYLWPKEELALNGAQDGGGGHILSPSGGARVGGGVGLFSSASPDVQSLWSFHETFNEKESIE

SEQ ID NO: 271593 - protein, 214 aa, Zea mays
  Clone ID: MRT4577_179287C.1.pep
MACVSTFQSCPIARRAKINTRSRGCSRAFQFQCRASTFAADTSLRLELDENPEAIISGAWPGNCSLLSYDDLRAYLESQEPAAQADDQQRGVALLSETMSTPVLVATADQTLEDVECHFEAVSGLPVVDSGLRCVGVIVKNDRARASHGSKTKISEVMTSPAITLSSDKTVMDAAVLMLKKKIHRLPVVNQDEKVIGIVTRADVLRVLEGMLKI

SEQ ID NO: 271594 - protein, 88 aa, Zea mays
  unsure (1)..(88): unsure at all Xaa locations
  Clone ID: MRT4577_179288C.1.pep
LKMKGDYYRYLSSCSSLELSKVSVVITLHLEXKTGAERKDAAENTMVRYKAAQDINLAELAPTHPIRLGLALTFSVFYYEILNSPDRA

SEQ ID NO: 271595 - protein, 149 aa, Zea mays
  Clone ID: MRT4577_179289C.1.pep
GYRPPSSVFFFFFFFFFFFFFFFFFFFFFFFFFWEKKAGLWIFVPKKNRGFFKPLRAPQRGEKTKKKLGEKKKEGPPLKTRGNKGLEDRAPRQKHFLMGLGFSTPWNQTKALEKKGNDPHQFLDQRNPPILFYGVPPKTQKIGQGELSL

SEQ ID NO: 271596 - protein, 126 aa, Zea mays
  Clone ID: MRT4577_17928C.1.pep
MAGSATAAAIKDSYRSYYFAVARRRSRRLRRARVWGALARALWQRAAAAGALVRASGARVACWLRNARPYVGDLFVGNYMFLQVAPSPMTITGGGTVVPFAQYNYGCKARAVHLHRYPTGAVLYET

SEQ ID NO: 271597 - protein, 52 aa, Zea mays
  Clone ID: MRT4577_179290C.1.pep
KKKNKKKKKTNKYKEIKKTGGRRTRGNMIYDRFLQSKSSIIGPKKNKLAAVL

SEQ ID NO: 271598 - protein, 53 aa, Zea mays
  Clone ID: MRT4577_179291C.1.pep
ASLTRNQMRDTSFLVVLGIPNSSLRILNCIFRTLAIRCVLSDQGFPQNHSSCR

SEQ ID NO: 271599 - protein, 93 aa, Zea mays
  Clone ID: MRT4577_179292C.1.pep
IVSGCPFFCGLVVFFFSLGLKQIHQQIGTAHGRDRVGDRLRGRQEGHVQELLGRAPGHKGAERPQPHGRPARHKARGRGPCLPRGRALVPCSC

SEQ ID NO: 271600 - protein, 713 aa, Zea mays
  Clone ID: MRT4577_179293C.1.pep
MPSIRAPASKQTATLQVAVKCRPLTDTEQRRSRHIIQVIDDKTVVVLDPDLSKDYLDLIQNRTKERSYTFDHVYAPGCSNSDVYKNISSTIAGVVQGLNATVFAYGSTGSGKTYTMVGTHSDPGLMVLSFRTIFELIKKDDSKDTFEVSCSYLEVYNEVIYDLLERSSGHLELREDPEHGIIVAGLRSIKVHSADRILELLNIGNSRRKTESTEASARGSRSHAVLEITVKRKQKGQYGNQVLRGKLALVDLAGSERASETNNFGQKLRDGANINRSLLALANCINALGKQNKKGLAYVPYRNSKLTRILKDGLSGNSRTVMVATISPADDQYHHTTNTLKYADRAKEIKTHVHKNIGTLDTHVEDYQRMIDNLQVEVSQLKKELAEKEHQLSVKPTEKTADSELSWLNVLSQETGENVQERINLQKALFELEETNKRNRMELQHLDDSIARHQVKEMDSTILQALTSRRQVILDNIRDNDEAGSGYRKDIEMNESRRRQLQDMIEEAISNNGNKTYLHILSQYRLLGMTNAELQIEMAMRDQVIHNQREALRSLWNILYGTGLNQKQILKLAAKQGLTVEGCPLPSSSPDVTTPPSCQPHRFPSFMPFPGPQSEPYSPSACFFQHGFSTMSLLKNQHETPTICRQEHLSSYYMMSGCSPYSGDGKQWSSGRPTAFFSTPEKPKEAQSQHNKEHSGSHDFSLHRKDLWSTERK

SEQ ID NO: 271601 - protein, 61 aa, Zea mays
  Clone ID: MRT4577_179294C.1.pep
EKQPYVDQAGQKKQDYEKTKANFDKKESTSSKKAKTEDEDGSKSEVDDEDGSSDQENDDHE

SEQ ID NO: 271602 - protein, 65 aa, Zea mays
  Clone ID: MRT4577_179295C.1.pep
TTNDRGTVRVAPGRRPCLPPDRTAASARARASQELTNRVPLLLARHSTAPPPGAGSGGWGPDRTR

SEQ ID NO: 271603 - protein, 71 aa, Zea mays
  Clone ID: MRT4577_179296C.1.pep
IKYLGPRKDATTQQSVQPLHQRPDRPTPPYLQQTLPPPPFLLLLPPIAILLVLIMSAFMPCNVRDITPPYM

SEQ ID NO: 271604 - protein, 247 aa, Zea mays
  Clone ID: MRT4577_179297C.1.pep
PAGSTLSRRCEAIEQRIDASDQRFQASEQKAEARFISPEMDHAEIDNWKPAIEKRLGNLSLEMSRANKFMEHESMAQDCFKPGLLPTDMSSFGRATAPHHSADEPNGNHMEFHHREREFDRIPIPTHGPVKGMYYDTSQRIDPDSYPLSYAAMEGGRSGHGKLPHINFPQFDGDNPQLWKSHCEKYFDVYDVDPAMWIKVATMHFTGRAACWLQSAERRVRQLPWLVFCAESLARFGRDQHESLICK

SEQ ID NO: 271605 - protein, 72 aa, Zea mays
  Clone ID: MRT4577_179298C.1.pep
HFFDFSDNVDLGTACGKYYRVCCLSIIDPGSFLLNCHYLVSVRTVTAQFLGRHCTILRPYLFRIIIWSNYII

SEQ ID NO: 271606 - protein, 78 aa, Zea mays
  unsure (1)..(78): unsure at all Xaa locations
  Clone ID: MRT4577_179299C.1.pep
VQDRLPWNQLVAQIVSDDVQAEQLVSFNQLSDVSAVTLLIQPHVVPFYQLAEANTXTILQLTQLLPVYQLAMTNSATC

SEQ ID NO: 271607 - protein, 70 aa, Zea mays
  Clone ID: MRT4577_17929C.1.pep
RYKKVSISSKNAFMSSRSTGAYSSNFSSHFSIDEMIRPTGTMTRMCFDCPDTLDKFIMMRSFSGRALVLE

SEQ ID NO: 271608 - protein, 73 aa, Zea mays
  Clone ID: MRT4577_1792C.1.pep
RGPVPGQAPFGAAFSPFSKPVALLEVPFLSHLRGEPPPPALKGGPPGKIFTPWCLPGVRDPWNQFLYGCPPLA

SEQ ID NO: 271609 - protein, 110 aa, Zea mays
  Clone ID: MRT4577_179300C.1.pep
MNSHAAGTSNGGPGDAAAARRNTRMAKDSQVTQQEVAAWKPTLTPKWGGSGFLIGGGIFGPIGGGSLVTARDVGENIDRYDEACVAGNMTENKLAYIQNETLSQEWIRNL

SEQ ID NO: 271610 - protein, 146 aa, Zea mays
  Clone ID: MRT4577_179301C.1.pep
SRRPPPRRLRPPPQNPPPHLRYPPPWPLPDRLRWPSSRPPLPLPTTPRRRARRRRRAPPPTPGSAKCGIWRTSSPSSTPWPRSSSLPPSPPPSPAPGPGTAPTRPRRSPQPPTASTRSTPASRSPRRATAASSASRRSPTPTPDAA

SEQ ID NO: 271611 - protein, 188 aa, Zea mays
  unsure (1)..(188): unsure at all Xaa locations
  Clone ID: MRT4577_179302C.1.pep
LIPSFIRRRRLLSAGVTCSTTPARCYRXLKNTPYSMTCYCRAVPDPKIWIYPVGMNRNCACDIPYCEHLVSCENDNVSPEALDAHRIALPLYLTQSAXHHAFHLRVRLHPFHALRINKMXLSCCXTDRLPVXMRCGFGKTQGTCAREYIVHCLLSVRCLDNHAAHAIVALLQAXEQATWPQKIIDMRK

SEQ ID NO: 271612 - protein, 122 aa, Zea mays
  Clone ID: MRT4577_179303C.1.pep
MAAKLAQLRTQVTRAAEFASKHGCSYYKEVMEKNKQYVVQPPTVEKCQELSKQLFYTRLASLPGRYETLWKELDCVKQVWKNRKDLTVEDLGIASLFGVELYAWFCVGEIVGRGFTLTGYKV

SEQ ID NO: 271613 - protein, 199 aa, Zea mays
  Clone ID: MRT4577_179304C.1.pep
MKNVAKCDTWCELQNPANHRVFERKLRPKPSGGGHVCLGVTYPPPPFPPPHLARRSRPCRSPRTSPIRFTKGLRPAAMAAKLAQLRTQVTRAAEFASKHGCSYYKEVMEKNKQYVVQPPTVEKCQELSKQLFYTRLASLPGRYESFWKELDCVKQVWKNRKDLTVEDLGIASLFGVELYAWFCIGEIVGRGFTLTGYKV

SEQ ID NO: 271614 - protein, 372 aa, Zea mays
  Clone ID: MRT4577_179305C.1.pep
MDSSGGGGGAQIKGMATHGGRYVLYNVYGNLFEVSSKYAPPIRPIGRGAYGIVCAAVNSQSGEEVAIKKVGNAFDNHIDAKRTLREIKLLRHMDHENILALKDVIRPPTRENFNDVYIVTELMDTDLHQIVRSNQPLTDDHCQYFLYQLLRGLKYVHSANILHRDLKPSNLFLNANCDLKIADFGLARTTSETDLMTEYVVTRWYRAPELLLNCSQYTAAIDVWSVGCILGEIVTRQPLFPGRDYIQQLKLITELIGSPDDASLGFLRSDNAKRYMKQLPQFPRQDFRLRFRNMSPGAVDLLERMLVFDPSRRITVDEALHHPYLASLHEINDEPTCPAPFSFDFEQPSFTEAHIKELIWRESLAFNPEPPY

SEQ ID NO: 271615 - protein, 517 aa, Zea mays
  unsure (1)..(517): unsure at all Xaa locations
  Clone ID: MRT4577_179306C.1.pep
PSVVYLKSRVLSLKVDPHTCFDRSLDLVFEYMEHDLAGLAATPGLKFSEPQVKCYMQQLLSGLDHCHNRGVLHRDIKGANLLLDNNGILKIADFGLATFFNPKQKQHLTSRVVTLWYRPPELLLGATNYGAAVDLWSAGCILAELLSGKPIMPGRTEVEQLHKIFKLCGSPSEEFWANLKLSRATIFKPQHPYRRCVNDVYKDFPTTALTLLDHLLAVEPGNRGTAASALDSEFFTTKPYACDPSSLPKYPPSKEYDAKLRDEEARRQRAAAKGQEAEAGRRKQPPAPDGNSGLQHRRVQVNSKNSTYKFTPKEDVSGFPIDPPXSCCRQWLPSARSFDASWPFFLHSGQIKWDGSKGPKIPHLPNXTTEMSGQSTASGQRGNAPKMSNLGESARRQYLREHRSSSRYSQLTAADPSDRPEWNHQFQERPSSSHRKDDAVANKEHTVVNGTKKNRIHYSGPLMPPGVNMDEILREHERQIQQAVRRARLDKGKGKHSGERDQSESLLCTTGNLRADR

SEQ ID NO: 271616 - protein, 48 aa, Zea mays
  Clone ID: MRT4577_179307C.1.pep
NTHWLWWLQIGHASEMTMELIPFLACPFTLVHQSLKENSSINSNLNIL

SEQ ID NO: 271617 - protein, 89 aa, Zea mays
  unsure (1)..(89): unsure at all Xaa locations
  Clone ID: MRT4577_179308C.1.pep
LQDFRLRFCNMSPGAVDLVXRMLVFDPSRRITVDEALHHPYLASLHEINDEPTCPAPFSFDFEQPSFTEAHIKELIWRESLAFNPDPPY

SEQ ID NO: 271618 - protein, 95 aa, Zea mays
  Clone ID: MRT4577_179309C.1.pep
DEPTKVARICDSIRQTHFLNIYRPNCMGCVRCAERGILRHRHQNLAKQQLYNSRQTKETRGMPARGICCARSSGRLLHQVTYDATDDRGATVLAH

SEQ ID NO: 271619 - protein, 109 aa, Zea mays
  unsure (1)..(109): unsure at all Xaa locations
  Clone ID: MRT4577_17930C.1.pep
LRRXGWTCIAWERTAMPGRDGRGHRWGQGHYGTLRRGILIPKFFQGGYHFLEVIGEARKSRSGHSRCKAGAPPPSASAASRRCPRLWDPRHRFASIMSPGSATPHAAWR

SEQ ID NO: 271620 - protein, 150 aa, Zea mays
  Clone ID: MRT4577_179310C.1.pep
MERDRQDAAQKRRAVTRIGDPFREAKKARGGTKSAAPGNSKPPPAAKPAAPGPSKCSAGARAATSGASKEPSAEAAKEQRPASLALTKVAVACVADFDTDICVADYLVAGCRPGYGGGHLANGGGWGEGCFAGPVVRLLRERRDFVGRCR

SEQ ID NO: 271621 - protein, 45 aa, Zea mays
  unsure (1)..(45): unsure at all Xaa locations
  Clone ID: MRT4577_179311C.1.pep
LECYPGIACYLILLLVRXREYYNMLGGLNDXEWYVLHNCLNGGIG

SEQ ID NO: 271622 - protein, 44 aa, Zea mays
  unsure (1)..(44): unsure at all Xaa locations
  Clone ID: MRT4577_179312C.1.pep
GQEKRQQQQGPHGGEPLSQIGHQAARPRRSALIRGXIAASKLPP

SEQ ID NO: 271623 - protein, 83 aa, Zea mays
  Clone ID: MRT4577_179313C.1.pep
RRRVVDLISPGCSLEPSWLLHDTRSLSSAPHGPLLTLWSLNSITCSPSWRRTTAAAPLPTRRSFADAKCNARTMSYMVTCVRQ

SEQ ID NO: 271624 - protein, 40 aa, Zea mays
  unsure (1)..(40): unsure at all Xaa locations
  Clone ID: MRT4577_179314C.1.pep
LTVAVCRRKGVGKKLVDRMEEWXRQTGAEYSYMATEQDNE

SEQ ID NO: 271625 - protein, 236 aa, Zea mays
  Clone ID: MRT4577_179315C.1.pep
MGEGAGDRVLSRLHSVRERIGDSLSAHPNELVAVFTRLKNLGKGMLQPHQIIAEYNNAIPEAEREKLKDGAFEDVLRAAQEAIVIPPWVALAIRPRPGVWEYVRVNVSELAVEELRVPEYLQFKEQLVEEGPNNNFVLELDFEPFNASFPRPSLSKSIGNGVQFLNRHLSSKLFHDKESMYPLLNFLRAHNYKGMTMMLNDRIRSLSALQGALRKAEEHLSTLQADTPYSEFHHRF

SEQ ID NO: 271626 - protein, 56 aa, Zea mays
  Clone ID: MRT4577_179316C.1.pep
LTYSRPRVFALIAWSMSGRRTSTIARWSWTAALCLRGRGDSWTTTANLAAKTAGSA

SEQ ID NO: 271627 - protein, 214 aa, Zea mays
  unsure (1)..(214): unsure at all Xaa locations
  Clone ID: MRT4577_179317C.1.pep
MGEGAGDRVLSRLHSVRERIGDSLSAHPNELVAVFTRLKNLGKGMLQPHQIIAEYNNAIPEAEREKLKDGAFEDVLRAAQEAIVIPPWVALAIRPRPGVWEYVRVNVSELAVEELRVPEYLQFKEQLVEEGPNNNFVLELDFEPFNASFPRPSLSKSIGNGVQFLNRHLSSKLFHDKESMYPLLNFLRAHXYXXMTMMLNDRIRSLSALQGALR

SEQ ID NO: 271628 - protein, 312 aa, Zea mays
  unsure (1)..(312): unsure at all Xaa locations
  Clone ID: MRT4577_179318C.1.pep
MGCSASKCCSQLKCSLCSNGCLGQAPDSPRESRGKSSRGRGRVDSSGSDDSSGDDLGEDDDAFNHMNATRESTAGISRLSRVSSQFLPPDASRKVQVPLGNYDLRYSFLSQRGYYPESLDKAKIHSYCVHTPFGPSPDDHLFGVFDGHGEYGAQCSQFVKRRLCENLLRDNRFRTDAVLALHSAFVATNTQLHADNLDDSMSGTTAVTILVRGKTIYIANTGDSRAVIAEKQGDDIVAVDLSIDQTPYRFDELERVKECGARVLTLDQIEGLKNPDVQCXWGTEESDDGDPPRXLWVQNGXMYPGTAFTRSI

SEQ ID NO: 271629 - protein, 175 aa, Zea mays
  unsure (1)..(175): unsure at all Xaa locations
  Clone ID: MRT4577_179319C.1.pep
MGEGAGDRVLSRLHSVRERIGDSLSAHPNELVAVFTRLKNLGKGMLQPHQIIAEYNNAIPEAEREKLKDGAFEDVLRAAQEAIVIPPWVALAIRPRPGVWEYVAVNXSELAVEELRVPEYLQFKEQLVREGPNNNCALELHYEPFNDCFHRPSLSESIGPGVQLLNRHLASKLFH

SEQ ID NO: 271630 - protein, 131 aa, Zea mays
  Clone ID: MRT4577_17931C.1.pep
AGCRRGPHRPPPMTSCCRRIAGQGRRWAVGSFVVTIMGATPWLPPRQSAPRCRRWQNHLRKGGPRQLRRWGWTCIAWERTAMPGRDGRGHRWGQGHYGTLRRGILIPKFFQGGYHCGIVEARGWGFIAKGQ

SEQ ID NO: 271631 - protein, 43 aa, Zea mays
  unsure (1)..(43): unsure at all Xaa locations
  Clone ID: MRT4577_179320C.1.pep
ILLVYAVRLFVRAGSLGRGFXGPTPRGRGSGKWRGRGKRKGAP

SEQ ID NO: 271632 - protein, 68 aa, Zea mays
  unsure (1)..(68): unsure at all Xaa locations
  Clone ID: MRT4577_179321C.1.pep
ALHLDLDLADDWVNXSQVQMDEATVYSHQIVHNIKTANIYKFTATFDRGRDDSANGNCLHIIFCSNLQ

SEQ ID NO: 271633 - protein, 46 aa, Zea mays
  Clone ID: MRT4577_179322C.1.pep
CWVGAKVRVNGLFPLISNSACSHPLLEVGLETLFNQRVRPCVRGRV

SEQ ID NO: 271634 - protein, 159 aa, Zea mays
  unsure (1)..(159): unsure at all Xaa locations
  Clone ID: MRT4577_179323C.1.pep
CALVSSLASAARXASAGFDAHPARGIDCFGGAGTVPPLTGDGNAASLXADQGAGHIKGHECASTTGKNTGGGTERDNPDDPMYLHRCHLNASATDDGQXVMPVCVPGLAPALVPPNYTESEYNRVLNGSAVFGAGNAREGHWVAGGLSASPGSRDYSPP

SEQ ID NO: 271635 - protein, 56 aa, Zea mays
  Clone ID: MRT4577_179324C.1.pep
GDLRKNEVTRDWKPRETETPVPLKSARPFFFFFLFFFLPFFFFFFFFFYIFFFFPG

SEQ ID NO: 271636 - protein, 141 aa, Zea mays
  Clone ID: MRT4577_179325C.1.pep
CSSCRRVVASCFSPVVLVCLCRFVCLSCCFGCGPFSFAGSCSSVPSVVCSSSGIGCLAALLPSVFLFIIFSFSGCFSRGWVSSRPMFRFGSPLACSVLWWQFAFLWCAQLPSLVFSRALPCFPRSRLPRLPPPVRCFLVRE

SEQ ID NO: 271637 - protein, 47 aa, Zea mays
  Clone ID: MRT4577_179326C.1.pep
RFRSVVYSLELILGNPKNMLPMWNDGYLYICMLISLFDVTFRVIWSG

SEQ ID NO: 271638 - protein, 120 aa, Zea mays
  Clone ID: MRT4577_179327C.1.pep
WTGPPFFFFLGANSKRVRPDLPKRKLRNTAHQLDTSCGPTFASSPYYLYMDYADCEPADDPVEGLQPCPELEEAGALPLRDRVGVLRPRRARRPDKRREQVGRASLARGGRTVTAPRTMA

SEQ ID NO: 271639 - protein, 122 aa, Zea mays
  unsure (1)..(122): unsure at all Xaa locations
  Clone ID: MRT4577_179328C.1.pep
MLQLPLERILGLEGTHECVEDQGRLTRVAADIXSDSFNFXEQLELPAVKRHISELTQRFAGRKIMLGVDRLDMIKGIPQKILAFEKFLEENPEWNDQIVVSIRTDVLECMNAFCVLPSFANT

SEQ ID NO: 271640 - protein, 140 aa, Zea mays
  unsure (1)..(140): unsure at all Xaa locations
  Clone ID: MRT4577_179329C.1.pep
HEEEKRRCNLPHVIRLRHAVVEQNAFPQVIFQHQQQQQQLQEWLLGTPRPDVLPGQQQGRADGEDGRVSHRPQPQGGPPHGGERRERXKRRPPTTKLSELESQLSQLQEELKXAREQLHSSELSRKRALQEADDAKGAAR

SEQ ID NO: 271641 - protein, 90 aa, Zea mays
  Clone ID: MRT4577_17932C.1.pep
MVMMGQLGRLVDGIKSRLRAGAGTGGNKRGGARKAAATTTTTGYDKVEKTESMRVEIRSRQARKLIAKNLDAAGSVGRTGRTNKRFFLAF

SEQ ID NO: 271642 - protein, 96 aa, Zea mays
  unsure (1)..(96): unsure at all Xaa locations
  Clone ID: MRT4577_179330C.1.pep
GPPCNEIXNSCSPPRFPPPLGWYRGPPGVFFQVGRVRVHLKKNGGSPAILVFKPKNQLMFQVPKLVPKLPGRPKNREPAPIPGGSSKTPKGGKKKK

SEQ ID NO: 271643 - protein, 43 aa, Zea mays
  Clone ID: MRT4577_179331C.1.pep
RRCHCPAGVVRGADRVATSRHSSFHVFILLKMLSHVVRSRSRP

SEQ ID NO: 271644 - protein, 104 aa, Zea mays
  Clone ID: MRT4577_179332C.1.pep
TKWDYKHQVLAATHMPPWRIFLWVKLIEILLQTRPKALWRLLFQPNKASRRGMYWFTLMGRRVLVHELINFFFGDRRVKNGPTLQEFWGMPQEHQEIPLSITRK

SEQ ID NO: 271645 - protein, 46 aa, Zea mays
  Clone ID: MRT4577_179333C.1.pep
LHITLVSYVFNNVVSFRAMRCSESSYNRLRCRLYSGLSPSLDPRSR

SEQ ID NO: 271646 - protein, 76 aa, Zea mays
  Clone ID: MRT4577_179334C.1.pep
QQGKEDRGGTIENRADLESVTNGTYESLCEFDRRKVTYCEQHGNRAKRYWDDSTAPTHDIYDNGLRSASQEHYFVM

SEQ ID NO: 271647 - protein, 42 aa, Zea mays
  Clone ID: MRT4577_179335C.1.pep
SSKKPWWLVEVRMGTGLVSRVVEAVTHVCDEHQEWPLIGGKL

SEQ ID NO: 271648 - protein, 46 aa, Zea mays
  Clone ID: MRT4577_179336C.1.pep
DALPDTGYHVASLNYALDWNSHCGTDRYSTSPVNSRSACDHDYHGD

SEQ ID NO: 271649 - protein, 56 aa, Zea mays
  Clone ID: MRT4577_179337C.1.pep
GRRVNVILFIFAPYTGLQIPINMRCAVFKYNKAQQATYDLLSVSCMDILFLSRNVP

SEQ ID NO: 271650 - protein, 64 aa, Zea mays
  Clone ID: MRT4577_179338C.1.pep
TSYRMYMCSLQSNIYGVPTAGGLTQSTKNCFVGTSYKYGQSLAMFSSCLVEPTRIATDQSTSRD

SEQ ID NO: 271651 - protein, 67 aa, Zea mays
  Clone ID: MRT4577_179339C.1.pep
PSSPASLSSCLLPLLPRRGLVTPFLGRSALAQLASRRSLFARWVVCCRVHLVVSSWTCWHAVLLPRS

SEQ ID NO: 271652 - protein, 83 aa, Zea mays
  Clone ID: MRT4577_17933C.1.pep
KWAAFQASTSVSASHPTRERTCYDYFPFVQKEFPQDPKVYHPLPTFVLPTLNMCLGANANATSASAAKNGIADVLCSFQNSVL

SEQ ID NO: 271653 - protein, 214 aa, Zea mays
  Clone ID: MRT4577_179340C.1.pep
WGCQRSACSWRGTRRRWRRSRPRCSGRASGRLPLAPLWERFFRGNEDRYSIYVHTMPLYRANFTSNSVFYRRQIPSKAVQWGQMTMCDAERRLLANALLDISNEWFVLVSESCIPLFDFNTTYEYFQNSSHSFVMSIDDPGRDGRGRYNLNMAPEVELEQWRKGWQWFEADRDLAVAIVEDTVYYPKFKQFCRPGCYADEHYIQTMLKIESPHK

SEQ ID NO: 271654 - protein, 143 aa, Zea mays
  unsure (1)..(143): unsure at all Xaa locations
  Clone ID: MRT4577_179341C.1.pep
MATGPKDLMWHAGRNXMSFLAYDLGNEIVNVQITKEPNMLYNMHSFRHSALENEKTAIIQPAVKDSAVHLSTTLTNNDNTPGKIIHKTVMHKDIRKMANAVKNQDNDXYYSADLTXTALAMLXSLYRMLLHAEHGVWHNNRHL

SEQ ID NO: 271655 - protein, 403 aa, Zea mays
  Clone ID: MRT4577_179342C.1.pep
MAMAMRVESVEEAKQAAILPAAQEQRRVFPAGMLKLFLGLMLFGVVMGLSAFGVFLARHAEEMAAVAPALFRPCLGAAAAAEPEPEEGLERWTRPPARAQHAMTDEELLWLASYAPRMRGRSGYPFQRVPKVAFMFLTHGPLPLAPLWERFFRGNEDRYSIYVHTMPLYRANFTSNSVFYRRQIPSKAVQWGQMTMCDAERRLLANALLDISNEWFVLVSESCIPLFDFNTTYEYFQNSSHSFVMSIDDPGRDGRGRYNLNMAPEVELEQWRKGWQWFEADRDLAVAIVEDTVYYPKFKQFCRPGCYADEHYIQTMLKIEAPHKLANRTATWVDWSRGGPNSAHPATFGRGDITEEFLKGVRGGETCLYNGRNTTVCFLFARKFAPSALQPLLELAPTVLGFG

SEQ ID NO: 271656 - protein, 98 aa, Zea mays
  Clone ID: MRT4577_179343C.1.pep
SPIPSPGSGAPPSSALLQPPQHQGAQILYRRGRRHRGGLRRCFLLHRLRHGGRLRALHVCTRTLRCAARPPACAQSTGTLPRSVTGGGYSNSSRTTQA

SEQ ID NO: 271657 - protein, 228 aa, Zea mays
  Clone ID: MRT4577_179344C.1.pep
MAEVIVQRACAKLRSAIGDEAVVRSNFIGDLRYMLGALESIQPVLERAEMEPFRSIPVARWLQLACSAACKTIDTVNELHDARPQAAATLTRMLPHLAIVKNAMAIEVQETKKLVMRADEERPSRFPNYYTEITEEPKTRPVSEEAMIFGRGSDKERIIAALLCSTEPNITQEHITILPIYGLEGSGKTTLAQMVFNGTHSLQGYDFRVWFHVSPQLDFHALGNSIIC

SEQ ID NO: 271658 - protein, 64 aa, Zea mays
  Clone ID: MRT4577_179345C.1.pep
GRESPPTSPQKRILIYKKTTPHEKPQPMLTTGNQAPTKTSLSKHPSGRFSKPSQKEKPSRLQQI

SEQ ID NO: 271659 - protein, 78 aa, Zea mays
  Clone ID: MRT4577_179346C.1.pep
GVQQSIFTDIGRNDLVVMTGLCASRSCSRGRWPARAGPETTHPEGGLNVGCGAEPLRGVPDQSLAARSAAAAASRSCK

SEQ ID NO: 271660 - protein, 145 aa, Zea mays
  Clone ID: MRT4577_179347C.1.pep
FHIYSHMDWFSEYVQSHAGEVVIEDRSTCEIIGINSIYIQVHDGSIRKLIDVRFVPKLKINLISLSTLEAMRFNFAAIDGVLKVSRGNRIILKGNRLNNLYYLQYSTIDAKAVSIAFQKRGYFDDTKSCSNSKSNDSLDLVDIQI

SEQ ID NO: 271661 - protein, 1089 aa, Zea mays
  Clone ID: MRT4577_179348C.1.pep
MEASAGLVAGSHNRNELVVIRRDGEPGPKPMDQRNGQVCQICGDDVGRNPDGEPFVACNECAFPICRDCYEYERREGTQNCPQCKTRFKRLKGCARVPGDEEEDGVDDLENEFNWSDKHDSQYLAESMLHAHMSYGRGADLDGVPQPFHPIPNVPLLTNGQMVDDIPPDQHALVPSFVGGGGKRIHPLPYADPNLPVQPRSMDPSKDLAAYGYGSVAWKERMESWKQKQERMHQTRNDGGGDDGDDADLPLMDEARQPLSRKIPLPSSQINPYRMIIIIRLVVLCFFFHYRVMHPVPDAFALWLISVICEIWFAMSWILDQFPKWFPIERETYLDRLSLRFDKEGHPSQLAPVDFFVSTVDPLKEPPLVTANTVLSILSVDYPVDKVSCYVSDDGAAMLTFEALSETSEFAKKWVPFCKRYSLEPRAPEWYFQQKIDYLKDKVAPNFVRERRAMKREYEEFKVRINALVAKAQKVPEEGWTMQDGTPWPGNNVRDHPGMIQVFLGQSGGHDVEGNELPRLVYVSREKRPGYNHHKKAGAMNALVRVSAVLTNAPYLLNLDCDHYINNSKAIKEAMCFMMDPLLGNKVCYVQFPQRFDGIDRHDRYANRNVVFFDINMKGLDGIQGPIYVGTGCVFRRQALYGYDAPKTKKPPSRTCNCWPKWCICCCCFGNRKTKKKTKTSKPKFEKIKKLFKKKENQAPAYALGEIDEAAPGAENEKASIVNQQKLEKKFGQSSVFVASTLLENGGTLKSASPASLLKEAIHVISCGYEDKTGWGKDIGWIYGSVTEDILTGFKMHCHGWRSIYCIPKRAAFKGSAPLNLSDRLHQVLRWALGSIEIFFSNHCPLWYGYGGGLKFLERFSYINSIVYPWTSIPLLAYCTLPAICLLTGKFITPELNNVASLWFMSLFICIFATSILEMRWSGVGIDDWWRNEQFWVIGGVSSHLFAVFQGLLKVIAGVDTSFTVTSKGGDDEEFSELYTFKWTTLLIPPTTLLLLNFIGVVAGISNAINNGYESWGPLFGKLFFAFWVIVHLYPFLKGLVGRQNRTPTIVIVWSILLASIFSLLWVRIDPFLAKDDGPLLEECGLDCN

SEQ ID NO: 271662 - protein, 214 aa, Zea mays
  unsure (1)..(214): unsure at all Xaa locations
  Clone ID: MRT4577_179349C.1.pep
VSAVLTNAPYLLNLDCDHYINNSKAIKEAMCFMMDPLLGNKVCYVQFPQRFDGIDRHDRYANRNVVFFDVRSVIKISKKFPCLTXTLNLQCCFPNVTFIQINMKGLDGIQGPIYVGTGCVFRRQALYGYDAPKTKKPPSRTCNCWPKWCICCCCFGNRKTKKKTKTSKPKFEKIKKLFKKKENQAPAYALGEIDEAAPGAENEKASIVNQQKLE

SEQ ID NO: 271663 - protein, 67 aa, Zea mays
  Clone ID: MRT4577_17934C.1.pep
VVSVAGQHAPYIYMGSAYYVLTLQKRLILCHMYHVHRSESSDLGDPLGLAVRAPPPVVVVPVATPPL

SEQ ID NO: 271664 - protein, 194 aa, Zea mays
  Clone ID: MRT4577_179350C.1.pep
SCRRAAFPRWWLLVCPLRSLLPLRQAGPHRRLDAQPAGPRGFRREAEKERARRDRHWQQNRRTHHQFNRGGPSSSSAKPSVDIQPEWSVKEQIPFSSFSKLSFAVADQPEDLLVCGAVEYYDRTYDRVTPRAERRLERFKSRNFFKVTTTDDPVIRRLAENDTATVFANDTILAALMCAPRSVQSWDIVIQRVG

SEQ ID NO: 271665 - protein, 89 aa, Zea mays
  Clone ID: MRT4577_179351C.1.pep
KDVDTPLRQQEQHHLTKEERNHISRHGILYARDGVIAGGRGSLCSGRLLGDDPDGVHVAGVVAEEGEDKAHPDFNTSSRTCRRPRAAAG

SEQ ID NO: 271666 - protein, 581 aa, Zea mays
  unsure (1)..(581): unsure at all Xaa locations
  Clone ID: MRT4577_179352C.1.pep
MGFDVGLVPYNPDGWGPPEVAAAPPSLGGGSSSVPFAPFSRSDKLGRIADWTRNPPGPGAFAAARDAVFRFRGARGLHRARVRGRLVLPPRRWQTAAAAPAVWTSLALPAAAPTPAAPRRRGRGSASRGPRRSAPAATATGSRTAARTTSSTAAGPSSSSAKPSVDIQPEWSVKEQIPFSSFSKLSFAVADQPEDLLVCGAVEYYDRTYDRVTPQXERRLERFKSRNFFKVTTTDDPVIRRLAENDTATVFANDTILAALMCAPRSVQSWDIVIQRVGNKLFFDKRDGSQLDLLTVNETAQEALPEAKEDINSAHSLAVEATYVNQNFSQQVLLRNGEKVTFDEPNPFATEGEEAASVAYRYRRWKLDEETSLVARCEVHAVSVDLRGERQFLTLNALNEFDPKVTGVDWRKKLETQRGAVLATELKNNANKLARWTAQALLAGADMMKLGYVSRLHPRDQYNHSILSVIGYKPRDFAAQINLNTANMWGIVKSIVDVCMKLGEGKYVLVKDPVKPQVRLYEVPNDAFENDYVEEPLPEEEQVRPFSEDVDASAKEMDAAAEAEATGTTAGAEKSGDVAAV

SEQ ID NO: 271667 - protein, 96 aa, Zea mays
  Clone ID: MRT4577_179353C.1.pep
KTFFFFFFFFFFFFFFFFFDSRNGGFIFPVPTNKTFLCKNKGGKAKPIARSPSVFTKKTQSDGIGHSHSVISHSRGGGLPLAMIYYWAYLKRGHGG

SEQ ID NO: 271668 - protein, 80 aa, Zea mays
  Clone ID: MRT4577_179354C.1.pep
SLSAPLTGAESGRRNLPPSGYGMASRARAIRYSPPTSRDAQGGNSMIGEGLRRLVLLTSYLPKDTDASASGLDPHQAIGS

SEQ ID NO: 271669 - protein, 98 aa, Zea mays
  Clone ID: MRT4577_179355C.1.pep
GEEWTSLDAMRSPNAIDACCASFHPAAKTIMRSGGRPRTSIESGQRGESEVGSRVSGGGETGPRLVGEGFRVRVWSAGRGERRGGRDGKRRVDAGTRK

SEQ ID NO: 271670 - protein, 88 aa, Zea mays
  Clone ID: MRT4577_179356C.1.pep
QCTQRAMDLCTWPILQSTRHDRMLGMPCSCRHMRIGPAAGTKNTDCVFQETVPDTEGANTENEPINANTFSVGLHTNVHTKILLRPGF

SEQ ID NO: 271671 - protein, 115 aa, Zea mays
  Clone ID: MRT4577_179357C.1.pep
MARSAVAQVVLVAVVAAMLLAVTEAAVSCGQVSSALSPCISYARGNGASPSAACCSGVRSLASSARSTADKQAACKCIKSAAAGLNAGKAAGIPTKCGVSVPYAISSSVDCSKIR

SEQ ID NO: 271672 - protein, 173 aa, Zea mays
  unsure (1)..(173): unsure at all Xaa locations
  Clone ID: MRT4577_179358C.1.pep
MMSDELTVLEPSASESREFHEDRLAQLLGNPDKQSLESPSSQDGGFTQMTVTHWKIQTGDTAQTCSKSGRNPILNSNLLILQRELIDAEARSCGGGGKGFPFNSDVVPHQISHTGEKPYKCDHCGKGFSQTSLLTEHQRVHTGDRLCVCHVCGXDFVHYASLREHQHVHTXEK

SEQ ID NO: 271673 - protein, 65 aa, Zea mays
  Clone ID: MRT4577_179359C.1.pep
GRAFGRRDRRRSDPDRCHCCSGCRYHAELSPPPLDPDAADTKPRWLGLRISHRQEPPSLAQFEPT

SEQ ID NO: 271674 - protein, 60 aa, Zea mays
  Clone ID: MRT4577_17935C.1.pep
SSTAMAWLPPPPPILLFSCSPISTSSNRSIEATADTRRSLPANSPCPHDLDMSYGCLLVP

SEQ ID NO: 271675 - protein, 78 aa, Zea mays
  unsure (1)..(78): unsure at all Xaa locations
  Clone ID: MRT4577_179360C.1.pep
INNAGVHRSVQCTANTNAMIQAFERDHDERGDAVLEGAPHKDPEFKTQPMNILNERTLKGIFGGNNKPRTDQPNXEER

SEQ ID NO: 271676 - protein, 156 aa, Zea mays
  unsure (1)..(156): unsure at all Xaa locations
  Clone ID: MRT4577_179361C.1.pep
STSLTPXPTTSDXXVDSXASXHATPDAGMLXPCFPSSIIVGNSSTXPVTSVGXXVLSASFYLKNILVAPHIIXNLYYVRRXTTDNSCSMEFXPFHLXFKDLATRTLLAHXYSAEPLYTXTXXSXSTATSSXHAXVATISSITWHHRLGHLGFYVIS

SEQ ID NO: 271677 - protein, 115 aa, Zea mays
  Clone ID: MRT4577_179362C.1.pep
SYYSCGSVSFGKRKGNGPAKRGQTENEAGDPEAHAVQIDPPHTQPATLHEKPGGNNTTGTKTCTGSGKRGGKPPPHSLNVPRDEVDQRVVQTQPGLETEDALAEWTAETDPTQSL

SEQ ID NO: 271678 - protein, 65 aa, Zea mays
  Clone ID: MRT4577_179363C.1.pep
PSRPEPPPPPFKQLPGGYPQQFLSFNQLATLDSSGYLQEEPLPPFNPVGGGRPGSFLTQPPVVAV

SEQ ID NO: 271679 - protein, 40 aa, Zea mays
  unsure (1)..(40): unsure at all Xaa locations
  Clone ID: MRT4577_179364C.1.pep
XGRSGRRDASNRSLPLVTSLPLRXSLXHPDIVRSLAKRRT

SEQ ID NO: 271680 - protein, 59 aa, Zea mays
  Clone ID: MRT4577_179365C.1.pep
SPPLDQRSIVCASHNRVPASLVQFGIYGPDHNYVKRCPDSNLSHPWWIQWPPSDPTNPP

SEQ ID NO: 271681 - protein, 72 aa, Zea mays
  Clone ID: MRT4577_179366C.1.pep
SNVNIGLITQDTYGTCVMVDSFNQMAILGQTGLWHLHQARIRTLPTSCTFKGGAPMLLTLARARTATPPICL

SEQ ID NO: 271682 - protein, 105 aa, Zea mays
  Clone ID: MRT4577_179367C.1.pep
PRVRGCATFWVGEEGEAPRRVAVPVARLGHPRMLELLGEAREEYGFAHQGAVVVPCAVERFMRAVEASASAGNRHEHHRHGHHHHHFRLPHIHIARCFRPSHVVA

SEQ ID NO: 271683 - protein, 82 aa, Zea mays
  Clone ID: MRT4577_179368C.1.pep
WWGARGPPHCVVVLVRGPLRALEVRPLVNKMLWGCPGHLLDGGPPPHGLLWSPPFFRGARILLVGGGRPLFGDGCPPLWGCF

SEQ ID NO: 271684 - protein, 69 aa, Zea mays
  Clone ID: MRT4577_179369C.1.pep
APRIKGSRMWRSVSQSSTEPFPSGSAKRPASKFLVHRDTGNGRALDTDRLVLWILTASYNVTANCPPPP

SEQ ID NO: 271685 - protein, 52 aa, Zea mays
  Clone ID: MRT4577_17936C.1.pep
KLEIEIGFLETSVLPNRPLLTQKRVDKQHYTHIVKKPKYQTTHSTQGNWRLK

SEQ ID NO: 271686 - protein, 65 aa, Zea mays
  Clone ID: MRT4577_179370C.1.pep
YLPFFHKKLREVALKPPLNCFTKRLQKQSLNQASLWHFGGAKLGHIFQNLVLQKTGSPNFSFPTF

SEQ ID NO: 271687 - protein, 113 aa, Zea mays
  unsure (1)..(113): unsure at all Xaa locations
  Clone ID: MRT4577_179371C.1.pep
IDEINNTVLTVXTIGHQXLXSYEYTDYEDLCXDSYIIPTNDXKPGELRLLXVDNRVVLXIELPXRILISSEDVLHSXSHPFIGLXTDAXPGRXKPATVTSKRQSIYGHSSSYH

SEQ ID NO: 271688 - protein, 116 aa, Zea mays
  unsure (1)..(116): unsure at all Xaa locations
  Clone ID: MRT4577_179372C.1.pep
SHNSXPMPVMKSLVVHARCVEQDASSCEAQITTYISKGLIETWTTNSDESITRASRGSTKAAPFPDTRSSRRVSRVLLLALTVDSTVIGCTDEPQLGVLISSIELQEIKTTTLSHM

SEQ ID NO: 271689 - protein, 523 aa, Zea mays
  Clone ID: MRT4577_179373C.1.pep
MAVEAVSGNGTEAVAAAPAKEVSTKQASFREESNFLDDLKESERKALAELRDKVEAAIVEGKLFDDGKPEVKEKEKEKEEVKKKAVEKKDEQPEAEEKGEEDGKKEADAEEEKKEGVEGGEKKEGQEEGEKEEAEEESGDDTKQEAKKEEEAGEKAAAKEPETAAVVVDKDIALWGVPLLPSKGDEATDVVLLKFLRARDFKAGAAFEMLRRTLRWRRDWTGFGSGAECDADADLPEELAGACYLDGADHEGHPVCYNALGVFADDAVYKKALGTEEGKARFLRWRVRAMERHVAELDLRPGGVASLLQVIDLRNSPGPAKKDFRVAVKQVLDLFQDNYPELVARNILVNVPFWYYAFSTLFYPFLTQRTKSKFVVARPSKVTETLLKYIPIEAIPVKYGGLKRDGDTEFSADDGEVAEVTVKGSSTETIEIEATEADATLTWDLTVLGWEVNYKEEFVPADEGSYTIIVRKGKKMASGEEAVRNSFRTGEPGKVVLTVQNTSHRKKKVLFRHKAKSACAKKC

SEQ ID NO: 271690 - protein, 102 aa, Zea mays
  Clone ID: MRT4577_179374C.1.pep
MGLLDGKVILITGSTSGIGASTAIEAAKEGASVVVSGRRQDKGDEVVKKITDAGGKAIFVKTDVNVLSDIDHLFAETIRVFGRLDGAFNNVGYALFKPFEQT

SEQ ID NO: 271691 - protein, 89 aa, Zea mays
  Clone ID: MRT4577_179375C.1.pep
SVFVLVALLCVVAWKAVCYACYGVSFQKGFVYKKLLEGFWRLAGASICCQGLDWCCWLQEGGFCGPLPLQKDPISKKKKKKKIKRGAAV

SEQ ID NO: 271692 - protein, 513 aa, Zea mays
  Clone ID: MRT4577_179376C.1.pep
MTGGGFAVAEGGHARDDYGGGVTVSVVVTCLMAASCGLIFGYDIGVSGGVTQMESFLAKFFPEVSSGTKDAKHDAYCKYDDQRLTAFTSSLYIAAMLSSLVASRVTRTVGRQAVMLMGGVLFLLGSAINAGAVNVAMLILGRMLLGFGVGFTTQAAPLYLAETSPARWRGAFTAAYSIFQVLGALAATVTNYLTNRVPGWGWRVSLGLAAVPAAIVVLGALLVPDTPSSLVLRGDADGARASLQRLRGPGAETDAELKDIVRAVERARRDDEGAYGRLCAKGYGHYLVMVVAIPSFFDLTGVIVMAVFSPVLFRTVGFSSQKAIFGSVILSLVNLASSLLSSFVLDRAGRRFLFIVGGAAMMICQLAMSCILAGHFGKQNAVTMPRDYAVAVLVLMCLYTFSFGVSWGPLKWVVPSEIYPVEIRSAAQALTVSIALCLSFAQTQVFVSLLCAMKHAIFLFYAGWVLVMTAFIAAFLPETKGVPLEAMRAVWAGHWYWRRFVRDAKQEVQVNCM

SEQ ID NO: 271693 - protein, 45 aa, Zea mays
  Clone ID: MRT4577_179377C.1.pep
EGFGSKLDVRIISFPPTKGDKLNNPGKFGNGWLVYKDENEMGGGY

SEQ ID NO: 271694 - protein, 112 aa, Zea mays
  unsure (1)..(112): unsure at all Xaa locations
  Clone ID: MRT4577_179378C.1.pep
KDXTVXISHLLVFFFFFFFFLHFENSSFLLSKAARVHASVPKNNGEFLAKGTPKKKENPSQIDYSNLVLRLCSALCRRKINHSSTNVLQWFHHYLTDSSGFQNYSQLNRFSS

SEQ ID NO: 271695 - protein, 127 aa, Zea mays
  unsure (1)..(127): unsure at all Xaa locations
  Clone ID: MRT4577_179379C.1.pep
QLDYGLQIGVLDTVKVLIVALALLALAVSAAFSTSVGCGCQTPPFHLPTAFYMPPPFYLPPQHQPQPWQYPTQPPQLIPCQQFGSXGVGSVSSPYLGXQCVEHLKHQCMLAKTRYCSPQCQALQQQC

SEQ ID NO: 271696 - protein, 121 aa, Zea mays
  Clone ID: MRT4577_17937C.1.pep
PRVRPRVRPRVRPRVRGKASAEIRDPHKGVRVWLGTYNTAEEAARAYDEAAKRIRGEKAKLNFPQTPHLTQPPAKKRCMMAPELTPPSSETKSPPTPQLFMGFGYENGVYRPSEAMESEME

SEQ ID NO: 271697 - protein, 322 aa, Zea mays
  Clone ID: MRT4577_179380C.1.pep
DHKSKEARKMHACGHDAHTAMLLGAARILHERRHDLQGTVVLLFQPGEEVGIGAKKMVEAGAVENVEAIFGFHVTVMLPTGVVGSRAGPLLAGCGFFEAVITGAGGHAATPHNIVDPVVAASSVVLSLQSLVSREADPLDSQVVTVTRFQGGGAFNVIPDSVAIGGTFRCFSSDGFMRLKRRIEEVIVSQSAVHRCAASVDFGAGGSPLLPPTVNAASLHVHFEAVAAETVGASAVRAAMAPCMGSEDFASFSEAVPASHFYFVGIRNEGIGAVHAAHSPHFLVDDDALPYGAAMHANLAIGYLRNRAAANDGPVVAPHDEL

SEQ ID NO: 271698 - protein, 123 aa, Zea mays
  unsure (1)..(123): unsure at all Xaa locations
  Clone ID: MRT4577_179381C.1.pep
HACGHDAHTAMLLGAARILHERRNDLQGTVVLLFQPGEEVGIGAKRMVEAGAVENVEAIFGFHVTVLLPTGVVGSRAGPLLAGCGFFEAVITGXGGHAASPQNIIHPVLAASSVVLILQSLVS

SEQ ID NO: 271699 - protein, 453 aa, Zea mays
  Clone ID: MRT4577_179382C.1.pep
MSTSPAASSSAPTAFAASAVTMAAEAADGPVLSVVSKRLRALRKKYNRITQMEESLAAGKSLNREQEEVLRSKPVVAALIDELERLRPPLASALAEELSSRSAPAPAPAPAATASSSDPDSSVQDLLALVYFGSLFDVKQQSDFVSLVYTRELERSSCLTYDYVGDDPEDSLVETDLNAVSALATLAASRPPAAAGVSHRDALQACAHHARLWLNRADEPIHPDSTITYAGVRAKLDRIMASGYYTAQLEMRTPMDLAAAVANFGAGGVQVQESMVVSPQALEAVEGSQDVEEHKDEKEDSQATEIYSDHQAPVVDAEHVDDEGLVNPAHEVPSAEAEQETFDDYVDDQEQKDQQFTQRRSYQNQRSGGGRGGGRRGYPNGRGVRGYQNGRGGGGYQNGRGGGGGYYESGYYQPRNYNNRGRGGRNSYYNNHGGGAQAGGHGHPGRVELGANA

SEQ ID NO: 271700 - protein, 209 aa, Zea mays
  unsure (1)..(209): unsure at all Xaa locations
  Clone ID: MRT4577_179383C.1.pep
MDLAAAVANFGAGGVQVQESMVVSPQALEAVEESQDVEEHKDEKEDSEATEIYSEHQAPVVDAEHVDDEGLVNPADEVPSAEAEQETLDDYVDDQEQKDQQFTQRRSYQNQRSGGGRGGGRRGYPNGRGVRGAXYQNGRGGGYQNGRGGGGYQNGRGGGGGYYESGYYQPRNYNNRGRGGRNSYYNNHGGGAQAGGHGHPGRVELGANA

SEQ ID NO: 271701 - protein, 78 aa, Zea mays
  Clone ID: MRT4577_179384C.1.pep
AKRGAFFVHSGIHKLGRCQGRQRATHTYLISGDSNRTIVHGRGGTNHHIESHKHQNRPYTDSTQTIAVTWARTALKRT

SEQ ID NO: 271702 - protein, 117 aa, Zea mays
  Clone ID: MRT4577_179385C.1.pep
RPGKKKLAEKHNHVLIPRKKNREGSTLHRRLGRETVGAGIAVPVSWNSSPVQAFIPLSLLATKTADALRQVPCSVGSMVGSCGKQVFRHEPARPTLNHPVKNRYRRMRRMEDAAMCS

SEQ ID NO: 271703 - protein, 123 aa, Zea mays
  unsure (1)..(123): unsure at all Xaa locations
  Clone ID: MRT4577_179386C.1.pep
FGYAPFSICPVQPAVRFGWRFIXKLFKLFPGPPLDFKKGGFSIYLSPEVHPGLGGPQSIYRGGPPSLGLGVFHGGVPFAENGALCFLRAQERMGFDFFVATTKVVNGNPILRPLLANNKKGEK

SEQ ID NO: 271704 - protein, 116 aa, Zea mays
  Clone ID: MRT4577_179387C.1.pep
HEEKHNHVLVPRKKNREGSTVAWGERPWEQELSFLFLGILLPFRRSSLFLSWRRRRPTPYARCHVPSGPWWEAAASKSSVANPLGQRLTIREDTCHLKSKLVPGISSPRSRTGTAG

SEQ ID NO: 271705 - protein, 57 aa, Zea mays
  Clone ID: MRT4577_179388C.1.pep
KTMPHFQSNPCKPPNHGGLKTACFLFVQCPKNPLVWTGPPFCTNPMLFVLKPLCLWK

SEQ ID NO: 271706 - protein, 125 aa, Zea mays
  Clone ID: MRT4577_179389C.1.pep
PSTSTNRVAVVAGVEHATAVVDPRRHHGSAFGRETVGAGIAVPVSWNSSPVQAFIPLSLLATKTAEALRQVPCSVGSMVGSYDKQVFRREPARPSLNHPREVTCHLKSKLIPGISSARSRTGTTG

SEQ ID NO: 271707 - protein, 129 aa, Zea mays
  unsure (1)..(129): unsure at all Xaa locations
  Clone ID: MRT4577_17938C.1.pep
MAGVXNYSVIGLKTDREETKASCGLCLGKRVQVXTPRIYQAYLLGLAALCHGTATTXGSGKASMLDQYLTKSKCNTEINDSKRLDISCANFARAYIMHYRSCNXLYNFNDIQHLDKINKNLYINDNHHI

SEQ ID NO: 271708 - protein, 65 aa, Zea mays
  Clone ID: MRT4577_179390C.1.pep
SFYACVIECGTHVGHASILHIFMSLSYVQLTICLHYFRPLLVLFCVLLSQVSLRSDSSTIDLTVI

SEQ ID NO: 271709 - protein, 94 aa, Zea mays
  Clone ID: MRT4577_179391C.1.pep
VFCSCHQFHQDNSPPPPALGQHLHFHPDLLPHRHQRLPPPHLPCPRPPPPPPLLPPAVPDPPPPPPRSPAPPDVAGPGPGPGPRHAATAPAPLL

SEQ ID NO: 271710 - protein, 151 aa, Zea mays
  Clone ID: MRT4577_179392C.1.pep
SLFHSPVDFFFIGEMSAHHPTPRSTCLSPLSSRSPPCKLLLDPGNRRSFRLIFHTAAPDSHLDYSLQDFFSTFGDALKCKIFDLIRIRLQPPATALRPTPLIRRMINAHDLVNCKRGARLNLIFNKVQSLCCRSSELSSPLRRSYRELLPL

SEQ ID NO: 271711 - protein, 74 aa, Zea mays
  Clone ID: MRT4577_179393C.1.pep
HIWIQVPIGEPILIGYSPRYLLSARGKPKNEGCTCIEKQIKLAYKRTTNMDMKQKGNMNKNNNFLRESIPLERP

SEQ ID NO: 271712 - protein, 134 aa, Zea mays
  Clone ID: MRT4577_179394C.1.pep
GFFSLLVRSLAWGWLPLFPLLGVLLHSFSPSFYIALHRNFLSSPNLVQYPPFPLFLPLRTLNGPWPGPLFPVFSPWVGRGPPLFPLLLLGRCGGPPPLSFFLFYPLSPASFPLLFFFFPLFAGFPCLALTRGFP

SEQ ID NO: 271713 - protein, 181 aa, Zea mays
  Clone ID: MRT4577_179395C.1.pep
NVLAWHAWRRGKPSCLPSSSCEKRSGAVSFPGVRFESAWRWRTSPLEHCLVSASRDEGRPSRHVERPQRIGGRTNQKPKPETGWSTGLSPLLSAGAGQEALLILQCSRDICHLSVSTPRRCRWCSREYSHRQTVGARIVCFAPSGAPTQPVLAGIGFFWRDHDEDQRRGPRATGGLETTAP

SEQ ID NO: 271714 - protein, 47 aa, Zea mays
  Clone ID: MRT4577_179396C.1.pep
LDLPLISLGVIYRCSIRSPVRLYSWSFSSCGGRDHGHVCQVAKPSVR

SEQ ID NO: 271715 - protein, 142 aa, Zea mays
  Clone ID: MRT4577_179397C.1.pep
NRETTFFLGGGASIKQTRDTTNTNRARGETTNTEHVPTGGARTRGLQKPRQQKNFLPPHQTRPSYWVTKRKALYLTTRVRGLSPCLDPGNNPHRRSGSRKGDQMHTHARARNWGTGEEKPGPTGGNPRGGGPAGNPWGRGQI

SEQ ID NO: 271716 - protein, 92 aa, Zea mays
  Clone ID: MRT4577_179398C.1.pep
PRTHITTHSNMMRLTGNNTQPSPHHPIPHISTSNTRPNRISSNRKPPHTRKTMKRTLMIITTTTQTRTSTITNTTTRNNLSIKHITNHRSNS

SEQ ID NO: 271717 - protein, 346 aa, Zea mays
  Clone ID: MRT4577_179399C.1.pep
LQLTLSLDDRPAGFLLACLLTALPSRSDSSDFAELLWENGQAVVHARTRKQPPQQQAAFPPFTFTCSSRAQQRQPVPPLLKTGGGLFADFSSATAGLDAPRHNGDLDDTVPWIHYPIPIVDEASPAAPALADSFSPDFFSELHAAAATTSLGPLPPPPPPVQHTGGDDNDNRSTPVPNPTTGRGPEPSKETHRAPVLPGPAGRPEPPQGPQAEVAPARKPRPESGAGEALMNFSIFSRPAAMARASLRQRPPHTGTDKASNNNATTSTRVESTVLQSASASGPRTATAPALFVDQRTAWPSQQPKDGRFRCAAATPPPPPTPTAGTLRQEDLATPPHDSSAERRET

SEQ ID NO: 271718 - protein, 45 aa, Zea mays
  Clone ID: MRT4577_17939C.1.pep
QQGHFGCSRPSSPASSRILRSGRVVQQETSSPSVRLVSMLSSMSH

SEQ ID NO: 271719 - protein, 52 aa, Zea mays
  Clone ID: MRT4577_1793C.1.pep
CNTVEHRFRKHCNLSRVKHQIVQSKSWSLGFSNVRGIHSTEKKRKWVFCFSL

SEQ ID NO: 271720 - protein, 46 aa, Zea mays
  Clone ID: MRT4577_179400C.1.pep
KKKLLSSLDLKKSPCEGFSRVNIIYNPPCFMFPFKRETGSANLISH

SEQ ID NO: 271721 - protein, 59 aa, Zea mays
  Clone ID: MRT4577_179401C.1.pep
IPIMHSSSQVASSYASLTPLLSWHRLRPQTTMHTPHTTLRHCNSHSAVGTGYLRATDHN

SEQ ID NO: 271722 - protein, 131 aa, Zea mays
  unsure (1)..(131): unsure at all Xaa locations
  Clone ID: MRT4577_179402C.1.pep
MAAALQAQRLFLTASTSTSSSSSSFATRPRRTTTTTAPCRAGLRVPSGVQTTTAASTSRPADGGGIRLDWIDIATSPADRNTVEKLRAVAEAAADRAEMHDIIGRQRDNWNHLLLHSTNSLALAXSVMAAL

SEQ ID NO: 271723 - protein, 119 aa, Zea mays
  Clone ID: MRT4577_179403C.1.pep
GDLFPLAFGVVDEETDENWVWFLSELHELLEKNTENMPRLTILSDRQKGITDGVEFNFPTAFHGYCMRHVSETFKKEFSNPVLVNLLWEAAHALTVIEFETKLLEIEDMSQEAAVWIRH

SEQ ID NO: 271724 - protein, 56 aa, Zea mays
  Clone ID: MRT4577_179404C.1.pep
FECGIDHFRNNAYACIRCLMSASWTSIWLIGSAQRRTQWVVHIDHGTPKNTEGQLA

SEQ ID NO: 271725 - protein, 130 aa, Zea mays
  Clone ID: MRT4577_179405C.1.pep
TGVMINSHIIHQKQSSAISMYVIDAESDETQTQLREDKIPSQGQTGKDGNDLDKIQTQGIEKHLKNASQLSQNGGSDSLLVVCCEDVLLLLSLASLIHGSSKHLQKTKLAKPCCWSALFKNMDDRVCGLI

SEQ ID NO: 271726 - protein, 38 aa, Zea mays
  Clone ID: MRT4577_179406C.1.pep
RNAARRTRRSSGAQQMSARTRSGESVSGLHATRCHAAA

SEQ ID NO: 271727 - protein, 131 aa, Zea mays
  Clone ID: MRT4577_179407C.1.pep
CRFPDRTRRRHRHSHKRGGSTRTWGRPQAARPRACRRRAGQLDGIRCGAGPGTCLQVTVALFVGIRRRGDLAPVEYSATDQPGGDSDVGTPASWRQPAASGSIVRAAVQRLVQENTAARAIMVAAGGLAVF

SEQ ID NO: 271728 - protein, 67 aa, Zea mays
  unsure (1)..(67): unsure at all Xaa locations
  Clone ID: MRT4577_179408C.1.pep
LLXRPPPKVQASVLIRSTPCRPHNNLTYRGLIPTKDARAGQAHIYITKSACKVRAPFPSNMMCSSPA

SEQ ID NO: 271729 - protein, 62 aa, Zea mays
  Clone ID: MRT4577_179409C.1.pep
RCAVSESQEKAPYVSKAEKLKVEYTKKMDAYNNKQSGGGPTLSGDSDKSKSEVNDGDEEGDE

SEQ ID NO: 271730 - protein, 37 aa, Zea mays
  unsure (1)..(37): unsure at all Xaa locations
  Clone ID: MRT4577_17940C.1.pep
LRGNYRVSQRCLKCRENKRARGRAASNXKSKNGRMCG

SEQ ID NO: 271731 - protein, 220 aa, Zea mays
  Clone ID: MRT4577_179410C.1.pep
PRGRPGRVGGGKDEEDELEAYRQIHFPVLSELKKMTKLPSAAFLRSEGKCPLAPEEAVLMLAAIGFKRITNIYVAGAEIYGGKDRMAAISRLYPALVTKETLLSPSELEPFRNFSSQLAALDFIACAAADAFAMTDPGSQFSSLVQGYRMYYGGGDLPTIRPNKRRLASILVKNATIEWNGFENRVRKLIQQTKQVHERPVARSVFRHPRCPECMCRTEH

SEQ ID NO: 271732 - protein, 74 aa, Zea mays
  unsure (1)..(74): unsure at all Xaa locations
  Clone ID: MRT4577_179411C.1.pep
LDAQALIPSNRIAQXLVRPXLRRFGTMRDMGLYYXDVARDSRKALSRVQEFLGVPARELASKHVKIHTRPLPDL

SEQ ID NO: 271733 - protein, 127 aa, Zea mays
  Clone ID: MRT4577_179412C.1.pep
MKSRARSGGGDSRLSVRKTKVEKDPNKPKRPPTAFFVFMEEFRKDYKEKHPNVKQVSVIGKAGGDMWKSLSDAEKAPYVSKAEKLKVEYTKKMDAYNNKQSGGGPTLSGDSDKSKSEVNDGDEEGDE

SEQ ID NO: 271734 - protein, 105 aa, Zea mays
  unsure (1)..(105): unsure at all Xaa locations
  Clone ID: MRT4577_179413C.1.pep
PRQGXTPPPLACVHLATAGRLEEWGXFWSRTQQEAIALLSRRFSRGEVSRKKAALGKRQTTGARDKGLITPRTKNKVQLPPQIPDLVGGGFTQQGTIHSTKSLSG

SEQ ID NO: 271735 - protein, 126 aa, Zea mays
  Clone ID: MRT4577_179414C.1.pep
MKSRARSTAGDSRLSVRKTKAEKDPNKPKRPPSAFFVFMEEFRKDYKEKHPNVKQVSLIGKAGGDKWKSLSDAEKAPYVSKAEKLKAEYTKKIDAYNNKQSGDPTASGDSDKSKSEVNDEDEEGDE

SEQ ID NO: 271736 - protein, 89 aa, Zea mays
  Clone ID: MRT4577_179415C.1.pep
TWRRAIPLVAMEFPRMSCTELRWDLEIIPRAASNESRRDLGACRPSIANGGEGRLDRPELSTYNGKGRRGRSGNKFLYRRGRRLRGRSR

SEQ ID NO: 271737 - protein, 68 aa, Zea mays
  Clone ID: MRT4577_179416C.1.pep
RLPYRLKPQLSPRKTIDMLTDMLFLICPLNIMMFLSLMYSKKNILSLYRQAKIKYFWNPIQLHHLKQI

SEQ ID NO: 271738 - protein, 91 aa, Zea mays
  Clone ID: MRT4577_179417C.1.pep
LEWSCSYLVAGGRGCRAAPLAERGCKAALAERHRPSAGAPCGPMRLRTKKRNRNRERSNMHATGMRKEHAYEKNRTMLRVGKQKKEKKGGD

SEQ ID NO: 271739 - protein, 64 aa, Zea mays
  Clone ID: MRT4577_179418C.1.pep
LHRSRSGHQNVVRSSTTRIETSVRKVIVRGRSHLMRAGILLDQLIAGIRMIDLIKYIRMYSQFP

SEQ ID NO: 271740 - protein, 63 aa, Zea mays
  Clone ID: MRT4577_179419C.1.pep
VHIFSSQVQTNKFKHGGGGSRSGHQNVVRSSTTRIETSVRKVIVRGRSHLMRAGILQNKQKFS

SEQ ID NO: 271741 - protein, 398 aa, Zea mays
  unsure (1)..(398): unsure at all Xaa locations
  Clone ID: MRT4577_17941C.1.pep
GKAHNLLILKGFTSKAYRXIFNKTHGIIEEAYDVEFDETNGSQDESGNLDDVGGTQLKNAMKTMAIGEIKPKENDDENSVVVIPTSSTLNEEDHQSQQNDEIMDTHDQDTSSHSVPPHASTSNYQTVSIIHHSIVKDHSVDQIVGDISKGVQTRSRIASFCEHFSFVFCMEPNRVYEALLDVDWVNAMHEELNNFSRNEVWELVERPKNHNVIGTKWVFRNKHNEDGVVVRNKARLVAQGYTQIEGLDFSETFAPVARLEAIRILLAYACAHNIKLYQMDVKSAFLNGKISELVYVEQPPGFVDPKRPNHVFKLSKALYGLKQAPRAWYERLRDFLLSKDFKIRKVGTTLFTKRIDKDLFVCQIYVDDIIFGSTNELFCEEFEKMMSKEFEMSMIGEL

SEQ ID NO: 271742 - protein, 155 aa, Zea mays
  Clone ID: MRT4577_179420C.1.pep
RAEHHAPPHHIVLRVASSDGYLLSPRRLLLHPTNDTKQAWRSPPTRSRRNMNAEAAFRGLQVAIKCKNSKGAYESAAVGQVNKSGAFSVPLAADAVGEDGELKSECFAQLIHKPPSTPANAAPATPTEPSAPVNSPPKPAPIYHPPARHDAATGP

SEQ ID NO: 271743 - protein, 138 aa, Zea mays
  unsure (1)..(138): unsure at all Xaa locations
  Clone ID: MRT4577_179421C.1.pep
MATAAYAAMASQVMNSRPGALEVRGACQALRSRGPGPGSSVGKAAIQPDKGTYHVEQPINGEPFIDRLETPXINSSPLMAYHLSNLPDYRTVVSPLLRCRXVDLAHGYLLVGPFALTXPVRTTPEHGQADALTLADLL

SEQ ID NO: 271744 - protein, 127 aa, Zea mays
  unsure (1)..(127): unsure at all Xaa locations
  Clone ID: MRT4577_179422C.1.pep
ARRPNAPRLSSAIFLPQHAPPSGPSRRSPXTPVVIPHLPVHGHSVPPVTKPPPVDVPEHKPAPVPVPDHKPPSTPPVDAPEHKPAPVPEPEHKPPSTPTEPSAPVNSPPKPAPIYHPPARHDAAPGP

SEQ ID NO: 271745 - protein, 57 aa, Zea mays
  Clone ID: MRT4577_179423C.1.pep
ILKGILPDHYLTFQTNILFLMRSSAEVSSHIAIGLLNLKPLYFSVSCHNSSFLFTPS

SEQ ID NO: 271746 - protein, 139 aa, Zea mays
  unsure (1)..(139): unsure at all Xaa locations
  Clone ID: MRT4577_179424C.1.pep
MECWSLLASARTARHGLTGYDHQIWMLTSHAPLKLSMHSCYTHHSRAPGWNPLSVLNLGQRGALLLDDYHVVDQLGHREIQRILQRVVQARRLTDQGLFEDTLDEXYLSCENRCFIPGCLLDYDPWVLSYSYIQVHSTI

SEQ ID NO: 271747 - protein, 322 aa, Zea mays
  unsure (1)..(322): unsure at all Xaa locations
  Clone ID: MRT4577_179425C.1.pep
SIASHQISEVKRAWARVVLGWATAGAGRELSPIHVFSFLDNGDPGTTATGVCXGILIAIGFANAALGETAPPVVVGLAKCSDCARRNMNAEAAFRGLQVAIKCKNSKGAYESAAVGQVNKSGAFSVPLAADAVGEDGELKSECFAQLIHSASSAPCPGQEPSRIVAAPPGHTAHTNGNGKTFLALGGRVYQPSPECASAFLCHPFFHSMHHHHVGVHTPVVIPHLPVHGHSVPPVTKPPPVDVPEHKPAPVPVPDHKPPSTPPVDAPEHKPAPVPEPEHKPPSTPANAAPSTPTEPSAPVNSPPKPAPIYHPPARHDAATGP

SEQ ID NO: 271748 - protein, 155 aa, Zea mays
  unsure (1)..(155): unsure at all Xaa locations
  Clone ID: MRT4577_179426C.1.pep
NFVLLQDMSLILPYLIFGXLRHCFYTLRQYVAQYKCDPTADLSLRCFMGDEADGVPGIQHLVLGFGRKTALKLLQKHGSLENLLNTAAIRTVGKGYAQDALTKHADYLRXNXEVLSLKRDVNVQFDDSWLPTRNTSNDTYVLADFILKLNGEGRS

SEQ ID NO: 271749 - protein, 47 aa, Zea mays
  Clone ID: MRT4577_179427C.1.pep
VMATANSHELCKQLFRLNACAYIRARARYRFLPKHVCRSQTYRTQAP

SEQ ID NO: 271750 - protein, 154 aa, Zea mays
  Clone ID: MRT4577_179428C.1.pep
MPWWRLPRPSPRTQPSRRTECFARTRRRRPSLSSRSRRSGPPARRRRSAVETSGSRCRTCRCYRATISRDPNYRPAPGAVLPVSASDLVLGPSQWSNHVVGKISEWIHLDAEDERLRLDSELTLKQEIAWASHVSLQACGIPAPRKTFLRQLCQ

SEQ ID NO: 271751 - protein, 205 aa, Zea mays
  unsure (1)..(205): unsure at all Xaa locations
  Clone ID: MRT4577_179429C.1.pep
MSHCERLVVQLFDCSYKLSLDYGVVLQPHSYRPTWPSPTMALGPYTNLRVQRYDSVFVIALAKAPENRINAAFAQEIILALRDIESELAPDAKRCVITKGAHEKFYRTGLDLDNNKANPHANTDGYLXLLATLLDYPFPTIALITGHTFGGACPLALXHDYRIMNSQRGFFSMPPVNLGLHFPGIAFLPKLKLRPLVALKMLLEA

SEQ ID NO: 271752 - protein, 106 aa, Zea mays
  Clone ID: MRT4577_17942C.1.pep
RSRPGRDIEHRSRTREPLPELLLLTRINIITTSATSGVLLPPLYHVLSPRCTVALSACETLLLDPNIPIPLASIPYMKAMLPTQALKLNERTTVICLSKSVLPQRD

SEQ ID NO: 271753 - protein, 72 aa, Zea mays
  Clone ID: MRT4577_179430C.1.pep
CADILLLDVAPLTLGIETVGGVITKLIPRNTVIPTKKSQVFTTYQDQQTTGFIQVRTRILVLASLDWQLGAW

SEQ ID NO: 271754 - protein, 106 aa, Zea mays
  Clone ID: MRT4577_179431C.1.pep
APIFIVDDNDDKYTSHFNIVSNAICTTYYLAPLAKVIHDNFVIIEGLKTTVHAITHTLKTVNLPFTKDCIHGKADIFNIIPSNTCASKALKKHLPELNNNLTCMSF

SEQ ID NO: 271755 - protein, 75 aa, Zea mays
  Clone ID: MRT4577_179432C.1.pep
KSAFFVFTLRLLFFVCLFVFQDRVSLCRLSWNSLCRPGWPGVAFLYNTQYELIIFIFSIAFFSLPASLILYFSNP

SEQ ID NO: 271756 - protein, 481 aa, Zea mays
  unsure (1)..(481): unsure at all Xaa locations
  Clone ID: MRT4577_179433C.1.pep
MAIVGGGGSWSIHGRADVTSRYEVLGRAGSGSYSVLYRRARAGTYRRITMSRHQRTRMMTAQLKNGVITGMVSLGLTFDEFGPVWMPPKLVLVLEWLPLDLAAVXLHAMRRAGGGEGGEGIPASQLKRWMLQVLEGVAECHRAGVVHRDLKPENLLISEDGVLKVADFGQARILQQSAPTFQEMYPHEQSSGMETWVPQQQPAVLQGTEEEPTSYESDATAGQEPETLTAADYLRELDQLREKSSDVDKMSFQDEHASCLATCSTGDIEDDPYPASYSDDMEGIGEDSGAFTSCVGTRWFRAPELLYGSTNYGLEIDLWSLGCILAELMKLEALFPGISDIDQISRIINVLGDITEETFPGCSNLPDYNKISFNKVEKPTGLEACLPNRSPTEVSIIKQLICYDTAKRTSAVDLLNDRYFTEEPLPAPIEGLHVPASKDEDDDSSTEEWGNYRDGVSRIDFDEFGSMDATKTEKGFSIQFS

SEQ ID NO: 271757 - protein, 42 aa, Zea mays
  Clone ID: MRT4577_179434C.1.pep
NSARGSHRHIVLQSAPSLTDRSLAISHAPREHSPRSRTSLLA

SEQ ID NO: 271758 - protein, 33 aa, Zea mays
  Clone ID: MRT4577_179435C.1.pep
QILLYLNSFIMYHQRPLRIGVGYPPQGGYPLHD

SEQ ID NO: 271759 - protein, 69 aa, Zea mays
  Clone ID: MRT4577_179436C.1.pep
KGGLGRDCPDRQAEYRSFLEWPTRYQFLQRPVQAQGMMCSTFSGRTLFSRLTLEYRWVPSSKSRKYIGA

SEQ ID NO: 271760 - protein, 241 aa, Zea mays
  Clone ID: MRT4577_179437C.1.pep
MDPPAEMDTGELDALLRAAADFASYPGTHGEDTVRQFLEQFPLPKLLGVLQSQADVPETVETVAACLDKVFSSRYGASLLPSYGEFIQAGLLTNSNSIRQLACKAVVHLLDKAGDIAVAVDTFVQHNLYPLLINCLIEGDEEISAIVLDAIKRLAEIPTGTDIIFPPDGQGLQLNKVAAQSSSMARIRTLSLIAKLFGASSCTATAIRDSNLLSLFEDEIKDRKDMLKTLSALEVLYELAE

SEQ ID NO: 271761 - protein, 100 aa, Zea mays
  Clone ID: MRT4577_179438C.1.pep
RGAPQPHHNGGLPFTKETMEGGGAPGPRGGGPNLPRKGPLGPIRPYLRQGGGGNPGPPRPGPPFFFPGGGGFRGAGGLTFFHQKGFLNRRAGFWNQTVFP

SEQ ID NO: 271762 - protein, 42 aa, Zea mays
  Clone ID: MRT4577_179439C.1.pep
LISPVTAASTETNCTSGKIYKGTSRKKKKKKKKKRLCVVTTA

SEQ ID NO: 271763 - protein, 1942 aa, Zea mays
  Clone ID: MRT4577_17943C.1.pep
MASNNNVHIGKPPHFDGNNYDYWKIRMSMHLRAMGGKIWPIVRDGFVVLKEDEPSVSDNENILTNDQAMNVFYDALDINEFNRIKNLTTAHEIWIKLMEIHEGTTIVKSAKLYVCKGKFEQFIMKEDESVSDMFNQLNEKVNELKGLGFNVPDVDFTHKFLRSLPEKYETIVTMLFGKEGENESIALKAKASKAIEKEDSNDEENESESDGDMALFVRKFNKFMKMKRGQPRRGQTSRRNAFNDRKCFECGEPGHIAMNCPSKKKKGKDESDKKKKKYYNKKKDGKAYLVEWDSDDSSDDDDDDTSSKLNAGIAIKEAPSLFSSPHCLMAKGDAKVKIITDLNDIKDDDDIDDVDDDGYSYDDLVRMLGEVDDYMHKEKEKFKTLKELYKNLQVSFEELKTSHNDLKENCEKLVDAQKSSIVHEVEVVTKDVGVTCDLLDSLTSEPLPTNSICDKYKISLNDNIALDESKTIVENEVLVDRVNTLTHDLEKAYGGKAKLDFILGSQRCSLNREGLGYVPKKGKNAFVKQKTLFVKECDTVCHKCHKKGHVKKNCPKFKNVSSTCFEHCYVLSHNAKGVHAKFVGKLQGGRNHWVLDSGCTQHMTEDMKMFTQMSEEDCSNYDSITFGDNRKGKVKGLGKIAISNDHSISNVLLVESLNFNLLSVAQLCDLGFYCNFTVEDVIISSVDGSNLKFKGFRHENLYLVDFSSNEAKLTTCLFSKASLGWLWHRRLGHVGMKQLNRLTKHDSVRGLKDVKFEKNKLCSSCQADKSNVFETFKSFAILAQNQYDFDIKKVRSDNGSEFKNARIDEYCDDKGIKHEFSSKYTPKQNGIVERKNRTLIDMARSMLAEYNISDSYWAEAINTACHSSNRLYCHKLLKKTPYELLIGRKPNISYFRVFGCKCYILRKGSRLSKFEKKCDERFLLGYSSNSKAYRVFNKTHGIIEEAYDVEFDETNGSQDESDNLDDVGGTQLINAMKTMAIGEIKPKEDDDENSVVVIPSSSTLNEEDHQSQQHDETMDTHDQGTSRHSVPPNASTSNYQTVSRIHHSIVKDHPVDQIVGDISKGVQTRSRIASFCEHFSFVSCMEPNRVDEALLDVDWVNAMHEELNNFARNEVWELVERLKNHNVIGTKWVFRNKHNEDGVVVRNKARLVAQGYTQIEGLDFGEIFAPVARLEAIRILLAYACAHNIKLYQMDVKSAFLNGKISELVYVEQPPGFEDPKRPNHVFKLSKALYGLKQAPRAWYERLRDFLLSKDFKIGKVDTTLFTKRIGKDLFVCQIYVDDIIFGSTNELFCEEFRKMMSKEFEMSMIGELSFFLGLQIKQLKDGIFISQSKYLKDMLKKFGLENAKPIKTPMATNGHLDLDEGVLLTVNAVQNFELVWMGILCKVINSTFVAARVLWSRPWSVADRPPGGHGPSGPLARTVRPPSADRLDPGREMQFYSFLLCGFGGLRKKLAGHFKSKRPRGDDDDYTPTTDSEAQSSARGTESMDAEDFPHVHPDYPIDTSRWTYPKRRFSMAEYCSRRTMNQYTLPSDTNIQIFHTQLQFDVFWGTLVDTNFHKHQVIDWSFMLGQSVMEGLIPKFETCGLYQFMGQRTDFSEMAVKQFLATSEIDIEEESVTWMTGFKRYSASFADFATTNSLDYGTISAGLDLYTEDNFEDIVQFYEPARLGIPRRIGETTGLRHHPAVINKIARVTILPKSGDKSKIRDKFWNIIHHIMNGEMDKNQNLAYAPYIMALIKAKTRFEGPCEIVHTPFRPFKNEIGFLTRPLTPFPDDEEDPGYNAGAAPDVEAEQMPPPQPQQYWQPGPGYFDPYFHNMQQGLETHIDTRFEGMMTHVDHRLDDMQSHFDSNWDALNSEFSEFRDHIHTNVTDPIMTRLNNVQQSFQDNMGALSSQFDHLSTNDSMHDISQRQQQLQRDFGQFSSLFDTFSTHYYNMHPPPSDQ

SEQ ID NO: 271764 - protein, 117 aa, Zea mays
  Clone ID: MRT4577_179440C.1.pep
ALPPHKPPPTPGEGVPLQLFFSPMYTNVGPCFCPKKNAAPGLPIFWRITNFWPSHGSSPPVILWKEPRPRFFGGSIKPPPPWLAQPKIDLWVCVSFPGVIFKPLGPSPKTPSFPFFF

SEQ ID NO: 271765 - protein, 60 aa, Zea mays
  Clone ID: MRT4577_179441C.1.pep
SSRWAHFFAGGACQCTGGINGCFPFDSKISKGTRFTTASPRTPTKEVVALGPQLLTGSAA

SEQ ID NO: 271766 - protein, 132 aa, Zea mays
  unsure (1)..(132): unsure at all Xaa locations
  Clone ID: MRT4577_179442C.1.pep
MRPTFALVKVVPWFASSHAVHASAVQPPAELLAGRVTTDGDVRRYYHRSVRHVASFGLDQRYGAGFCSTRMYLFAEHSADTKLVXGDSAGTWTSFYLTSGEADKHYXTDMELXGRLQGLPXALNTNGWATAH

SEQ ID NO: 271767 - protein, 102 aa, Zea mays
  Clone ID: MRT4577_179443C.1.pep
GIVQTANDIHRYVRCTLLNSTRPFDDVVKSAQDSLRWLCHKSFLEWNHETKIYSATPLGRAAFGSSLNPEESLVVLDDLSRAREGFVLASDLHLVYLVTPIN

SEQ ID NO: 271768 - protein, 123 aa, Zea mays
  unsure (1)..(123): unsure at all Xaa locations
  Clone ID: MRT4577_179444C.1.pep
CDGIWAWTRFNQLFNYLPLAAMIEKKIICXHGXLTFLCLHACRLLNTVEQIEKLERPITMDVGSIVLMDLLWSDPTENDSVEGLRPNARGPGLVTFGPDRVTEFCKRNKLQLIIRAHECVMDG

SEQ ID NO: 271769 - protein, 339 aa, Zea mays
  unsure (1)..(339): unsure at all Xaa locations
  Clone ID: MRT4577_179445C.1.pep
VRNSRVDPRVREVGELCYAAEQIFMQEPTVLQLKAPIKVFGDLHGQFGDLMRLFXDEYGFPSTAGDITYIDYLFLGDYVDRGQHSLETIALLLALKIEYPENVHLIRGNHEAADINALFGFRLECIERMGESDGIWAWTRFNQLFNYLPLAAMIEKKIICMHGGIGRSINTVEQIEKLERPITMDVGSIVLMDLLWSDPTENDSVEGLRPNARGPGLVTFGPDRVTEFCKRNKLQLIIRAHECVMDGFERFAHGQLITLFSATNYCGTANNAGAILVVGRGLVIVPKLIHPLPPPVNSPESSPERGDATWMQELNIQRPPTPTRGRPQAAGDRNSLAYI

SEQ ID NO: 271770 - protein, 80 aa, Zea mays
  Clone ID: MRT4577_179446C.1.pep
VLSIAPPVTLSVISGKPLASSQKFYLLLPYHPNLFYKPSSVLPALHHWWCPLFKLTYDVIVSIYEVLLDECLWLRTNKKV

SEQ ID NO: 271771 - protein, 158 aa, Zea mays
  unsure (1)..(158): unsure at all Xaa locations
  Clone ID: MRT4577_179447C.1.pep
PGTSLQGPPSSATRPTSDQTSSLPYLSLFSQQQXFLQLIGLFTPISAVYIQHQLXLNHLATASPHHVVPLNQQASFNSTAYYHHQHLLPFSQLDDVSPTAFLXTQQQLLPFYLHAMPNAGTLLQLQQLLPFNQLALTNPAVLXYNEPIIGGALFYDCL

SEQ ID NO: 271772 - protein, 58 aa, Zea mays
  Clone ID: MRT4577_179448C.1.pep
TLKSSHLWNRKSYITCNFSPRTCGILADLATIRIRCGYVGVIMMNAQGELAPVTLIQS

SEQ ID NO: 271773 - protein, 60 aa, Zea mays
  Clone ID: MRT4577_179449C.1.pep
TGYMMSLFQTVIMDPLWYKLGGDSQFFCRFTKFQQFLPLHIMIKLVDVKELLLLTDHLNF

SEQ ID NO: 271774 - protein, 245 aa, Zea mays
  Clone ID: MRT4577_17944C.1.pep
MSIRPRTVRPWTADRPQHQAMDSPSSLADCLSGFGGLRKKLAGRFKSKRPRGNDDDYTPTTDSEAQSSAGGTESMDAEDFLHVHPDYPIDIQGWTYPKRRFSMAEYCSRRTVNQYALPSDTNIQFFHTQLQFDVFWGTLVDTNFHKHQVIDWSFLLSQSVMEGLIPKFETCGLYQFMGQRTDFNEMAVKQFLATSEIDVAEESITWMTGFKRYSASFADFAAVALCQLQIKISPMKLISKIYLIP

SEQ ID NO: 271775 - protein, 101 aa, Zea mays
  Clone ID: MRT4577_179450C.1.pep
EKSNLQTDNADALLDSLRAELRSREIQIEQMEEYLTQVLCLNETEIKSESEPDKNIVEELRAKVEVLEKQVELQRNVITDREEEKREAIRQLCFSLDHYMN

SEQ ID NO: 271776 - protein, 151 aa, Zea mays
  Clone ID: MRT4577_179451C.1.pep
ASPVLQHAKCECCGMSQECTPEYIPRVRARFAGRWVCGLCAEAVTEEAEKKKGLPLEEALKAHMGVCKRFNGFGRTHPVLFQAEAMREILRRRATATLGPRSRSSINPREVNREVAKAAGTGISRSSSCMTFIADHDFNHRAASSSSINKN

SEQ ID NO: 271777 - protein, 127 aa, Zea mays
  unsure (1)..(127): unsure at all Xaa locations
  Clone ID: MRT4577_179452C.1.pep
FCSGVFRGGLLXLGLCPVPCSWLVPASCALLACRSLLGLAPFCCCSAPAASRVLSGSLFSGCSGRFGSFLALPVPCRVSPSRWRCWXRSWLGGVPVPVXLRSVGVLLAALXPPPXLLFPGAPFXGAR

SEQ ID NO: 271778 - protein, 65 aa, Zea mays
  unsure (1)..(65): unsure at all Xaa locations
  Clone ID: MRT4577_179453C.1.pep
LWSRKARTGTMLNVSFFKRPCGYVGAPGKLGTQKKKKKKKKKKKXTGKKKKKKKKXKXLCVVTTA

SEQ ID NO: 271779 - protein, 63 aa, Zea mays
  Clone ID: MRT4577_179454C.1.pep
LLITEAYISYAEPSRIIYPEGPVYVPQSSYTDCYATSKREQDQPHYRKNCLLPSVPHVSLIGI

SEQ ID NO: 271780 - protein, 67 aa, Zea mays
  Clone ID: MRT4577_179455C.1.pep
MTRGKVRCEQKTANEAHDMIRIMDLSPGKLTFGCYWSTTRIQNHQCVRLHLLQEPNLFQKATTNQQM

SEQ ID NO: 271781 - protein, 90 aa, Zea mays
  Clone ID: MRT4577_179456C.1.pep
SIYRVRVFRRETLLWISVLNKVATPLSRSTMSNSNACNCSSLHTNFFFSNALDTRDHLLALGNAIFFERRCDADSSIDTAISLASANNIP

SEQ ID NO: 271782 - protein, 94 aa, Zea mays
  Clone ID: MRT4577_179457C.1.pep
TARSGCHNTKPPPGIKNHESTIPKTALVSWADGPDCRCSWRQDPEAAAGPVNSCVPGERRPPPQSGLKRIAAIRRNERVAKDGGWEIVLLSPAD

SEQ ID NO: 271783 - protein, 29 aa, Zea mays
  Clone ID: MRT4577_179458C.1.pep
DIIICCQLTDHSLCLLNMIEIVNSKMLNT

SEQ ID NO: 271784 - protein, 359 aa, Zea mays
  Clone ID: MRT4577_179459C.1.pep
MGVYLSTPKTDKLSENGENDRLKFGLSSMQGWRATMEDAHSALLDLDSETAFFGVFDGHGGRVVAKFCAKYLHGQVLKSEAYSTGDLGTAVHRAFFRMDEMMQGQRGWRELSALGDKINKFSGMIEGLIWSPRGSDSNNQQDDWASEEGPHSDFAGPTCGSTACVALIRNTQLVVANAGDSRCVISRGGKAYNLSRDHKPELAAERERIMKAGGFIHMGRVNGSLNLSRAIGDVELKQNKFLPPEKQIVTANPDINVVELCDDDDFVVVACDGIWDCMSSQQLVDFIHERINTESSLSAVCERVLDRCLAPSTIAGDGCDNMTMILVQFKKPVDRNKKAEAAGQSASNVDEAKSRVAEE

SEQ ID NO: 271785 - protein, 644 aa, Zea mays
  unsure (1)..(644): unsure at all Xaa locations
  Clone ID: MRT4577_17945C.1.pep
MASNNNVHIGKPPHFDGNNYDYWKIRMSMHLRAMGGKIWPIVKDGFVVLKEDEPSVSDNENILTNDQAMNVFYDALDINEFNCIKNLTTAHEIWIKLMEIHDGTTIVKSAKLYVCKGKFEQFIMKEDESVSDMFNRLNEIVNELKGLGFNVPDVDFTHKFLRSLSEKYETIVTMLVRSDLSTTSPTEVLGEILTQHIFKKSQADAISLAKKVKNESIVLKAKASKAIEKKIVMMKKMKCGEPSHIAMNCPNKKKKGKDGDDKKKKFYNKKKDGKAYLVEWDSDDSSDDDDDDASSKLNAGIAIKEAPSLFSSPHCIMAKGDAKVKIITDLNDINDDDDDDVDDDDYSYDDLVRMLGEADDYMHKEKEKFKTLKELYKNLQVSFEELKTSHNNLKENCEKLAEAQNSSFVHEVVLVTEDVGVTCDLLDSPTSGPLPTNSICDKCKISLMNDDMALDESQNIVENEVLVDRVNALTHDLEKAYGGKAKLDFILGSQQCSLNREGLGYVPKKGKNAFIKQKTLFVKXVTKCVTRRDILRKIVLSLRMYPPLXEHYYVLFHNAKGVHVNYKAGGNHWVLDSGCTQHMTRDMKMFTQMSEEDCSNYDSITFGDNGKGKKSRNNIKLQMYLRLERRQKYMRDAKANVKSA

SEQ ID NO: 271786 - protein, 380 aa, Zea mays
  Clone ID: MRT4577_179460C.1.pep
MGVYLSTPKTDKLSENGENDRLKFGLSSMQGWRATMEDAHSALLDLDSETAFFGVFDGHGGRVVAKFCAKYLHGQVLKSEAYSTGDLGAAVHRAFFRMDEMMQGQRGWRELSALGDKINKFSGMIEGLIWSPRGSDSNNQQDDWASEEGPHSDFAGPTCGSTACVALIRNTQLVVANAGDSRCVISRGGKAYNLSRDHKPELAAERERIMKAGGFIHMGRVNGSLNLSRAIGDVELKQNKFLPPEKQIVTANPDINVVELCDDDDFVVVACDGIWDCMSSQQLVDFIHERINTESSLSAVCERVLDRCLAPSTIAGDGCDNMTMIIVQIKKPVDRNKKAEAAGQSASNADEAKSRVAEELSMAGTHKGATICFHKAGEKK

SEQ ID NO: 271787 - protein, 97 aa, Zea mays
  Clone ID: MRT4577_179461C.1.pep
GVSAINPRTTKKNWLTDHYPRTNKSKNIDTGLLGIFKDTSKCLVKTLDKLGDVALTDAGVTDLHVGVPILMEAVVGRLKLERTQEEGPLLEDRDNGP

SEQ ID NO: 271788 - protein, 251 aa, Zea mays
  unsure (1)..(251): unsure at all Xaa locations
  Clone ID: MRT4577_179462C.1.pep
MAAAAAAATSFTTLAVARSAGQRSLLASKAAPSPLLSLRGARIPSQAVSFSGGLAASPSHSRARFATSASAEPKEADLQSKITNKVYFDISIGNPVGKNVGRIVIGLYGDDVPQTAENFRALCTGEKGFGYKGSSFHRVISDFMIQGGDFDKGNGTGGKSIYGRTFKDENFKLVHXGPGVVSMANAGPNTNGSQFFICIVKTPWLDGRHVVFGQVVEGMDIVRLIESQETDRGDRPKKKVVISECGELPVV

SEQ ID NO: 271789 - protein, 248 aa, Zea mays
  Clone ID: MRT4577_179463C.1.pep
MAATATSFATLAVARSAGQRSLLASKAAPSPLLSLRGARLPSQGVSLSGGLAASPSHSRARFATSASAEPKEADLQSKITNKVYFDISIGNPVGKNVGRIVIGLYGDDVPQTTENFRALCTGEKGFGYKGSSFHRVISDFMIQGGDFDKGNGTGGKSIYGRTFKDENFKLVHTGPGVVSMANAGPNTNGSQFFICTVKTPWLDGRHVVFGQVLEGMDVVSLIESQETDRGDRPKKKVVISECGELPVV

SEQ ID NO: 271790 - protein, 39 aa, Zea mays
  Clone ID: MRT4577_179464C.1.pep
APQVGGISIPLPNTYCMVRSLSCLALVRACVILIEFSAF

SEQ ID NO: 271791 - protein, 63 aa, Zea mays
  Clone ID: MRT4577_179466C.1.pep
SVTINIRNYLAAMPTLCDLPSSSRPDSLRSYGINANNDDLSYKFNIFCSPHENVINLKDKFKI

SEQ ID NO: 271792 - protein, 46 aa, Zea mays
  Clone ID: MRT4577_179467C.1.pep
SPERRTKRPLAKEEERFFLERKKKGQRRQEGLKNDWPKPSQVKRTK

SEQ ID NO: 271793 - protein, 74 aa, Zea mays
  Clone ID: MRT4577_179468C.1.pep
TLAYRSTGRKSIGPTMGFLDNHHKHKRGTWLNKKLKGKRRWKTLHSRDKREPVSTWKWNAHSFFKKGPGAITSW

SEQ ID NO: 271794 - protein, 98 aa, Zea mays
  Clone ID: MRT4577_179469C.1.pep
GARGEDGGGRQEALREFVSVTGAEEDRARFILESAGWDLQIALQAFMEDGGDEDIVTISQATPSSVSRGTAPSDNRVTSVRDLIHDQDEDEEEEEGQR

SEQ ID NO: 271795 - protein, 1517 aa, Zea mays
  unsure (1)..(1517): unsure at all Xaa locations
  Clone ID: MRT4577_17946C.1.pep
MASNNNVHIGKPPHFDGNNYDYWKIRMSMHLRAMGGKIWPIVRDGFVVLKEDEPSVSDNENILTNDQAMNVFYDALDINEFNRIKNLTTAHEIWVKLMEIHEGTTIVKSAKLYVCKGKFEQFIMKEDESVSDMFNRLNEIVNELKGLGFNVPDVDFTHKFLRSLPEKYETIVTMLVRSDLSTTSPTEVLGEILTQDIFKKSQADALSLAKKVKNESIALKAKASKAIEKEDSNDEENESESDGDMALFVRKFNKFMKMKRGQPRRGQTSRRNAFNDRKCFECGEPGHIAMNCPSKKKKGKDESDKKKKKYYNKKKDGKAYLVEWDSDDSSDDDDDDTSSKLNAGIAIKEAPSLFSSPHCLMAKGDAKALKELYKNLQVSFEELKTSHNDLKENCEKLADAQKSSIVHEVEVVTKDVGVTCDLLDSLTSEPLPTNSICDKCKISLNDNIALDESKIIVENEVLVDRISTLTHDLEKAYGGKXIWISYWEVNDALLTVKVLDMXKKGKNAFVKQKTLFVKECDKVNYKAGGNHWVLDSGCTQHMTGDMKMFTQMSDEDCSNYDSITFGDNRKGKVKGLGKIAISNDHSISNVLLVESLNFNLLSVAQLCDLGFCCNFTVEDVIISSVDGSNLKFKGFRHENLYLVDFSSNEAKLTTCLFSKASLGWLWHRRLGHVGMKQLNRLTKHDLVRGLKDVKFEKNKLCSSCQAGKQVANTHPNKSQMSTHRPLELLHMDLFGPTSFVSIGGNSYCLXLWMTIQDLLGFIFYETNPMCLKHSSHLLYWLKINLISTSKRLEVIMGRNSKMQELINIVMTRVSSMNSLPNIPQKQNGIVERKNRTLIDMARSMLAEYNISDSYWAEAINTACHSSNRLYCHKLLKKTPYELLIGRKPNISYFRVFGCKCYILRKGSRLSKFEKKCDEGFLLGYSSNSKAYRVFNKTHGIIEEAYDVEFDETNGSQDESENLDDVGGTQLINAMKTMAIGEIKPKEDDDENSVVVIPSSSTINEEDHQSQQLNETIDTHDQGTSRPPIPPNASTSNYQTVSRIHHSIVKDHPVDQIVGDISKGVQTRSRIASFCEHFSFVSCVEPNRVDEALLDVDWVNAMHEELNNFARNEVWELVERPKNHNVIGTKWVFRNKHNEDGVVVRNKARLVAQGYTQIEGLDFGETFAPVARLEAIRILLAYACAHNIKLYQMDVKSAFLNGKISELVYVEQPPGFEDPKRPNHVFKLSKALYGLKQAPRAWYERLRDFLFSKDFKIGKVDTTLFTKRIGKDLFVCQIYVDDIIFGSTNELFCEEFGKMMSKEFEMSMIGELSFFLGLQIKQLKDGIFISQSKYLKDMLKKFGLENAKPIKTPMATNGHLDLDEGGTMVDQKLYRSIIGSLLYITASRPDVMFSVCMCARFQASPREIHLKAAKRILRYLKYTPNIGLWYPKGAQFELIGYSDSDYAGCKVDRKSTSGCCQFLGRSIVSWSSKKQNSVALXYRRGGIYIGRKLLRSTIMDETNLIGLWNYFQECASYV

SEQ ID NO: 271796 - protein, 71 aa, Zea mays
  Clone ID: MRT4577_179470C.1.pep
MRSFSVDSEKIVLPGDKSEIDGWHTIQFAGGKNSPTKFQLTLYWSSSKPSEREAKQAADAPLLVKLRTVCY

SEQ ID NO: 271797 - protein, 60 aa, Zea mays
  Clone ID: MRT4577_179471C.1.pep
VRRHVRVMVQRMHAWRSRRCYIMSLMGSLVNVSRALLKSVNIVCSSRRSASCVAVDHERQ

SEQ ID NO: 271798 - protein, 52 aa, Zea mays
  Clone ID: MRT4577_179472C.1.pep
PTRPVRTVGSKSERGHSEDSLMCGEGLGLFTELSDRELSLYTSILARHFNDD

SEQ ID NO: 271799 - protein, 182 aa, Zea mays
  Clone ID: MRT4577_179473C.1.pep
MADFSKESCPSVKNILLLDSEGKRVAVKYFSDDWPTNASKLAYEKSVFTKTLKTNARTEAEITLFDGYIVVYKFVHDLHFFVTAGDDENELILASVLHGFSDSVGLLLRGDVEKRTALENLDLILLCIDEIVDGGIILETDANTIAGKVATNAVDGSVPFSEQTISQALATAREHLARSLLK

SEQ ID NO: 271800 - protein, 73 aa, Zea mays
  unsure (1)..(73): unsure at all Xaa locations
  Clone ID: MRT4577_179474C.1.pep
TSYFSSSCFTAQPKHKEGXQHLGRIHHTTXPSPKNKRQNHTHAKPPLDKRKATYIQRSNPTTNRHRQRRTLTA

SEQ ID NO: 271801 - protein, 134 aa, Zea mays
  Clone ID: MRT4577_179475C.1.pep
GTAIHHGGFLQAEITLFDGYIVVYKFVHDLHFFVTAGDDENELILASVLHGFSDSVGLLLKGDVEKRTALENLDLILLCIDEIVDGGIILETDANTIAGKVATNAVDGSVPFSEQTISQALATAREHLARSLLK

SEQ ID NO: 271802 - protein, 90 aa, Zea mays
  Clone ID: MRT4577_179476C.1.pep
TKGGAQRFAETCFSPVGLGPPFSNPWLGGFPPWFLNLGILFGPPLPRLYLCPGFFCPMNLSFRVVIKDKVVFLFLVRCLDRLLKEKNNPV

SEQ ID NO: 271803 - protein, 182 aa, Zea mays; identical to SEQ ID NO: 271799
  Clone ID: MRT4577_179477C.1.pep

SEQ ID NO: 271804 - protein, 182 aa, Zea mays; identical to SEQ ID NO: 271799
  Clone ID: MRT4577_179478C.1.pep

SEQ ID NO: 271805 - protein, 64 aa, Zea mays
  Clone ID: MRT4577_179479C.1.pep
QSSFTYYMIFLMKKSRCFILIYSVSHFRQKWINRMMNSKEMRKIRHREVKVDTDPNSHKIMTSP

SEQ ID NO: 271806 - protein, 1759 aa, Zea mays
  unsure (1)..(1759): unsure at all Xaa locations
  Clone ID: MRT4577_17947C.1.pep
MASNNNVHIGKPPHFDGNNYDYWKIRMSMHLRAMGGKIWPIVRDGFVVLKEDEPSVSDNENILTNDQAMNVFYDALDINEFNRIKNLTTAHEIWVKLMEIHEGTTIVKSAKLYVCKGKFEQFIMKEDESVSDMFNRLNEIVNELKGLGFNVPDVDFTHKFLRSLPEKYETIVTMLVRSDLSTTSPTEVLGEILTQDIFKKSQADALSLAKKVKNESIALKAKASKAIEKEDSNDEENGSESDGDMALFVRKFNKFMKMKRGQPRRGQTSRRNAFNDRKCFECGEPGHIAMNCPSKKKKGKDESDKKKKKYYNKKKDGKAYLVEWDSDDSSDDDDDDTSSKLNAGIAIKEAPSLFSSPHCLMAKGDAKVKIITDLNDVNDDDDIDDVDDDGYSYDDLVRMLGEADDYMHKEKEKFKALKELYKNLQVSFEELKTSHNDLKENCEKLGNAQKSSIVHEVEVVTKDVGVTCDLLDSLTSEPLPTNSICDKCKISLNDNIALDESKIIVENEVLVDRISTLTHDLEKAYGGLGYVPKKGKNAFVKQKTLFVKECDKVNYKAGGNHWVLDSGCTQHMTGDMKMFTQMSDEDCSNYDSITFGDNRKGKVKGLGKIAISNDHSISNVLLVESLNFNLLSVAQLCDLGFCCNFTVEDVIISSVDGSNLKFKGFRHENLYLVDFSSNEAKLTTCLFSKASLGWLWHRRLGHVGMKQLNRLTKHDLVRGLKDVKFEKNKLCSSCQAGKQVANTHPNKSQMSTHRPLELLHMDLFGPTSFVSIGGNSYCLVIVDDYSRFTWVYFLRDKSNVFETFKSFAILAQNQFDFDIKKVRSDNGSEFKNARIDQYCDDKGIKHEFSSKYTPEQNGIVERKNRTLIDMARSMLAEYNISDSYWAEAINTACHSSNRLYCHKLLKKTPYELLIGRKPNISYFRVFGCKCYILRKGSRLSKFEKKCDEGFLLGYSSNSKAYRVFNKTHGIIEEAYDVEFDETNGSQDESENLDDVGGTQLINAMKTMAIGEIKPKEDDDENSVVVIPSSSTINEEDHQSQQLNETIDTHDQGXLQDLQFLXASTSNYQTVSRIHHSIVKDHPVDQIVGDISKGVQTRSRIASFCEHFSFVSCVEPNRVDEALLDVDWVNAMHEELNNFARNEVWELVERPKNHNVIGTKWVFRNKHNEDGVVVRNKARLVAQGYTQIEGLDFGETFAPVARLEAIRILLAYACAHNIKLYQMDVKSAFLNGKISELVYVEQPPGFEDPKRPNHVFKLSKALYGLKQAPRAWYERLRDFLLSKDFKIGKVDTTLFTKRIGKDLFVCQIYVDDIIFGSTNELFCEEFGKMMSKEFEMSMIGELSFFLGLQIKQLKDGIFISQSKYLKDMLKKFGLENAKPIKTPMATNGHLDLDEGGTIVDQKLYRSIIGSLLYITASRPDVMFSVCMCARFQASPREIHLKAAKRILRYLKYTPNIGLWYPKGAQFELIGYSDSDYAGCKVDRKSTSGCCQFLGRSLVSWSSKKQNSVALSTAEAEYISAGNCCAQLLWMKQTLLDYGIIFKNVPLMCDNESAVKLATNPVQHSRTKHIDIRHHFLRDHVGKGDISIYSIGTDDQLADIFTKPLDETRFCSLRSEMNVIDISNKVGRDWQNEYQAADRPPMDRGPSAASGNGQSEQPRRLSESRFDSNWDALNSEFSDFRDQIHTNVTDPIMSRLNNMQQSFQDNMGALSSQFDNLSTTDNLHDISQRQQQLQQDFGQFSSLFDTFSTHYYNMHPPPSDQ

SEQ ID NO: 271807 - protein, 83 aa, Zea mays
  Clone ID: MRT4577_179480C.1.pep
MAAAALRVQLEALLENMFATGMVDEQFRQLQSLQEGGSASGFVAEVATLFIDDADRIIADIGSLLDQPVVDFDKVDAHVHQLK

SEQ ID NO: 271808 - protein, 552 aa, Zea mays
  Clone ID: MRT4577_179481C.1.pep
GLGKTLQASAIVASDIAEARARNDEKILTSLIICPSTLVAHWEYEIEKYIDSSILKPLQYVGSSQDRVTLRSQFDKVNVIITSYDIIRKDIDFLGNITWNYCVLDEGHIIKNSRSKITFAVKQLKAQHRLILSGTPIQNNVLELWSLFDFLMPGFLGTEKQFQAAYGKPLLAAKDSKCSAKDAEAGILAMEALHKQVMPFLLRRTKDEVLSDLPEKIIQDRYCDLSLLQLKLYDKFSSSNAKDEISTIVKANELEESAPQPKATRHVFQALQYLLKLCSHPLLVTGENPPNHLVDLLNEIGLGSGSELHELHHSPKLVALQEILQECGIGSEISSPDASTAVGQHRVLIFAQHKAFLDIIEKDLFQSHMRSVTYLRLDGSVDPEKRFEIVKAFNSDPTIDVLLLTTHVGGLGLNLTSADTLVFVEHDWNPMKDLQAMDRAHRLGQRKVVNVHRLIMRGTLEEKVMSLQRFKVSVANAVINAENSSLKTMNTDQLLDLFTSTPASRKASDEQSKRKSGGKGLKSILNGLDELWDQSQYADEYDLNQFLAKLNG

SEQ ID NO: 271809 - protein, 73 aa, Zea mays
  Clone ID: MRT4577_179482C.1.pep
AGPQHPTPVSIHPSPLVPPVPILASSRSPSRSTCPQAKTFRARRRSTRGRGGASAGRVSEVFASSDLSRLVPN

SEQ ID NO: 271810 - protein, 35 aa, Zea mays
  unsure (1)..(35): unsure at all Xaa locations
  Clone ID: MRT4577_179483C.1.pep
CVTIDLSLFFRLRVFVDVFQNKVGVCSYSAXXPLV

SEQ ID NO: 271811 - protein, 76 aa, Zea mays
  Clone ID: MRT4577_179484C.1.pep
MAAAAPADAKAEAAKMDLLEDDDEFEEFEIDQEWDDKEDGNEAVQQWEDDWDDDDVNDDFSLQLRKELEGGNTQKS

SEQ ID NO: 271812 - protein, 206 aa, Zea mays
  unsure (1)..(206): unsure at all Xaa locations
  Clone ID: MRT4577_179485C.1.pep
MQRAVQAVRSHGNVLKYAVLQHISAPKPAMLPAAFSRFMSVSSARLEDRGFETATVADVLKSKGKSADGSWLWCTTEDSVYDAVKSMTQHNVGALVVVKPGQNKSIAGIVTERDYLRKIIVQGRSSKSTKVGDIMTEENKLITVNPDTKVLQAMQLMTENRVRHIPVIDGTGMLGMVSXIGDVVRAVVAEHREELNRLNDYIQGGY

SEQ ID NO: 271813 - protein, 133 aa, Zea mays
  Clone ID: MRT4577_179486C.1.pep
MASKAVLFLALNLLFFTVANACGNCPTPTPPVEPPPPPPAATPPPSSSGKCPLNALKFGVCADVLGLVKGEVGKVPAEPCCTLIKGLADFEAAVCLCTAIKANVLGVVVDVPIKLSALVNYCGKCVPKGYMCA

SEQ ID NO: 271814 - protein, 128 aa, Zea mays
  unsure (1)..(128): unsure at all Xaa locations
  Clone ID: MRT4577_179487C.1.pep
LLLDIQRRLKECPPSCQLSDLIFAGKHIWDETTRGHDSIQNETTLRLVLQLGGDCKNRHICTXTQDAQYQDQPLEGVYLRAVXLYKVAIFTNNWTHLRSSRPFSQSTPLPCMRTEFCRHYCEKYLLSY

SEQ ID NO: 271815 - protein, 134 aa, Zea mays
  unsure (1)..(134): unsure at all Xaa locations
  Clone ID: MRT4577_179488C.1.pep
MASKAVLFLALNLLFFTVANACGNCPTPTPPVEPPPPPPAATPPPXSSSGKCPLNALKFGVCADVLGLVKGEVGKVPAEPCCTLIKGLADFEAAVCLCTAIKANVLGVVIDVPIKLSALVNYCGKCVPKGYLCA

SEQ ID NO: 271816 - protein, 43 aa, Zea mays
  Clone ID: MRT4577_179489C.1.pep
MYFRSDFVALKKKKKKKKKKKKKKKKKKKKKKKKKKKRASILQ

SEQ ID NO: 271817 - protein, 302 aa, Zea mays
  Clone ID: MRT4577_17948C.1.pep
MKSSDGNQIKLQPMWRKVAYGGRQSGYDDNYTDESFLEEMVMNANVVKRDLLKVMIDSVSISQYLCIVALVVSTWTLTLNLDIDESTLLKLDVGLLLVGFWVLLLTTCPFSLKLLTKYVLNISFFISGLYVLAPIYHTLTRSISSDSIWALAVSLLLVHLFLHDYSGSTIRPPGALNNPKLTSNISLNASIVASVLVASRLPSRLHVFAIMLFSLQVFLFAPLITFCVKKYHFRLHLLFSFTLMAVALSVTYQLHRMFFTVLLALLVFVSIVCPYWLIRIQEYKFEINGPWDEAKLCFDITE

SEQ ID NO: 271818 - protein, 132 aa, Zea mays
  Clone ID: MRT4577_179490C.1.pep
MASKAVLFLALNLLFFTVANACGSCPTPTPPVEPPPPPPATPPPSSSGKCPLNALKFGVCADVLGLVKGEAGKVPAEPCCTLIKGLADFEAAVCLCTAIKANVLGVVIDVPIKLSALVNYCCKFVPKGYLCA

SEQ ID NO: 271819 - protein, 132 aa, Zea mays
  Clone ID: MRT4577_179491C.1.pep
MASKAVLFLALNLLFFTVANACGNCPTPTPPVEPPPPPPATPPPSSSGKCPLNALKFGVCADVLGLVKGEAGKVPAEPCCTLIKGLADFEAAVCLCTAIKANVLGVVIDVPIKLSALVNYCGKCVPKGYLCA

SEQ ID NO: 271820 - protein, 60 aa, Zea mays
  Clone ID: MRT4577_179492C.1.pep
GENVLFFVYYSFDAFRGEGPTYSPFNLGCIIYTPPPVIWLKQWLILYHPKKVALAKPLKC

SEQ ID NO: 271821 - protein, 59 aa, Zea mays
  Clone ID: MRT4577_179493C.1.pep
GSAVGVPPSPLGPLWCSAIQERRIPVFWCSRCLRLIFWCGGKLDCVPKKTPPEEMIVSG

SEQ ID NO: 271822 - protein, 133 aa, Zea mays
  Clone ID: MRT4577_179494C.1.pep
MASKAVLFLALNLLFFTVANACGSCPTPTPPVEPPPPPPAATPPPSSSGKCPLNALKFGVCADVLGLVKGEAGKVPAEPCCTLIKGLADFEAAVCLCTAIKANVLGVVIDVPIKLSALVNYCGKCVPKGYLCA

SEQ ID NO: 271823 - protein, 88 aa, Zea mays
  unsure (1)..(88): unsure at all Xaa locations
  Clone ID: MRT4577_179495C.1.pep
IGLPQQPRYRTIIPQCSHAYIASILTTYLSPQIAPTXENPILEPYRIQHAITSRILPLSPLFLQQTSYLXQQIPMEHLLSQNIMIQQL

SEQ ID NO: 271824 - protein, 144 aa, Zea mays
  Clone ID: MRT4577_179496C.1.pep
PDASFMVSNFWSGDKRSRISDILSEYDMTVMDYPQQYEGCPLLQLEMIHHFLKSCENWLSVEGQHNMLLMHCERGGWPVLAFMLAGLLLYRKTYTGEQKTLEMVYKQARRDFIQQFFPLNPQPSHLRYIFRTLIHSNLLLPSRR

SEQ ID NO: 271825 - protein, 127 aa, Zea mays
  Clone ID: MRT4577_179497C.1.pep
VRGRVYPGGGEPGRWHFRLFPLWAFWPGENFGPPNLVAPGVWGKNHLTFRIWGGPVPPPFPHIKKKKLGGGFPPPPQIGGPKKKKPFFQKKKKKKKKKKKKKKKKKKKKKKKKKKKKKKLKKNPPTP

SEQ ID NO: 271826 - protein, 98 aa, Zea mays
  Clone ID: MRT4577_179498C.1.pep
WLFGFKFCSPKVLIRSPGLLFFRPNWFAWGLGPRLLAMARLFPSPGFAPSGPGGRGRIQALFPLLRGPSWMSFGLVVTLLAWVGPRLGSFFGPTRYAS

SEQ ID NO: 271827 - protein, 133 aa, Zea mays
  Clone ID: MRT4577_179499C.1.pep
EDIALSTCSKSSMSEERSAIQLAKKISSKPNVTSSRGSPFNQRSIQIQATGRPSATATQLVPSKVEETTLRASHVHIPAASASREDGGGAEDGGDGSTTGGEGSSDGRVAWLSTWPMKRGRAGEGGGHPRLFR

SEQ ID NO: 271828 - protein, 1770 aa, Zea mays
  Clone ID: MRT4577_17949C.1.pep
MASNNNVHIGKPPHFDGNNYDYWKIRMSMHLRAMGGKNWPIVKDGFVVLKEDEPSVSDNENILTNDQAMNVLYDALDINEFNRIKNLTTAHEIWIKLMEIHEGTTIVKSAKLYVCKGKFEQFIMEEDASVSDMFNRLNEIVNELKGLGFNVPDVGFTHKFLRSLPEKYETIVTMLVRSDLSTTSPTEVLGEILTQDIFKKSQADAISLAKKVKNESIALKDKASKAIEKEDSDDEENESESDGDMALFLKKFNKFIKMKRGQLRRGQTSRRNAFNDRKCFECGEPSHIAMNCPNKKKKGKDGDDKKKKKFYNKKKDGKAYLVEWDSDDSSDDDDDDTSSKLNAGIAIKEAPSLFSSPHCLMEKGDANADDYMHKEKEKFKTLKESYKNVQVSFEELKTSNNNLKENCEKLVEAQNSSIVHEVVVVTEDVGVTCDLLDSPTSEPLPTNSICDKCKISLMNDNIALDESQIIVENEVLVDRVNALTHDLEKAYGGKAKLDFILGSQRCSLNREGLGYVPKKGKNAFIKQKTLFVKECGKVCHKKGHIKKICPKLKNVSYTCFEHCYVLSHNAKGVHAKFVSTSIVGNKKAIWVPKTLVTNIQGPKQVWVNYKAGGNHWVLDSGCTQHMTRDMKMFTQMSEEDCSNYDSITFGDNRKGKVKGLGKIAILNDHSISNVLLVESLNFNLLFVAQLRDLGFSCNFTVDDVIISIVDGSNLKFKGFRYENLYLVDFSSSEPKLTTCLFSKASLGWLWHRRLGHVGMKQLNRSTKHDLVRGLKDVKFEKNKLCSSCQAGKQVANTHPNKSQMSTHRPLELLHMDLFGPTSFVSIGGNSYYLVIVDDYYRFTWVYFLRDKSNVFETFKSFAILAQNQFDFDIKKVRSDNGSEFKNTRIDEYCDDKGIKHELSSKYTPEQNGIVERKNRTLIDMARSMLAEYNVSDSYWAKAINTACHSSNRLYCHKLLKKTPYELLIGRKPNISYFRVFGCKCYILRKGSRLSKFEKKCDEGFLLGYSSNSKAYRVFNKTHGIIEEAYHVEFDETNGSQDESYNLDDVSGTQLKNAMKTMAISEIKPKKDDDENSVVVIPSSSTLNEENHQSQNNDEIMDTHDQDTSSHSVPPHASTSNYQTVSRIHHSIVKDHPVDQIVVDINEALLDVDWVNAMHEELNNFTRNEVWELVERPKNHNVIGTKWVFRNKHNEDGLVVRNKARLVAQGYTRIEGLDFGERFAPVARLEAIRILLAYACAHNIKLYQMDVKSAFLNGKISELVYVEQPPDFEDPKRPIHVFKLSKALYGLKQAPRAWYERLRDFLLSKDFRIGKVDTTLFTKIIGKDLFVCQIYVDDIIFGSTNELFCEEFGKMMSKEFEMSMIGELSFFLGLQIKQLKDGIFISQSKYLKDMLKKFGLENAKPIKTPMATNGHLDLDEGASPREIHLKAAKRILRYLKYTPNIGLCGLGGLRKKLAGRFKSKRPRVDDADYNPTTDSEAQSLAGGSVSMDTEDVPHAHPDYPIEITGWPYPKRRTDFSEMAVKQLLATAEIDIDEESITWMTSFKRYYATFAEFATPNSLDYDTISAGIDLYTEDNFEEFVQFYEPARLGIPRRFGETVELRHHPAVINKISRVTILPKSGDKSKIRDKFWNIIHHVMNGEVMNVVLFMMRQLNDLKMDKNQNLAYAPYIMVLIKAKTKFEGHCEIVHTPFRPLKNEIGFLTRPLTPFPDDEEEAGDDAGEAPEADAEQMPPPLPPPQPQQYWQPGPGYFDPYFQNMQQGLQTHMDGRF

SEQ ID NO: 271829 - protein, 44 aa, Zea mays
  Clone ID: MRT4577_1794C.1.pep
QIRVYSSCCASFRRGSSLSVRMPARSALKPARDESPPMAAEPCR

SEQ ID NO: 271830 - protein, 116 aa, Zea mays
  Clone ID: MRT4577_179500C.1.pep
PPALMDGQHRGQEQEVCSGRRGSLVIIIRHASPGGRIVAAKEHATYRWLERAESYRHGPRPLEPAVGSISQRVSFSARASAGDRLMSHDPARMPRSLVGRGRIIVHTARTSGRTRE

SEQ ID NO: 271831 - protein, 156 aa, Zea mays
  Clone ID: MRT4577_179501C.1.pep
LEAGRTLPCTFHPPGNHACRSRDSRDALLPSPRSPICVHAHPPGSHRLDSRRPAGLTYQPARGSLMMHLGAEAEHLADADAADRAGSAIRANEASGEDARWGRRRAASTTAPSLRRSRGASADTHHVRRARGGRQTAREVWRPELPVLRREGPHAA

SEQ ID NO: 271832 - protein, 84 aa, Zea mays
  Clone ID: MRT4577_179502C.1.pep
NGAWDPVSFFSQMTWESNFLRRATTQLGALASITRGCLISKKNAKEKNLSKRKSSNEPYKSLFLVTGAFNGVGRGVDLFWRALQ

SEQ ID NO: 271833 - protein, 198 aa, Zea mays
  unsure (1)..(198): unsure at all Xaa locations
  Clone ID: MRT4577_179503C.1.pep
PRVRESSANGFTLVGLRTIDIAKSTVEGMCPGKVSCADILAFAARDAAVAAGLPRYEVAAGRRDSMRSNMDDLPGNFPVPGHHVXAHSIGGAHCFMFSNRIYNFSQEADVDPTLLPEYAKWLRQMCPPRQPGDDPEQAPKVKFDAQTEERLDVSCYSELLARRGLLTSDNALIEDPQTMAMEENFARNEPLLQQKFSP

SEQ ID NO: 271834 - protein, 421 aa, Zea mays
  Clone ID: MRT4577_179504C.1.pep
MRGNNMPRHTSPFLFALLASAATLLSVGDALVVDGLQVGFYGKTCPAAEGVISDIVNNEIAMDRGISPGLIRLFFHDCFITGCDASILLDESPAGDVPEKESSANGFTLVGLRTIDIAKSTVEGMCPGKVSCADILAFAARDAAVAAGLPRYEVAAGRRDGMRSNMDDLPGNFPVPGHHVPRLTELFSQRGLSQEDLVLLSGAHSIGGAHCFMFSNRIYNFSQDADVDPTLDPEYAKWLRQMCPPRQPGDDPEQAPKVKFDAQTGERLDVAYYSELLARRGLLTSDNALIEDPQTRAMVENFARNEPLWQQKFSQAMQKVGMLDVLIGEGKGQVRKQCRLVNGQEKEEKQQQPQEEQEEQQPPELEEEEQQQPHQPQLPWFLQRQRPPVLLPWLRPHPRPRRPFRKHPVADLVNGFFRGFH

SEQ ID NO: 271835 - protein, 169 aa, Zea mays
  unsure (1)..(169): unsure at all Xaa locations
  Clone ID: MRT4577_179505C.1.pep
VPAAASGFGLCAKVLVATRGLSTAGNAAEVASDSDDSTSPAVEHPPRIKFKRPDKTARHIIIILNKEAVEKVRSERAIPDVQPGCIIQMRLQVPENKRRESTLKGIVIGRRNXGINTTFRLRRLVAGVGVESVFPLYSPNIKEIKVLDRKKVRRAKLYYLRDRMNALKR

SEQ ID NO: 271836 - protein, 126 aa, Zea mays
  unsure (1)..(126): unsure at all Xaa locations
  Clone ID: MRT4577_179506C.1.pep
MLSHLGACRSPWYGPYRVLYLGPVSGKPPSYLTAEFPGNYXWDTAGLSAYPETFAKNXELEVMHSSWAMLGALGCIFXELLYRNGVKIGEAXIWFKADSQIFIXGRVDYLGNPSLIHAQRILAILG

SEQ ID NO: 271837 - protein, 96 aa, Zea mays
  Clone ID: MRT4577_179507C.1.pep
GKKKDQNKKTGAKKKMGTAKANGSTKKRGDTPPSMSTKTGPKNAGGGGKPKNPGFFFFKHTKQNPFMGTSPAPLIIGQPPPQARRKKNKSLGARPT

SEQ ID NO: 271838 - protein, 94 aa, Zea mays
  unsure (1)..(94): unsure at all Xaa locations
  Clone ID: MRT4577_179508C.1.pep
SALSSAXAWADAWGKLRIREGACGRSSFWFIVFALSFSAXHLCVQVCSFLLFFFSLXRPGGGGGGIFFFLFFSFFXCPCFFFFFSLFFFVSFFF

SEQ ID NO: 271839 - protein, 112 aa, Zea mays
  Clone ID: MRT4577_179509C.1.pep
FGTKQPRALEENNGNGRPRLESRRISGGDLFSSPPLPFHRHRFSNPAGFGATGSVVCVGKYSYFSSLLSSPRAVSHLVSQLDITCLYKQLTFVLISFSILCLALTLHFFYNL

SEQ ID NO: 271840 - protein, 59 aa, Zea mays
  Clone ID: MRT4577_17950C.1.pep
FHTSISSILFVLSQVLEKGNSCRIFWHELCSNNSFFYCSKERFRVEEQDKKGASVCCYG

SEQ ID NO: 271841 - protein, 48 aa, Zea mays
  Clone ID: MRT4577_179510C.1.pep
SQVIILYLTLSDLRLVMILDMKFCCMYTASFICKELIVFSSDYKLSSF

SEQ ID NO: 271842 - protein, 48 aa, Zea mays
  Clone ID: MRT4577_179511C.1.pep
KQNPTTYLYSVFNMAFGFIVWLLFLLILYYSDYILLFHHYMFSSVFSL

SEQ ID NO: 271843 - protein, 55 aa, Zea mays
  Clone ID: MRT4577_179512C.1.pep
SFELNLRRSHDLIPPNISSSTSNSRTESQITQKFPPKREQNEPALAKMPNEPAPL

SEQ ID NO: 271844 - protein, 137 aa, Zea mays
  unsure (1)..(137): unsure at all Xaa locations
  Clone ID: MRT4577_179513C.1.pep
GGHQHAIELSPXDKYYGAKVIMNERAPKIQQPNELSLSQLLEFSXGSFWEDLNSLDVWXQVIPDLYGDNNTXRLFTYWTCDANQATGCYNMLSSWFIQINNQIDMGANICPSSNYSGFQADISILICEDSIEGYWWM

SEQ ID NO: 271845 - protein, 90 aa, Zea mays
  unsure (1)..(90): unsure at all Xaa locations
  Clone ID: MRT4577_179514C.1.pep
RTKGPQHCTQGPAPPITLLVHTVSAYLTKTFNPRIAGANFFXQPPKKNXQTTKQTXPKPTNPGTRXTKTPRXEGAXTKKKKATRPPGGGP

SEQ ID NO: 271846 - protein, 151 aa, Zea mays
  Clone ID: MRT4577_179515C.1.pep
PTDEDLSCLRAIFGIHLFPRNCPLDFHLQLSPKQRLRQKSSPMSRRPPPSHPLRQHRRTQTPHPDLPAARGAPPRRPPHRRTRSTRAGCPPGTPPCRKLLRNRRLGFGAIRRWGSNPEQTVAALLRPAGLEGGVRLQEDGDERDGRGGGSR

SEQ ID NO: 271847 - protein, 93 aa, Zea mays
  unsure (1)..(93): unsure at all Xaa locations
  Clone ID: MRT4577_179516C.1.pep
MTEEKHHHHMFHPRKAEEEGASGEADYKEKEKHQKHMKKLGELGAIXAGAYALHEKREAKKDPDNEHGHRVKEEVAAVAVVGSDXFAFHEHYF

SEQ ID NO: 271848 - protein, 91 aa, Zea mays
  Clone ID: MRT4577_179517C.1.pep
MAGYPEDNQHALNGYDDEEVDEEGHPGRRGGRDGASGYGDAGGEDVRGAGGDSSGKIFVGGVAWETTEESFSKHFEKYGAITDSVIMKNKP

SEQ ID NO: 271849 - protein, 203 aa, Zea mays
  unsure (1)..(203): unsure at all Xaa locations
  Clone ID: MRT4577_179518C.1.pep
VKRRYIIFAFCRKIFVGGVAWETTEESFSKHFEKYGAITDSVIMKDKHTKMPRGFGFVTFSDPSVIDKVLEDEHVIDGRTVEVKITVPREEMNTKDGPKTRKIFIGGLPPSLTEGXVCYQQTNVEFILFMILRRHKISYELKDHFSLYGKVLEHQIMLDHSTGRSRGFGFVTFESEDSAERVISEGRMRDLGGKQVRFLIFLV

SEQ ID NO: 271850 - protein, 177 aa, Zea mays
  unsure (1)..(177): unsure at all Xaa locations
  Clone ID: MRT4577_179519C.1.pep
SLPASDPVPLISLVAWARLQPWFVPSDDLSSLLAARLPPATHSSELLALFDDTLGLSDLATFPKTFNAVVSALATHXLLEPAFYCFKRLRDVSFRGLETPAYNALLSLLLTRGLAFKAFEVLDEMATSGCALDEGTYQLAVPALARAGRIDAPPXMFREXEPPGAIGRAAGGAGFLC

SEQ ID NO: 271851 - protein, 1565 aa, Zea mays
  Clone ID: MRT4577_17951C.1.pep
MAKGDAKVKIITDLNDIKDDDDIDDVDDDGYSYDDLVRMLGEADDYMHKEKEKFKTLKELYKNLQVSFEELKTSHNDLKENCEKLADAQKLSIVHEVEVVTKDVGVTCDLLDSLTSEPLPTNFICDKCKISLNDNIALDESKTIVENEVLVDRINTLTHDLEKAYGGVHAKFVGTSIVGNKKKAIWVPKTLVTNIQGPKQVWVNYKAGGNHWVLDSGCTQHMTGDMKMFTQMSEEDCSNYDSITFGDNRKGKVKGLGKIAISNDHSISNVLLVESLNFNLLFVAQLCDLGFCCNFTVEDVIISSVDGSNLKFKGFRHENLYLVDFSSNEAKLTTCLFSKASLGWLWHRRLGHVGMKQLNRLTKHDLVRGLKDVKFEKNKLCSSCQADKSNVFETFKSFAILAQNQFDFDIKKVRSDNGSEFKNARIDQYCDDKGIKHEFSSKYTPEQNGIVERKNRTLIDMARSMLAEYNISDSYWAEAINTACHSSNRLYCHKLLKKTPYELLIGRKPNISYFRVFGCKCYILRKGSRLSKFEKKCDEGFLLGYSSNSKAYRVFNKTHGIIEEAYDVEFDETNGSQDESDNLDDVGGTQLINAMKSMAIGEIKPKEDDDEDSVVVIPSSSTINEEDHQGQQLNETMDTHDQGTSRPSVPLNASTSNYQTVSRIHHSIVKNHPVDQIVGDISKGVQTRSRIASFCEHFSFVSCMEPNRVDEALLDVDWVNAMHEELNNFARNEVWELVERPKNHNVIGTKWVFRNKHNEDGVVVRNKARLVAQGYTQIEGLDFGETFAPVARLEAIRILLAYACAHNIKLYQMDVKSAFLNGKISELVYVEQPPGFEDPKRPNHVFKLSKALYGLKQAPRAWYERLRDFLLSKDFKIGKVDTTLFTKRIGKDLFVCQIYVDDTIFGSTNELFCEEFGKMMSKEFEMSMIGELSFFLGLQIKQLKDGIFISQSKYLKEMLKKFGLENAKPIKTPMATNGHLDLDEGGTMVDQKLYRSIIGSLLYITASRPDVMFSVCMCARFQASPREVHLKAAKRILRYLKYTPNIGLCGFGGLRKKLAGRFKSKRPRGNDDDYTPTTDSEAQSSAGGTESMDAEDFPHVHPDYPIDTQGWTYPKRRFSMAEYCSRRTVNQYTLPSDTNIQFFHTQLQFDVFWGTLVDTNFHKHQVIDWSFLLGQSVMEGLIPKFETCGLYQFMGQRTDFNEMAVKQFLATSEIDIEEESITWMTGFKRYSASFADFAAANSLNYGTISAGLDLYTEDNFEDFVQFYEPARLGIPRRFGETAGLRHHPAVINKIARVTILPKSGDKSKIRDKFWNIIQHIMNGEVMNIVLFMMRQLNDLKMDKNQNLAYAPYIMALIKSKTRFEGPCEIVHTPFMPFKNEIGFLTRPLTPFPDDEEDPGYEGGAAPNVEGQQMPPPPPPPQPQHYWEPAPGYFDPYFHTMQQGLETHIDTRFEGLMTHVDHRLDDMQSRFDNNWDALNSEFSDFRDQIHTNVTDPIMTRLNNMQQSFQDNMGALSSQFDNLSTNDNMHDISQRQQQLQQDFSQFSSLFDTFSTHYYNMHPPPSDQ

SEQ ID NO: 271852 - protein, 42 aa, Zea mays
  Clone ID: MRT4577_179520C.1.pep
NKLKHFFKGWGFLSFAFEKLNFLSFKVCKFFNFWWVQFFYPY

SEQ ID NO: 271853 - protein, 62 aa, Zea mays
  Clone ID: MRT4577_179521C.1.pep
RVEPQKPPPQGATREGQTPRKNLGHQGFTQMGKKGGFNPPEKSGGKGPPREGVTIEESKFPK

SEQ ID NO: 271854 - protein, 97 aa, Zea mays
  Clone ID: MRT4577_179522C.1.pep
RGGPNRGVLSVNEFTREGTCDGHRTLKLEIQKTPYALSKVSRSPDDTKHVVRNDMQNNTDYSIPNIDSYDQAAPLGSCTDGAHVSVNQERGGIYCDI

SEQ ID NO: 271855 - protein, 111 aa, Zea mays
  Clone ID: MRT4577_179523C.1.pep
IALTSINPSKSNTALNSRSPRIKGSVAWDSMRRRRVLAYIPAADACRCASEAPKGKGSRSRCRLGGPGNQRGTASTGPPRHLVSASDEKTKSSSPLFKTCRSWTSIALALG

SEQ ID NO: 271856 - protein, 53 aa, Zea mays
  Clone ID: MRT4577_179524C.1.pep
PKKHYHLVVKGAVDDLYKIYRFVLFLVMAFHGCRVTQGNYVGKPHPFKTNAAS

SEQ ID NO: 271857 - protein, 175 aa, Zea mays
  Clone ID: MRT4577_179525C.1.pep
GGPPYGVGSGAIPWPLLGSGPCVFTRFFSPRGGPLKTSSVWVVPGSRAFIPGQGCPWTGPSEGVLWFPGGVAPFKALLVPWVKAYSRSGNNPWWRAPGDPEPPASRVNTKNPWVPPPRGVGKKARVRFPWPLFPPLLLPKVTKKKNTQKKKKKKKKKKKKKKKKKKKLEGGGRVP

SEQ ID NO: 271858 - protein, 100 aa, Zea mays
  Clone ID: MRT4577_179526C.1.pep
FGKKWTTLEHNGVIFPPPYKPHGVKMLYNGKPVDLTPEQEEVATMFAVMKDTDYAAKPTFIDNFFTDWRKVLGKNHIIKNFELCDFTPIYEWHLREKERI

SEQ ID NO: 271859 - protein, 90 aa, Zea mays
  unsure (1)..(90): unsure at all Xaa locations
  Clone ID: MRT4577_179527C.1.pep
GTXXRXRESKARAGXDPPXNKDXHHRDXXGQGAGEXXTRGGNEKEXRXRXRRGXXGXXXGKEAXHTREREGXRKPGRXGEAXAGQERXQA

SEQ ID NO: 271860 - protein, 568 aa, Zea mays
  Clone ID: MRT4577_179528C.1.pep
ENSLDDQYVDKVKLGEPGYRERYYADKFKEEAESKPIVQVRRDVVQKYVEGLCWVMRYYYQGVCSWQWFYPYHYAPFASDLKGLAELEITFFLGQPFKPFDQLMGTLPAASSNALPKYYGDLMSDPDSPLKSFYPKDFEIDMNGKRFAWQGVAKLPFIDERRLLAETRKLEDTLTEEEKFRNRTMLDIIYVRDTHPLITQIIFLYQNYYHLSRTDPYVIPIEPAASGGMNGFLCLSERNWYSVTVTSPVKGFNGIAQNRVLNAAYLNPQYHKHIPEPPAGVIIPAKILKPSDFKPFPVLWHQDNSRRQVRERPQVSGALSGSLLGEAAHRLVKNSLQIRSGNAAGLLYMPYRGAPYGPGNRPRPAGPLGYERGFVDNPYHAHMSRSVPNPHAQFFGDSQANRQPMRILERPDSRSHDAGIRASMSKLTIQEGPRPHQNNRMQNSGYWPNQPHPTHFTGPPAQRPMQNISFTPQRPFQTGGFPQQRPVNGAPPPLPPSNWIGKQPSGCHMSVSPAKLDPRTAPDRQPKQDNPRSQQDKRQQATKVYRVKTQATNVNGLSEPGKQEEPEG

SEQ ID NO: 271861 - protein, 29 aa, Zea mays
  Clone ID: MRT4577_179529C.1.pep
DQVTISQANTIHMNNAKAAEHNTINLTHN

SEQ ID NO: 271862 - protein, 50 aa, Zea mays
  Clone ID: MRT4577_17952C.1.pep
KVPNTIDKRAQANRGYTVHTITATSTNKNCNDENWVLLIFGQDRIISIMY

SEQ ID NO: 271863 - protein, 126 aa, Zea mays
  unsure (1)..(126): unsure at all Xaa locations
  Clone ID: MRT4577_179530C.1.pep
QAPLEKSDHTGDXISMIQNTKGSCLGXIKVDTNFLSYSLQDAQKYPFFAGVGAYXYCTPTVRLLDLVXSSILWIHXDIGSXHLPGAVLDNKAQACICTTYWEDVGSFKSLFDANLGLTDLPCKYDF

SEQ ID NO: 271864 - protein, 109 aa, Zea mays
  Clone ID: MRT4577_179531C.1.pep
HSIRSTSEWVRQDTQCFYLCNTVRFSTLSSSRQFVIHEYYYLQSLRLRRSGLDCTCQVTDIAPQIVVRLHDPGRVSIHVHHQQPHYRRLNHSMCSFYGYHLQTRPHTCL

SEQ ID NO: 271865 - protein, 77 aa, Zea mays
  Clone ID: MRT4577_179532C.1.pep
ALLLSCLGGGWLPFSRLVAPLAGSLVPLRLWVPFCRLALAFPSAFFLLPFVGGALFWGCFWVFLPVWGFLGVFVTTP

SEQ ID NO: 271866 - protein, 152 aa, Zea mays
  unsure (1)..(152): unsure at all Xaa locations
  Clone ID: MRT4577_179533C.1.pep
QTYPYVWGSYILVYGGLGAYLAWRWRKLRRTEDRVRGLQERLRKLSAAEESQAASXPPAPXTPSTPPLPQESASGAAKPASRPRRSKLPFFFPASWHDGLQIYRAIHRLSSLLCLVPYLVGDPSSEVEVEEYNTSAERLVILSLSSNRLGEA

SEQ ID NO: 271867 - protein, 57 aa, Zea mays
  Clone ID: MRT4577_179534C.1.pep
TRPRNGRLFLDPCNHPLRWGFLPQWRLYFRHFLLQNAIETQTSNQRCENLLKMKIQQ

SEQ ID NO: 271868 - protein, 84 aa, Zea mays
  Clone ID: MRT4577_179535C.1.pep
LRTSEFTWSLGRMRAVPEADATSEHHEDFPPYELRLIYQPRQRYGGRSLTEYNLEAWSGDHHEVDSYCRGSADHQQTMLQREDL

SEQ ID NO: 271869 - protein, 125 aa, Zea mays
  Clone ID: MRT4577_179536C.1.pep
PRTLARFEEYRDAVKARAGAEQLAVAAANSIRHPRCSADGNELLRFHCATLACSLGLNGATHLCDAAGTCAACGIIRDGFSSGGVLTMATSGRAHDAVPAAEAGAGLDEETTPRAMLVCRVIAGR

SEQ ID NO: 271870 - protein, 96 aa, Zea mays
  unsure (1)..(96): unsure at all Xaa locations
  Clone ID: MRT4577_179537C.1.pep
KKRKLEGLIPFIYKAIKERRARSYSYYYSRCISTGSSRGRLGAREEDRKKPLEXMQREXXDGGKAAAPGGGGAGDPHAHRRHXSLDELAGEEGASP

SEQ ID NO: 271871 - protein, 62 aa, Zea mays
  unsure (1)..(62): unsure at all Xaa locations
  Clone ID: MRT4577_179538C.1.pep
KTRKNFVKNPPKXQDGGRVAFXHKGLAPLAENFGFSKQAPANASAMALDEPTNFKNDPGSPP

SEQ ID NO: 271872 - protein, 34 aa, Zea mays
  Clone ID: MRT4577_179539C.1.pep
RRDVPGYRHRSPDDVVPESRCGISSVFEMIANDQ

SEQ ID NO: 271873 - protein, 1560 aa, Zea mays
  unsure (1)..(1560): unsure at all Xaa locations
  Clone ID: MRT4577_17953C.1.pep
MASNNNVHIGKPPHFDGNNYDYWKIRMSMHLRAMGGKIWPIVRDGFVVLKEDEPSVSDNENILTNDQAMNVFYDALDINEFNRIKNLTTAHEIWVKLMEIHEGTTIVKSAKLYVCKGKFEQFIMKEDESVSDMFNRLNEIVNELKGLGFNVPDVDFTHKFLRSLPEKYETIVTMLVRSDLSTTSPTEVLGEILTQDIFKKSQADALSLAKKVKNESIALKAKASKAIEKEDSNDEENESESDGDMALFVRKFNKFMKMKRGQPRRGQTSRRNAFNDRKCFECGEPGHIAMNCPSKKKKGKDESDKKKKKYYNKKKDGKAYLVEWDSDDSSDDDDDDTSSKLNAGIAIKEAPSLFSSPHCLMAKGDAKALKELYKNLQVSFEELKTSHNDLKENCEKLADAQKSSIVHEVEVVTKDVGVTCDLLDSLTSEPLPTNSICDKCKISLNDNIALDESKIIVENEVLVDRISTLTHDLEKAYGGKKNLDFILGSQRCSLNREGLGYVPKKGKNAFVKQKTLFVKECDKVNYKAGGNHWVLDSGCTQYMTGDMKMFTQMSDEDCSNYDSITFGDNRKGKVKGFCCNFTVEDVIISSVDGSNLKFKGFRHENLYLVDFSSNEAKLTTCLFSKASLGWLWHRRLGHVGMKQLNRLTKHDLVRGLKDVKFEKNKLCSSCQAGKQVANTHPNKSQMSTHRPLELLHMDLFGPTSFVSIGGNSYCLVIVDDYSRFTWVYFLRDKSNVFETFKSFAILAQNQFDFDIKKVRSDNGSEFKNARIDQYCDDKGIKHEFSSKYTPKQNGIVERKNRTLIDMTRSMLAEYNISDSYWAEAINTACHSSNRLYCHKLLKKTPYELLIGRKPNISYFRVFGCKCYILRKGSRLSKFEKKCDEGFLLGYSSNSKAYRVFNKTHGIIEEAYDVEFDETNGSQDESENLDDVGGTQLINAMKTMAIGEIKPKEDDDENSVVVIPSSSTINEEDHQSQQLNETIDTHDQGXLQDLQFLXASTSNYQTVSRIHHSIVKDHPVDQIVGDISKGVQTRSRIASFCEHFSFVSCVEPNRVDEALLDVDWVNAMHEELNNFARNEVWELVERPKNHNVIGTKWVFRNKHNEDGVVVRNKARLVAQGYTQIEGLDFGETFAPVARLEAIRILLAYACAHNIKLYQMDVKSAFLNGKISELVYVEQPPGFEDPKRPNHVFKLSKALYGLKQAPRAWYERLRDFLFSKDFKIGKVDTTLFTKRIGKDLFVCQIYVDDIIFGSTNELFCEEFGKMMSKEFEMSMIGELSFFLGLQIKQLKDGIFISQSKYLKDMLKKFGLENAKPIKTPMATNGHLDLDEGGTMVDQKLYRSIIGSLLYITASRPDVMFSVCMCARFQASPREIHLKAAKRILRYLKYTPNIGLWYPKGAQFELIGYSDSDYAGCKVDRKSTSGCCQFLGRSIVSWSSKKQNSVALSTAEAEYISAGNCCAQLLWMKQTLLDYGIIFKNVPLMCDNESAVKLATNPVQHSRTKHIDIRHHFLRDHVGKGDISIYSIGTDDQLADIFTKPLDETRFCSLRSEMNVIDISNVA

SEQ ID NO: 271874 - protein, 74 aa, Zea mays
  Clone ID: MRT4577_179540C.1.pep
NKSPAPKLRRSSSNFGTGSSNPPTTGLTAGTATSTFNPKASHKEETAKVALRKTPPKDCNKFKADRNPPGFWLT

SEQ ID NO: 271875 - protein, 140 aa, Zea mays
  Clone ID: MRT4577_179541C.1.pep
MSKRGRGGSAGNKFRMSLGLPVAATVNCADNTGAKNLYIISVKGIKGRLNRLPSACVGDMVMATVKKGKPDLRKKVMPAVIVRQRKPWRRKDGVFMYFEDNAGVIVNPKGEMKGSAITGPIGKECADLWPRIASAANAIV

SEQ ID NO: 271876 - protein, 189 aa, Zea mays
  unsure (1)..(189): unsure at all Xaa locations
  Clone ID: MRT4577_179542C.1.pep
TDEGSMRGSIQRXLLEARVSLRMSLGQDRLHELGLWEMGEDVAXVWTVEEDNLYQRVVLLNAVFLGKNLWDHLPDAFPNKSSHELGSYYVNVYMLRKMAKKNTYDMMAEDSDDDKLHGEPLAEPVEGDPAGDSSTHEHSDNHSVTMDDDHDEFEGAQVGEYLGEKSGYNAVYCTHLPNHMPADLTAENT

SEQ ID NO: 271877 - protein, 78 aa, Zea mays
  Clone ID: MRT4577_179543C.1.pep
VDSYRQMVGAKTHKLEEEYAAKVAKLCFQETEEKRRKKVEELKVLENSHYDYHKMKLRMQTEIQGLLERMEATKKMWV

SEQ ID NO: 271878 - protein, 226 aa, Zea mays
  unsure (1)..(226): unsure at all Xaa locations
  Clone ID: MRT4577_179544C.1.pep
AGRFNHQVSGEVSSRPPSASRRRRKENLTNPLDAGSSRLRPVAPVGSKKHKRFGSARTSPSWWRREGPDLGARLRRRRWXLVLLVGCLVAGGQGAEIRRQKNVQAALRAKWAGTPLLLEASELLSTEWKDLFWDFIDLWKDLEKGSECLTAKCCAQKIVEDAHTLLNEPLSSIFEFSLTLRSASPKLVLYRQLAKESLSSFPIDDSPENISGHGTGKTFDGAVDPG

SEQ ID NO: 271879 - protein, 62 aa, Zea mays
  Clone ID: MRT4577_179545C.1.pep
FKTEHWYFPHKLQLKKRKKTKKTPGIRATCQKFMLSLNFQVTAELKMVCLHKCLCHSLSLGI

SEQ ID NO: 271880 - protein, 139 aa, Zea mays
  Clone ID: MRT4577_179546C.1.pep
NVQQVLTIFQLDGTQAIELLLLVSCQNSYRTFLEHSSVQQEEWTGQLDHDLASSSSQSRYYSWQYWIHYPDRRHVTLILPRSLCVSGCIIRRRSSRCLGKGVKLSAVYLCIAVRCIPDPRSPVNTSSGEDVWVVLTVVV

SEQ ID NO: 271881 - protein, 58 aa, Zea mays
  Clone ID: MRT4577_179547C.1.pep
LIAWCLSSKLVLEFYVSSFIFRLRVIHVLLNLNTEYLLKGVNNDHELFVLSRITPFAT

SEQ ID NO: 271882 - protein, 144 aa, Zea mays
  Clone ID: MRT4577_179548C.1.pep
MAIGSLIASTFARSSHALPAAAASAISQAPRSQHTASPLLSGLGAAARAFSSRALWKGAFVDAFLSRIKKNRENMNGKKIWSRRSSILPEFVGSSVLIYNGKTHVRCKITEGKVGHKFGEFAFTRRRRPHRTMTGKGNQGKARK

SEQ ID NO: 271883 - protein, 51 aa, Zea mays; identical to SEQ ID NO: 242440
  Clone ID: MRT4577_179549C.1.pep

SEQ ID NO: 271884 - protein, 186 aa, Zea mays
  Clone ID: MRT4577_17954C.1.pep
MPPLHSGDSSSMAPPLVGRGGGATSSAMVRSSAALPSSRASRSGGAGCSNYELGLSKTSWRRVKEMEPLGYFPIGSSRAAGAETTPKPEGEALVFESLFAASLRLPCHGLLVDVLDRSKPILSPTYVVDLGDRLRDTFTVEIEKEAEELVGLVTEHEVGRSVELLGGNMRLNRVFSQMGLNYDEFL

SEQ ID NO: 271885 - protein, 103 aa, Zea mays
  Clone ID: MRT4577_179550C.1.pep
VPVVDAPEDGDGDSGWEREREAWPECRVEAPAAAGPGEDGGVLVRIVMKRKDIAQLVARLERQRGAGVEAEVGSSIELDGGGVTMSPCRGAWSPRLSIIPENY

SEQ ID NO: 271886 - protein, 86 aa, Zea mays
  unsure (1)..(86): unsure at all Xaa locations
  Clone ID: MRT4577_179551C.1.pep
ECTSCSIXVGYADXALAADYTVQKLPEKLEFQQGAAIGIQYITVSRDLIHSACVKTGQSDLVHRASGXAGLSACHIARAYGLKNLG

SEQ ID NO: 271887 - protein, 68 aa, Zea mays
  Clone ID: MRT4577_179552C.1.pep
LLTFNQVRSINIASYIKKEKLVPFNHMAGRSTMYLICTITAYSRVYTYTLLLTRFTMLQLQKCCHSTN

SEQ ID NO: 271888 - protein, 240 aa, Zea mays
  unsure (1)..(240): unsure at all Xaa locations
  Clone ID: MRT4577_179553C.1.pep
MLQQSPARLSAASPAPAGMDRPAQAPTQLPPGFRFHPTDEELVVLYLRRKALARPLPAAVIPVVHDVARLDPWDVTGAYYAVRVICGSIQSFPDCLXTKPXGASEGEGYFFSLRRAPATGRRRRAGSGYWKATGKEKPVFLQCGGEQRQLLVGVKTALAFHRREPPPPSSRTGWVMHEYRLAXPRRGRPEEEECETXTLLNREKWVVCRVFLKDRXNRDAGSKTLRHGASAPRRRRQQQP

SEQ ID NO: 271889 - protein, 241 aa, Zea mays
  unsure (1)..(241): unsure at all Xaa locations
  Clone ID: MRT4577_179554C.1.pep
GQCSKLPVGYVQLPVGVAGPLLLDGRRFYLPMATTEGCLVASTNRGCKAIAESGGATSVVLRDAMTRAPVARFPTARRAAELKAFLEDPANFDTLSVVFNRSSRFARLQGVQCAMAGRNLYMRFSCSTGDAMGMNMVSKGVQNVLDFLQDDFHDMDVISISGXLALSVFGNFCSDKKPSAVNWIEGRGKSVVCEAVIGEEVVKKVLKTDVQSLVELNTIKNLAGSAVARALRGFNAHASNI

SEQ ID NO: 271890 - protein, 66 aa, Zea mays
  unsure (1)..(66): unsure at all Xaa locations
  Clone ID: MRT4577_179555C.1.pep
DLDFCNPVTYLCPGLVTDPASSCYMDRYFNEILKDTEQHALXHTHSWHPALHELSHTLTCVHVDTK

SEQ ID NO: 271891 - protein, 265 aa, Zea mays
  Clone ID: MRT4577_179556C.1.pep
MKMSSVTLSEPGQNRSHQHNFVHRMTVQLETQDPTATYSVHTFLQLSQANQHLRLLKPGNFCSDKKPSAVNWIEGRGKSVVCEAVIGEEVVKKVLKTDVQSLVELNTIKNLAGSAVAGALGGFNAHASNIVTAIFIATGQDPAQNVESSHCITMLEPVNAGRDLHISVTMPSIEVGTVGGGTQLASQSACLDLLGVRGASRDRPGSNARLLATVVAGGVLAGELSLLSALAAGQLVKSHMKYNRSSKDVSSTTATEKTRQREVDV

SEQ ID NO: 271892 - protein, 69 aa, Zea mays
  Clone ID: MRT4577_179557C.1.pep
TIRPSVVDWRVHRILPGEPPTPGFAEHKWAWILTYMGFKSNDVLMNVDARGFSWAVKNIYYQPRSPIYT

SEQ ID NO: 271893 - protein, 240 aa, Zea mays
  Clone ID: MRT4577_179558C.1.pep
YNVNGNLSHSVVTNDSDSDEVNGIVNGCNGVGKEIDEVSAAIGQDWTRKSMDKCTIAYTKKELRISIERGVKPKIRWLSRGPLGEAAVSNGFLVTKIQMKKCKLTGEITVFEEFSITIPPKSALLFPCQRAISIDASGCQVQHLIVLDGTWAKAQRMYHENPWLQLLPHVKLESDRVSLYSEVRHEPKAGCLSTIESIVVAMRKLGEDSKGLDDLLDVFESMIADQRRCKDENVKQKLNS

SEQ ID NO: 271894 - protein, 35 aa, Zea mays
  Clone ID: MRT4577_179559C.1.pep
WFVALCFLRTAASRVWCWVVRVSLENKLQTSVSLG

SEQ ID NO: 271895 - protein, 61 aa, Zea mays
  Clone ID: MRT4577_17955C.1.pep
KDFRLLPAHQQSLSVQDILDRVFSCMFACHRDTMACALAPVQDHRYSASLGFVLSLELVFN

SEQ ID NO: 271896 - protein, 114 aa, Zea mays
  Clone ID: MRT4577_179560C.1.pep
MSLFWQKLKCFMGPKTGAPKNASCSNLPNWVHYPPRLVLHGVGGMFLPFKKKGFSPRFKNGMFCRSMVLNQNFFFPLKKKCLSPKKKKKKKKKKKKKKKKKKKKKKKKKKKKKK

SEQ ID NO: 271897 - protein, 73 aa, Zea mays
  Clone ID: MRT4577_179561C.1.pep
FHSSSHRASGGPYKGAGSRVEDLCKEQRSTMPPHPNKAHMTIYIHRKACDYMQTRLLCTHMCRERNFIIYRHL

SEQ ID NO: 271898 - protein, 89 aa, Zea mays
  Clone ID: MRT4577_179562C.1.pep
GQVSLFLVGLRHGGRSACGAFHRRGSVPPVSTKQAFLWNKPCARAIRLGVSVGLPRRGNSVFCESSETFFPPGSRDQSWIEWCCNVFFF

SEQ ID NO: 271899 - protein, 156 aa, Zea mays
  unsure (1)..(156): unsure at all Xaa locations
  Clone ID: MRT4577_179563C.1.pep
KQNFRGPNGKPFGERGPFPPRQHRKHTQKPAARRGPQEGNQNKTPQGTTGQPPQGPTKKGPKRQPRTHNLQDQNPKKPTXPPKKSQRAQRRGPRLPKKKKKKPRNPPPHKXSQEGRAPGTHQQKPGGGNEPPXKTAGGGGGGRKPPKGGPGGGKKQ

SEQ ID NO: 271900 - protein, 65 aa, Zea mays
  Clone ID: MRT4577_179564C.1.pep
ILVRRLCLKGLTLEGRLAHSGKEIKGAMAMKGGSCNYASSLFLTKIKYNPLNKWNSGIKAIVHAC

SEQ ID NO: 271901 - protein, 43 aa, Zea mays
  unsure (1)..(43): unsure at all Xaa locations
  Clone ID: MRT4577_179565C.1.pep
DHSADAHRTDLMTITRHPLNXQSHNPKSRCDFTILLSHIVLLC

SEQ ID NO: 271902 - protein, 75 aa, Zea mays
  unsure (1)..(75): unsure at all Xaa locations
  Clone ID: MRT4577_179566C.1.pep
MTNLTTKGGIVGKHGTRYGASLXSQXKKKGGSETFKDLWELWGKFAAYRKADGIWGRQDXRKGKAGGAYTLNTAR

SEQ ID NO: 271903 - protein, 46 aa, Zea mays
  Clone ID: MRT4577_179567C.1.pep
PSYHTTVTTKTLTILNSIDYQHIPLYPPNIVAPTNAPIIDPYILKT

SEQ ID NO: 271904 - protein, 223 aa, Zea mays
  unsure (1)..(223): unsure at all Xaa locations
  Clone ID: MRT4577_179568C.1.pep
MPLPLAQVQELRDRLSDRFRPWRRSAQFWVRAVDIYGSYKVCQLRTGFVKDEEERQAMWEQQHEIGAQKMYSLCSELGGLFLKAAQILGKPDLAPTAWVKRLVTLCDKAPSTPIEVVRDVVEKQFCKSFDEIFDFFEVEPVGSASIAQVHRARLKSSKTDVAVKVQHPGAEQLMMVDIRNMQAFALFLQKYDINFDLFSAHKEMEKQICYXXXDFVREARAME

SEQ ID NO: 271905 - protein, 66 aa, Zea mays
  Clone ID: MRT4577_179569C.1.pep
MDSDKSDHLVHVLAKAHDLQFRDTAVRLHREGTESGHLTVGNLERRVGSGQTLSEVRPQRVEIPPW

SEQ ID NO: 271906 - protein, 38 aa, Zea mays
  Clone ID: MRT4577_17956C.1.pep
RYGHWANEKVQLYNDCIHWCLPGPIDIWNDMLFQMLLA

SEQ ID NO: 271907 - protein, 67 aa, Zea mays
  Clone ID: MRT4577_179570C.1.pep
VLRNSTSTRAANELLAAFCSVRRRQIQGGGRGDSAPNPQHNSGTKGGASSFGVDAQSPSSETNKAPS

SEQ ID NO: 271908 - protein, 85 aa, Zea mays
  Clone ID: MRT4577_179571C.1.pep
KGNKVNVGVKYAEKQERKFEPGKLREGRNIIGLQMGTTKFASQQGMTAYGTRRHLYDPKLGTDQPLDQATISLQMGTNKGASQAG

SEQ ID NO: 271909 - protein, 61 aa, Zea mays
  Clone ID: MRT4577_179572C.1.pep
GHLSGSSPLVLLEATGDCGTGRGWSRWCHLSTFFASRQWMRPLPLPHQAWAVPACLRPGPC

SEQ ID NO: 271910 - protein, 96 aa, Zea mays
  Clone ID: MRT4577_179573C.1.pep
PGGRCTGGSLGTGTRLVVVCALFHTNIILPILLPIRCATRSIRDALSIVPRIGGHVHLPRISGPGTTRFVTTIAAVGTLGDYLLTMRVRIETLLSK

SEQ ID NO: 271911 - protein, 118 aa, Zea mays
  Clone ID: MRT4577_179574C.1.pep
TPRVGFPVCSPACSIAPPPRVLPQRRPLPLGALLAGAPSSPSPWPSASPWWSGACPMAELPLHGRAPPLLHPWLPSSLPGRAQVPYARLTMFTPLQHHRHLPAPSSVVPSIFPNTEPL

SEQ ID NO: 271912 - protein, 41 aa, Zea mays
  Clone ID: MRT4577_179575C.1.pep
AAMCMHVVYLQTYIWFEVHGDQLMGLGIYIMMLTIKIKNYY

SEQ ID NO: 271913 - protein, 120 aa, Zea mays
  unsure (1)..(120): unsure at all Xaa locations
  Clone ID: MRT4577_179576C.1.pep
GVCVDATEDELFRLNTKEGKHTVKRXSVKIQTQRLSLVGPFVPDTVPMLDMLRALXSNREMIRALQESLASELAARMSAMISSTEXPSSTCKNPENAYVLKDQAKMIGDTLEILDGVNTI

SEQ ID NO: 271914 - protein, 69 aa, Zea mays
  Clone ID: MRT4577_179577C.1.pep
MAASLQAAVTLMQPAKIGGRAPFASLPSRPSSQLACRAFGATPCANRITYSMHNLFGRLPRERLLRLPP

SEQ ID NO: 271915 - protein, 110 aa, Zea mays
  unsure (1)..(110): unsure at all Xaa locations
  Clone ID: MRT4577_179578C.1.pep
GGGGAFXSSLLGLLPAAALAGLSACAAPFTITNNCGFTVCXSSTPLFPGGGGGPSXXSPFNVPPLTSSRRLWGRTGWSFNGDRGSCQPGLCLGPLACPLSGHPPLALAFF

SEQ ID NO: 271916 - protein, 69 aa, Zea mays
  Clone ID: MRT4577_179579C.1.pep
IIIIQFVIMFGVMLILSMPCLSVLLRLARGCVSSEKQVGTWNLKCQASCALDSLLLPNNVLYNHLPCIG

SEQ ID NO: 271917 - protein, 86 aa, Zea mays
  unsure (1)..(86): unsure at all Xaa locations
  Clone ID: MRT4577_17957C.1.pep
KCKGGFNSTEQXXPAXLHXEAMASLPQPTFSDXXFEXQLLASTXSSSALRSSSWHPDTLSSRQPFFPSIDXXLHPXTAWVGPGXFR

SEQ ID NO: 271918 - protein, 289 aa, Zea mays
  Clone ID: MRT4577_179580C.1.pep
PQEQNAAASHFFQRVRATNATVLSFGGHGGAPPAARLDLDLAEQLSHQLAPVRSAGDAGRPCSEGSSSRDGNGSRSSVDEAAANADDGSVQQHPGPASMNSSGATVWPPYSCAPAPAAYFPQGIAIPIYPAAPAYWGCMVPGAWSLPWPVQHPSSSSSPTTTSAPSVVSSSGAADDSSSHALGKRPRDREGDDGRNGGNAKVWAPKSIRIDDVDEVARSSIWSLVGIKGDQTKQQDAADDHAGGHSKQLGTVFEPKRGEATKKAMMTSSPLLHANPVALTRSVAFQEGS

SEQ ID NO: 271919 - protein, 48 aa, Zea mays
  Clone ID: MRT4577_179581C.1.pep
VFQLRVSLMPKCCLTPLSQLASPSDVLNLKCSLLKCRSRLRFTVAAHD

SEQ ID NO: 271920 - protein, 56 aa, Zea mays
  Clone ID: MRT4577_179582C.1.pep
CMSYLRIGWKGVIIIINYISLVSICLMLYYKCFIHFGVDYLSYTIYTRATCASCIS

SEQ ID NO: 271921 - protein, 87 aa, Zea mays
  Clone ID: MRT4577_179583C.1.pep
PGFKKGGFLHYCRAIARFKANSVCLGPWLLALGTLKEPSSLVFVFSRPCCRLAGGGRCVPPPFCVGLAISFGPPSGCCKTLVWCFWR

SEQ ID NO: 271922 - protein, 72 aa, Zea mays
  Clone ID: MRT4577_179584C.1.pep
EFPLVSRSGWSQCNRVNEIPIGYMLGLMLIHFILYLDECSSVLNSRKQNWVSVREKNINCSGCSSGIMEGIS

SEQ ID NO: 271923 - protein, 100 aa, Zea mays
  Clone ID: MRT4577_179585C.1.pep
APARRSRPWTADQKLCLLSTGTVNTQTRRHRSHTCCIQVNDDPNSDAKCLWGLHDTHDKDSTSHQRQRRPRPRQALRTEGLYSSTARLLKLPTFVEGDHK

SEQ ID NO: 271924 - protein, 90 aa, Zea mays
  Clone ID: MRT4577_179586C.1.pep
NIKPFSLWDFILWYCVYMYRSKFLVFFFANREGNNDTSATRNVAKKTGWEMAHKNASIANTILYLRAKKATLLPPTSKKRHTIEEWSWPS

SEQ ID NO: 271925 - protein, 52 aa, Zea mays
  Clone ID: MRT4577_179587C.1.pep
PYQLDGLIWRKAWNMLVGKFLFMLPTYSVNDSKSHQDYSMGFNIIMNRMKDP

SEQ ID NO: 271926 - protein, 141 aa, Zea mays
  Clone ID: MRT4577_179588C.1.pep
MEKMNVVASRKQQGGDWICRSCQYVNFCKRDACQRCGEAKLGVERTDYGALGGDWDVKPGDWYCYRCGVNNYASRAGCFKCGAAKNESPPAAVAQGWGYTAAGQAGMKPGDWICPRLGCNVQNYANRTECFRCSMPKSYYG

SEQ ID NO: 271927 - protein, 106 aa, Zea mays
  Clone ID: MRT4577_179589C.1.pep
IRHEAPLVHVHHSIYGHETGGGWTVLSFLAAVIRSNCRMRANDSRCFRRGLPFVYPLKPLPGCWSSGSGVRKRPMASPLHSPPRLYADAWAACDCAKMNGLKDTKH

SEQ ID NO: 271928 - protein, 65 aa, Zea mays
  Clone ID: MRT4577_17958C.1.pep
DDMTLAYGQRNMDCWMQSDLCDDNYRANTFYALGSPYGDTYSYFNTLAHRTIADVEPSSTHMKCT

SEQ ID NO: 271929 - protein, 140 aa, Zea mays
  Clone ID: MRT4577_179590C.1.pep
MEKMNVVASRKQGGDWICRSCQYVNFCKRDACQRCGEARLGVERTDYGALGGDWDVKPGDWYCYRCGVNNYASRAGCFKCGAAKNESPPAAVAQGWGYTAAGQAGMKPGDWICPRLGCNVQNYANRTECFRCSMPKSYYG

SEQ ID NO: 271930 - protein, 89 aa, Zea mays
  unsure (1)..(89): unsure at all Xaa locations
  Clone ID: MRT4577_179591C.1.pep
PAXGEREXGXNGXGRXGRXXARGAXQSEXXEPXAXNDPXXTTDHXTXKXKDDTXHGHRKHSDXTRKDPKTXXXXDKPXTXXGXRNXEEN

SEQ ID NO: 271931 - protein, 141 aa, Zea mays
  Clone ID: MRT4577_179592C.1.pep
GDFFPLFFEIPGGVKRGVLIFWVSFFPWFGVRRGPMFSLARGGPSQKILGSMVLKSLPRGFRWVEKRLFPQPGFLILFPGGFLEGCFFLLKKIPFWVGPFELGLGIVPLLIKALFLNMVLFLKKKKKKKVFTPKKKIKTPP

SEQ ID NO: 271932 - protein, 80 aa, Zea mays
  Clone ID: MRT4577_179593C.1.pep
NDAELATIHRLRTSKINNSPRDPFPALPPNPILSSVLNRSTTSLPDHGWAHHRPSLHSQVCNNFETCLTQAILAVKSTCK

SEQ ID NO: 271933 - protein, 36 aa, Zea mays
  Clone ID: MRT4577_179594C.1.pep
LKPVEIKGLYTWGNLIIKKIPNLKKIGALFKNQLKI

SEQ ID NO: 271934 - protein, 131 aa, Zea mays
  Clone ID: MRT4577_179595C.1.pep
LCVARAGRAAYTQAWHDTCNIENNMAKEYAILIVLISMVLVVSCNVVDGSAADMRHATLPRKGLKEDIKLAINGVNSPVSSISGQASSNSETGTDNDMSSATAFTSKVTTTQGSHRGYEIHGFQGSKISPP

SEQ ID NO: 271935 - protein, 101 aa, Zea mays
  Clone ID: MRT4577_179596C.1.pep
MASPKPSSDILLLLTEAAVLALSLADLTHHNCLKNNNVTVQNLCSHETTLTLEPISNNPPMISGTYTLHPRSQSELPICLATERLPTPDAIHVEIHVGVDC

SEQ ID NO: 271936 - protein, 85 aa, Zea mays
  Clone ID: MRT4577_179597C.1.pep
RKPPDPLVFSFYPGKKGALLPIKTQKDPGLPPGNPGPTRGAAQISLQGKFQKPGEPKAKRVNPGKPKAGTNSKKKTSPNQKGLNP

SEQ ID NO: 271937 - protein, 76 aa, Zea mays
  Clone ID: MRT4577_179598C.1.pep
SRQPRSSGRHSLERTRRLAAHETAKQTKVLHERPRTPGSSAVTREPTAPFDLLSAWVTTSNPKKGKGRMLNTLLFK

SEQ ID NO: 271938 - protein, 119 aa, Zea mays
  Clone ID: MRT4577_179599C.1.pep
ASGLANKRRREKEPAFASAATRGTDRSISYPNMRPPCTSSSAAYVLRKCISLMCVNQKLLTDLFFYFSPTVIHKHDWDYNYRSAVFVSNGMCFWNPHLGTASCVESPDWQCLGKLDNGP

SEQ ID NO: 271939 - protein, 81 aa, Zea mays
  unsure (1)..(81): unsure at all Xaa locations
  Clone ID: MRT4577_17959C.1.pep
RFSSFSIPPASSRSDPSPPPRPRNQLTXDXIAEFKXAFSXFEKDGXGCITTXXLGTVMRXLGRNPXEAXLQDXXXEVDXDG

SEQ ID NO: 271940 - protein, 82 aa, Zea mays
  Clone ID: MRT4577_1795C.1.pep
ETAHAASYDQQHTASAMPFSMISSPALAVATQGLPPLRPERLLRSAPSDPRRRSRSTMPTPVHVHSTDDVYTDEYESEKSEW

SEQ ID NO: 271941 - protein, 73 aa, Zea mays
  unsure (1)..(73): unsure at all Xaa locations
  Clone ID: MRT4577_179600C.1.pep
MIDTVTIRTSKFMTNRLVQRRQMVIDVFXPGNATVPKTEIREKLARMYKTTPDVIFVFGFRTHFGGGKTTGFG

SEQ ID NO: 271942 - protein, 217 aa, Zea mays
  unsure (1)..(217): unsure at all Xaa locations
  Clone ID: MRT4577_179601C.1.pep
GSTLSPYLFALVIDEVTRDIQGDIPWCMLFADDVVLVDESREGVNRKVELXRQTLESKGFRISRTKTKVTSHILGTTISEDGYVXAWEARYLGSMLQRDGDIDQDVSHRIKAGWIKWRQASGVLCDKRVPQKLKDKFYRTTIRSAMLYGAECWPTKRRHIQQLSGAEMRMLRWICGHTRLDQVRNDDICDRLGVEEKLIQHRLRLFGHVHRRPPEAS

SEQ ID NO: 271943 - protein, 93 aa, Zea mays
  Clone ID: MRT4577_179602C.1.pep
MAKPPLQTAAIILLVLLSAASCLHTVDAATLGFCWGKCSVRCAGATARQARAACMSSCGLCCEACNCVPHDIHDCPCYRNMLTAGPKKRPKCP

SEQ ID NO: 271944 - protein, 186 aa, Zea mays
  Clone ID: MRT4577_179603C.1.pep
MGSKGRMPPPYHHRPLPGPGSGPPHGMMHRDPYGPGMHQPPGPGPYPYDMLPPPEILEQKLAAQCGEIQKLALENERLAASHASLRKELAAAQQELQRIQAQGEAAKVAEEQEMRGLLDKAAKMEADLKSYESVKADLQQAHAEAQNLAAARQHLLADAQKLNKDLQRNFGEAQQLPVLKADLDAG

SEQ ID NO: 271945 - protein, 103 aa, Zea mays
  Clone ID: MRT4577_179604C.1.pep
MAAASLLSRARWLLVEHPAVASFRWQPGRTVGATPSFAAAVICGYLAAVLVLRRLVLPRLPALPPPALRALSAAHNAVLLALSAAMDGGCALSTAATAPATRR

SEQ ID NO: 271946 - protein, 111 aa, Zea mays
  Clone ID: MRT4577_179605C.1.pep
SPNHRIGWLTLFFIVFELRVVIRTQWEQPCLVFKIDSHDRKGTAHFRSLDYDERNGYLKVMVTIIIHDPGQNATVAKVAFRHPIRYNKHIELLIACQGIYTCHTIYMLKEG

SEQ ID NO: 271947 - protein, 83 aa, Zea mays
  Clone ID: MRT4577_179606C.1.pep
WGRKRVGPGNGIGNPQRGKWELEKAIRKSRPGGRKFGKIARLKDMPGKGARLNFLFGYGLKFFFFFFFFFLFFFFFFFFFFFF

SEQ ID NO: 271948 - protein, 116 aa, Zea mays
  unsure (1)..(116): unsure at all Xaa locations
  Clone ID: MRT4577_179607C.1.pep
RTHASGPLLSQKMVXGXNRGHLRTTVTVSIHAYITDFAFSKPAEGGIYDNRNGMDYHIHAIDXSHAREPPMHIVHIAQVMVPIAKVGGLGDECTXLXRPLHDLRHIDLHFLTKYDR

SEQ ID NO: 271949 - protein, 63 aa, Zea mays
  Clone ID: MRT4577_179608C.1.pep
VLLFLYGRFRGATDNTLHWMPPRLEQVHDEAVVEYFSRIDDPQWEDLDLPANGSHGRTIESKL

SEQ ID NO: 271950 - protein, 206 aa, Zea mays
  Clone ID: MRT4577_179609C.1.pep
MDGGYYGGRDQRYGGGYYGGGGAIATPGYAPAVPYGMSQVNIEGNGCGRALPPQPTVKVYCRANPNYAMSVRDGKVVLAPANPKDEYQHWIKDMRWSTSIKDEEGYPAFALVNKATGEAIKHSLGQSHPVRLVPYNPDFLDESVLWTESRDVGNGFRCVRMVNNIYLNFDALHGDKWHGGVRDGTNVVLWKWCEGDNQRWKIQPYY

SEQ ID NO: 271951 - protein, 202 aa, Zea mays
  Clone ID: MRT4577_17960C.1.pep
MMSSQKRRKGCIFFSLALLLCSASGGVPSLASENSPSEFAKIVQSKQTRHARVCGADPQLLSSLAGSGAEVMLTVPNEQLEHVAEFQEEADLWVAASVARFVPATRITHVLAGDDAPARSPPSAHFLVPAMANLRSALAAAGLAGRVSVSSALSADTLAAPDPERSGVVGRVLRSLASGSPLVLKSSGPVGGQRRQGRRRVR

SEQ ID NO: 271952 - protein, 210 aa, Zea mays
  Clone ID: MRT4577_179610C.1.pep
MERSAESWWVLPMTLIPAISGEQHGNMATVATSFAYLAIFACLAWVGASLLYWAHPGGPAWGKYWRARGKKPSAAIPGPKGLPVVGSLGLMSGLAHRSLADEASRRPGAKRLMALSLGPVRAVVTSHPDVAKEILDSPAFAARPLNHAAYGLMFHRSIGFAEHGPYWRALRRVAAGHLFGPRQVEAFAPYRAAVAEGIVAALLRAGSGGA

SEQ ID NO: 271953 - protein, 99 aa, Zea mays
  Clone ID: MRT4577_179611C.1.pep
RVFRGFYQWVPVGRILPPGGGWKFLFRSFTRFSCFIFFGVCPLWPIFKIFSGATLFFCPPFFRSLTLPGHHFFFLKTFFFFPPPPPGQSWCLEKKMKNV

SEQ ID NO: 271954 - protein, 75 aa, Zea mays
  unsure (1)..(75): unsure at all Xaa locations
  Clone ID: MRT4577_179612C.1.pep
RAXGYFFWAGRINRAVEGGLVCGLAWASSNIGAGECLHVLGRGPQLQVITEPGRRVLFCYPDEFLYGGGNPYWGL

SEQ ID NO: 271955 - protein, 46 aa, Zea mays
  unsure (1)..(46): unsure at all Xaa locations
  Clone ID: MRT4577_179613C.1.pep
ARTFFCCCEXKRSRSPXTMEAAEEANAYPEKNRHEYGLKKPILHAL

SEQ ID NO: 271956 - protein, 112 aa, Zea mays
  unsure (1)..(112): unsure at all Xaa locations
  Clone ID: MRT4577_179614C.1.pep
IFFHHKWVREGKNPPFAYEKKKKKPIGTSSLMPHAPEGEPHHLKNITWPPKKWPPQLNFIALSNRSPYFKGGGGVVILAVARFLTGYIALWRPAVCISTALIFLCTIPGPYX

SEQ ID NO: 271957 - protein, 65 aa, Zea mays
  Clone ID: MRT4577_179615C.1.pep
KKFLMLSFGISKLDYLLISSHSKPLVRILANNVTSSLVSADQKSPFTVSSNTAPNFGSSSPDHLG

SEQ ID NO: 271958 - protein, 93 aa, Zea mays
  Clone ID: MRT4577_179616C.1.pep
MALPVPSGGWYLARLMDRFRSMSRWRCARRGGGASAGASSSSLLRLLPSGETGGNGGLGMVRRRRPLLWLHLVMAMLLLRPSVLALRPACLEP

SEQ ID NO: 271959 - protein, 199 aa, Zea mays
  unsure (1)..(199): unsure at all Xaa locations
  Clone ID: MRT4577_179617C.1.pep
FGQGPFSGYFPNRGAPLRKNIPXKKAGPAKKFKNFSNXPEKTLLDIFPPPMQAPKVFSPLGILFLPFPHKENIGGFSEPFWLGEPLVKAAFXKFAGRKKKIQGFFSEGNNNLGPKNPFGPGVFPFKIFKPFSQPGVPGGGLPPRISLFSPPRRPLSHLFKRGGVFFFPPRGLFEKNGLYGPFFFPVGPTPQRALFGFLF

SEQ ID NO: 271960 - protein, 60 aa, Zea mays
  Clone ID: MRT4577_179618C.1.pep
LPKRPLEFVEKFRFDPRHWGQPLVVRWKQPPPWRGLARFGRSVSGGATGCVYPGQFRVKG

SEQ ID NO: 271961 - protein, 122 aa, Zea mays
  unsure (1)..(122): unsure at all Xaa locations
  Clone ID: MRT4577_179619C.1.pep
AGLLPFYQQFAANPATLLQLHTIVRPLSNLXLTGPMRPFYQQHXSLAGAALFRCAYVVVTSPNRSFLGCMCCAPSPIWSSYSFRIFNAAVGCVCVPRLRGALLSARAPLRPPPFGFLRLAFL

SEQ ID NO: 271962 - protein, 129 aa, Zea mays
  unsure (1)..(129): unsure at all Xaa locations
  Clone ID: MRT4577_17961C.1.pep
XLIFFSSQQHQKGGRVKGKQRTEPQSNGKSPQQIHGEEDHPFPHAKEATHPRGKRGSRQREPTRSPQNNPKHAGDNSRSRTRLMSPTTQTEEQRNKKRGGRKKRTAHQRRGGPNQKRREPGGGPKSHPP

SEQ ID NO: 271963 - protein, 96 aa, Zea mays
  Clone ID: MRT4577_179620C.1.pep
AATKSHYPQPASVTKPYCVWGQPHHIQSPTPTAHPFRPHPRRHHHQLATSASRTPTRSYLTNYRADSALESTFFTSLQRTRDALRFSRFAVRYGKN

SEQ ID NO: 271964 - protein, 39 aa, Zea mays
  Clone ID: MRT4577_179621C.1.pep
GGDDYDLITTTGDIRNSSTGGLHRRSYLTTMAWIILLTN

SEQ ID NO: 271965 - protein, 128 aa, Zea mays
  unsure (1)..(128): unsure at all Xaa locations
  Clone ID: MRT4577_179622C.1.pep
YFFFCXASCGVLPRFPLFRGVFFFFFFKKGGKGPFFFGGKKKGLGKAHMAPHHPVFKPGGNPLFLKRVKKGPGPRPNRGGGTMAPIWGGGPRPSFGGPHFGGQKALGFWPDMGLPYRFGGYLFEKPPV

SEQ ID NO: 271966 - protein, 114 aa, Zea mays
  unsure (1)..(114): unsure at all Xaa locations
  Clone ID: MRT4577_179623C.1.pep
ANQKLLGIPSKKINVLGGAGSLGPPLGGRGAPILVPPIGVPRAKSGKIGVAGVSPGGGGAPALVXSSHKKSSPCGSQKSPEGIWESYFPGGEPQRTFFNLIWQKNEVGLLWVAK

SEQ ID NO: 271967 - protein, 119 aa, Zea mays
  unsure (1)..(119): unsure at all Xaa locations
  Clone ID: MRT4577_179624C.1.pep
MATHISQIKKFARGAGFYAEVNEMVTRELPEDGYSGAEVRVTPMRTXEIIIRATRTHNVLGEKDRRIKEVTSVGQKRFYFFYNGAQLYAEKVVNRRLCAIAQAESLRYKLLGGLAVRRA

SEQ ID NO: 271968 - protein, 455 aa, Zea mays
  unsure (1)..(455): unsure at all Xaa locations
  Clone ID: MRT4577_179625C.1.pep
MDPKGKRMVVNDKEKESFLNEPRDDKPTDSGSSHKKDGKKKRRIKKIVYYDSDGSSSSPRDDDYDEKKKLYGSVFINEQIHKNAQATTVLLASLCRDEYNKVSGLDNAKQIWDTLKISHEGNDATMITKMELVEGELGRFAMIMGEEPTQTYNRLKTLVNKIRSYGSTRWTDHDVVRLMLRSFTVIDPHLVNLIRENPRYTKMTPEEILGKFVSGRMMVKEARYVDGALNGTMPIYEPQPVTLKATSSNREALPSKVAQVEATGLNEDEMALIIKRFKTALKGRKEHPNKSKAKGKCSCFKCGKTGHFIANCLDNANDQEQEKSRKREKKKAYKKAKGEVHLGKEWDSDCSSSDSDDEGLAASAFNKSSLFPXNERHTCLMAKEKXEHVVICNRCKDFDVDACVEHLTSITKLNGEVASLNAQLKTCKNDFDKLKFARDTYTVGRHPSIKDGLGF

SEQ ID NO: 271969 - protein, 590 aa, Zea mays
  unsure (1)..(590): unsure at all Xaa locations
  Clone ID: MRT4577_179626C.1.pep
MDPKGKGMVVNDKEKESIFNEPRDDKPTDSGSSHKKKDGKKKRRIKKIVYYDSDESSSSPRDDDYDEKKKSVNSNFSFDYSCIPYNSNAHLLSIPLGKPPHFDGEDYAFWSHKMCSHLFSLHPSIWEIVENGIQFDSTDNPVFINEQIHKNAQATTILLASLCRDEYNKVSGLDNTKQIWDTLKISHEGNDATMITKMELVEGELGRFAMIRGEEPTQTYNRLKTLVNKIRSYGSTRWTDHDIIRLMLRSFTVIDPHLVNLIRENPRYTKMTPEEILGKFVSGRMMVKEARYVDDALNGPMPVYEPQPVALKATSSREALPSKVAQVEAAGLNEDEMALIIKRFKTALKGRKEHPNKSKAKGKRSCFKCGKTGHFIANCPDNANDQEQEKNEKREKKKAYKKAKGEAHLGKEWDSDCSSSDSDDEGLTASAFNKSSLFPNERHTCLMAKEKKNRLLEXQEDILYEEHDKXLCKDFDVDACVEHLTSITKLNGEVTSLNAQLKTCKNDFDKLKFARDAYTVGRHPSIKDGHGFRKEVKNLTSQRAPIPNKEKGKAPMASSNQKNHAFMYNDRKXRSSHYNRSYNAFDSHAM

SEQ ID NO: 271970 - protein, 273 aa, Zea mays
  unsure (1)..(273): unsure at all Xaa locations
  Clone ID: MRT4577_179627C.1.pep
MAIKRTKAEKKIAYDKKLCSLLDEYTKVLIALADNVGSKQLQDIRRGLRGDSVVLMGKNTLIRRCIKVYAEKTGNHTFDPLMDLLVGNVGLIFTKGDLKEVREEVAKYKVGAPARVGLVAPVDVVVPPGNTGLDPSQTSFFQVLNIPTKINKGTVEIITPVELIKKGEKVGSSESALLAKLGIRPFSYGLQVTSVYEDGSVFSPEVLDLSEEDLIEKFATGVSMVASLSLAISYPXPVAAGDSGAAAAPKEEEKAAEPEEESDEEMGFSLFDD

SEQ ID NO: 271971 - protein, 50 aa, Zea mays
  Clone ID: MRT4577_179628C.1.pep
INARLVLDQFEQGPLHIMTKKLILVQHGGTKHQRIPNFDHYQQDIKTKEE

SEQ ID NO: 271972 - protein, 184 aa, Zea mays
  unsure (1)..(184): unsure at all Xaa locations
  Clone ID: MRT4577_179629C.1.pep
DRAGRLGRAGASRSFVAVAVPIQLLDRSAGPQAAPRKALCIALARKGLFVTVIDLSEENGREVASLVQKENKHVHQYARVPSAIFIKCDVTNGEDLAAAFRKHVDTFGGLDVCINCAGFVNKSLVYDDKSDGTSTWRRAVNVNLVAXIDGTRIASQVMRSQKKPGVIINISSVAGIYPMSYEPV

SEQ ID NO: 271973 - protein, 54 aa, Zea mays
  unsure (1)..(54): unsure at all Xaa locations
  Clone ID: MRT4577_17962C.1.pep
LXCVELWXLICQVLVGSWCHGSSIDXGSHHPCLISSAXRGNKSXYFLFLLLSYL

SEQ ID NO: 271974 - protein, 98 aa, Zea mays
  Clone ID: MRT4577_179631C.1.pep
ETHIIPNCYMHIFASLFLENVELEFCEEFRSHFLWFQDRLNKSTNNACSYMDIFATRFLEYVSLEFPEEFRSHVLWLQDRLNITANDSDPIYEHFCLV

SEQ ID NO: 271975 - protein, 91 aa, Zea mays
  Clone ID: MRT4577_179633C.1.pep
RGGTGKEGVQSLREMGEGQRVSVSEDKSSQKYSTLFLPYTRASLRTNALSRRSSNGNGPRALNTHCAPTRGTIPYSTVPITLPSDSARTSS

SEQ ID NO: 271976 - protein, 98 aa, Zea mays
  unsure (1)..(98): unsure at all Xaa locations
  Clone ID: MRT4577_179634C.1.pep
YGXNIFXIXXGGMMVVFGYTTAMAIEEYPEAWGSGVEVLVSVLVGLAXEVGLVLWVKEYDGVVVVVNFNSVGSXIIYEGEGSGLIREDPIGAGALYDY

SEQ ID NO: 271977 - protein, 98 aa, Zea mays
  Clone ID: MRT4577_179635C.1.pep
HHHAHSRYGHGLIMRSPVSPMDAYMVLAASASPSPSPSPSSGGAVVTISREEEEREEKAIASKGFYLHASPRGGDGDRPMLLPLFPVQSPRISELRRG

SEQ ID NO: 271978 - protein, 85 aa, Zea mays
  Clone ID: MRT4577_179636C.1.pep
HSNSLIQFDQILIMRYKERKKKKRNQEKKNTRWIWMHGEVLYWRLEKYYTPATATARQRERAAKAWFTSTASPAAAATRTPRRTP

SEQ ID NO: 271979 - protein, 347 aa, Zea mays
  Clone ID: MRT4577_179637C.1.pep
SGPTRATQLVLQAHKEAVNSLGENGPAKLGTVATVVAVANATAIEATKEVEAAMKISLRAALGSTTHKLTKGQLDDLTIMMETLRVKDDELHQLLQDIRARDSTINEIADKLQETAEAAETAASAARSIDEERRFFTLELERLKQDHEKQVEASLLRLRESEEKAKLLVEERDRLLTERDSALQEAQMWRSELGKARGNAVILEAAVVRAEEKARVSAADADIRIKEAMNRLESATKEKEDLLALVDALQSQIQRQETSTIQVCEESSELCSTASKHMEDDNVDKACVSDPDSVPVTENVVELDDEGVDIPTVGDTEWDDPRSSEVSDVREVTTEPEENSLDIPVDT

SEQ ID NO: 271980 - protein, 135 aa, Zea mays
  unsure (1)..(135): unsure at all Xaa locations
  Clone ID: MRT4577_179638C.1.pep
MASNRSSSTVVGEMQSRLDRVRRQLSSTSTRHLLQGPLLKRSDTLRKWNERWVILDPATGKIEYKVNRSDKDVRGVVVFDSTSTXVTLSPTNFHGLXKYEGCCFCIHTVVSFAFVMFTPLLPFWSAIWVPFGPLN

SEQ ID NO: 271981 - protein, 98 aa, Zea mays
  Clone ID: MRT4577_179639C.1.pep
GTYFFRQETSTIQVCEESSELCSTASKHMEDDNVDKACVSDPDSVPVTENVVELDDEGVDIPTVGDTEWDDPRSSEVSDVREVTTEPEENSLDIPVDT

SEQ ID NO: 271982 - protein, 68 aa, Zea mays
  Clone ID: MRT4577_17963C.1.pep
TPGVKGPVQGGFQLPIRLGNCLERRSVRAFLVIPQLAKRGFSPKPFSWGTPRFFPIPDVGKPRPINLN

SEQ ID NO: 271983 - protein, 256 aa, Zea mays
  Clone ID: MRT4577_179640C.1.pep
SVTLSLLFPYRASYRPTPASSFAFPYPLRRDLTGTWEISLAPRSCVACAAAPRHATPRAQVVGEMQSRLDRVRRQLSSTSTRHLLQGPLLKRSDTLRKWNERWVILDPATGKIEYKVNRSDKDVRGVVVFDSTSTVTLSPTNFHGLAKYDGCCFYIGTPQKKEYFLCAETPSAARAWVSTLHATQLVLQAHKEAVNSLGENGPAKLGTVATVVAVANATAIEATKEVEAAMKISLRAALGSTTHKLTKGQLDDLTI

SEQ ID NO: 271984 - protein, 229 aa, Zea mays
  unsure (1)..(229): unsure at all Xaa locations
  Clone ID: MRT4577_179641C.1.pep
MVPLDPCNKPTSQRRITEGDTVVVYERHDSMRAVTVSAAGVLQNRFGVFRHADWLGRHFGSKVFSSGGXGGKGGRKAGGGFVHLLAPTPVLWTLVLSHRTQILYIADISLVVAYLELVPGCVVLESGTGSGSLTTSLARAVAPHGRVYTFDFHDQRADSARXENFEKNGLSSLITVAVRDIXGEGFPDEYSGXLPDGVVLDLPQPWLGIPSAGXMLRTDGVLCSFSPAL

SEQ ID NO: 271985 - protein, 387 aa, Zea mays
  unsure (1)..(387): unsure at all Xaa locations
  Clone ID: MRT4577_179642C.1.pep
ASYRPTPASSFAFPYPLRRDLTGTWEISLAPRSCVACAAAPRHATPRAQVVGEMQSRLDRVRRQLSSTSTRHLLQGPLLKRSDTLRKWNERWVILDPATGKIEYKVNRSDKDVRGVVVFDSTSTVTLSPTNFHGLAKYDGCCFCIHTVVSLRCHVYSLLLFVWHLVRLHSLTSVLDIGTPQKKEYFLCAETPSAARAWVSTLHATQLVLQAHKEAVNSLGENGPAKLGTVATVVAVANATAIEATKEVEAAMKISXLRAALGSTTHKLTKGQLDDLTIMMETLRVKDDELHQLLQDIRARDSTINEIADKLQETAEAAETAASXARSIGEESRCXTLELERLSQDHVKQVEASLLRFWESVEKAXLLVEERDRLLTXRDSALSEAQM

SEQ ID NO: 271986 - protein, 91 aa, Zea mays
  Clone ID: MRT4577_179643C.1.pep
PFGVPNTVGTVAGEHPFGEHPSRTLFVRNINSNVEDSELRSLFEQYGDIRTLYTATKHRGFVMISYFDIRAARNAMRALQNKPLRRRKLDI

SEQ ID NO: 271987 - protein, 65 aa, Zea mays
  Clone ID: MRT4577_179644C.1.pep
TRGGRPRYFFLEFDRRTRAASALIKKTGHGHSQRKRDPRAGGRLKKERKDAEGFPRRGRAPQEGK

SEQ ID NO: 271988 - protein, 79 aa, Zea mays
  Clone ID: MRT4577_179645C.1.pep
RPPFFFFFFFFFLFLGGGNNISGAWAKNSCKQKPGQFFYRVVSQPGQPKGPSGVPTTKPWVEAGAYTCDTRIRRRPPLI

SEQ ID NO: 271989 - protein, 110 aa, Zea mays
  unsure (1)..(110): unsure at all Xaa locations
  Clone ID: MRT4577_179646C.1.pep
MAFGELACTYAXSILMRRPGSLITXEKIDTIXKAANIKTKXYWPALFSKLLKNRIVEDLILSNGSGGGSAPYAAVXPAEGAASDAAPAADEKKESXKEESVDYMGLXLFD

SEQ ID NO: 271990 - protein, 91 aa, Zea mays
  Clone ID: MRT4577_179647C.1.pep
SKAPPCKNAVPVPLERGPPKRPNWGPLKSKSPPTPPVWRKIPKFFPKSGPGPRSQPPLSFFIMLIFIWSFLHIYICVSSFFYLFYPPGRPP

SEQ ID NO: 271991 - protein, 52 aa, Zea mays
  Clone ID: MRT4577_179648C.1.pep
SGGHNERKYNRLVLIQAMGCQFSKAFTTYAGSLNCLVGRMCYCMRISRLHVS

SEQ ID NO: 271992 - protein, 35 aa, Zea mays
  unsure (1)..(35): unsure at all Xaa locations
  Clone ID: MRT4577_179649C.1.pep
TRRWGWSLLLLYEXQLLAIIYKIKNFIISSATSKI

SEQ ID NO: 271993 - protein, 46 aa, Zea mays
  Clone ID: MRT4577_17964C.1.pep
IRLELFPPASINHTPTRRTRAGLKTESRSRRHETTHKMPAEARTMM

SEQ ID NO: 271994 - protein, 241 aa, Zea mays
  unsure (1)..(241): unsure at all Xaa locations
  Clone ID: MRT4577_179650C.1.pep
MPASPYSSYTLVLGLFLVSLLLLHSPRPCSCANYHTLAAGQALAVGDTLVSRNGKFALGFFPSGTTTTPAAAASKSSSDINTTAVSNWYLGIWFNKIPVFTPVWIANRDDPFTDPNNKLLPKRTLQISRDGNLVVVQEDNNAPQRTETLVVWSTGIITNNASSKTTTSINTNTTNTVAELTHNGNLVVRDASATDAXKVRWQSFDYPTDVYLPGSKLGRNKVTGLNRVFVSRKNRANPARG

SEQ ID NO: 271995 - protein, 41 aa, Zea mays
  Clone ID: MRT4577_179651C.1.pep
LQFFVGEPLKDNASVVFPYSKDGAPNPPFPYFSHGLKEIKC

SEQ ID NO: 271996 - protein, 61 aa, Zea mays
  unsure (1)..(61): unsure at all Xaa locations
  Clone ID: MRT4577_179652C.1.pep
TAINPNRPFRPPCSKAKTPFFRGLSLDIQLRRENVVALNGHSRTFXTITRXYITARRAVDP

SEQ ID NO: 271997 - protein, 96 aa, Zea mays
  Clone ID: MRT4577_179653C.1.pep
GANKSTQQTIGHKVKSGFPVVLSVSMGLRATSSDTDLLIHLFASCLFASCIAFIFSRVKTLAILPSADGVVELHTSLDGSLWVFAPCHARARVNRG

SEQ ID NO: 271998 - protein, 29 aa, Zea mays
  Clone ID: MRT4577_179654C.1.pep
RNSVSITLTSSVCDRPTYNYPTHILCCFA

SEQ ID NO: 271999 - protein, 150 aa, Zea mays
  Clone ID: MRT4577_179655C.1.pep
QKLTRVRQTSIQFSASNAPSYPVSSAGSIKSTHTDSWTRAANLSKTPPFEFEHTSSGAAPGGALPVAEEDEATARHRGGRAQDRRLRGGRRRIDGDGDRAGDGRRRAEGGRRARGGEEAERDRGGTRGAAGEQRGNRRSWSSHLPVAIRK

SEQ ID NO: 272000 - protein, 101 aa, Zea mays
  Clone ID: MRT4577_179656C.1.pep
RRDKYYGWVISGPYRRSGPAISSAHTYILMRSRTWRPPDQVDSHATQSIYMDTDQNPDTPISNVVTDNMLGLYIYTDELVLADAVQKKSTQAADLEDHCLL

SEQ ID NO: 272001 - protein, 73 aa, Zea mays
  Clone ID: MRT4577_179657C.1.pep
PCFRISRDFKTCPWPIMVSFWSHNQQICSAQLITSTAVHIILSNKNTILSFGCMVMVLSLTRYAFSPFGLCFW

SEQ ID NO: 272002 - protein, 108 aa, Zea mays
  unsure (1)..(108): unsure at all Xaa locations
  Clone ID: MRT4577_179658C.1.pep
YTFLTRTCLIQGLRSVAMGETAILMDRFDFIAALRAIERYRVTLLPVTPPRMRATXDLSSLLFIGIGGAPLSREVAERFAAIFPNIELIQVPCLIGFVLLIFSYSVPY

SEQ ID NO: 272003 - protein, 114 aa, Zea mays
  unsure (1)..(114): unsure at all Xaa locations
  Clone ID: MRT4577_179659C.1.pep
LVARPNEHWTGNLVYDGDLTXPHAEDMIFLXATRCCTLRSINXRCTEITCTPTHADQICMIXRTLLRKLAYSHPMRSAIPTQEALPTTVLSKREMLARYLQDTLKCSYCTGAYA

SEQ ID NO: 272004 - protein, 73 aa, Zea mays
  Clone ID: MRT4577_17965C.1.pep
LQGPRSRRSQRRHRIGSSSSPAVRKGSRGTEVTLLPRNWGLGGTNLVVSTRPTPCLARPVEPGGGQRRRAAQA

SEQ ID NO: 272005 - protein, 105 aa, Zea mays
  Clone ID: MRT4577_179660C.1.pep
GTSSRPGKITPQSTTTEGGATAGLRTSSDDKAAHERVQRLQHGYSPPSPALRSAWLPRLRPPLRSAWIPRLQPSSFQDSSSFQRPIPCCTEAYSLAYFEVEFTKL

SEQ ID NO: 272006 - protein, 65 aa, Zea mays
  Clone ID: MRT4577_179661C.1.pep
TRPKRYNETDSNPTQVTWPLDDSCITAWPHIAWSRNLARSGLHKLPNRPYSYLDVRYMPSAHYLQ

SEQ ID NO: 272007 - protein, 91 aa, Zea mays
  Clone ID: MRT4577_179662C.1.pep
FPPLEGAVRAPQFRWVGPLIGRGWFFPFCGRLLCCWGLWPVVVFPQESVMAVLPGKCGGFPDRECWEAFQGRVRDFWGSSRVRLRVQMCGL

SEQ ID NO: 272008 - protein, 119 aa, Zea mays
  Clone ID: MRT4577_179663C.1.pep
MALRGVWQLQKLVVNYCDWGGSSRGIRAFMEAHLPAFKEKIPHLEVVTELVRGQHPNLKGIYKNHNERVVCVRNLPPEEILLQATRLRNSLGRKVVKLRTRHVTKRPSVQGTWTTELKM

SEQ ID NO: 272009 - protein, 130 aa, Zea mays
  Clone ID: MRT4577_179664C.1.pep
RREIPKQGNLKTTRSLSTSSASEISPHLPGPLADSGGQHRSQIRERVGATHQRLREWRNTVDEARRAGTNPSTARLGQRNKAPNIRECPNEGGPRVRTSRPKMGGRGGSLHTPNHASAYQAKERWGPATQ

SEQ ID NO: 272010 - protein, 101 aa, Zea mays
  Clone ID: MRT4577_179665C.1.pep
IIKTGFQAITLNIFFTAGPDEVKGWQIRRQSKAPQAAGPIHTDFERGFICAEVMKFEDLKELGNEPAVKAAGKYRQEGKTYVVQDGDIIFFKFNVSGGGKK

SEQ ID NO: 272011 - protein, 134 aa, Zea mays
  Clone ID: MRT4577_179666C.1.pep
HWVPRGRPGPGNVTSPRSNSPRLTNPREPPWRRTATASLLGGWNPIPDVSDSHIQELGGWALGQAKHQKLAADGLRFRRVVRGEQQVVSGMNYRLYVDAADPAGRTVPYVAVVYEQVWTRTRQLASFNPVPRAH

SEQ ID NO: 272012 - protein, 67 aa, Zea mays
  unsure (1)..(67): unsure at all Xaa locations
  Clone ID: MRT4577_179667C.1.pep
KEKPPRGHKXDQHTTATTDGAXGQQGHNGSAHGQQGHTDRANATGTEGTGEKKGNKDKNKEKXPGQX

SEQ ID NO: 272013 - protein, 130 aa, Zea mays
  Clone ID: MRT4577_179668C.1.pep
MATHRHCLPLLLVAAALALAAVPARAALGGGRGPLLGGWNPIPDVSDSHIQELGGWALGQAKHQKLAADGLRFRRVVRGEQQVVSGMNYRLYVDAADPAGRTVPYVAVVYEQVWTRTRQLASFNPVPRAH

SEQ ID NO: 272014 - protein, 301 aa, Zea mays
  Clone ID: MRT4577_179669C.1.pep
ARGDSTFLRLNNLDINGDDAPSSQAPTSKKKRRGTRAVGPDKGNRGLRQFSMKVCEKVESKGRTTYNEVADELVAEFTDPNNNIEAPDPDNPNAQQYDEKNIRRRVYDALNVLMAMDIISKDKKEIQWKGLPRTSISDIEEMKTELVGLKGRIEKKSAYLQELQDQYVGLQNLIQRNEQSYGSGNTPSGGVALPFILVQTRPHATVEVEISEDMQLVHFDFNSTPFELHDDSYVLKEMRFCGREQHDSTQESISNGGESSSVSNIYWQHVQHVERPNNGTGRLPSSPPIPGILKGRAKHEH

SEQ ID NO: 272015 - protein, 71 aa, Zea mays
  Clone ID: MRT4577_17966C.1.pep
IITPAGPHRRGGTNAQEGEHHPQTTKHQERDSEREPEKEHGARNSDNHAEEETPHPRRGQGTDTGRRAKQA

SEQ ID NO: 272016 - protein, 136 aa, Zea mays
  Clone ID: MRT4577_179670C.1.pep
RPFSKKSRLPDLSPPDSRIPESLHGDAPPLPPTPPCSRGPLLGGWNPIPDVSDSHIQELGGWALGQAKHQKLAADGLRFRRVVRGEQQVVSGMNYRLYVDAADPAGRTVPYVAVVYEQVWTRTRQLASFNPVPRAH

SEQ ID NO: 272017 - protein, 40 aa, Zea mays
  Clone ID: MRT4577_179671C.1.pep
HNIIQIKIKMGQPTFYTQPKGGTTVSANYSALKFHFTYLP

SEQ ID NO: 272018 - protein, 55 aa, Zea mays
  unsure (1)..(55): unsure at all Xaa locations
  Clone ID: MRT4577_179672C.1.pep
IVPNVGVAWVILIHXXRRALMREINDFDVNMLANALAQALKVIACVXMTLDQMHA

SEQ ID NO: 272019 - protein, 279 aa, Zea mays
  Clone ID: MRT4577_179673C.1.pep
PHILVQCVALGLSRCGQVAFHESVLRCVCMGLLKELLPLPDFLRRSVQNAGGNSNEVIKAQVNKHLDSVLFKEAGPVTGVLCNQYTYANDKAKSFVETCVWEYAQEIYRHLRAVVFLHRGKQDGLITAIDKNAEASFLMVVVFAAEVAKHRLNAKSSEGFQPEVAARILVAFSCVEHLRRLRLPEYTEAVRSAVLANQENAAATALFIESIPSYTELTSKPDLLALDGTTTYNWYRDEVQTSRMLFYLRVVPTLCSLIPVHTMQDKLGSIMVLYLHIQM

SEQ ID NO: 272020 - protein, 299 aa, Zea mays
  unsure (1)..(299): unsure at all Xaa locations
  Clone ID: MRT4577_179674C.1.pep
NEQTLSKTLSHIHPAAASSSPFQLRRNPNPPGEVAMSNPKGSKMLQFINYRMRVTIQDGRQLVGKFMAFDRHMNLVLGDCEEFRRLPPSKSSKATGEREERRTLGLLLLRGEEVVSMTVEGPPPPDESRAKAAAAGGALAGPGVGRAAGRGVPTGPLLQAAPGLAGPVRGVGGPAPGMMPFRYWRPGEPSQRVHHSSFXREMGPCTWRGQDLYPSRWRRLXVRKXRMPGWTPATVFVAAPHQPMRGPSPMGSPQVWPGMPGPPPPGMRPGMPPPPFGQPRPGMPPPPPGPQQPGQNPPQ

SEQ ID NO: 272021 - protein, 61 aa, Zea mays
  Clone ID: MRT4577_179675C.1.pep
RRANTAYHGEGLRVKQPIRAPWQLLDADGKIRVQPQGHHRGGRPWTGSTPPGGCMSRIRRR

SEQ ID NO: 272022 - protein, 273 aa, Zea mays
  unsure (1)..(273): unsure at all Xaa locations
  Clone ID: MRT4577_179676C.1.pep
SPRPPFPAXAMSNPKGSKMLQFINYRMRVTIQDGRQLVGKFMAFDRHMNLVLGDCEEFRRLPPSKSSKTTGEREERRTLGLLLLRGEEVVSMTVEGPPPPDESRAKAAAAGGALAGPGIGRAAGRGVPTGPLLQAAPGLAGPVRGVGGPAPGMMQPQISRPPMPNLSAQPVSYPQVVRPPQGMPPPMRPGMPPQMPMQFRPPGAPPAPFPGAPPQQYMRGPPPMGPPQVRPGMPGPPPPGMRPGMPPPPFGQPRPGMPPPPPGPQQPGQNPPQ

SEQ ID NO: 272023 - protein, 200 aa, Zea mays
  Clone ID: MRT4577_179677C.1.pep
SWSGLGSTGKKKKKKKKKKKKKKKKKKKKRFEAGVAREVVNRIQKLRKTAQLEPADPVDVYYESVGNDKNTLEEILKSQDQYIRDALGSPIVPKEMAPTDVVVLGEESHNVHDMSFVICIARSTPILAPDLLSHASGKSNHVEALRVYLLSRSLSRLKNQFQAGKGMITVDCIEGYPPVSLLLGKHVFLSAGDFYLASRS

SEQ ID NO: 272024 - protein, 42 aa, Zea mays
  Clone ID: MRT4577_179678C.1.pep
IFFTLCLYIYVIIFFFPFLIYFFSRKKNTLFIQELCLNTSRF

SEQ ID NO: 272025 - protein, 48 aa, Zea mays
  Clone ID: MRT4577_179679C.1.pep
MENDEEEEGYVKVGTRPYRVAMRPSGAAARRRIHYLECCYLRKESIAR

SEQ ID NO: 272026 - protein, 103 aa, Zea mays
  unsure (1)..(103): unsure at all Xaa locations
  Clone ID: MRT4577_17967C.1.pep
SSSRGTAASPPPPPPSTRRRRSAPARGARARGAASLPPRLAGRPHKAIVVSRLELPAEKVVVICPGGLACVQRERRXWARSVPPRFPAASPGAGGAGDPSPCP

SEQ ID NO: 272027 - protein, 111 aa, Zea mays
  unsure (1)..(111): unsure at all Xaa locations
  Clone ID: MRT4577_179680C.1.pep
PTAPVAXXRRPPARAAGXPARGPEGAWMTSIAMRKRAAPPPPGTPCPPPPRGGDGGGASGQAAPPADGRCCRCRCRLRLLLLPAPCRSAEIKGRFFFFSLFPFVSDENTYG

SEQ ID NO: 272028 - protein, 80 aa, Zea mays
  Clone ID: MRT4577_179681C.1.pep
LHNGQPKWLLCFIPNYPMLIFMLTIAIYLLAWKESNWGTREKDPASPILGGRKKLAPPLQQEEGGGSKPTRRVQSEGAPR

SEQ ID NO: 272029 - protein, 89 aa, Zea mays
  unsure (1)..(89): unsure at all Xaa locations
  Clone ID: MRT4577_179682C.1.pep
TAHYVXALGVARFLSCAHWVLQVLDTRGRLLTALGYGLWPYMVLFSEIVQTFILADFCSYYVKSLYSAAACTSLTPPLREAVAPSAHQP

SEQ ID NO: 272030 - protein, 73 aa, Zea mays
  Clone ID: MRT4577_179683C.1.pep
MSSTECGGGGGGAKTSRPEEVGLSVKDAKKVILKDKTDADIVALPDGSAPTAHYRPNRVRIFYYIDHHTPPIG

SEQ ID NO: 272031 - protein, 44 aa, Zea mays
  Clone ID: MRT4577_179684C.1.pep
NDTVLLQFGKVDRNMFTMDYGQPFSEFKAFAISLSSFGTKLACE

SEQ ID NO: 272032 - protein, 75 aa, Zea mays
  Clone ID: MRT4577_179685C.1.pep
GAKAAWTAIRRALIERPAIPLCLGSLGSERSYLLRGAVREQRPQLGTYRLLTFEASTHNYGSLQPSGRWLCSRAR

SEQ ID NO: 272033 - protein, 83 aa, Zea mays
  Clone ID: MRT4577_179686C.1.pep
KPGLKPCIVQAFSEPGLKIQPFFNLAIFPLLGYTDNIDKLSPVHKLPDDPDELVGGLTVRVHGEKPMPLPREHEEVDGLSGRF

SEQ ID NO: 272034 - protein, 41 aa, Zea mays
  Clone ID: MRT4577_179687C.1.pep
RSLTTAMIVRQEIACASSPLVCNTVHHQSSLLLNLNQAGWV

SEQ ID NO: 272035 - protein, 81 aa, Zea mays
  Clone ID: MRT4577_179688C.1.pep
AKSLYPIKCGGGFLPGGKSCFAQSRGVNHEEFPPEIFLGGFLCQFQFQFPFKAVIRVRLSRKAPDNKKGPQWEKKKVKKYK

SEQ ID NO: 272036 - protein, 153 aa, Zea mays
  unsure (1)..(153): unsure at all Xaa locations
  Clone ID: MRT4577_179689C.1.pep
RANFCGFALSRGGPCQAILITRVPPPPLCGWGHDFHIAPRAVALLHSSGFWEKPGXVAQFNGVAGNPPFSSCPNFKEARPFPLSQHLHNLNADXPSPCTGALTAGGVAVSPRVTVTLARALTPIPSATFPSFLATGAFFSFFALFPGLPFGFR

SEQ ID NO: 272037 - protein, 88 aa, Zea mays
  Clone ID: MRT4577_17968C.1.pep
FPSQLVTSGSWTDKFLVLHQGNQSRAPAVAVPVFSNKDAASPRKRKGPTRIVRPGAPSFVRRRESGDVKVQQGGGAGVHWRGIRVSKG

SEQ ID NO: 272038 - protein, 56 aa, Zea mays
  Clone ID: MRT4577_179690C.1.pep
AEASMELGSIRSWLNLSRRNRPLIPPLTKVAAASTLRLFLQPTLETGRYLSKYQFR

SEQ ID NO: 272039 - protein, 166 aa, Zea mays
  Clone ID: MRT4577_179691C.1.pep
MSEDKNEEYSDPQIIRDILGECEQFEFCMKILAHSFYARPKRSNQELTKLRDSLQAVSPKSFEGVAAKMLKFSYNDLPKEYKSCLLYLAIFPPGRSIRRSTLVARWVVEGLINRDDWNAAVRQSDRCFEALIDRGLVDPAEISGTGKAKICHSTNRSNGLRTVTSD

SEQ ID NO: 272040 - protein, 89 aa, Zea mays
  Clone ID: MRT4577_179692C.1.pep
RVQPCAACCWHSFMGDRSPRLSWSDLHLFKVPVATTLLSEPDSCAVPTEPSEELDAPLACAIGLSLAPMATTFTVRRRTLSAERRKNAW

SEQ ID NO: 272041 - protein, 87 aa, Zea mays
  unsure (1)..(87): unsure at all Xaa locations
  Clone ID: MRT4577_179693C.1.pep
PXXPAMIPXVLAHRRWPKXQLALCSIXLLXTMLXLXLFLTMAAAQSXXIFGRLXQDXGXLGXRXRIXXFLXXXSXGHPCASXFAWXR

SEQ ID NO: 272042 - protein, 76 aa, Zea mays
  Clone ID: MRT4577_179694C.1.pep
MLFSGNEIVPYESPRPPAGIHRIVFVLFKQQARQTVYAPGWRQNFNIRDFSAIYNLGAPVAALYFNTWTWPFCVFR

SEQ ID NO: 272043 - protein, 49 aa, Zea mays
  Clone ID: MRT4577_179695C.1.pep
TPMPSSTKPNFFCPSPTISFPTPLIQPPIPHSRTPPMLKKKTFHYNPSF

SEQ ID NO: 272044 - protein, 116 aa, Zea mays
  Clone ID: MRT4577_179696C.1.pep
VPCFFPPLLLFLAWLFFLSPLLRFAPPFLPFAFSPLASLVLFPFPSGRVSLFCVGLPLLPVFSFARPVRSGRLLVGVCFVPSRPFLPPGSLRAPLASRPLRAPLRVLGRVGRPGLP

SEQ ID NO: 272045 - protein, 380 aa, Zea mays
  unsure (1)..(380): unsure at all Xaa locations
  Clone ID: MRT4577_179697C.1.pep
PRVRQNDLHELWSLLEFMMPDIFATGDVDLKKLLNAEDRELISQIKSILGPFILRRLKSDVMQQLVPKIQHVKFVVMGTEQSEAYKNAINEYRAACQARSAKSSDGISNNVAGLIPKRQISNYFTQFRKIANHPLLIRCIYGDKDVDRIXRLRYPKGAFGFQCSLERAIQELKNYSDFNIHQLLLSYGDVGTKGALKDEHVFASAKCQALGELLPSLANDGHRVLIFSQWTTMLDILEWALEIIGVTYRRLDGGTAVTERQTIVDTFNNDLSIFACLLSTRAGGQGLNLVGADTVIIHDMDFNPQMDRQAEDRCHRIGQQKPVTIYRLVTKDSVDENIYEIARRKLVLDAAILHSGAELDNSTDVPEKTMGEILASLLLV

SEQ ID NO: 272046 - protein, 62 aa, Zea mays
  Clone ID: MRT4577_179698C.1.pep
CTPMASLTTTLSYSDSHRNQLKETCLCLLHTPSEVRRQPSSCHRQLGADWHHRHLQLTTGQC

SEQ ID NO: 272047 - protein, 54 aa, Zea mays
  unsure (1)..(54): unsure at all Xaa locations
  Clone ID: MRT4577_179699C.1.pep
GTGHSFSSFFFFFFFFFFFFFFFFFFFFFFFFXFNSKNLLKPGIRPPIKHIPPI

SEQ ID NO: 272048 - protein, 69 aa, Zea mays
  Clone ID: MRT4577_17969C.1.pep
HLVGHLRNSLALRTYRQIPSESPVMSATRRRSTTQARASWSVSQYRSIKIHPWLLVRILLLLVFALDSP

SEQ ID NO: 272049 - protein, 39 aa, Zea mays
  Clone ID: MRT4577_1796C.1.pep
SDAPSGSAGSDDAAPTGAAGARAVGWSFSGLAAVLGCLL

SEQ ID NO: 272050 - protein, 251 aa, Zea mays
  Clone ID: MRT4577_179700C.1.pep
SGPSPATGTTSMDESRKRAVSTANGKNISSSLDEDFGNDFLSSWKLPKSGKDTIDFSVDSVPKSSKKFSFDNLDDFGLNGAFDKLPSFQMGMSDLDFSSPDKKKVKHTSSNADLFEKKKETDKDNFSFSFDFNELGKFSLDGKLGIEEKSTNRFNGKSDPVSSEVKKDTQRGLLAKGNAILEENNSKDKMHTLDTRTSRPSHLTNHENVKNASQPTSNIDVADSSDKMQEHTSVNPGTMGQTVDSVLNDNP

SEQ ID NO: 272051 - protein, 107 aa, Zea mays
  Clone ID: MRT4577_179701C.1.pep
HWDPRGRPGTLSQAVANQTGLHSPYILSARHAAIYSTALLRLSLLQGRTHHPEYDDPVLLLTERLHSGTRPPMRSPGTRGSPHWRTISHSELSLGVLWRYGKFYPSP

SEQ ID NO: 272052 - protein, 153 aa, Zea mays
  Clone ID: MRT4577_179702C.1.pep
RKNRRGGAEINPKQGPGIRPPKKTEGIIPGLKINQKFQRRQFGPRGSAKRPKNTGVKSKAKHSFRKAPRNWAIQTKKKHGPSPEKNRSKRGQPLPPALGSRGGGCLAPTRGSTQGGARAPHQRGRGPSWTPAITGGNRSWSTPPISPSGSNRG

SEQ ID NO: 272053 - protein, 88 aa, Zea mays
  unsure (1)..(88): unsure at all Xaa locations
  Clone ID: MRT4577_179703C.1.pep
RLDRERPPLVFFFFGGRKNFFDLPDREKTKPGPDQKNLGHAPMLNESPDPEHQVKPDYKERYYIGVEVPAHDPXANRSFYGPNQRPSK

SEQ ID NO: 272054 - protein, 45 aa, Zea mays
  Clone ID: MRT4577_179704C.1.pep
SSHKIMQVENLFEHHLSSHQLCDLMDYLLQRALVRQFVIECLGLV

SEQ ID NO: 272055 - protein, 69 aa, Zea mays
  unsure (1)..(69): unsure at all Xaa locations
  Clone ID: MRT4577_179705C.1.pep
EEYELSWPVLSXQVIDPVSQRHMVTHHMTRCRTPLVLCAFLGAILSCHVIYNIEGETAYVRGLPLDAHG

SEQ ID NO: 272056 - protein, 52 aa, Zea mays
  Clone ID: MRT4577_179706C.1.pep
VNKNGLEFGIEHFAVLVLIDCLLVANLKATEVFFSCYENCATIYIYSGTCSM

SEQ ID NO: 272057 - protein, 73 aa, Zea mays
  Clone ID: MRT4577_179707C.1.pep
EAPDCVYLLLNLCLLCSRCLVFCSFVISQVLNEWLPCVDNEQSVVPEGVAGDFPMQQLGEGKCSLTHYGLLTL

SEQ ID NO: 272058 - protein, 184 aa, Zea mays
  unsure (1)..(184): unsure at all Xaa locations
  Clone ID: MRT4577_179708C.1.pep
IPASHSSPYAIPLSHTAAGSDSISLAPRTPKLHGRPAPSLAELWLLPWRHPFPRRPSSSGWCAGPLPPHAERPCVPFSPSAPWPVPCSPRNPAGRVGAPSPSGSMMLGGSPPRPALQPGVHGVGALPQQCAVDPLHSPANIFHRTPMSFPTSNVGTAREHKLRAPLXPLVRAQGAPAFPWPSST

SEQ ID NO: 272059 - protein, 38 aa, Zea mays
  Clone ID: MRT4577_179709C.1.pep
KKWMRYKSSYKCESTQQSYDTKLAPDEIPTPDQSDHLI

SEQ ID NO: 272060 - protein, 72 aa, Zea mays
  unsure (1)..(72): unsure at all Xaa locations
  Clone ID: MRT4577_17970C.1.pep
LSCVSKDLGRLVIIEXNXFMFILHPSIXSHCRALSAGQHSNEQRMMVISPLLWQLSLHNDVRHVLHEGFQMP

SEQ ID NO: 272061 - protein, 169 aa, Zea mays
  Clone ID: MRT4577_179710C.1.pep
MAKDIEAAAAHEGKDYSDPPPAPLVDAEELTKWSLYRAEIDEFVGGVLFLYITVGTVIGYKHQTDAGGSGPDAVCGGVGVLGIGWAFGGMILMLVYCTAGVSGGHMNPAVTLGLFLARKVYMVRALLYIAWQCLRAICGVVLDKGLQSALYVRYSGGANELSAGYSKGT

SEQ ID NO: 272062 - protein, 76 aa, Zea mays
  Clone ID: MRT4577_179711C.1.pep
PPAPGTGARAPKVRSPPEQPMTVLLGVHCKPRTANAPADGPRHLICHAYPTTTYVCTNVWYAALCRAPRSMMDAHD

SEQ ID NO: 272063 - protein, 62 aa, Zea mays
  Clone ID: MRT4577_179712C.1.pep
PPPLSIRPIVPKMVVLRGGSQFSLPTHLPGKLIPWALGACLFSFFFPPGFCENLVVQRIWGP

SEQ ID NO: 272064 - protein, 293 aa, Zea mays
  Clone ID: MRT4577_179713C.1.pep
MGTVLDSHFLALTAIVTVGYQLLFFIITALLRFDKVTDFAGSTNFIIISILTLALKGAWHFRQIVLTVLVTIWGLRLGLFLLMRILQWGEDRRFDKMRDNLGKLAVFWIFQAVWVWSVSLPVTVVNASDRNPSIEARDIIGWIIWLVGICVEAAADQQKLVFKNSPSNRGKWCDVGLWKYSRHPNYFGEIFLWWGVFVASTPVISDAEWLVILGPIFLTLLLLFVSGIPLLESSADKRYGRLEEYRAYKNTTSPLIPLPPAVYGSLPAWFKVAFLLELPLYNPGPGGDPIKPE

SEQ ID NO: 272065 - protein, 128 aa, Zea mays
  Clone ID: MRT4577_179714C.1.pep
RPGRDPGKWCDAGLWKYSRHPNYFGEIFLWWGVFVASTPVISDAEWLVILGPIFLTLLLLFVSGIPLLESSADKRYGRLEEYRAYKNTTSPLIPLPPAVYGSLPAWFKVAFLLELPLYNPGPGGDPIS

SEQ ID NO: 272066 - protein, 292 aa, Zea mays
  unsure (1)..(292): unsure at all Xaa locations
  Clone ID: MRT4577_179715C.1.pep
MGTVLDSHFLALTAIVTVGYQLLFFIITALLRFDKVTDFAGSTNFIIIAILTLALKGAWHFRQIVLTVLVTIWGLRLGLFLLMRILQWGEDRRFDKMRDNLGKLAVFWIFQAVWVWSVSLXPVTVVNASDRNPSIEARDIIGWIIWLVGICVEAAADQQKLVFKNSPSNRGKWCDAGLWKYSRHPNYFGEIFLWWGVFVASTPVISDAEWLVILGPIFLTLLLLFVSGIPLLESSADKRYGRLEEYRAYKNTTSPLIPLPPAVYGSLPAWFKVAFLLELPLYNPGPGGDPIS

SEQ ID NO: 272067 - protein, 80 aa, Zea mays
  Clone ID: MRT4577_179716C.1.pep
CVRSPRVWRTQDPVQEGAGPPGSEQCEHSPAHAQKVALKEGISCSCPLGRGWFGSWPCGPGMVSAGGGCFWWARPSLVPH

SEQ ID NO: 272068 - protein, 67 aa, Zea mays
  Clone ID: MRT4577_179717C.1.pep
TRDHCLHMLGLKIEPNSLHLHDAMNTKRGNLLHTGNVQSVCHLRSVYFRPHLQLNRDQGFPNNFCTV

SEQ ID NO: 272069 - protein, 45 aa, Zea mays
  unsure (1)..(45): unsure at all Xaa locations
  Clone ID: MRT4577_179718C.1.pep
KSASQTGRITVTSLMYSWVIYHEXVXKPKNYIRHADCDRSSLADA

SEQ ID NO: 272070 - protein, 52 aa, Zea mays
  Clone ID: MRT4577_179719C.1.pep
CPQEVVNGLSIRQRACSPYHSSRQLGGRHSGRYHRGWSFPSGKVVIDRDRGW

SEQ ID NO: 272071 - protein, 90 aa, Zea mays
  Clone ID: MRT4577_17971C.1.pep
MGGGSGSFLKVLVNNMDVLAGPLVSLAYPLYASVRAIETKSAVDDQQWLTYWVLYSFITLFELTFAPVLEWLPFWSYAKLFFNCCCTEVH

SEQ ID NO: 272072 - protein, 143 aa, Zea mays
  unsure (1)..(143): unsure at all Xaa locations
  Clone ID: MRT4577_179720C.1.pep
SNTRSPFLAEYHITDTALRDQPTLGAARHXLLILHSLEATXSXHWLKKINLCSRSMKLHLKCTVSHNTLYAHFIRTIHCRSLYTECNKSLTHPMNIALLISLLYADTSGDMLLLLMLALLNNAFYFKPLMNQPIXIDNQILKT

SEQ ID NO: 272073 - protein, 317 aa, Zea mays
  Clone ID: MRT4577_179721C.1.pep
MIRAFPYGFNCPIPRAWPYAVEIERHLQVAPWENEKTRWRGFNLVTKILAEGRHNVLEYEIDGHHLGTGLNCRIFDNQCSEYEDFVSVLRLPGFKELRLSLFVDGQERLGWPALRNGLLRKALAEATQLEHVSIATGPFEHLHGWVDAPLGLRRFLPIECWPKLQHFELWNVDVDLAELLSVISQLPDGLLCLQLNSLRFYSGCYRELLDQMRDRLHWCEQHPQTRVMIGVSIDNCIPGRVAWLETEIDDFFKRGGINPFEQDNTFYLHLPRFGMGVVRNAFDMDYVRPWVEQDGLAWTYSSPYSECHCKDSTVIDS

SEQ ID NO: 272074 - protein, 69 aa, Zea mays
  Clone ID: MRT4577_179722C.1.pep
SMPFQVCVLIFRAKIVNIQSVHSCSVYFHVIKTCSVVGSASSAFLYSPLASLFQTQNMHVRFVIMTHTG

SEQ ID NO: 272075 - protein, 64 aa, Zea mays
  unsure (1)..(64): unsure at all Xaa locations
  Clone ID: MRT4577_179723C.1.pep
PTRPFGLRKSSSYDDVKAGERGAXYGALKCILGYTNEDFVFNDIDGDYMSSIFDANAGIVLSFY

SEQ ID NO: 272076 - protein, 120 aa, Zea mays
  Clone ID: MRT4577_179724C.1.pep
FPDCLGLEVLIGPETCPPVSSNPKAPPFSVSFFVHTPEVFSWPPPGFLTFPTPPFFLWLRKPSLWVSVFPFFSFFFSLFGPFFFPVCLPLFSRVGCPFLPGFLPLVFQGTLTQLKKKPVN

SEQ ID NO: 272077 - protein, 140 aa, Zea mays
  Clone ID: MRT4577_179725C.1.pep
CASRSAADRRVAEAEPSISGGRGNGRGDLEPWSQLPMLSPKKKETQRSSISSCLRRTDRHATARPRLQHLHLPPSPLSIPSWKARPCLPACGASLDLPHHPRLPAAALPWIFLTSRQQNKRKPNGLLPYFSSPPVPPPPL

SEQ ID NO: 272078 - protein, 69 aa, Zea mays
  unsure (1)..(69): unsure at all Xaa locations
  Clone ID: MRT4577_179726C.1.pep
HPSVAPILFQWFLVLASLELYPVGQSKVGGGGRXFTKSLVNLNRQNWLRVALTKQQQLPISNGGRLPSC

SEQ ID NO: 272079 - protein, 90 aa, Zea mays
  Clone ID: MRT4577_179727C.1.pep
PPNLTGVHVPFLRPIFPRLPRGIVSTPTPPRQRPFHISHKLTGGCLKPNLWPRIPFKKNGGGFLSIRGGRALSSNSFWHPNPLFGGIKQL

SEQ ID NO: 272080 - protein, 72 aa, Zea mays
  unsure (1)..(72): unsure at all Xaa locations
  Clone ID: MRT4577_179728C.1.pep
MKVLMGALALLALAASADSSTSGGCGCQTPPIHLPPALYMPSTFYLPTXQQPKSWQYPTQPPKVSPCQQFGS

SEQ ID NO: 272081 - protein, 126 aa, Zea mays
  unsure (1)..(126): unsure at all Xaa locations
  Clone ID: MRT4577_179729C.1.pep
EPKSEQTDAGKESQSPSIGEPKKNSRAGVKKGGEGKNPGVTQLKRLAEKPQIARGRKKKKARTERPSQKGANLKGERDPPRNGPKSAGGGGGTPTETRTLARAGGGGPWEWFPSFXRKFPGFPRKE

SEQ ID NO: 272082 - protein, 89 aa, Zea mays
  Clone ID: MRT4577_17972C.1.pep
MVLSFPCTRYQVLIGCDGVHSVVARWLGLSEPASSGRSAVRGLSVFPGGHGVKRELRQFLSEGLRAGMVPISDTDIYWFLVNNTVAAGK

SEQ ID NO: 272083 - protein, 311 aa, Zea mays
  Clone ID: MRT4577_179730C.1.pep
IQIRIPIRARVNFFSSVFSPPAKEDGEEPQQEGEEEPASQESGGGWIFGSLIDTLKEEIEGQRKVNESAAVAAEAEEAQRGADGEAVPGSGWIFGGLIVRLAEGIEAQRKEQEAIAAAAESEELERGAEADAAAAATATATATADEEGESSGGGWSFGGLIRTLAEEIEAQRNENEKEAASTAEEDGEQGIDAEVAAVDGEEGAPAGESSDGGWSFGGLVSTFASRSESVLGVYRRDLEDLGSGLRLETAALRAAAARAASALPGALEAGASVASDRLESVGQAVDDLGAAAAGLLSHANEGLRSAETDRV

SEQ ID NO: 272084 - protein, 96 aa, Zea mays
  unsure (1)..(96): unsure at all Xaa locations
  Clone ID: MRT4577_179731C.1.pep
RLTLPSWLELLWASHSLTTCASHLLASRNECYRLCTQRETNPAALCNYRRPSDHSTYRVIQIMRTSYHDFEMVXRYDDILXDVSDCTTYVINIARI

SEQ ID NO: 272085 - protein, 154 aa, Zea mays
  unsure (1)..(154): unsure at all Xaa locations
  Clone ID: MRT4577_179732C.1.pep
PRVRSDDGIATTDEPDDGWLCFYETLADRFVIVPESGMHLLESTVHLWSQIFWANIYALLFQKWLCEATIDEKEISIRYMFALVQGATDVFWIDIQTNTRHSLSMNHYVLDDIALVPERLSQISLQAXGDLILLVSKFMLFYDQDHMLCTVLEH

SEQ ID NO: 272086 - protein, 84 aa, Zea mays
  Clone ID: MRT4577_179733C.1.pep
CAVFLSFVSFIFVVQVYIDLWFSAPLCPATAIGVLQGALTYRSSSTICYAVFLSSSVSIWFGTVGHMHHSLSKCPPSGFPGPRL

SEQ ID NO: 272087 - protein, 136 aa, Zea mays
  Clone ID: MRT4577_179734C.1.pep
GDWDPRGRPGEPGCYFAETAFTLAARVIGKRTRGEVREYWIDDGLYGSLNCIIMDHYVPTPRPLASPRPGDKTYTSTVFGPTCDSLDTVLTGYLLPEMSVGDWLVFDDMGAYTTGAGSNFNGYATSDIKIYVAYSS

SEQ ID NO: 272088 - protein, 27 aa, Zea mays
  Clone ID: MRT4577_179735C.1.pep
HPSFHHQSRTDTASISDSMDVMLTQTW

SEQ ID NO: 272089 - protein, 59 aa, Zea mays
  unsure (1)..(59): unsure at all Xaa locations
  Clone ID: MRT4577_179736C.1.pep
QGKPQPQIIFLEAYPALGLPFLSTESIKVXGTFSSCLPGNNLKVFVPVLKKFLVCPPNF

SEQ ID NO: 272090 - protein, 108 aa, Zea mays
  Clone ID: MRT4577_179737C.1.pep
HMLPARPPWRAAPSPWRPCELLLPRLISSSGLAGCRRRFSNLALTLNRCSTPYRVCCTVIVRYPHPCQFSSSFLGYNLVSSCALCTSCVRVEPQDFEEKEALVHQPVK

SEQ ID NO: 272091 - protein, 160 aa, Zea mays
  Clone ID: MRT4577_179738C.1.pep
MATIALVVVAMVLSLAQLSAGSRRLMELYVPPESDRLTYHQGGVLSGGIPVSILWYGKFTPAQRSIVSDFVVSLNSAPDGAATPSVGQWWGTIEQLYLSKAAAANGEAAATHVLLAEQVTDEQCSLGTSLTLAQIDQLAASIGAKKGGIALVFTDEDVRR

SEQ ID NO: 272092 - protein, 224 aa, Zea mays
  unsure (1)..(224): unsure at all Xaa locations
  Clone ID: MRT4577_179739C.1.pep
CCKPSRLLRSLTTSPTACDYAAADHKYLHLDVEHGNDTHALLLAELIFHDIRLGYARGTGTTSGNXRRQXQRLPLPPSAPDKLAIIGHLHLIDVETHISIRDLHAKDGSNGLLILRIXGAEPTLCVASHQXADAVLRSQDXIFASRSPAMGAEIIRYGPSDGAVVRYSEYXREGRKILTTHMFSTRKEQDFRHGRQEEERLGMDKTRADDKPRRXTGADLSDLL

SEQ ID NO: 272093 - protein, 192 aa, Zea mays
  Clone ID: MRT4577_17973C.1.pep
MGGGSGSFLKVLVNNMDVLAGPLVSLAYPLYASVRAIETKSAVDDQQWLTYWVLYSFITLFELTFAPVLEWLPFWSYAKLFFNCWLVLPQFNGAAHVYEHFVRPMIVNQQVVNIWYIPKKDESSRPDDVISAAQRYIEQNGSKAFENLVNKFKSSNPRRSILEEVEVERRARIQLESEAREVNPFFNPEYQY

SEQ ID NO: 272094 - protein, 63 aa, Zea mays
  Clone ID: MRT4577_179740C.1.pep
TCCQSIESFSFPTVETEYRFSIIKLRCNTFDTPLSLTTVHTDSSSLKGLRVRRVPQGNTAIDL

SEQ ID NO: 272095 - protein, 93 aa, Zea mays
  unsure (1)..(93): unsure at all Xaa locations
  Clone ID: MRT4577_179741C.1.pep
MLCGRMAHSYTSRIDEQLMHSSIYTPGSPYTCDVPMVQEAIDAICRIHGSSPDEKIDITXAIIKXSTGSKPALFAGIIALVMSNLTMIRMTRR

SEQ ID NO: 272096 - protein, 86 aa, Zea mays
  Clone ID: MRT4577_179742C.1.pep
IKRLVDDLHLSRAWRGSFFLLPCRRRRHRRRGRGGSATTCTSAGSTCSRRRSASRGGRRRGGLLLWSFTCGRRRWFVVVVLLLLTA

SEQ ID NO: 272097 - protein, 35 aa, Zea mays
  Clone ID: MRT4577_179743C.1.pep
GASSVALTVGVWTLAVAMGADQRADVYSPEWLATS

SEQ ID NO: 272098 - protein, 47 aa, Zea mays
  Clone ID: MRT4577_179744C.1.pep
MAPPLMGSSSKRSWASQTMLPSMETIVAVCIEGASVYAHCAGYNGTT

SEQ ID NO: 272099 - protein, 123 aa, Zea mays
  Clone ID: MRT4577_179745C.1.pep
ASPSRSSRFTAPPLASPTAARMPFKRFVEIGRVALVNYGKDYGRLVVIVDVVDQNRALVDAPDMVRCQINFKRLSLTDIKKLIVQKRRAALSDFDRFKVMLARIKRGGAIRQELAKLKKASTA

SEQ ID NO: 272100 - protein, 105 aa, Zea mays
  Clone ID: MRT4577_179746C.1.pep
RPGRGFCSDFRRASPSRSSRFTAPPLASPTAARIRVPKKSTLIKAMEEADVKTKWENSSWGKKLIVQKRRAALSDFDRFKVMLARIKRGGAIRQELAKLKKASTA

SEQ ID NO: 272101 - protein, 170 aa, Zea mays
  Clone ID: MRT4577_179747C.1.pep
PAKKKKKKNCSDFRRASPSRSSRFTAPPLASPTAARMPFKRFVEIGRVALVNYGKDYGRLVVIVDVVDQNRALVDAPDMVRCQINFKRLSLTDIKIDIKRVPKKSTLIKAMEEADVKTKWENSSWGKKLIVQKRRAALSDFDRFKVMLARIKRGGAIRQELAKLKKASTA

SEQ ID NO: 272102 - protein, 93 aa, Zea mays
  Clone ID: MRT4577_179748C.1.pep
YLLHFLRYEPSAPCCAHEPRHVRPCCLGPPRPHFPGGALCMWEMMSHASRLPGFKQVHPGHFTSLLLSSWAASLKVSCSSSVCWRRATVQQSV

SEQ ID NO: 272103 - protein, 97 aa, Zea mays
  Clone ID: MRT4577_179749C.1.pep
IRMFLDFHIKFATTPRPLMAIKGTPMRLILVLKHLKSIPTLQIFASTHSNNSSEIRVSVLSCNCDIVFLRSFLWIYCVCSCVVLLCACSFSLPYSKS

SEQ ID NO: 272104 - protein, 264 aa, Zea mays
  Clone ID: MRT4577_17974C.1.pep
MALSCRYPKDSEKLMLARQTGLTRSQISNWFINARVRLWKPMIEDMYKEETGDIEQDSNSSSDNAPAGSKAKTASSRDKEDHLARSCCTPRAVCESSSQLSEPPGGASMRAMSVAAAAAGAPMGLFQNEPGHDHDHDDSFMSLMLKEQRPNDGGGGLLLHHSAVAQHQDENARFMAYHLAELGRYGNGNVSLTLGLQRSSSSLSVPHAQQSFPGVGIGVGDDDIYNATAAPLGVSVASPDYESMSQMDQRQRFEQSPLFHDFVG

SEQ ID NO: 272105 - protein, 78 aa, Zea mays
  Clone ID: MRT4577_179750C.1.pep
MLWTWWYARTPATYHRAPTWSCTRRIQDKGKCNEQKVFTGPHMNYCQQACDKDYCFKADDVNNDCNTTCAKEEQPLLI

SEQ ID NO: 272106 - protein, 89 aa, Zea mays
  Clone ID: MRT4577_179751C.1.pep
APIFHHACGLVCALVQNLSTSEQCPILRHTHVYVGTSGLFVFRNTVRCHCNIIGPRSSHSLGLKHRINSSISACGYATKKTDPQFLSSR

SEQ ID NO: 272107 - protein, 56 aa, Zea mays
  unsure (1)..(56): unsure at all Xaa locations
  Clone ID: MRT4577_179752C.1.pep
YVTPSXHSSFKFSVTLSNHGHGGVAILEKWPLLFIQPFVQLEAMVDSKDRPLFSSG

SEQ ID NO: 272108 - protein, 444 aa, Zea mays
  Clone ID: MRT4577_179753C.1.pep
METTTKLRWSRPGSFLLVAAAFLASAAASGVNVGQFDDHLQKRKELAEASAREAYRPDPYNVTNSFNAAVHRAVSSSRREMRERPRKHKKRGPCRATNPIDKCWRCRRDWATDRQRLARCARGFGHATTGGLGGKIYVVTDPTDLDVVNPRPGTLRWGVIQPGPLWIIFARSMIIQLSQELLMSSDKTIDGRGAQVHIANGAGITVQLAQNVIIHNLHVHDVKHTMGGLMRDSPTHIGSRTRADGDGISLFSATNVWIDHISMSNCEDGLIDVVQSSTGITISNCHFTNHNDVMLFGASDSWPQDQIMQITVAFNHFGRGLVQRMPRCRWGFFHVVNNDYTHWLMYAIGGGDAPTIISQGNRYIAPPNIAAKVITKHYAEEGVWKNWVWHTEDDLFMNGAIFNPSGGAPKQVDTNEWVKPKPGTYVTRLTRFSGTLSCCTGKPC

SEQ ID NO: 272109 - protein, 49 aa, Zea mays
  Clone ID: MRT4577_179754C.1.pep
MEHGYPCNGCGKEKRPPLKRGQLKLQIARTLLGSLAAPVAKNRDRAFGR

SEQ ID NO: 272110 - protein, 45 aa, Zea mays
  unsure (1)..(45): unsure at all Xaa locations
  Clone ID: MRT4577_179755C.1.pep
GCIAGSGRGLVGAHSAARKQSKANQXSGWLVNARGFXIRSSARSV

SEQ ID NO: 272111 - protein, 57 aa, Zea mays
  unsure (1)..(57): unsure at all Xaa locations
  Clone ID: MRT4577_179756C.1.pep
TKKKKHKAKLKFKTTQAPPXKSTLQILIYKKSYPLSHTHILTLSTSKSSIFFPYPLF

SEQ ID NO: 272112 - protein, 101 aa, Zea mays
  Clone ID: MRT4577_179757C.1.pep
VSQPRRIDGKETGDQVGSSSHKSQDAQVGSLVNLLRNASPLRNPSNSSQISRAESSEVASASSVTSRRTSDALEELQSFKEIRERLLFRSSAKHQEPPGKP

SEQ ID NO: 272113 - protein, 296 aa, Zea mays
  Clone ID: MRT4577_179758C.1.pep
MSGMSDSAGGGRAGAELMVEQFHLKVLHAVLAVRTPRPLATAAAAASSSSSFRRRDRWFHLPLHDPPPPEAAGRLDELAPGEPRVVGPLLCPATASGVGARGEVVERWTVACEPWPDAASGEEVAVNRAYKHCFTLLRSVYAALRVLPAYRVFRLLCANASYNYEMGHHVDTFAEPFSRPQEAAMRSQRFVPVETQLGRLVVSVHYLPSLAGVAAFNLEITPLSPSMIIPDYVGSPAAEPMRTFPASLTEATGSGFPPSYEQQRPHSWASPAFWPHTPAHQARFSPPSVFYASPTP

SEQ ID NO: 272114 - protein, 43 aa, Zea mays
  Clone ID: MRT4577_179759C.1.pep
SHGGALISLALALILITAFNCEINSFFKFNYLITMCTMVLQIL

SEQ ID NO: 272115 - protein, 126 aa, Zea mays
  Clone ID: MRT4577_17975C.1.pep
RRLTHPPRYIHISPSSKNSALWERAGAGAGPGRSYQKLGDMANAGGGAAGEGEWLKVAQLRALVQAQDEDHRAKIESIRLRREKRCLRTTVGVLTTDLHEYRQIRFLGNASRTSARIPLQHSWKSL

SEQ ID NO: 272116 - protein, 510 aa, Zea mays
  unsure (1)..(510): unsure at all Xaa locations
  Clone ID: MRT4577_179760C.1.pep
MSGMSDSAGGVRAGAELMVQQFHLKVLHAVLAVRTPRPHAFAAPAAASFRRRDRWFHLPLHDPPPPPEAADRLDDLVPGEPLVVDVLLSPAGSVGARGEVVERWTVACEPWPDAAGGEEVAVNRAYKHCFTLLRSVYAVLRVLPAYRIFRLLCANPSYNYEMGHRVDTFAEPFSRPQEAAMRSQRFVPVETQLGRLVVSVHYLPSLAAFNLEITPLSPSMIIPDYVGSPAAEPMRTFPASLTEATGSGFPPSYEQQRPHSWASPAFWPHTPAHQARFSPPPVFYASPTPSPPHFPPGLMRWESAPMPIPQVSERRSPAHRQNMLPPPSPRRGDTGAAGALEFPSESGRLIGRXGTSASXLHATSSPRHKGKDTKDGSGRFSALSSCDSPRQDDLDDVDYHFDVDDVDTPVSQPRRIDGKETGDQVGSSSHKSQDAQVGSLVNLLRNASPLRNPSNSSQTSRAESSEVASASSVTSRRTSDALEELQSFKEIRERLLFRSSAKHQEPPGKP

SEQ ID NO: 272117 - protein, 56 aa, Zea mays
  Clone ID: MRT4577_179761C.1.pep
VIHRISRLVSALQTIVVISPCTFIVIMRPKGVERLYMYEFMPIAATDSHHPITGCH

SEQ ID NO: 272118 - protein, 36 aa, Zea mays
  Clone ID: MRT4577_179762C.1.pep
MADGSRDISRRRNPADKLTEDLLVEILSRVPYRSLC

SEQ ID NO: 272119 - protein, 38 aa, Zea mays
  Clone ID: MRT4577_179763C.1.pep
RKGWSLDHPILSPSPRNETTLDKMKHPQAHRDRSQLIQ

SEQ ID NO: 272120 - protein, 84 aa, Zea mays
  Clone ID: MRT4577_179764C.1.pep
GFLGIINFFLQTINKMPTVFQIKFRDFRENLSEKISRFSISDEFQTYCFRIRFPNKIFVFVSVIRKKSGFPKIPFEPVFTIFES

SEQ ID NO: 272121 - protein, 38 aa, Zea mays
  Clone ID: MRT4577_179765C.1.pep
RNVPSYFWGGPNLKPKTLLLDLYLLEILKRAPPMIGWW

SEQ ID NO: 272122 - protein, 63 aa, Zea mays
  Clone ID: MRT4577_179766C.1.pep
SSLESNGLRQREGAGEPLELNSHADMAEVKTDAPSCRSRVMLPDSRLPELVIWANKWQSERTV

SEQ ID NO: 272123 - protein, 75 aa, Zea mays
  Clone ID: MRT4577_179767C.1.pep
RINMKHSAVICTAEQEGFQHRYDMDHVLDIGKHESKDAEHNIEYCIGSKYNPILATFPLKKSTSPFPLHKKNGIN

SEQ ID NO: 272124 - protein, 78 aa, Zea mays
  Clone ID: MRT4577_179768C.1.pep
PPCSILYVGGKQQHIGPAYAVPSDAQCDEKVGHSPSGRSGRRIGQATDTAFNEALARFTVLLYVRYMHTHGCNLMRRA

SEQ ID NO: 272125 - protein, 131 aa, Zea mays
  unsure (1)..(131): unsure at all Xaa locations
  Clone ID: MRT4577_179769C.1.pep
RGRKGQGGAHMLFGSHGFPGKVPRTWFKGVGHLPFNVGHAHYXPLFPFGLGLPPKGPNSFWFWPYSRLGPVRAIWIRGPAPRPCLFIWCGGAGVHVLPPSPPFRRLCGLGSLVMGNASLAFFRWWALGWVV

SEQ ID NO: 272126 - protein, 63 aa, Zea mays
  Clone ID: MRT4577_17976C.1.pep
SSRRSFVSLSNRGDSPTDADSDGRRVQASGSRLAHVTQRLRTTRQVLIFGLLRTGRWAYARDL

SEQ ID NO: 272127 - protein, 76 aa, Zea mays
  Clone ID: MRT4577_179770C.1.pep
DWERLGYLRRDKRKAKAMKLGVGRVKPRGSAATHGTVKLDFGRGHIFFNPPPCMFSPFFFFFFFFSPHYSATLFIL

SEQ ID NO: 272128 - protein, 158 aa, Zea mays
  Clone ID: MRT4577_179771C.1.pep
CRCLPQKLAIPRDADDGDQLDAHGCLKTYNNAAKRFNALLGDACAQLRRRMVDAALVFVDMYAVKYDLVANHTTHGIEKPLMACCGYGGPPYNYNHFKACMSAEMQLCDVGTRFISWDGVHFTEAANAIVAAKVLTGDYSTPRVTIAKLVNSTLPNDD

SEQ ID NO: 272129 - protein, 55 aa, Zea mays
  Clone ID: MRT4577_179772C.1.pep
LSSADEYGKVPTVLPQVAGSAAECAALAVACRSPAVIPVQSAPAVFSRQCCSCVR

SEQ ID NO: 272130 - protein, 67 aa, Zea mays
  Clone ID: MRT4577_179773C.1.pep
VCDFVTIQSFTNSANRKYRLYQKEKYNRNRKNILVFSMCASYWAETMHPLRPRFSSKARSSLSAHLN

SEQ ID NO: 272131 - protein, 41 aa, Zea mays
  Clone ID: MRT4577_179774C.1.pep
HRSGTVGHLLVSEIRMFLNIFQSQATLIQVTKIPAWIDAGI

SEQ ID NO: 272132 - protein, 99 aa, Zea mays
  Clone ID: MRT4577_179775C.1.pep
PLDVDCSSQACPLFMSSACQASTAYAYMRFATVIRLLDMRIQQSPQLYIVRHPISRYTHACMHRIVIASHACMYYASVIQCHASRQNKTSGGRAMRSAR

SEQ ID NO: 272133 - protein, 42 aa, Zea mays
  unsure (1)..(42): unsure at all Xaa locations
  Clone ID: MRT4577_179776C.1.pep
PPHLATLANFQYSXFTLHNXAGXSXRRWTCQPPKSPKXIXXX

SEQ ID NO: 272134 - protein, 160 aa, Zea mays
  Clone ID: MRT4577_179777C.1.pep
SHMNLTQFCTCSCVLKLHSPFSSDRDMAWMVMNDYVPYDSILLIGVDAAIRVSVVVAGDHPSVGDNDGGRCTCVMRVTMSRSGSRRRPRSRRSRYRSMCSSITSWVCIFYKVQSSSGQFHFLLCNQVYFVGGRHHHHTRFLGDTLHDHHFTHVRAATIEV

SEQ ID NO: 272135 - protein, 88 aa, Zea mays
  unsure (1)..(88): unsure at all Xaa locations
  Clone ID: MRT4577_179778C.1.pep
AGQQLTGVAGSPAYLAPEVLLGNYSQKVDVWAAGVLLHVLLMGTLPFQGKSVEAIFDAIKTAELDFHSSQWAFVSLLAHDLIXRMLNR

SEQ ID NO: 272136 - protein, 51 aa, Zea mays
  Clone ID: MRT4577_179779C.1.pep
VIPQPEISLLLPCVMCRDTPSRWWHVYSYSSTGIISSRVIFINTQTKFDHP

SEQ ID NO: 272137 - protein, 102 aa, Zea mays
  Clone ID: MRT4577_17977C.1.pep
GFDTSVGEHGTQLSGGQKQRIAIARAILKDPRILLLDEATSALDAESERIVQEALDRVMSNRTTVIVAHRLSTVRNADTIAVIHQGTLVEKGPHNELLRDPE

SEQ ID NO: 272138 - protein, 193 aa, Zea mays
  unsure (1)..(193): unsure at all Xaa locations
  Clone ID: MRT4577_179780C.1.pep
WFHGGEKCXGHXLARHPSFGRXVAVSSCPIWPXXAARFGARGHEMTRXXPVFGTSAXXSIRQGXRVRKKGARARICFCDRSXAWFDSASALWAPTTNGRANLFHANLYAXRLSPVELXXKRTKRRGRKGEMNNXASXXCFPQKRKGPAPGPCAPPPTPPXVGGXXXPXLXPSFXDGGNXREKRLXLPFAXXPX

SEQ ID NO: 272139 - protein, 94 aa, Zea mays
  Clone ID: MRT4577_179781C.1.pep
KSQHNRRPDKKTNIKLDQIAQQEHVWRARDSYRSHEGPDLSQQPAALDEFCCSCRESRDLPTLTAHLSPNEEAAAAYIPLAPKRSDAGGIDFLS

SEQ ID NO: 272140 - protein, 77 aa, Zea mays
  Clone ID: MRT4577_179782C.1.pep
TPRTLIILPTIDIEQGSVGTPIHNNRSSSPTEIPPILTFTQPHFACDSGKALCSGPHLTFFFASAIFVLVEGIFFLC

SEQ ID NO: 272141 - protein, 72 aa, Zea mays
  Clone ID: MRT4577_179783C.1.pep
GLQFAPKRGTGPRGFFSSKVPAAQLPLQPLGETPTFIMHHAYIIGQATPDNVCCLTALVQIQLDRPAYTCFA

SEQ ID NO: 272142 - protein, 85 aa, Zea mays
  Clone ID: MRT4577_179784C.1.pep
TIYSIKSYHGGPMNTWIPDTQSVSTNMQEDTRTYMSTKTDAKHAERDSKLKNSVSLSLTHHHTSDLCHGRPASASSYYGSTTTTR

SEQ ID NO: 272143 - protein, 256 aa, Zea mays
  Clone ID: MRT4577_179785C.1.pep
MSLLAAAIPSTSSHFSAPFLPSFHMPRKNLTAPLHRIRRPRPFTVVSSVPDPAAGPVEYTPWLIAGLGNPGNKYYGTRHNVGFEMVDRIAAEEGITMNTIQSKSLLGIGSIGEVPVLVVKPQSYMNYSGEAIGPLAAYYQVPLRHILLIYDDTSLPNGVLRLQKKGGHGRHNGLQNVIEHLDGRREFPRLSIGIGSPPGKMDPRAFLLQKFSSEERVQIDTALEQGVDAVRTLVLKGFSGSTERFNLVQKYKFHRV

SEQ ID NO: 272144 - protein, 115 aa, Zea mays
  unsure (1)..(115): unsure at all Xaa locations
  Clone ID: MRT4577_179786C.1.pep
GFPVGFLRAWLGLLFLLSGFGVGCSFAFLGRRGCGVVLGVGAVVVVWGGPFCPPPLALPGGFSLRVRSSVVLVRXGSLGPPRWWGWRGAPGFFGPPLFFFAPPGSLCFGLYFAWV

SEQ ID NO: 272145 - protein, 130 aa, Zea mays
  Clone ID: MRT4577_179787C.1.pep
PIPAPAPTLPKAGDTARPPPRPGLHKRTCARAPASVARQGRAGRHLVLCAFWRWFFLHNSSAGFQSLGRDEINKKARKKQRGKPAASRSLRSETPLVGRCFRYHLQDQAQIPSVGTYVRTASLRSLAAAR

SEQ ID NO: 272146 - protein, 110 aa, Zea mays
  Clone ID: MRT4577_179788C.1.pep
PAGSGRFPRPPGRPYAAKSGGHRPSPSPSGSPQAHLRARARLPLRSRAGQSNISSWSWVAFGFRRLAVLSLCSWSSDLGGINLETQSLGRDEIHKKEERSSAASRRALEA

SEQ ID NO: 272147 - protein, 127 aa, Zea mays
  unsure (1)..(127): unsure at all Xaa locations
  Clone ID: MRT4577_179789C.1.pep
MPVAASLMAIELEKDQLAWAEQQRQQNRRQTMVVCRKSAAAVAKGQQRQNASPPSPKPPPAGGLSAEAFLVLACVAVSXLVVLPLVLPPLPPPPPLLLLVPVCLLLLLAALATFVPSDVRSMPSSNL

SEQ ID NO: 272148 - protein, 76 aa, Zea mays
  unsure (1)..(76): unsure at all Xaa locations
  Clone ID: MRT4577_17978C.1.pep
MAADSFLLTSRLFFEGFLHKLRDQVPDAALDPCLPQDPHRKAACETCTTTNMVTRVGQTXTKATADSDKTLPHTCP

SEQ ID NO: 272149 - protein, 82 aa, Zea mays
  Clone ID: MRT4577_179790C.1.pep
SKCFARNDSVEAYAVMETDEDVKMNTQIDEINAYSFLYPVELPGKKFAFKWYFSSLHYNILSNLLFFSLNLFFAYLLPSHGH

SEQ ID NO: 272150 - protein, 47 aa, Zea mays
  unsure (1)..(47): unsure at all Xaa locations
  Clone ID: MRT4577_179791C.1.pep
LREQGAIHLLTLLKLIAQAXPXTSKYVSPHTPKIIQLTHPNYKYNQP

SEQ ID NO: 272151 - protein, 77 aa, Zea mays
  unsure (1)..(77): unsure at all Xaa locations
  Clone ID: MRT4577_179792C.1.pep
IDIKISWIINHASMFCLAIFYTNCLGFMCTKTSWLPVLNTSGPNXAHTHIIHCKFEHHISKCCLYIKVRSSFLRQQH

SEQ ID NO: 272152 - protein, 91 aa, Zea mays
  Clone ID: MRT4577_179793C.1.pep
AQRRRDLHDQILHSGIYCLNHLTSKFEAASHETFPISFMKHLLIKLCFLTCPAKLSFLTCCYCVQRRCRLSPANVAAEEMNFLLLCRGNTY

SEQ ID NO: 272153 - protein, 55 aa, Zea mays
  Clone ID: MRT4577_179794C.1.pep
KKHPPPAGRAPRLAPPTGFFLFLKSQFPKLVGLMGLGSNPACPVFLIKRLNLGCF

SEQ ID NO: 272154 - protein, 31 aa, Zea mays
  Clone ID: MRT4577_179795C.1.pep
LSSYRVVKILLYNPISFPIILIPVQDYPITT

SEQ ID NO: 272155 - protein, 56 aa, Zea mays
  Clone ID: MRT4577_179796C.1.pep
TNAEKWVYGVNLPATKTLEVCFFLFSFHIISDRPKQDFIKLLPSPKIKKKAVCRDL

SEQ ID NO: 272156 - protein, 148 aa, Zea mays
  unsure (1)..(148): unsure at all Xaa locations
  Clone ID: MRT4577_179797C.1.pep
SPSLPPSPAQPTTQSQPPPPRHARPASQPASHEAVEIPGPGAAPAXAPAASCXAPAVAVALPVAAPRGRRHHDAAAPPAGGAAGGLRRARARVRSAGDGAGADAGAPAAPXAAPTRCSSARRSPPWRLLDELVPGDAYFPAACSPVSF

SEQ ID NO: 272157 - protein, 66 aa, Zea mays
  unsure (1)..(66): unsure at all Xaa locations
  Clone ID: MRT4577_179798C.1.pep
SVVAVVGSLXCSXXXVGCXXXXCCXXXXGFAXAXXVXAGXXCCPPSLLQXXXVHWXQXAGLMGAPA

SEQ ID NO: 272158 - protein, 128 aa, Zea mays
  Clone ID: MRT4577_179799C.1.pep
PAGRILSPRPTRQRAGRSAVPIPNFAIAVRKSATNPRVLDVTAARALGGRRCLQAPLQYSTSTRPLQRHRRHGGSGARRSALPPGSTPPPSSTPAPSRQRSSGHRRAAASTVHWPLHGRMDAWLVELE

SEQ ID NO: 272159 - protein, 144 aa, Zea mays
  Clone ID: MRT4577_17979C.1.pep
SLLHALRSITDDQWFRARIKRYGPVSKMSVLGSPTVLLAGTEANHFIFTNQGLILTQTRALRSLLRRSILTLTGDDLKQVRSALQGYLRPEMVRGYVGKMDAEVRRQLKLNWVGRSTVNVLPMARSLTLGVICSVVFGEEAAAI

SEQ ID NO: 272160 - protein, 98 aa, Zea mays
  unsure (1)..(98): unsure at all Xaa locations
  Clone ID: MRT4577_1797C.1.pep
IEDVYFEDESAEVVISSVRPGDDQDSCLFTNLTRITFHGKRGIDDRQSASEPSSYPSSLETSLEGVEAADGKVLXGTDDEMDTVYLGNGRAVEVKDVA

SEQ ID NO: 272161 - protein, 73 aa, Zea mays
  Clone ID: MRT4577_179800C.1.pep
KTSTISLRQLPLGLYPPSKTLDCTWTRFRIPFHITTMQHDEANNFAQLMPTAPTCSLLDILFTQLPYHYYVPE

SEQ ID NO: 272162 - protein, 77 aa, Zea mays
  Clone ID: MRT4577_179801C.1.pep
RVKILPKKKLKPQKTQTLIPPRIPQKRPPLLSKSPFQKPPPPNKKKKKKKKKKKKKKKKKKKKNKKKKKKKSLYLGR

SEQ ID NO: 272163 - protein, 50 aa, Zea mays
  Clone ID: MRT4577_179802C.1.pep
LRTYLTYKPNRVSNYIFTKHTPAKHINPNRLTPGAGVLCQIHFYICPESN

SEQ ID NO: 272164 - protein, 46 aa, Zea mays
  Clone ID: MRT4577_179803C.1.pep
QHSIGIDPLSPQEFILKFLSPDHKSTTSQNITMAPDLHSSSVRTGG

SEQ ID NO: 272165 - protein, 76 aa, Zea mays
  Clone ID: MRT4577_179804C.1.pep
HNMATFLCSLSLSTILPTISHYPTILTTFYISTYYHILLNTLINNITNLNFTTIHYPTYTSHQTILPLSPFLLQQP

SEQ ID NO: 272166 - protein, 67 aa, Zea mays
  Clone ID: MRT4577_179805C.1.pep
DGNFVLDYRRNPPSNPRVGVMDFSCWKSLLCVVWLVEKNYTRFFLKKKKKKKTNPQKKIKKKHPPRA

SEQ ID NO: 272167 - protein, 35 aa, Zea mays
  Clone ID: MRT4577_179806C.1.pep
LDKLDLGSGERVNTSRNTRVAHSSSELWLKSADAW

SEQ ID NO: 272168 - protein, 86 aa, Zea mays
  unsure (1)..(86): unsure at all Xaa locations
  Clone ID: MRT4577_179807C.1.pep
KPIRPLYLKNIFSQTKXTXSFSISHLLLSTPTILHTHHSTTTYLILFNKTNLTFFHNIFLLLSYPIIPILTPTFYPLLPSISCLSF

SEQ ID NO: 272169 - protein, 73 aa, Zea mays
  Clone ID: MRT4577_179808C.1.pep
KRTLDPPSHPPQRASQDAYLSLIVVLLRCSIVKCLDLGVLAPDQFCCCCFSPALSPLKMHRGGLAISASGGDI

SEQ ID NO: 272170 - protein, 106 aa, Zea mays
  unsure (1)..(106): unsure at all Xaa locations
  Clone ID: MRT4577_179809C.1.pep
VRSTGSHTXITDIVCFPKGQVGVYLXQRXXSSGPSAGASSSNVGGEKXXHRLASNHSXKKGTMEHAPLERGTRYPPRTEVGQLATGVGLSTEKVLRKEGEGAXSXK

SEQ ID NO: 272171 - protein, 81 aa, Zea mays
  Clone ID: MRT4577_17980C.1.pep
GGFSLKTKIGGGVGSFLGFIKSGGSRFLFFVWRPPKKKKKKIGRGTGKEKKKKKKEKKKKKKKKKKKKKKQKKKKKKKKKA

SEQ ID NO: 272172 - protein, 118 aa, Zea mays
  unsure (1)..(118): unsure at all Xaa locations
  Clone ID: MRT4577_179810C.1.pep
MKGGDMSSVSPLVSFVLGAAMATVCVLFFMSAAPARXLXDIXAFTSNSNFTGDLLLDSSTSFDLXGEGDLAEATGPAPAPVQAPPCSWGDLEEVLARAATKDRTGIMTQINAAWTRPG

SEQ ID NO: 272173 - protein, 109 aa, Zea mays
  Clone ID: MRT4577_179811C.1.pep
PLLAATVNLERDRGNGEQCVGRYGLRFSHSPPRRRYCSWTCSPEPRVARSSSTTRTPDRRTSTPWRPPMYWGPCHNVRVTWYKQAQRGSCPDDNERGVRLQAHQANTPS

SEQ ID NO: 272174 - protein, 126 aa, Zea mays
  Clone ID: MRT4577_179812C.1.pep
MKGGDMSSVSPLVSFVLGAAMATVCVLFFMSAAPARRLVDISAFTSNSNSTADLLLDSSDSPAAADLAEAAPPAPAPVQVPPRTRFSFVSVSAYVLPACAFVARNSTAAVSSSPQTIHKPPTISPG

SEQ ID NO: 272175 - protein, 118 aa, Zea mays
  Clone ID: MRT4577_179813C.1.pep
MKGGDMSSVSPLVSFVLGAAMATVCVLFFMSAAPARRLVDIFAFTSNSNFTADLLLDSSTYFDSPAAADLAEATAPAPAPVQAPPSSWGDLEEVLARAATKDRTVIMTQINAAWTRPG

SEQ ID NO: 272176 - protein, 365 aa, Zea mays
  unsure (1)..(365): unsure at all Xaa locations
  Clone ID: MRT4577_179814C.1.pep
MKGGDMSSVSPLVSFVLGAAMATVCVLFFMSAAPAXASSTSLPSPPTPTPPPTSSSTPPTXAAADLAEAAPPAPAPVQAPPSPWGDLEEVLARAATKDRTVIMTQINAAWTRPGSLLDLFFESFRTGEGGVARLLDHLVIVTMDPAAYEGCRAVHSHCYFLRTGNGVDYRSEKVFMSKDYLEMMWGRNRFQQTVLELGYNFLFTDVDVMWFRDPFRHISMAADIAISSDVYMGDPYSLRNFPNGGFLFVRASDKTVAFYRAWQQGRWRFLGKHEQDVFNLIKHEEAPRLDLAIQFLDTAYISGFCQLSKDLNRICTLHANCCVGLGAKLHDLRGVLDVWRNYTAGTPEERRAGKFQWKLPGICIH

SEQ ID NO: 272177 - protein, 48 aa, Zea mays
  Clone ID: MRT4577_179815C.1.pep
VSLPYRIKKCVICITLHGCKNSSFVQFGAVKIPFSGCKSIVYNISSVR

SEQ ID NO: 272178 - protein, 158 aa, Zea mays
  unsure (1)..(158): unsure at all Xaa locations
  Clone ID: MRT4577_179816C.1.pep
GVGPFGLWVLASGDRXERTAGVFRVFRGGGGHDDKPVVLMCTDPTKSSLDANLYQPTFAGFVDTDISNGKISLRTLXSYIIKLRISLLLYTNLSRLQIDRSVVESFGGGGRTCILSRVYPSLAIGSKARLYVFNNGRADVRVSRLTAWEMKKPLMNGA

SEQ ID NO: 272179 - protein, 77 aa, Zea mays
  Clone ID: MRT4577_179817C.1.pep
FVDTDISNGKISLRTLIDRSVVESFGAGGRTCILSRVYPSLAIGSKARLYVFNNGRADVRVSRLTAWEMKKPLMNGA

SEQ ID NO: 272180 - protein, 108 aa, Zea mays
  unsure (1)..(108): unsure at all Xaa locations
  Clone ID: MRT4577_179818C.1.pep
PAAAPPPFAHSAEHHATSMPPPPVPGGRDGLVELPLFPLPLVLFPDATHALHIFELRYRIMMHTVLQTDLRFGIVFAGNSGSPAXVGCVGEVVKHERLADDRFFLICK

SEQ ID NO: 272181 - protein, 168 aa, Zea mays
  unsure (1)..(168): unsure at all Xaa locations
  Clone ID: MRT4577_179819C.1.pep
EVSGLAGPETLLDPALASDAQRLCGARGATVEGGVGPFGLWVLASGDREERTAVFFRAPRXAAXDKPVVLMCTDPTKSSLDANLYQPTFAGFVDTDISNGKISLRTLIDRSVVESFGAGGRTCILSRVYPSIAIGGKARLYVFNNGRADVRVSRLTAWEMKKPPMNGA

SEQ ID NO: 272182 - protein, 117 aa, Zea mays
  Clone ID: MRT4577_17981C.1.pep
WLLRDFSSSVVEFSTRSSCVASGRSWYRRKGLVVHRVKAPPQSLARALSCSVPLDVEAGCRGTWARPRKMVEDSARQSMVLKAVLVTSLLAHADASSSGTAVVALPCHLAGASILIG

SEQ ID NO: 272183 - protein, 141 aa, Zea mays
  unsure (1)..(141): unsure at all Xaa locations
  Clone ID: MRT4577_179820C.1.pep
FPGFITSDRESLSFRGPTERVRDWKEVAIECTPAPLLNTQSARCMDCGTPLCHYESSSAAXPIGNKIPEFNGLVHHNRWPTAXHRLLXSKQASPEFTGRVCPAXPCEGLCDLGIIENAVCLKRLDCALIHEGYQEVWMIPQ

SEQ ID NO: 272184 - protein, 85 aa, Zea mays
  Clone ID: MRT4577_179821C.1.pep
THAGYLQRDQGMVRPELLLLAEQPAPRRRDTAWAPVLSKARSHMLKTTGSALPTGAGRALTGQRLWSIAISAHTGCCQHSRTARL

SEQ ID NO: 272185 - protein, 152 aa, Zea mays
  Clone ID: MRT4577_179822C.1.pep
LGRRSRLHHSARRSVATLPPRCPPGVLAVVRRVSVSLSSFSSRRRGFALASAATPASSLTTCAAPAQQLAAAVASQPTVARRCCRTASCGILSGRRQAWPSQPPRHGPGAVPGRRVRPLAACSSRALPTFPRSCRSPATITSVMPALVRLIH

SEQ ID NO: 272186 - protein, 47 aa, Zea mays
  unsure (1)..(47): unsure at all Xaa locations
  Clone ID: MRT4577_179823C.1.pep
QTQTLIGFYTCPSCSKRKASLELLFKDWSNRIDNRSLSHCVSLXYIL

SEQ ID NO: 272187 - protein, 84 aa, Zea mays
  Clone ID: MRT4577_179824C.1.pep
FSPFFFYAQRFPLQTGDLPLARERTLIMTPAAKEETGRHAAEPYTYRPLTCDFLTKREKFIHPRSIKYARSLPMNITIYICVHI

SEQ ID NO: 272188 - protein, 41 aa, Zea mays
  Clone ID: MRT4577_179825C.1.pep
FAGLLSLIMLLYGLYMWGVVIDLHRANTLSSTALISGAYED

SEQ ID NO: 272189 - protein, 1031 aa, Zea mays
  Clone ID: MRT4577_179826C.1.pep
MGKNKKGGSSSHHSGDKRKREPTPPSEDFGDSEYSEEEFSSESEGSPAPASPPASSDDSDDSQGIAAEVRTYIRAVERAGLEGSDESEYSSDEENSSDSSEEGGDGNGGDGHNDRGDGDGGGGDDKSGDGGDKGGSGDGGGGSKGSSRGSNKFCFSASRPSLLSCNTAFALFASTVEMAPKRKSQSSSAAVIPPIDPNSRLPFAAFLGILPHFGLWKYLYHCRPGMAGGQHQLVGGASLEMHRGRKTDYLDIPLKDNIKGWRLEWFIVENHGNSLPPRSGRQPDVHTPSWTKSPTDLEVAEAGALLAKVGLLKERGLTEEVVVTDFIFKNIQPLKDRAYPTYLYRGLADSTRVTNRRIPAVDLVSRLEMILRGKVSNIGAPVAYSAWNLPPSRAFTSFVSNPPAGDSGLGLRVRPSPEEVSALVASLGEVPDDERQVHFEVPLNPSDAEISAMLDMLAEDSSDAAPAETLAVAPIPEADKALDTQRSDSVRPKRPRRATQPTSPAEGKKKKKRRLRRVSCLDQDASPSAEEVPVPVFAEADPNGCDLDDTDPNGSDPNGCTVRIVDEDEEEEDEIPLVRKNNRRYIASGESSGVPSPALSALIGLQELSLANFDQTLEDMVPEDLLSELADGGMMDICADVPDAGLELSRAASRASSTLERCLKGQEAGLDCSAPMEVGEGPSALEVAITESSALKDGASVYPAPEGVAGDDSARMGSAIYDPAPEGVRVSSPSHTSMDVHVGSSLPHSGCMAAAQASGQEVALEASAPDDRVLTSANDTDLVPTDALRVVPVDDPSSSHQLTSHDLGVPSFFSNLQTLVDEMVGQLRSQGASVPERALSLAHWNPVLLQRRVSDLEMANADMARRYSDLEEKYSQGQTELARVSASLNDANTLNSTLHAQLDSEKRSHRFTMEDLDTHRYKLQESLDDMIRLRQVVSNKDTIIKDLRAFKKSVALELEAARLAVKAVEETSATLRAQRNKAMDKAIRAGRILMRRPGVVVPDDIVADVNAAPDSSSRPSSSVAPEKNITK

SEQ ID NO: 272190 - protein, 151 aa, Zea mays
  unsure (1)..(151): unsure at all Xaa locations
  Clone ID: MRT4577_179827C.1.pep
MGKSKKGVSSSHHSSNKRKREPTPPSEDFGDSEYSEEEFSSESEGSPAPXSPPASSDDSDDSQGLAAEVWTYIRAVERAGLEGSDESEYSSDEENSSDSSEDDDDGDGDDGDGDDGGEGDDKGGDGGGKGGNGDGGDGSKGSSRGSSRASG

SEQ ID NO: 272191 - protein, 167 aa, Zea mays
  Clone ID: MRT4577_179828C.1.pep
MGKSKKGGSSSHHSGDKRKREPTPPSEDFGDSEYSEEEFSSESEGSPVHASPPASSDDSDHSQGIAAEVWTYIRAVERAGLEGLDESEYSSDEENSSDSSEESDGGDGGDGDDDGGDGDGGGDGGEGDGQGGDGGGKGGSGDGGDGSKGSSRGSNKGSSKGSNKANG

SEQ ID NO: 272192 - protein, 81 aa, Zea mays
  Clone ID: MRT4577_179829C.1.pep
AGRGFKNFFKKKTGPKGPPKATHAKSHSKTPSGPKKGGKNLGVLKRSLKKADQLFNLHQKLEKKLGNPGGLPPQKENGFPF

SEQ ID NO: 272193 - protein, 141 aa, Zea mays
  unsure (1)..(141): unsure at all Xaa locations
  Clone ID: MRT4577_17982C.1.pep
ITFFADISPKYRPTTIFTGCGSLMRPRTVRAIHTAVLDHGAAWTKMRCGKTYPARNVDDAGQNQQSTISLPHIFFYETHSRAMLQRKPGRRLYNLINIWPLTNLHQTTYVKTMLYVLRTWNMKSSKQRRTXAMTNARTKLN

SEQ ID NO: 272194 - protein, 128 aa, Zea mays
  Clone ID: MRT4577_179830C.1.pep
ALKALLEYHIVVDQTLYTDAFYDGRKDDKETVEERPGGYHYDLPTALCHKNLAVDVGRYGPFVEIRINGFSRVTVHDGVASDGVIQVVSNVLIPPKTSGGEQSFWKGEELDVEDLKERLQPLIENMEL

SEQ ID NO: 272195 - protein, 66 aa, Zea mays
  Clone ID: MRT4577_179831C.1.pep
RCCYGQLQKQQEEEQQPSLGQEDQWDDESARHLLMWDDDQELTPSNLEAMESTAHSLLFMGPNDHT

SEQ ID NO: 272196 - protein, 242 aa, Zea mays
  Clone ID: MRT4577_179832C.1.pep
MGRSFRDSLKVLEADIQHANSIASEFRREYDGASLQMRMAYCPAAHFFLFLVQWTDCNLAGALGLLRILIYKVYADGTTTMCTHERKASIREFYAVIFPSLMQLHERINEVEDRKQKAICLERYRRRDEDPKTVVSEIDDNIEEECGICMEINVKVVLPTCSHAMCIKCYREWRSRSQSCPFCRDSLKRVNSADLWIYTDSNDIVDMATVRRENLRRLFMYIDKLPTVIPESVFDVYDSHVK

SEQ ID NO: 272197 - protein, 76 aa, Zea mays
  unsure (1)..(76): unsure at all Xaa locations
  Clone ID: MRT4577_179833C.1.pep
GRXXKKKKKKKKKKKKKKKKKKKKKKKKKKKKKKKKKKKRPLEAPQIPLWFPFWGLKGGFNGTMAKIVSWGKLLGD

SEQ ID NO: 272198 - protein, 345 aa, Zea mays
  Clone ID: MRT4577_179834C.1.pep
ICSQVAAFVPLMYMCICTYYSLFKIGMLMFYSLTPRQTSSVSLLMICSMVARYAPPISYNFLNLIRLGGNAKTTFEKRMGNIDDAVPFFGRGFNKIYPLIMVVYTLLVASNFFVRVIDFLGRWKRFKFQREEENIDGLDPSGMIILQKERSWIEQGCKVGEQVIPLARNFNGVNADIESQNVPLVENTVEMKVGATSSRNDGRAGQLKYANNRETIASKYTSIREQNRQSGKVVRKEISPNSISLLEERNSEQGSNAGVPPTGVSATWASMKIGFQNFKANMGSKKFLPLRQDPGFVPNLNVSSPESLDDIFQRLKRRPANVPVDYLDDDDDDNIGDTDLHFQDQ

SEQ ID NO: 272199 - protein, 116 aa, Zea mays
  Clone ID: MRT4577_179835C.1.pep
ETGADQPFRQPFRLSRVLMSGSQGPRSGRRVTKASRGPRPYFRCSFAPACPAKKKVQRRATNPTILVATSKGNHNNGQPPQQAQAPNNGSSLGPRKKPPSPPRPFAAVPGRFHNKQ

SEQ ID NO: 272200 - protein, 58 aa, Zea mays
  unsure (1)..(58): unsure at all Xaa locations
  Clone ID: MRT4577_179836C.1.pep
SESLRHLKPTERQMHVIRRRXXIDKRHRSSAQIVMTYSDTRQASRTQSDVHLRILDVS

SEQ ID NO: 272201 - protein, 108 aa, Zea mays
  unsure (1)..(108): unsure at all Xaa locations
  Clone ID: MRT4577_179837C.1.pep
GGVRGPGNRGPGPAGXPFGEGGAGWEGGGAKVFPGPRGKPFSGPNTTQPKSRKNKGGRAEGLREHPTKKKGAGPNAQFPKGKRGGQKAIKNRPARGGRRFGQRGPGCF

SEQ ID NO: 272202 - protein, 70 aa, Zea mays
  Clone ID: MRT4577_179838C.1.pep
HLTPGAVSVEWEGFSCDSKCLLLQARGRTISSGNVTWSLVRASVHNFRLVHTAVVKIGEVSLVNNLLPDW

SEQ ID NO: 272203 - protein, 47 aa, Zea mays
  Clone ID: MRT4577_179839C.1.pep
MAMPRAADAGSLHFLGLLKQPQSDAASPFQLDQRDVLWPTGVGQHDG

SEQ ID NO: 272204 - protein, 192 aa, Zea mays
  Clone ID: MRT4577_17983C.1.pep
MGCTTSHDVVAAAVTSSNSRPHARRSSASEPSPRRGDPAALCRERVALIRAAADRRYALAAAHAAYFRSLAVVGDALRCFVASALAPATPGSSPVLTLPPSPAKLVAAASASLPPWSSSTVSPLSHSLAEKRWIFREAALKGSARERTRSRTQATAAHSCIRIRFRVRDHTCQRRIRDAPVKCGRGLQICRY

SEQ ID NO: 272205 - protein, 72 aa, Zea mays
  unsure (1)..(72): unsure at all Xaa locations
  Clone ID: MRT4577_179840C.1.pep
YDISANSSYDVEKPFLYLARKLARDQNFHYVEAGALKPPXEHIDMALPKQDEPDLAGAAAQPLPDDYDDLRE

SEQ ID NO: 272206 - protein, 160 aa, Zea mays
  unsure (1)..(160): unsure at all Xaa locations
  Clone ID: MRT4577_179841C.1.pep
ELGWYFSTYCSSRVGADQWSLQHKSIPEKLQRLYDDGYKLVIFTNEXNIERWKNKRQQAVDSKVGRLDNFIECVKAPIQVFIACGLGKGKGIPDDPYRKPNPGMWWLMAQHFNSGIKIDMDQSFYVGDAAGRENDHSDADIEFAKAIGLKFHVPEEYFGF

SEQ ID NO: 272207 - protein, 62 aa, Zea mays
  Clone ID: MRT4577_179842C.1.pep
KTVYCLSNTSAPQHKRTQNPSFKTQRFALPRFKTTSKLDLRINKNIAKMCAQNLQPSKIPSL

SEQ ID NO: 272208 - protein, 61 aa, Zea mays
  Clone ID: MRT4577_179843C.1.pep
GYGINKISSNASLSYRMHVYNIPHLVQILSTTLTSELPRDFVYKILCCTTYVAFSGVAIDH

SEQ ID NO: 272209 - protein, 159 aa, Zea mays
  Clone ID: MRT4577_179844C.1.pep
PMSRSASEARRFGRRGEETVAMARGQGSSCWDMAEQGRMGFDSSMAPVAGASWRTASRALSSTRPAAPSDSPHQCANQGTTQEVATTPQVSRRRCLDGFDGGQPSKGPGRSGREAQGRPVQRSPWRGAERPSGGRRCSHGDDGRANRRHEFQSMELTTA

SEQ ID NO: 272210 - protein, 132 aa, Zea mays
  unsure (1)..(132): unsure at all Xaa locations
  Clone ID: MRT4577_179845C.1.pep
IMWRIKCDLYWVYRATWSVLLIPLRLRGHFLVLSFSCFSGSLLFLAMVGCSPCPASGSGSRWVRIRLASVYGPPVCARTGSFTVACYPYPVRSWGGYAAPFRALLEYRXCLLAVVSWVPISGFWFCLALSWC

SEQ ID NO: 272211 - protein, 89 aa, Zea mays
  unsure (1)..(89): unsure at all Xaa locations
  Clone ID: MRT4577_179846C.1.pep
DPRAFTFQTSPKSTGRGLLFKMHLFVKTLTGKTITLEVESTDTIDNVKAKIQDKEGIPPDQQRLKFTGQQLEDGLPLAXDYQLPKESTL

SEQ ID NO: 272212 - protein, 86 aa, Zea mays
  unsure (1)..(86): unsure at all Xaa locations
  Clone ID: MRT4577_179847C.1.pep
NSCTQTAYPYFPCLHAGSAGKPLVVKNHLSMVAFNNITRLAFGKRFVDATGELDEXQGREFKGIVHNGIKIGASLSIAQHIPWLRW

SEQ ID NO: 272213 - protein, 65 aa, Zea mays
  Clone ID: MRT4577_179848C.1.pep
AVRNCSEFIHTLVWAKELLEEFRKEAIGDRRRCIWMSHIRTLSPTKNCCSSVRFLLEKIKHLVLF

SEQ ID NO: 272214 - protein, 217 aa, Zea mays
  unsure (1)..(217): unsure at all Xaa locations
  Clone ID: MRT4577_179849C.1.pep
DRWLNGKTVQDLAPEVICMVGSRTITXRTVAQVLANWQWVSDIVHPLSLIGDCSSSCXLWDALXRRVVLTQEDDRHVWVHTTSGQFSSRSCYKAFFMGSISFEPWKRLWKSWAPPKCNFFLWLAXKCWTADRLQRKGLPHPVVCQLCDQEFETVQHLLCTCSFARQFWHIILSPLMLGHLTPDSDETSFAAWWSNAHIKVHKRLRKGVHSVIILGTW

SEQ ID NO: 272215 - protein, 67 aa, Zea mays
  Clone ID: MRT4577_17984C.1.pep
LFSFSVRPGLFVAFFFLLSNQTDLYNKRVSNVGTSILHHILDLINMPTMSKYKLLITDRPIIHSPIL

SEQ ID NO: 272216 - protein, 51 aa, Zea mays
  unsure (1)..(51): unsure at all Xaa locations
  Clone ID: MRT4577_179850C.1.pep
QANKGEDRGIGFTEVRFLQTYSPLRGXQRPGLFQPFPSLKRAPKPRELFSS

SEQ ID NO: 272217 - protein, 121 aa, Zea mays
  Clone ID: MRT4577_179851C.1.pep
HIVWHTIGVGALHMEDLCPPRVIWDRPTEDEDCSKIVHINWHPTLRIICMMTAERLTFYYQFTTSTLTGISIYPCTTLLTLGRPHAPRKRKLKRREVTRNTILDHIYKKNMPYRDPSRRGL

SEQ ID NO: 272218 - protein, 156 aa, Zea mays
  unsure (1)..(156): unsure at all Xaa locations
  Clone ID: MRT4577_179852C.1.pep
MNSSSSEVPVCVTGGAGFIGSYLVKKLLEKGYTVHATLRNTXRGEDRAAAAAGPRRGGASAXLFEADLFDAATFAPAIAGCQFVFLVATPYGLEAAGSKYKSTAEAAVAAVRVILRQCEESKTVKRVIHTASISTASPLKDKEAPYLQEHKLFFFF

SEQ ID NO: 272219 - protein, 50 aa, Zea mays
  Clone ID: MRT4577_179853C.1.pep
PSRSRHPYIKVDAPQRALMLLSLYCSLPPVFVPCPCLCNWFPLFSIYQSI

SEQ ID NO: 272220 - protein, 175 aa, Zea mays
  Clone ID: MRT4577_179854C.1.pep
MSEQDGQHVGGSPPDAAIESFSQLPFVRPKPPQPASSSSPSSIRLFGFEVPPDAATSSTATSDATAASATVAGQAAASGAAGAGAGASDGTGGGRKFECHYCCRNFPTSQALGGHQNAHKRERQHAKRAQYQSAMAMHHAHYPGHPHAYPAFTSYHQQQRFGMARYEPPPPGPPP

SEQ ID NO: 272221 - protein, 70 aa, Zea mays
  Clone ID: MRT4577_179855C.1.pep
PPPPRPPGIIKYPDGRAGLSIKRAYHAELQREISLSSAPLSLSSTRSLRHEGPALYPNGAYVGSRVTRNP

SEQ ID NO: 272222 - protein, 217 aa, Zea mays
  Clone ID: MRT4577_179856C.1.pep
MIIRSSEPEVKIAVDRDPIKTSFEEWARPGHFSRTIAKGPDTTTWIWNLHADAHDFDSHTGDLEEISRKVFSAHFGQLSIIFLWLSGMYFHGARFSNYEAWLSDPTHIGPSAQVVWPIVGQEILNGDVGGGFRGIQITSGFFQIWRASGITSELQLYCTAIGALIFASLMLFAGWFHYHKAAPKLAWFQDVESMLNHHLAGLLGLGSLSWAGHQIHV

SEQ ID NO: 272223 - protein, 82 aa, Zea mays
  Clone ID: MRT4577_179857C.1.pep
LYAYTPNLQASVSKPSVPFMPNFSEYIAGASWSQPWQSTLTTRATTGAHLRLTCHRCLLVLYNKYEEASVCGFKGPSNLFVP

SEQ ID NO: 272224 - protein, 458 aa, Zea mays
  unsure (1)..(458): unsure at all Xaa locations
  Clone ID: MRT4577_179858C.1.pep
MASASAAPAPDREEIVFLDVETSTPPCVLLEFGAVAVCSRRLVEVSSFATLVRPANLDALPDPTARSNGITRGTLADAPPFGDVADMVYDVLHGRVWAGHNIVHFDSMIIMDAFAEIGRPPPQPKAMIDTLPLLTQCFGPRAGDMKLASLANYFGLGKQRHRSLDDVKMNIDVFKNCATVLFLEESLRGVRVPTVQNMXRRGVQQSEXQGITSDPAPNRDNPNESLLVGSSTVHVEEMMLDTTVTVQTDTRSSGAFSGFAVLDDVSTESIKISAPLFLRPFGPRAIVQHKGSPLQLICPGLEVLWVNTKGFPNSPHRPKVGIKVDIPENLSKVLGFCDDLAQSSSSSPGPGAICSNSRWKSLIERDADRRPTVWLKIPTFGSGDTAACRTHVYEKECDGVVPRLVSERVDPSELASMLQGNKVVDAFVSVETFDHYQSAGIRLVANRLDVHFKRQQQA

SEQ ID NO: 272225 - protein, 85 aa, Zea mays
  Clone ID: MRT4577_179859C.1.pep
HQCYQLAAFLGPSPLKLGPPFPKGPPIGASKVGPLGLSPKLKVQFLSLGKGRGSPGQVCVGNPVYPFKFIPKMLLETKFIINILV

SEQ ID NO: 272226 - protein, 158 aa, Zea mays
  Clone ID: MRT4577_17985C.1.pep
GEVLPVVQVRWAEEIQRLAGSPTRFLLPPLTAWARSPSPRTAPGRERQAPADRLHRKDCRVAIGRPITCCWYRARAQGGPGCGETRARAPGCCWYRARARAQGAPSRPSQQPQKQLAGRQAARCQGLELELVDGGMKRTNLTKLLSMAIHSSRELVIY

SEQ ID NO: 272227 - protein, 132 aa, Zea mays
  unsure (1)..(132): unsure at all Xaa locations
  Clone ID: MRT4577_179860C.1.pep
LFGFSPPAVWGLSFRAFLVGFRRGFPGPRVVGGWPVXCLWVPLSSGSGVACPGACAWVLWGGRPVFLFFFFLFVFFVCFSCSLGCPCFCVLPWGRVAFSGGWCSAGWFPNLPVVPGSRGFHRVGRTGIPSRS

SEQ ID NO: 272228 - protein, 210 aa, Zea mays
  unsure (1)..(210): unsure at all Xaa locations
  Clone ID: MRT4577_179861C.1.pep
QIVDARSPSPKPPLVKDSEWLYLSILWHACIEKFKRTPITWFFSLNAPPHILSCARIPRCRVKQSGLLICSLLCQDLADVHILGTVLQLGVCFFPVVTKAFPQPRWCRFCRLPPRRCFMGHWPFAALLCLMDSLHSFLSLLRTGLPKWMTLEVVTRYDRLHDLYAQTKRRTGGXXQKEKQAPGAXXXPKKKKKKKKKKKKKKKKKKTREG

SEQ ID NO: 272229 - protein, 107 aa, Zea mays
  Clone ID: MRT4577_179862C.1.pep
RVDPAFAPSDEDEDDDDEDFDNYESDMMVDEETIHSEKPDTAEGSSEINDINNITLDLKGSRVKFKGLQQVFGPIERRHLNALERQLSRYVKVVGKELSDRMVYCLS

SEQ ID NO: 272230 - protein, 34 aa, Zea mays
  Clone ID: MRT4577_179863C.1.pep
VNFLINYSSRLRVSSRQCGVLILILLISGTDASL

SEQ ID NO: 272231 - protein, 640 aa, Zea mays
  unsure (1)..(640): unsure at all Xaa locations
  Clone ID: MRT4577_179864C.1.pep
MADGASSSGGAQNGGESVVIDYGRRRTTCGYCRSSGPTSISHGMWANSLKADDYQALLDRGWRRSGCFLYKPEMERTCCPSYTIRLKANDFICSKEQARVLKKIQRFLDGELDPQIGSPQCKASPTKRSLGEPLNSPTSKVSKVSAEEXKKAQVQIXKEDDIICCLANKINEATATCFRGGVFGSVQLPKAVVKTVKPQVKRKVGEAVQEKKVGEAVQALVYTCNISFQIVAAVRRALPKENGATQTEVPADLSPNSVAEKLSVAMERLGELAGFEVKACNGHLNFYLASNQAMQNHTSVVVPVQASDKSSGSKPSSVNQTNAKYPLKRKNLEIRLSTSHFDPEEFALYRRYQTKVHKEKAVTESSYKRFLVDTPILFVPPKTGDNTVPPCGFGSFHQQYRIDGKLVAVGVVDILPKCLSSKYLFWDPDLPFLSLGKYTALKEIDWVKTTQEHCPSLQYYYLGYYIHSCNKMRYKAAYRPSELLCPLRYEWVRYDLAKPLLDASQYSVLSDYATMQGEVPQPQICGPSDDSSAKVDHHESPSDEDEDDDDEDFDNYESDMMVDEETIHSEKPDTAEGSSEINDINNITLDLKGSRVKFKGLQQVFGPIERRHLNALERQLSRYVKVVGKELSDRMVYCLS

SEQ ID NO: 272232 - protein, 67 aa, Zea mays
  Clone ID: MRT4577_179865C.1.pep
NKIQTPMEPFCEKHNTLNLGFFPRPSVVLSTPAVILRTTPLFCRARSFFGSLVSRRRRFFNIGGSMD

SEQ ID NO: 272233 - protein, 51 aa, Zea mays
  Clone ID: MRT4577_179866C.1.pep
GGTYYINFKQSQKCTGFLEEQGIKITNNRPQPDPLQFSTKTTDLPPLPLDP

SEQ ID NO: 272234 - protein, 50 aa, Zea mays
  Clone ID: MRT4577_179867C.1.pep
QSPIDVDGADLNRASVLDDGSLAVSTEGAGGVSITLYHSNRATGNRRTST

SEQ ID NO: 272235 - protein, 80 aa, Zea mays
  Clone ID: MRT4577_179868C.1.pep
LGNSRDLYSVVKIPDQIKSSLTSIYRTSYTATFNALIACSSIDWAPCIPCDIIQHAGKNTYLRPTPHLYLLNHHIFPYKR

SEQ ID NO: 272236 - protein, 106 aa, Zea mays
  Clone ID: MRT4577_179869C.1.pep
PRGLGREKKKKKKKRKKKKKKKKKKKKKKKKKKKGELFRVPLLGNQHPIGVEITKAAMELGPEKLSGLANDAYKDAPQRGVQAMKDRMADLAQSLEMPVALGDGLK

SEQ ID NO: 272237 - protein, 104 aa, Zea mays
  unsure (1)..(104): unsure at all Xaa locations
  Clone ID: MRT4577_17986C.1.pep
KDLNRGIWASNSKVAPAKGGVCLTSQVIIMNPPGRIANGFAQVLDCPTXNNCCKXFVDLVPKIXWRSGKDLEKEPKFLKNGDAGLGKMVPTKPMGGETFFKILL

SEQ ID NO: 272238 - protein, 73 aa, Zea mays
  Clone ID: MRT4577_179870C.1.pep
KTGIVRYHIRKSCNPPGTLCGLTEVKLRMHKPTNHPRTSSYALHMKVLLLCCLVSGLSALSGHIGVVVSEDLS

SEQ ID NO: 272239 - protein, 68 aa, Zea mays
  Clone ID: MRT4577_179871C.1.pep
IGTVGSSARWRPCSACVVAAFSSGSWNPCQIVFVVLSAGATCRITGSQLDGVVSLVGLPIYRPGVCMS

SEQ ID NO: 272240 - protein, 67 aa, Zea mays
  unsure (1)..(67): unsure at all Xaa locations
  Clone ID: MRT4577_179872C.1.pep
ATPPPRFSLRSSTGTMAVAARRSARTRRSTPRSSWRSXDDDAAQSLCRTDGGETRXPIXARTLXRPG

SEQ ID NO: 272241 - protein, 90 aa, Zea mays
  unsure (1)..(90): unsure at all Xaa locations
  Clone ID: MRT4577_179873C.1.pep
VQQVVGGFSFXIGVPPPPQGSAALVSISRRLITTFHPHSALRASFSGNLAPPGPAWSLPEGRSVRKLPVSPPVSPVIVMVWLVPQQHXVP

SEQ ID NO: 272242 - protein, 105 aa, Zea mays
  Clone ID: MRT4577_179874C.1.pep
RTPTPAGGGGDRFFFFLKPGFPLFKISPLFGGGGPKTHGNGGPFPKIFQTWAFGRDPPGNRRLWKQEKARTFFKQKNPFFLKILPRAQPGVWAFQGGENPQGRGG

SEQ ID NO: 272243 - protein, 63 aa, Zea mays
  Clone ID: MRT4577_179875C.1.pep
AHYRTRFGTNYPFRIYTGNKLTCAVIYFGTLNHWPLILGFFEHQIGKLGKISKTYVQQITWET

SEQ ID NO: 272244 - protein, 94 aa, Zea mays
  Clone ID: MRT4577_179876C.1.pep
LWTPDFPRQAPTISRMLLPRKNLRRVSKMDSVSRPAAADVEARPEPEPSASILIHHLLADLVLTASSSSPPARRRMRRKLPLLLFSFKILHVIP

SEQ ID NO: 272245 - protein, 43 aa, Zea mays
  Clone ID: MRT4577_179877C.1.pep
KRGKGVKRNFYPGEKLPLWTDELEPQNPLLIILEPGNPDPRVQ

SEQ ID NO: 272246 - protein, 230 aa, Zea mays
  Clone ID: MRT4577_179878C.1.pep
MQAIERTPPLVWASKIAPIASAEATAEAGTSAEAAATAEAANLESTLSGIDKLLLNMAAEETATAAEKVMVAVPDKGKKIADSASEERDLDLRNLVGQELSKAEKKELQEYGISCGYQPGAMLFGGIDEGALGCIRDRAGAKIIGTLSKSVGFPKLEADIRGYRRQHIVDSLFYSNFKSMMLSKALRMQQDLKDKKNEIIIEGLESKIKDYEASLEKKDFPLQATEGSLE

SEQ ID NO: 272247 - protein, 85 aa, Zea mays
  Clone ID: MRT4577_179879C.1.pep
LPLCQLRCLSPSAYCHQLMLMPFGELASTSPSSVLKQRQLLPLSQQYVTNPATLFQLRQLLPLVHLALANPSAFYQPHIIAGAIC

SEQ ID NO: 272248 - protein, 93 aa, Zea mays
  Clone ID: MRT4577_17987C.1.pep
PLERSTISTSNFHILSFHLIQHAKVQLYFPNHLPNPNMTQSSSSSQTPYSIPSTSIPTYHNIHLSHIDSHTLNQTCNDYQNTTHLLSSQYEFF

SEQ ID NO: 272249 - protein, 48 aa, Zea mays
  Clone ID: MRT4577_179880C.1.pep
GSFLRRRNIDLACINLFACQPRLWCLKTFVCVLPPLGNVWVFPSIIPC

SEQ ID NO: 272250 - protein, 413 aa, Zea mays
  unsure (1)..(413): unsure at all Xaa locations
  Clone ID: MRT4577_179881C.1.pep
MASDSVTSTTVEDGGAHESKQEHLNGAVGTPTVGQEEEIIGPGPAPAKQRRKRPLQFEQAFLDALPSAAMYEKSYMHRDVVTHVAVSPADFFITGSADGHLKFWKKKPVGVEFAKHFRSHLSPIEGLAVSVDGLLCCTISNDRSVKIYDVVNYDMMFMIRLSFVPGAIEWVHREGDVKPKLAVSDRNTPFVHIFDTHSGSNDPIMSKEIHGGPVKVMKYNHIHDVVISADAKGLLEYWSPSTLMFPENEVRFRLKSDTNLFEIAKCKTTVSAIEVSNDGTQFAVTSPDRRIRVFWFKTGKLRRVYDESLDVAQDLQRSDVPLYHLDAIDFGRRMAVEKEIEKTENVPQPNAVFDESCNFLIYATLLGVKIVNLHTNKVSRILXKVENNERFLRIALYQGDKGNKKVRKIPSVA

SEQ ID NO: 272251 - protein, 106 aa, Zea mays
  Clone ID: MRT4577_179882C.1.pep
CCWRRGAGTASALVSCAQLTASEPPYLGDCDGQHGDTLRSTLHRGALAQQPRSSGGDREATCNCLKSMTSPFWWRKSIWPKTPTSPASAASSVCVSISPYRLLHAT

SEQ ID NO: 272252 - protein, 202 aa, Zea mays
  Clone ID: MRT4577_179883C.1.pep
MSTCPPCIVYCDFGFCCGGASDDGGLECHAPPPQLLPPPPPPPCHGHTEVTTVVNATVQLPPPPPPPPPPPCHGHKEVITTVVNAPTMQPPPPPLHPHVLVPYSTQLPPPVPAPPHPPRPPTITVYDTPPPLQAIIVPRRQCVPPPPPPPPPANKVYDAGSSSSPLSVSKSTQLAKPDGDVPSSTTTRYEYETDDDPSSFAL

SEQ ID NO: 272253 - protein, 135 aa, Zea mays
  Clone ID: MRT4577_179884C.1.pep
AGKTSKGASGSGPSFPPSLTESQSQWGSQSRAATAKNVGGLLSRARDTHCDARGIHPRLTQPTIHPPPHPAAEMRGGAILSGFIPPHGVPVEAGKNKQQRRATVDLLRPGPGKNAASREEDLQADYPLPLERTQR

SEQ ID NO: 272254 - protein, 61 aa, Zea mays
  Clone ID: MRT4577_179885C.1.pep
LGRAWLVSSPSKKDNLMDKQFLKDPSEITWDIGDKKLKEIVASRGKKGPGRFKRVEQLTFL

SEQ ID NO: 272255 - protein, 140 aa, Zea mays
  Clone ID: MRT4577_179886C.1.pep
GAHSIRAQQLQQLVLANLPAYSQQQQFIPFNQLAALNYASYMQQQQLPFSQLPAAYPQQFLPFNQLAALNFHVYLQQHQRLPFRQLDGVSHSTFFIQLQMMPFYQLGARNNGVVLVIARWLPVSHRGFCNKAAMYHPSCR

SEQ ID NO: 272256 - protein, 94 aa, Zea mays
  Clone ID: MRT4577_179887C.1.pep
MAHAAVVALLAVAVILACLPPPAASSYRGAAALRRLETAEPMDTAQGLREKADVNKGAEEDLSTTGFGAESEREVPTGPDPIHHHARGPRRQSP

SEQ ID NO: 272257 - protein, 99 aa, Zea mays
  unsure (1)..(99): unsure at all Xaa locations
  Clone ID: MRT4577_179888C.1.pep
TIGKSAGLSVGQTSLLKGLISGPVFGGSINPARSVGPALVNGEYTSIXWVYVVGPLVGPVAGGWAYNFIRFSNKPPREIPKSTXSFLKSPSRINPPPPP

SEQ ID NO: 272258 - protein, 36 aa, Zea mays
  Clone ID: MRT4577_179889C.1.pep
PNYIDSLLELVLDEMLLTRRLARFMVGSFEFFYKLS

SEQ ID NO: 272259 - protein, 153 aa, Zea mays
  Clone ID: MRT4577_17988C.1.pep
GEEKKKPAGGFFLRCAIHTGKTQEALSYARDWEKNSLGALSPKFIPPIGEKHRGSPEHPLARPFAHMGGGLGKTPRRWHTGALFCGVGEGAHRGGGPPTRPPVCPPGVGPPGGGSKINPPPRVSLFSPGSHKHGGAVAPHGERGFKRHPGILG

SEQ ID NO: 272260 - protein, 75 aa, Zea mays
  Clone ID: MRT4577_179890C.1.pep
GSIKEAEQGCPQSPYQGLDMASLKGRSSLSPSQQHTIMVFIYRPVRHHNLFNGGALLAKHHQLIHAEVNHWSWAI

SEQ ID NO: 272261 - protein, 121 aa, Zea mays
  Clone ID: MRT4577_179891C.1.pep
FRGKGGSLGLLVSRVRAFLSALNKIYRFPGAVKAPNRVAWAPRVPSPELASVLFPVTCFKFLEGFSLWLWAGRKFLGLCRGPFLCVLSRARFPFVLFPFLTLGFVSLLKFGPGPLLLFPCF

SEQ ID NO: 272262 - protein, 105 aa, Zea mays
  Clone ID: MRT4577_179892C.1.pep
PYFFWGFFIFFTFLTPINRVQKNQMLQALRRPRTRAKKSKTPGQKTTKLKQQRKCPGAMDTHKKTVRGGAQNTGGPSKNKQHPRKHTGMPGIGDIKNALALGGPP

SEQ ID NO: 272263 - protein, 261 aa, Zea mays
  unsure (1)..(261): unsure at all Xaa locations
  Clone ID: MRT4577_179893C.1.pep
RPRRFLGYLSPHSGARWRPADTDLPVPPHAFPTAVPAAVTASSYSNATAGKELSFLDENGRPDDPSSASASSSTSGATPAAGVVRCDPRDAVRVFMYDMPPEFHFGLLGWSPPSPDSVWPDVTAASPPPRYPGGLNQQHSVEYWLTLDLLSSSPPCGRHSAVRVSDSRDADLVFVPFFASLSYNRHYRPVPPEKVSRDRALQEKLVRYLAARPEWRRFXGADHVIVAHHPNSLLHARAGLHPAVFVLSDFGRDPPGVASLE

SEQ ID NO: 272264 - protein, 424 aa, Zea mays
  unsure (1)..(424): unsure at all Xaa locations
  Clone ID: MRT4577_179894C.1.pep
MDRGGSQKKRHKSVTNVDIISNLPDVIKDKILCCLPIKEAVRTCLLSRKWRYTWASMTELMFREDDFALGNGXKTVTATDLFXFVITFLSLHDGPILKFEMNARRVHMFSPGGHIHRWMLMLSRNGIKEIQIKXGYGXEYKIPSSFFSCVELEYACLQGCIFQLPPLFAGFKRMRTLHFVEFCATENNIGELVASCPNLEELILSRLLSFADITIHSTKLKVLRVDGMFKHLNLVTPHVSSAVINLQVNTGYVKRAGSNFNLSQFIGSLLDIENISLLGHAFECAAHGIVPGKLPRSLNRLTEITLELDLGNLKEANAAHCLFQIAPNLRRMELQLMHRGYSAPTSSFWDSVDRQDCLFKNLYTVVMNNFTGSCAESGFLKLLLDDAPVLRSARIEDNNKLDKESLKRLLKMRRASKDAEIILL

SEQ ID NO: 272265 - protein, 118 aa, Zea mays
  unsure (1)..(118): unsure at all Xaa locations
  Clone ID: MRT4577_179895C.1.pep
MARIGLAYIEIEDSMNXKHKQRVRMRPTRRQMDIXDYQVLRERGMNYQTQTKTPRHGALYYXADXFEGKLRERTPGMLPRKLKDPLGMRASSPPTWLINMHSYVSPSSYPQMKISGVN

SEQ ID NO: 272266 - protein, 128 aa, Zea mays
  Clone ID: MRT4577_179896C.1.pep
SFGYRLGCPRSRPCPGTSKLVSAPSLSSFSSVVSGAAVDNPQGRTGQEIGASNAGLRPGGINWGRPGQSTTTPAAMHRPADPAMRRGSERGRNHCRAWHSIPPRRRPRGAGCGVFSSNCATGGGCSPR

SEQ ID NO: 272267 - protein, 84 aa, Zea mays
  unsure (1)..(84): unsure at all Xaa locations
  Clone ID: MRT4577_179897C.1.pep
PPGVALLFPXYFKKVLGVLGPFFFWPLPIYLPVKIYWVQRGVLPWTRTWVALQALRVVFFFVGPFPFLGSVEGVTPKRLAYFWF

SEQ ID NO: 272268 - protein, 36 aa, Zea mays
  Clone ID: MRT4577_179898C.1.pep
RFFILSGLCRRTWLLQSAACDWRVRNLLQVLNENRL

SEQ ID NO: 272269 - protein, 38 aa, Zea mays
  Clone ID: MRT4577_179899C.1.pep
GLRFVNNIMVAQHYFFSSRIHFEVGKLVLTGMFKLLPV

SEQ ID NO: 272270 - protein, 148 aa, Zea mays
  Clone ID: MRT4577_17989C.1.pep
RAALLTGRLPVRMGMYPGVLVPSSRGGLPLEEVTVAEVLAARGYLTGMAGKWHLGVGPEGAFLPPHQGFHRFLGIPYSHDQGPCQNLTCFPPATPCDGGCDQGLVPIPLLANLSVEAQPPWLPGLEARYMAFAHDLMADAQRQDRPFF

SEQ ID NO: 272271 - protein, 75 aa, Zea mays
  Clone ID: MRT4577_1798C.1.pep
PRTPRSMSSFPDHPTPGHAARWADGERTSRGRARRPCRVLRYLFLFLLHVGFSSVAQASRDQAMILQMLEFACRS

SEQ ID NO: 272272 - protein, 58 aa, Zea mays
  unsure (1)..(58): unsure at all Xaa locations
  Clone ID: MRT4577_179900C.1.pep
RKRVGFTGFNCICVNTYVSMLGYSDKQDCQFYYRPSARVAMAKANPVVKXAEKLVKIS

SEQ ID NO: 272273 - protein, 45 aa, Zea mays
  Clone ID: MRT4577_179901C.1.pep
EAKSIDYTLFVIGIILWIFSPATLSAVQTHCCNWLKHQKEIRFPS

SEQ ID NO: 272274 - protein, 48 aa, Zea mays
  Clone ID: MRT4577_179902C.1.pep
KHPCRQSYALNRPTRPYISTLVPCACCSSVQGLASLYGPVALRLHSTP

SEQ ID NO: 272275 - protein, 61 aa, Zea mays
  Clone ID: MRT4577_179903C.1.pep
SSYSLFMPHPHIHVRPHRLSGWSTSHRGGGKLFFMRSWFVHSRRTDIASFMATHEGLLYYC

SEQ ID NO: 272276 - protein, 70 aa, Zea mays
  Clone ID: MRT4577_179904C.1.pep
GQGGPKKKRFLFFFENNFPPMQRKQSGDGNPPFWKKRAPPPQLFLPKVKTLIHQKKGVTKGGGGTYFWEP

SEQ ID NO: 272277 - protein, 395 aa, Zea mays
  Clone ID: MRT4577_179905C.1.pep
MTMAATTTMMSAAAQAATSQLPPGFRFHPTDEELILHYLRNRAASAPCPVPIIADVDIYKFDPWDLPAKALYGDGEYYFFSPRDRKYPNGIRPNRAAGSGYWKATGTDKPIHDAATGEGVGVKKALVFYKGRPPRGSKTNWIMHEYRLAAVAGCTSPLAAYRPPSKFRNVSMRLDDWVLCRIYKKSGHASPMVPPLADYEHLDRDGPSPGGFFDDYFCGSTSLYAAAAPAIGGGAAAAGTTNTTTTPAVVMQQHQQPAALPRLPKIPSISELLWDEYALAQILDPPADVAADHASFAVHPSLNQLLAVGDDGSDLMMFSPPPAAAAGGKRKAMVAMNMSPADECAATAHQHQSPAAKRLNGGSCFDDAPQPASGLPATMSSVLGGGLNHHMLPQF

SEQ ID NO: 272278 - protein, 62 aa, Zea mays
  Clone ID: MRT4577_179906C.1.pep
KRYWPKAVPPEILWGLPYQTKGLKVVNNGKIFTGVMNTRKHVKRTLVLVFWPPKMFKYLVFC

SEQ ID NO: 272279 - protein, 148 aa, Zea mays
  unsure (1)..(148): unsure at all Xaa locations
  Clone ID: MRT4577_179907C.1.pep
GTSLDSFLPVGSYKKLYSYTHLINGFALHAESEKTVRILSGAKGVRLIQEDIKMAKMTTHTPSYIGATGVWPLLGGAENSGNGVVIGMIDTGIDPKNPSFATSXRSSQAEPPXASFKGICRTGNRFPPDSCGGKIVGAKWFARSAQAT

SEQ ID NO: 272280 - protein, 155 aa, Zea mays
  unsure (1)..(155): unsure at all Xaa locations
  Clone ID: MRT4577_179908C.1.pep
GVHDGHRLSSPPNTRPSARLHPTAPHLRHRSPHAVVMDPHANRTRSAPKQPSLEHRRRPXAPRCNTXSLPPAKQKPPLPPAAYPSPXRFHSNRVIVVXRRRPRSPEPIGRPQRACAAGRGGSPRRRHGDNRTTRVPSPMTPTPPVPSRLARCGCR

SEQ ID NO: 272281 - protein, 114 aa, Zea mays
  Clone ID: MRT4577_179909C.1.pep
MAGAQESLSLVGTMRGHNGEVTAIANPIDNSAVIVYCYRDKSLLVWDLTNPVHSTPEFGATGDYGVPLRRLNGHFQLVQDLGLKFEGQVGLFRFWEGEVRLLELFNGLNNRRFV

SEQ ID NO: 272282 - protein, 42 aa, Zea mays
  Clone ID: MRT4577_17990C.1.pep
GEGSLSIPWLFGRKGMGSIHLDAGIVHVIPCRQNLSLLFLEI

SEQ ID NO: 272283 - protein, 653 aa, Zea mays
  Clone ID: MRT4577_179910C.1.pep
MQLLLLLILASFLLRPPAAAASAADSSSGCWPKTCGDLNVTYPFWVEEPGRPPCGPPTFQLKCDSSGAFLIRSVYQASQVLGIFPENNSFHVVDHNLPLATGCPAPTVNISLLLPGTFVFSRANRELLFLGKCTGFPPAESAGFRSLPCDNSSFVRLGDGRNFSSQSIQGGVPQGCLFTVLPTLGAPDGNGDDYVASMRNGFLVDWKAVPGDCPKCMARGGECTYGGPDAEFACDCSGGKCGTKGNGRKIPLIVSISVAASLLLPCIYVLVWHRKKLEFFLCRKTSSAIEENIEALILAHGSLAPKRYRYSEVTKITSSFNIKLGEGGYGMVFKGRLDDGRLVAVKFLHDSKGDGEEFVNEVMSIGRTSHINIVSLFGFCLEGSKRPRVCEYMSTGSLDKYIYTENPKAVLGWDKLYTIAIGIARGLEYLHHSCNTRIVHFDIKPHNILLDQNFHPKIADFGLAKLCHMKESKLSMTGARGTPGFIAPEVHSRTFGVVSTKADVYSYGMMLLEMVGGRKNVNSAAQESSEKYFPHWIYDHFGQEDGLQACEVTRENEGIAKKLSVIGLSCIQILPMHRPTIGKVMEMFERGSDELDMPPRQNFSQIFQDPVHSLNAETMSMISGTKAKASSEVLKMKGISVVNSKTIQRLPTL

SEQ ID NO: 272284 - protein, 54 aa, Zea mays
  Clone ID: MRT4577_179911C.1.pep
QISRTSLAFLDSWNEPRMFPSFQMGSIHQSVERSIPCISLGITTVSCALLLLLL

SEQ ID NO: 272285 - protein, 114 aa, Zea mays
  unsure (1)..(114): unsure at all Xaa locations
  Clone ID: MRT4577_179912C.1.pep
MRVLLVALALLALADSATFTHTSCGCRCQPPSTVHLPPEXHLPPTRNLPPTAHLTSPVQLTTSVHLTPPVHVLPTVHLPTPRCHYPTQPPRPQPHTQPHLCPCQQPHSSPCQLH

SEQ ID NO: 272286 - protein, 61 aa, Zea mays
  Clone ID: MRT4577_179913C.1.pep
GRVGRRVGLVIHRERTPCAHLITVYTQEYCQDWKIQDNIYHGYNIWIKDCHITYSGLGCMI

SEQ ID NO: 272287 - protein, 113 aa, Zea mays
  Clone ID: MRT4577_179914C.1.pep
MDLPPNPESPGGGGDGGGGGGAGGSSGGASSSAPGGGTPQTPSRYEAQKRRDWNTFGQYLRNHRPPLSLAQCSGAHVLEFLRYLDQFGKTKVHTAACPFFGHPSPPAPCPCPA

SEQ ID NO: 272288 - protein, 71 aa, Zea mays
  unsure (1)..(71): unsure at all Xaa locations
  Clone ID: MRT4577_179915C.1.pep
MIQSSTNIRDNDKKGKKKMEKKRYYXKKGGEAHMGQEWDSDESSTDSSSDEDAANIAIIKGLLFPNVGHKF

SEQ ID NO: 272289 - protein, 125 aa, Zea mays
  unsure (1)..(125): unsure at all Xaa locations
  Clone ID: MRT4577_179916C.1.pep
KNKWGGGATQIISFLPKPLGDKGGPQPPLKXFGKPXYPSSPRGLKGTPPPKGTNGTPPSPPRHWGRAQKTPTRPPRGCGGQTGXFGHEGXPPWRGWPKGWGPPTNPQGGPRGLPGGPERGGFGTE

SEQ ID NO: 272290 - protein, 178 aa, Zea mays
  Clone ID: MRT4577_179917C.1.pep
YQGGLFYFSSKLLRTTVATLTKTAQERTTRVQAPVFFFHVASPRPRGPNNHKTFLAGNQCITHLQTAQKTKNHGRNKDMKLKRRSTRYGNRLHAQEVHCASCPLLLRTTVATLTKTAQERTTRVQAPVFFFMWPRLALEVVATTKRFLLVISASLILRAITVAGGDGEVGSARHRDGH

SEQ ID NO: 272291 - protein, 149 aa, Zea mays
  unsure (1)..(149): unsure at all Xaa locations
  Clone ID: MRT4577_179918C.1.pep
KKKKKKKKKKKKKKKKKKKKKKKKKKKTSGGLPLLLTDKSRILRVLKGALRKVEDPLPPLQVDPHSFDFNXRFQELGFEKGWGDXCLNRPQEIFHLFWTLWGAQNPPTLKKFLEPTPRGSKAVILSLKGYFVKAKVWGSPDPGGQVVYF

SEQ ID NO: 272292 - protein, 115 aa, Zea mays
  unsure (1)..(115): unsure at all Xaa locations
  Clone ID: MRT4577_179919C.1.pep
MASKRILNEXNDFQKDPPTXFSACPAGDDMLHWQTTIMTPPDSPYAGRVFLVNIHIPPDYPFKPPKVSLNTNVFHPXNINXNVSICVDILNDQCSPAFTISKALLSICSPLSVPN

SEQ ID NO: 272293 - protein, 82 aa, Zea mays
  unsure (1)..(82): unsure at all Xaa locations
  Clone ID: MRT4577_17991C.1.pep
RRRATMSGRGKCGKGLGKAGAKRHRKLLRDIIQRITKRAIRCLARRGDVMRISXLXIYEETRGVLKIFLEXXIRDAXTYTEH

SEQ ID NO: 272294 - protein, 55 aa, Zea mays
  Clone ID: MRT4577_179920C.1.pep
VSVLTAAQVLRGQWVIMGKGCPLHWADLHRSHNFFFLIHMNHPHLPPHIFLLVAP

SEQ ID NO: 272295 - protein, 88 aa, Zea mays
  Clone ID: MRT4577_179921C.1.pep
RAGSEIRGSPPASFENKGRVQCGAKGWPLLIKEKFVAFQPPFFEKPTGVFYATNNGGGPFLVFLGGRVQKKSFLFNVCAFPEVGKSFS

SEQ ID NO: 272296 - protein, 53 aa, Zea mays
  Clone ID: MRT4577_179922C.1.pep
ERQRSREPLLDLGLFCYCFGPKILRVCSPARDGSQLVSVDRSANVGTGEQHFR

SEQ ID NO: 272297 - protein, 183 aa, Zea mays
  unsure (1)..(183): unsure at all Xaa locations
  Clone ID: MRT4577_179923C.1.pep
LGPSRPAGAFRGRSFAQRSSVFSRFSSCSSLDVVSGIQICITGSTSAGLHQILPWLYYHNVIGVSHFFLLVEGEAAKPAVTSVLESIXSRIWNETWLAGFFYKPCNYELFVKQSLNMEMAIIMARXGAREYSLRRLLLDVPDNVDMVIFPNYESSIDCXDIKDPFTEAFIIASTATEEEMGNW

SEQ ID NO: 272298 - protein, 94 aa, Zea mays
  Clone ID: MRT4577_179924C.1.pep
DPLSPDISISDCSKRGRNFEKQTDMNAQNGGRSAGAFWHRHRRVLVGSYTSRPSSQLLSQAYTEWGRDLTCAPCTQKAGPGCSLYIKKRNNILC

SEQ ID NO: 272299 - protein, 66 aa, Zea mays
  Clone ID: MRT4577_179925C.1.pep
EFSQIPRNVVAHRFPSSFAGLLECDPFAFALIVPAFLFLLRPKQQQLALKEMPYKSAKYRKQTLMN

SEQ ID NO: 272300 - protein, 127 aa, Zea mays
  Clone ID: MRT4577_179926C.1.pep
ARSSSPLLASTLRARFDARTGTSHPDMAVQQVRAEYRKSRLGGVYSGISFRLVLVIELISVGLLHGMSQILEDHLGPPFGSCAWLFQYNRYASDRLIMWRVVMAPSGSVPERSSSQVRERQRRQQDL

SEQ ID NO: 272301 - protein, 194 aa, Zea mays
  unsure (1)..(194): unsure at all Xaa locations
  Clone ID: MRT4577_179927C.1.pep
LTCPAPALYNNIRLYTSLLPPQNQQTEQLVNAICTANPMPTVIPTPEAVSXCISEQKHNLDTQSLQXNQPMVTVIQPQLVHTQLXQQPLECRHNNPHHTQAIVQIRLLLAXPLVQNHTTILGXVQQIHVLQQQQVQQSVQEQQQIKIQPFQAPNDANMVTQLSDQMTIXLLKALQPQQPLVMKQQKMIFDLQQQ

SEQ ID NO: 272302 - protein, 104 aa, Zea mays
  unsure (1)..(104): unsure at all Xaa locations
  Clone ID: MRT4577_179928C.1.pep
MAAGGRVRFNVGGQLFETTTTTLANAGRDSMLGALLDASWNVSSSSPGGGVAEYFIDRNPACFAVLLDLXRTGSLHVPPHLPEKLLYREALYYGLLDHVRAARW

SEQ ID NO: 272303 - protein, 114 aa, Zea mays
  Clone ID: MRT4577_179929C.1.pep
SCMPVFSVPCPHARANQINGVFCSLVIITDGTFGSPRPDPGQDSVDSFLHFSRSGFSISQNNSTMQAVRCSQGSNPSMLIREDRQLQCLHSHSFGSFFSAFSILVQPVLSLRHQ

SEQ ID NO: 272304 - protein, 38 aa, Zea mays
  Clone ID: MRT4577_17992C.1.pep
FSWANRARVGRLDTLVHPCYRGWNGDCERLMRTNRFSA

SEQ ID NO: 272305 - protein, 89 aa, Zea mays
  unsure (1)..(89): unsure at all Xaa locations
  Clone ID: MRT4577_179930C.1.pep
HSSKRITTTSTXNNRALQALFNTIKRPPXTHTPTYKNFTNTNNGFHITTHSYPPSKDTPMTPNTKSPYQSKPNKYLNLQNNTFNPPHYL

SEQ ID NO: 272306 - protein, 142 aa, Zea mays
  Clone ID: MRT4577_179931C.1.pep
GGGGVFFFFFFFFFFFFFFFFFFFIPINLKPKTNKPNQSTNPQPKIQHTKTRGGGGAQNQNSQNSLNLKKKTTPKNAQFPTKQKPPQPKRGHNQNSKRASLGNKQHPRNPTKGSPLANDHPPRYGPNPKGTKSTKAQTHPGA

SEQ ID NO: 272307 - protein, 123 aa, Zea mays
  unsure (1)..(123): unsure at all Xaa locations
  Clone ID: MRT4577_179932C.1.pep
GNXGRTNASANASVKPSFYFWPEIFAKRGGLNLARGGQNPSQRHNNKETQELKARPKPVWSKKPNVKLVLNFLQAKLYFGKNAKLKASKRKFQDVAKDSYNPNNQSTFHRGGPENLPKYGTTN

SEQ ID NO: 272308 - protein, 96 aa, Zea mays
  Clone ID: MRT4577_179933C.1.pep
ARPRSDAHRRRRSEPPAGGAQWSPDVGNSVSSRRLPLPPPPRDPRSISSAKEAGAIIPIPAPPPTMRWCIPGGPAGGPTRLRKPGRNRPQRRRRSG

SEQ ID NO: 272309 - protein, 138 aa, Zea mays
  Clone ID: MRT4577_179934C.1.pep
KWYAIYAYSVLLCICRSSSAMALFLHTCVLQSCGQTVVALPARTCARGVSRPLRLGCWGHATPPGLLGPCPRRGHPRPDGAMPAAPVPSRPRPPNSGTPSVETAPGPGRGRTPVARPRARTGTPLAGQAHAGSRACAM

SEQ ID NO: 272310 - protein, 55 aa, Zea mays
  Clone ID: MRT4577_179935C.1.pep
TVGFSYAHTSDTATKFHYINLCCFAFKEIPSRGVALLYPTRNVLKSDKPTEGKAV

SEQ ID NO: 272311 - protein, 76 aa, Zea mays
  Clone ID: MRT4577_179936C.1.pep
YFIFYQGFGSFSLALVHIHYLTHQNQHHTQIQADSQIHTFQDHKQTYSIYRPQLDQPVHAHAPNSQILSHTPLDSN

SEQ ID NO: 272312 - protein, 99 aa, Zea mays
  unsure (1)..(99): unsure at all Xaa locations
  Clone ID: MRT4577_179937C.1.pep
LTRHGDHHFIYIQMADHHDVSGVSYIHNVLDINGGQTHIINRGRVMFVNERSXSGPGKGETITCXVWDRCLLCCLRFCSLRCKILGTARGLPVQEESLL

SEQ ID NO: 272313 - protein, 250 aa, Zea mays
  Clone ID: MRT4577_179938C.1.pep
MLISNAIAALSVLSLASAAVIPESHIEARAAKTVDAGFKAKGKKYWGTASDQGILGQSAINNAAKANFGQITPENSMKFDATEPSRGNFNFGGADWLVNWAQTNGKLIRGHTLVWHSQVPAWVTNINDKATLISVMQNHIKTVVGRYKGKIYAWDVTNEIFNEDGTLRQSHWMKVIGEDYVRIAFETARAADPSAKLYINDYNLDVANYGKTQGMIKYVKKWRAAGVPIDGIGSQMHLFNGNGWATATDV

SEQ ID NO: 272314 - protein, 49 aa, Zea mays
  Clone ID: MRT4577_179939C.1.pep
RVNKSGREAGVLENHEEGIGYPMHGLRSFVHDKNPEIMPVVNKFLDEPK

SEQ ID NO: 272315 - protein, 73 aa, Zea mays
  Clone ID: MRT4577_17993C.1.pep
TNIYFSNFAPYAIILYTSHITPFRLYNDNNSTKFHLLLPMNFTCRGNSKIKTIPVRCRLSDKAHDELYQGVHY

SEQ ID NO: 272316 - protein, 66 aa, Zea mays
  Clone ID: MRT4577_179940C.1.pep
NLGEITPFHYSSYKCHLNRFPHVLSHLINLSLTRITPSEIKEQELRIRGHLVALHGADYRLKIISG

SEQ ID NO: 272317 - protein, 129 aa, Zea mays
  unsure (1)..(129): unsure at all Xaa locations
  Clone ID: MRT4577_179941C.1.pep
MACVMLEYPLPSFGGPSPRATVLPISLHNAFSTRGXRVLESKXILVSWRRSRCPRTSVFVTLLHRRRRMLERHSRASNGKXXLDGRNITVNEAQSRGCRGGGGGGYGGGRGGRGYCGGGRRDGGVGYRD

SEQ ID NO: 272318 - protein, 307 aa, Zea mays
  Clone ID: MRT4577_179942C.1.pep
MRNLLTDSFELGKRGQSSGNVDIELGLQGDLTSSAQPGFEGFYEQVKEVESLLNTLTKLLKDLQNSNEESKVVTKASAMKEVKKRMEKDVNEVTKIARLAKSKVEQLNKDNAVNRGKPGFGKGSGVDRSRTTTTVALTKKLRERILEFQTLREEIQQEYRDVVERRVFTVTGERADEETIDKLIETGDGEQIFQRAIQEQGRGRVLDTLQEIQERHDTVKEIERKLLDLQQIFLDLAVLVEAQGEMLDNIETQVTGAAEHIQTGTNLLQKAKKLQKNTRKWTCIGIIILLIIILIIILSLKPWSWGK

SEQ ID NO: 272319 - protein, 39 aa, Zea mays
  Clone ID: MRT4577_179943C.1.pep
PIMDDASLTALINNPTSISYLNNCLPSQEQDRPFLKPKA

SEQ ID NO: 272320 - protein, 137 aa, Zea mays
  unsure (1)..(137): unsure at all Xaa locations
  Clone ID: MRT4577_179944C.1.pep
EEAGAEGERGXGXATDXXEGSRAAXRXAAANRXRAGDHXXRXARQGEPDXEQSEAXHRETTGXPXXPRXESXDXXXAKKXGAKPDXETXDXXNXTXTQKXXXXXXKXXXXXPXEKPXQXXQXTPXSXXXXGSRGXGK

SEQ ID NO: 272321 - protein, 49 aa, Zea mays
  Clone ID: MRT4577_179945C.1.pep
TISCISMITNYCAPSTLMAVAFERMNEISYVMLMPVALLFLKRRTGYHD

SEQ ID NO: 272322 - protein, 55 aa, Zea mays
  Clone ID: MRT4577_179946C.1.pep
PAAEGGTLAAHCACDGGALHYDRRYGCIGYIYSSSIHDDAAQAASLHGHLTDITR

SEQ ID NO: 272323 - protein, 68 aa, Zea mays
  Clone ID: MRT4577_179947C.1.pep
SGMCAAGRLSLVTAGPSQSMSWKENGQAIDSRSHYRRDNPYLVGVHPRVSYNVTGRVQIQDVWMYACT

SEQ ID NO: 272324 - protein, 66 aa, Zea mays
  Clone ID: MRT4577_179948C.1.pep
LNNTRTRAQTLQHKAPHRHPTTYLLLDAKTELLYYPQTTVPTIQSMPILRGTRNTTEGQRDETDTD

SEQ ID NO: 272325 - protein, 33 aa, Zea mays
  Clone ID: MRT4577_179949C.1.pep
HAYLKLLRLVLARKPLLLRTQEHQLCAGLPNRK

SEQ ID NO: 272326 - protein, 94 aa, Zea mays
  unsure (1)..(94): unsure at all Xaa locations
  Clone ID: MRT4577_17994C.1.pep
QPEPPNVPLENSVQPDLPNQRMGYACALKPNPSQTADMLVCCHCKPRRXREEEKRRRKEPLRPKRSTSLCPTRPAATPDVPSCRGSARLAAGQC

SEQ ID NO: 272327 - protein, 66 aa, Zea mays
  Clone ID: MRT4577_179950C.1.pep
GKGIQKNGHPFRRTTDEISLNPIEVRKKSPPGHFFSHAKVEYKRTRSFMNANGVLSRSSALARHLQ

SEQ ID NO: 272328 - protein, 194 aa, Zea mays
  unsure (1)..(194): unsure at all Xaa locations
  Clone ID: MRT4577_179951C.1.pep
SRNPSSYPRGLPSLGRRTRGSQGWRFPGPSALRSRPQNAPGTGKPPPSPADRSHPPRPPTPKPPPSSPPPPPXHPPPLSSPPPPXXVSPPIQTSLTILSPLXPVPHPPPPPPPXPPPLPPPPPPPPPPPPPPPPPPPPPPPPPPPPPPPPPPPXPPYXPFPFSPPPPPPPPPPPXPPPPPPPPPPPPPPPPPPP

SEQ ID NO: 272329 - protein, 100 aa, Zea mays
  unsure (1)..(100): unsure at all Xaa locations
  Clone ID: MRT4577_179952C.1.pep
MHCWAGFVLKLDHETMRTDASCPVCRLAECISTXKQXLDASTLTXLAIAYAGTWKRHTIILXDPCHEDQQXDMERLNHRTVHTTWTMEGTCTRKRGAGTG

SEQ ID NO: 272330 - protein, 136 aa, Zea mays
  Clone ID: MRT4577_179953C.1.pep
MAVTALLNYNIDNELDMAVSSMLNGKHPLAALNRMTNNMTSFLKHSNILDKIPEDTLKWKMKLIKRAASYANYRLQSVQADVLLLVSCADRLLPSKDEADRLQKLLPKCKIYFFEKHGHSLLLEYGVHVASIIKCT

SEQ ID NO: 272331 - protein, 120 aa, Zea mays
  Clone ID: MRT4577_179954C.1.pep
RLHTFFFQGGFKSILLPDFSICPSKHKAHQVGGPPAFPTRVTRRGLGISVGPRAEMQLDQSVFFPTPPTVRRGGFWSGSRFTERGFGRFRSGVPPQNPRGFFTIGSGPSPQGCQPLFCTP

SEQ ID NO: 272332 - protein, 42 aa, Zea mays
  Clone ID: MRT4577_179955C.1.pep
CYTFFLSKITGEIIYDRPFFSFGYYLKFFPTSKQSLAFIKVW

SEQ ID NO: 272333 - protein, 111 aa, Zea mays
  Clone ID: MRT4577_179956C.1.pep
RTWGSSRGSRRRGSASIGAETLWSPASSAPCSNKLWYRSSSRMDCFLLDSPPRRSPISSLGVCSGTLPSSTSLIGTGPEVSCGLQTSATIRVRTDNLEKKKSRCSLTTRPR

SEQ ID NO: 272334 - protein, 124 aa, Zea mays
  unsure (1)..(124): unsure at all Xaa locations
  Clone ID: MRT4577_179957C.1.pep
PPPRGPFRPPFFPVQNLLKGGPKGPPSKKRLVXAPFPLKGAFPNFNPPIEKRNFPRKKKVKKGGILSGGPPPPPQKVKGGVFFYGHPVELVFWSPPLFNQKIPVKKKDFRKFLGGFFFNPKGVF

SEQ ID NO: 272335 - protein, 107 aa, Zea mays
  Clone ID: MRT4577_179958C.1.pep
PQSPLLPLPPGLLPKPLVCQRSVVVPAGCRRLHGVPLLDDLLEEEEAVKASSRLRALLPCGCYVTALSLPSFHACTTPSFLFAVFVSSLSRIHDVCLLDLARLFARG

SEQ ID NO: 272336 - protein, 71 aa, Zea mays
  unsure (1)..(71): unsure at all Xaa locations
  Clone ID: MRT4577_179959C.1.pep
RRPPLDPQFPAPERNPAPEKFVLYRYYRYGREENVYMXKLAEQAERYEEMVEYMEKVAKTVDVEELTGEER

SEQ ID NO: 272337 - protein, 69 aa, Zea mays
  Clone ID: MRT4577_17995C.1.pep
QLRGVVTSRNQNNKAPNPAANTYYAPNNTPLTYFNQIPNFHVIKLRMKRKILLFCHPIIFNVVNLYFSF

SEQ ID NO: 272338 - protein, 93 aa, Zea mays
  Clone ID: MRT4577_179960C.1.pep
APQTESAAEQHHQARQTRKEKKKKNPPTTGPPYTPGKRPAARRPTLRDRGETGMARTETTPNAFKEEMLNAVLVGNPLPGGITKWVGRATTLG

SEQ ID NO: 272339 - protein, 64 aa, Zea mays
  Clone ID: MRT4577_179961C.1.pep
IVSMVQTSSCFQLKLRYNRPSTCHSVTSSNAQDARDLTQLSSNRSNPTNTATPIPTSQIQTSRA

SEQ ID NO: 272340 - protein, 129 aa, Zea mays
  Clone ID: MRT4577_179962C.1.pep
PPPPIAARFVGLVPKIYGRSAKKLEKDPKFFKTGFFGLVKMVPLSPRGGGPFFRVPPLGGFPARAMGQPGGVGVPKGVGKRAPPGPKVAKVFPKKKNFFCWGRGFLVGSPGEASKIWFCCPPPGGGGTK

SEQ ID NO: 272341 - protein, 200 aa, Zea mays
  unsure (1)..(200): unsure at all Xaa locations
  Clone ID: MRT4577_179963C.1.pep
FSRVPKPXNPPLSXMGRRXFGSQARRPAAXXRGTRHXLAPPXLXXSQXWXXRTXXEKXXAXXVADSKSLLRXSTGXRGGRWXSSGNQXLPXXAGXXAXXDRXXGPXXXAXXQRXLXXLQXSXTXXLXAGXPXPPXXPXPSXXRIPCXXTLFXSPXXPLPSLXXVSVTXFKFYHFRVTXXKFIHXXSYPIRXXHQXXXSXS

SEQ ID NO: 272342 - protein, 102 aa, Zea mays
  unsure (1)..(102): unsure at all Xaa locations
  Clone ID: MRT4577_179964C.1.pep
KGWKYPVANISHFFNFGLDEHKCKDYCKQLDQLLLESTMQFYIRLYESVRSXQDYDPHLPPELAAVTGHTYISADSRNKMVNVHTDFIAHRRCPANILTPVM

SEQ ID NO: 272343 - protein, 69 aa, Zea mays
  Clone ID: MRT4577_179965C.1.pep
GNDGDALELQPFVKYLREKPPTAPTKLLGTLLVSKQRTGLPILATYIPGRGGQGTGHGGQGLVNPPTGS

SEQ ID NO: 272344 - protein, 82 aa, Zea mays
  unsure (1)..(82): unsure at all Xaa locations
  Clone ID: MRT4577_179966C.1.pep
GRPRPSXXPXCRLSPACVGLVSGLSFGVWLWLPLGCAPGXLPSLPALCLXPXSGXVFLFFWPPVFVPLXXLXFXASVXXPAP

SEQ ID NO: 272345 - protein, 71 aa, Zea mays
  Clone ID: MRT4577_179967C.1.pep
DNIHHITPQHTWIEINTKGAKQRLKHFIRIDQYNTTFGEIFNWPVVSSLSFRTDRPIFGLSDEINWSSLEF

SEQ ID NO: 272346 - protein, 56 aa, Zea mays
  Clone ID: MRT4577_179968C.1.pep
FLVWTKNLRPIFIKYYRNLGVQQNWSHIFNIFLEFSMDFQKKKKKKKKVLCVVTTA

SEQ ID NO: 272347 - protein, 99 aa, Zea mays
  Clone ID: MRT4577_179969C.1.pep
VLFQCFLQDCEYISPAIMELESAALISPLFKIKASVSCPSYTSTVCLQWLVWNTVVRGGRIGRSIDDTSRAPTEKYVSSTAAAVRLRQVGTRVRTWVGS

SEQ ID NO: 272348 - protein, 59 aa, Zea mays
  Clone ID: MRT4577_17996C.1.pep
TTRNMQPYASLPRAFLNFRSCHQPRAGSGRQGLGGQGEVWGDPGHLAIWGFPARGFFFP

SEQ ID NO: 272349 - protein, 726 aa, Zea mays
  Clone ID: MRT4577_179970C.1.pep
MSAIMLCTCSGDQSKFEDLPRSPESLATRDFSANCSSSKMASRETTPDDSQVNEVESDLKETLSLNYEEARALLGRLEHQRGNFDAALQVLQGIDIRSLRPRMTTAIAESVKPRMPPRSSRRKSSQVNGMLMHMSMHSVSLLLEAILLKAKSLDTLGRAADAAEECRTIIDIIESAWPYGVPDGTSEECKLIDIFHSALEYLPKLWMRSGCFDEAIIAYRRALAKPWNLGSQRSAKLQKELAVSLLYCGVEVKFPQEFSQERNLVTPGNNLEEAILLLLMLTRKLFLREIQWDPDLVNHLVYALSLSGHYEVLASHLEMLLPGTYTRSERWYILALCYSAAGMDDSALNIIRNGFSVLERKGKPHVPSLLLGAKLCCKNPKHASEGIKFANKAMKSFRSRDLHFISTTKHFLGVCYGPFSRSSTSYLDKSRLQDNALRLLQDAATTAKYNPEIMYSLAWENAMQRKLNAAVESATECLEMVMGGSVSAWKLLILVLSAQQNLQEAEAVADFAMDEAEKNDQLDILRLKAQIQASRGQFKSAVETFRVLLAAIQVKKEVWKLTTCNEVKCLQKLEMDAWLDLASIYSKLEAWHDSNICLDKAISIDFYYPKCWHVRGLLLEAQFLHKEALMAFSFALSIDPDYVPGMVCMAGILRNIGGDSLSIARTYLRNALRLEPTNHRAWLSLGLVLKAEGSLQEAADCFQAAYELRELSPIQDFSEQLPIMLH

SEQ ID NO: 272350 - protein, 69 aa, Zea mays
  Clone ID: MRT4577_179971C.1.pep
SSLLHIVVVSNSKSMSLRYMSLVGARLVRESTGRLVKAHAHAAYMARSGGSWAPAGGVSRVLDSKRRFV

SEQ ID NO: 272351 - protein, 121 aa, Zea mays
  unsure (1)..(121): unsure at all Xaa locations
  Clone ID: MRT4577_179972C.1.pep
PPCCLAGFFLLRPLLSGPPFVPWLWFLASGVPPHCLVSXFVPFLSPKSLTGSPAPFLFLFLPPPPLFVVAPCARPLSVVSPGSSXVLSXLLGLVPRSCSCLPPPPFLPXLXPQILGAGGGG

SEQ ID NO: 272352 - protein, 55 aa, Zea mays
  unsure (1)..(55): unsure at all Xaa locations
  Clone ID: MRT4577_179973C.1.pep
QRQQLLNALAGGKPWSSACLQXQQQLLPYNQFSLVNPALVSEEPIVGGAIPQIAY

SEQ ID NO: 272353 - protein, 55 aa, Zea mays
  Clone ID: MRT4577_179974C.1.pep
SNTLGHRDLRLIVPVTTSVQRMSALICSRDGLLGVDGYLLFISCVICVDGYLLMH

SEQ ID NO: 272354 - protein, 59 aa, Zea mays
  Clone ID: MRT4577_179975C.1.pep
MAGGLLSMEYSWSSVFGIIGNIISFLVFLAPLPTLLRVYPKKSTEGFSSVSDAVALDSC

SEQ ID NO: 272355 - protein, 50 aa, Zea mays
  Clone ID: MRT4577_179976C.1.pep
QWLEMLKILVSFGFHDESVQSNKWFHLLLYYCARVLQSPLLSGTRVRLGV

SEQ ID NO: 272356 - protein, 85 aa, Zea mays
  Clone ID: MRT4577_179977C.1.pep
YKQMIFPFLQLISSLTLSVSKGCVTFSMMLSSMNMMSSIQTSTFSWFLLSRMRIKNRQRLHYRSTEIHDVRQDQHCVIPTGSIVL

SEQ ID NO: 272357 - protein, 62 aa, Zea mays
  Clone ID: MRT4577_179978C.1.pep
QKGKLKPPPLLPGAHHTRLVINKTLPHGGTNPPIDRAGGDHPHNIFTTPTLLELATPTATTG

SEQ ID NO: 272358 - protein, 103 aa, Zea mays
  Clone ID: MRT4577_179979C.1.pep
PPPVETPKGFFRAQGPGSTLTPGFFTFFGPPFSRNPLVLCNFLGGPPTPLFFFFAPPFQPKGFSEPLFFDLGPPPPIRDPPLLIKRLAQKCFQVPLYQSFNHY

SEQ ID NO: 272359 - protein, 198 aa, Zea mays
  unsure (1)..(198): unsure at all Xaa locations
  Clone ID: MRT4577_17997C.1.pep
MRRFFQPLSRGSGTSANNNVNNTPTVGGTFNPDDIVADPALRRQIYEYDKDVQNQVRRAYVLNGPCQPKGLDFPHRQYEQSLRPFKEEWYDKYDWLEYIESKDAVYCFYCFLFKQAVKGDKYEAFTKVGYNNWKDAVERLNHMVGWCXSIHNNARVHFDDFNNQRQSISTIMSSASREAEDFYKIRXTSSLACSRFLL

SEQ ID NO: 272360 - protein, 194 aa, Zea mays
  Clone ID: MRT4577_179980C.1.pep
MLTLSNPINLYKAGAPEGGAAGGGLATGGVLRRVQEQRVVQVVLVVVVLHVLHGPRGSGRRGRVVEDGGLGHVRVGGHHLVLLLPRHGGSGRAVGLQLSGAARRPAGAVDVRRAGRRAWVGPHTEPGGFDLLPRIMYDSGVYGRRNERAVLHAPGRALRRGVDRWGFRADAGDEGRRTDTERGRVKGCRRPIAR

SEQ ID NO: 272361 - protein, 138 aa, Zea mays
  unsure (1)..(138): unsure at all Xaa locations
  Clone ID: MRT4577_179981C.1.pep
ERNVCSCVKTTVAGAENKATKRISKAGLHSPVATIARFXLKARKYPDCVGAGYPVYLAPAMXEYLTVEELXELAANATRNNNKTRIVPRHIQFSRAHXEKLTXVLGAATIXSTTIMTNIHRNLLPKKTVIVQRLSQRS

SEQ ID NO: 272362 - protein, 87 aa, Zea mays
  Clone ID: MRT4577_179982C.1.pep
ARQRELSHTVESEGDSKMKRQVSSTKSKELSGHDIFADHEDPKPNRSRRSDYGSSAAQSPVKNARPCPRRIQRLQRNSLRTVRGRKE

SEQ ID NO: 272363 - protein, 73 aa, Zea mays
  unsure (1)..(73): unsure at all Xaa locations
  Clone ID: MRT4577_179983C.1.pep
SDRLLPDRALFCMAQLFMRCYWHLLIHTCHXRRGIHAMGGMAAQIPYKDDVVSNEVVLELVRKDKLKEVRAVH

SEQ ID NO: 272364 - protein, 277 aa, Zea mays
  Clone ID: MRT4577_179984C.1.pep
MERAAPVRSSHTSTAGLLAWPHPDGAGSLPARRPNQPTEEFRNVVFGGQLTEGADGLNKTKRKTGSSPKGKETTGTGISKAESAAAAVATASRDRQASQITFSQDGTVPTRKATSVAGVARQRELSHTVESEGDSKMKRQVSSTKSKELSGHDIFADHEDPKPNRSRRSDYGSSAAQSPVKNANVSSFSFGEADIDSTVKTAKKKGSSNLSTDLNGKTMPKKDSASAEKQPPNRARPKGMSGSSNFADGKASTSTTGDHEGRRTRQPPGGDSSILLG

SEQ ID NO: 272365 - protein, 65 aa, Zea mays
  unsure (1)..(65): unsure at all Xaa locations
  Clone ID: MRT4577_179985C.1.pep
LFLFRCWLCFALDLGVYSSVFVVVSIVLSWLLACPXILFGFVRCIHYYFAPCPVFXXLVIFLYLF

SEQ ID NO: 272366 - protein, 211 aa, Zea mays
  unsure (1)..(211): unsure at all Xaa locations
  Clone ID: MRT4577_179986C.1.pep
TPAGSGPEFPGRPTRPVAGNMLLRAAWRRASLAATSLALGRSSVPTRGLRLRVVDHGPHSPVHSEAEAVLRPLYMDVQATTPLDPRVLDAMLPYLVNYYGNPHSRTHAYGWESEAAMERARQQVASLIGADPREIIFTSAATESNNIXIKGAARFYSSRKKRLVTTQTEHRCVLDSCRSLEAEDFRVTDXPVQTSGIIDLPPLEAAVQPDT

SEQ ID NO: 272367 - protein, 51 aa, Zea mays
  Clone ID: MRT4577_179987C.1.pep
LTYPIYFCQIESELPLENTIEYLPSLLIISSYLLILTYLNIFYSFISYLFK

SEQ ID NO: 272368 - protein, 31 aa, Zea mays
  Clone ID: MRT4577_179988C.1.pep
RGHRCMAYLTMSRCPQQLCDIARYVRVDVRV

SEQ ID NO: 272369 - protein, 271 aa, Zea mays
  Clone ID: MRT4577_179989C.1.pep
MLLPSSSSSSASASKGNSFGKTVNDHLRSTLSFDNKQPPFASQNFDYGQTIACISYPYNRSGSGDVWAAYESRTSTATVFRSQIAGGGSSTRIPLPLELAENEPIYVNPKQYHGILRRRQLRAKLEAQNKLVRARKPYLHESRHLHAMKRARGSGGRFLNTKQLQQSHTALTRSTTTSGTSSSGSTHLRLGGGAAAAGDRSVLAPKTMASQDSSKKAVSSALAFTATPMLRRDDGFLQHPSHLFSFSGHFGQASAQAGVHNGSQHRVPVMR

SEQ ID NO: 272370 - protein, 173 aa, Zea mays
  unsure (1)..(173): unsure at all Xaa locations
  Clone ID: MRT4577_17998C.1.pep
NGVVAKEGKTSYHREANLAGEWFDGGTRCVEAARDGWGHELLRRRRRRQRHAQRGGVCCARWAFVAPRASDCGGICGGYDFRREVAARFAAGERTGGGRRQACIAAGVREKRRQASRICSVRCGGQRSGGCYEQGGGSLQSSLNSCSRPPSRYPLEXGEKKXXXGEKRRRKKR

SEQ ID NO: 272371 - protein, 60 aa, Zea mays
  unsure (1)..(60): unsure at all Xaa locations
  Clone ID: MRT4577_179990C.1.pep
TPPPPSXAHVLSFASWWGAALWASFIGGIIMFKNLPRHMFGNLQSKXVPAYFTLIYPCPS

SEQ ID NO: 272372 - protein, 67 aa, Zea mays
  Clone ID: MRT4577_179991C.1.pep
NKSFAHKLGNKALQLGNKKLLGRGGPLIIKWAPLFSPLGTLPPSNFQILNKDYPFFTVELLLKFIGP

SEQ ID NO: 272373 - protein, 53 aa, Zea mays
  Clone ID: MRT4577_179992C.1.pep
ILSNRPRRYLIALPGRYLITVDWLKHRHHGHGNFICEQSTSTSKICQKGYTTG

SEQ ID NO: 272374 - protein, 53 aa, Zea mays
  Clone ID: MRT4577_179993C.1.pep
NKSSARIYKFGVKGLPVTLLRGNDLYYNTRERVGMTSKWRRKMNNLVEDLIMH

SEQ ID NO: 272375 - protein, 72 aa, Zea mays
  unsure (1)..(72): unsure at all Xaa locations
  Clone ID: MRT4577_179994C.1.pep
MLSQYKLRHRAMLVSAYKQHVPNSMNASEFAHNFGSHSVPHGHWYMHSICPTTXEGLYEGVVWLSTTIASKA

SEQ ID NO: 272376 - protein, 76 aa, Zea mays
  Clone ID: MRT4577_179995C.1.pep
SWGSAPEPAPPCCCQLRPIFMARGQLASPPAISLISLRTFCSLVISHLDCSLASLISSRCTMLAEWAAGTSGQGSA

SEQ ID NO: 272377 - protein, 221 aa, Zea mays
  unsure (1)..(221): unsure at all Xaa locations
  Clone ID: MRT4577_179996C.1.pep
MAAPLGFFCMLLLLLLQLGHSSCNNVYIVYMGARNPELHPALVRDAHHGMLAGLLGSEQAAKDAILYSYRHGFSGFAAVLTDSQAARLAGSPGVVRVVRNRVLDLHTTRSWDFMRVDPSHSAGILPESRFGEDSIIGVLDTGIWPESASFRDDGMSEAPXRWKGQCVAGDRFNVSNCNRKIIGXAKWYIXGYEXEXNGKMNTTDIYEFMSXXTPVGHGTHT

SEQ ID NO: 272378 - protein, 38 aa, Zea mays
  Clone ID: MRT4577_179997C.1.pep
TGFIQNRDITYLAIYIWTAGYKYSRTFRALAGYATICT

SEQ ID NO: 272379 - protein, 81 aa, Zea mays
  Clone ID: MRT4577_179998C.1.pep
AALFNPSAEQITTPYTPPRDATLSPMLVTRTSLRVPTPRSSVCGCADPPSPLSHPCHATPRIGYPTELPGEPAAAPVPPFT

SEQ ID NO: 272380 - protein, 105 aa, Zea mays
  Clone ID: MRT4577_179999C.1.pep
KCSEVSMRSAKCTSLMKHLWWGFLSVFRSECSGTTFIGIFGEHHVETVPLGAIADALLDILHDARLSCAAIRLWRRISTFTVSRIFAIVCAVLAIMPLRSAVECG

SEQ ID NO: 272381 - protein, 59 aa, Zea mays
  Clone ID: MRT4577_17999C.1.pep
NPLLLFLGGKPGFPIPGGPFLLRNYFFFPGPGLAQQHYAGTHFNSAGFQKTWGPQFQGL

SEQ ID NO: 272382 - protein, 72 aa, Zea mays
  Clone ID: MRT4577_1799C.1.pep
TRRNGPGPATWRGRPGLFLLTRADKKGTLGPRLANLTPASNWSSGDSQVHPRERGGSVEREPQSHQLVVGPI

SEQ ID NO: 272383 - protein, 202 aa, Zea mays
  unsure (1)..(202): unsure at all Xaa locations
  Clone ID: MRT4577_179C.1.pep
SPGPHRCRDRRLRTRLSPRLKASSISYRRRCSSTPFSSTPCRECIXSIHIGQAGIQXGNACWELYCLEHGIHADGQMPGDKTIGGGDDAFNTFFSETGAGKHVPRAVFDDLEPTVIDEETTGTYRQLFHPEHVIRGKEDADNNFARDHYTIGKEIVDLSLDRITTIADNCTGLQXGFLLFNAVWQXTGSGLGSLLLQRLADD

SEQ ID NO: 272384 - protein, 85 aa, Zea mays
  Clone ID: MRT4577_17C.1.pep
DTDILRESTNENISIAKAIAIDMDINPQLKQERIAYETLQYDSCRMEGWFATDAHSISLQGWDQEVLLSYGHGLMVRGYRAVINT

SEQ ID NO: 272385 - protein, 303 aa, Zea mays
  Clone ID: MRT4577_180000C.1.pep
KFTFLDNPKDLGQCSNLKFLNLSSNRLSGLLDKDLCPHCMTVFDVSGNEISGSIPACVNKVCTSHLVLDKMSSSYSSFLMSKTLQELPSVFCNSGECSVVYHNFAKNNLEGHLTSLPFSADRFGNKTSYVFVVDHNNFSGSLDSILLEQCSNLKGLVVSFRDNKISGQITAEFSRKCSAIRALDLAGNQISGMMPDNVGLLGALVKMDMSRNFLEGQIPASFKDFKSLKFLSLAGNNISGRIPSCLGQLRSLRVLDLSSNSLAGEIPNNLVTLGDITVLLLNNNRLSGNIPNFASSPSLSIFN

SEQ ID NO: 272386 - protein, 42 aa, Zea mays
  Clone ID: MRT4577_180001C.1.pep
PIGNILSCIDGVGRLGPVKRPAIYFVVYYFCRRSSLFMLLVF

SEQ ID NO: 272387 - protein, 31 aa, Zea mays
  Clone ID: MRT4577_180002C.1.pep
YSRLTSNFYHIIYLHIYVEFDVNLLYQLCRK

SEQ ID NO: 272388 - protein, 68 aa, Zea mays
  Clone ID: MRT4577_180003C.1.pep
SPCGEADRIKTNRGQRARAVTVGDGQPHPDTGALLSTLGRHQTSKMSSKGSGVTVHQRETYLLILIRC

SEQ ID NO: 272389 - protein, 63 aa, Zea mays
  Clone ID: MRT4577_180004C.1.pep
GWGGPPLGFVSERISPGGPGLSLGLSNNLLGGILLGVLGLFWSLSPFYPFALDKDEESGGLSL

SEQ ID NO: 272390 - protein, 98 aa, Zea mays
  Clone ID: MRT4577_180005C.1.pep
EAGARPVVCMFRWSPADEDDARGRPSCAADERAGGLDSGVRWRRLVTGNLGLPRRPTGTDAESAEPPSPAKAPPTSHSPLGEGPCAGTHKSGGPTDNG

SEQ ID NO: 272391 - protein, 103 aa, Zea mays
  unsure (1)..(103): unsure at all Xaa locations
  Clone ID: MRT4577_180006C.1.pep
PSLSGPGGVFRPPCFPRQVAIGPGGAPCEFGPPSMAVSNRRPRSAAFRSRAWAEGKSPVAGRTXSGVESKGEIASGXARGEREGGKGKGRRRALQEGRAGAGD

SEQ ID NO: 272392 - protein, 92 aa, Zea mays
  unsure (1)..(92): unsure at all Xaa locations
  Clone ID: MRT4577_180007C.1.pep
RGVPQIEVTFDIDANGXLSVTATDRSTGKANKITITNDKGRLSKEEVERXVHEAEQYKAEDEAQRDRVAAKNSLEAHVFHVKGSLQEESLRD

SEQ ID NO: 272393 - protein, 49 aa, Zea mays
  Clone ID: MRT4577_180008C.1.pep
RRRKVISRPFEHPKGPSSSVASNTPFPSSHTCVGAQKIDFRFRSKFWLC

SEQ ID NO: 272394 - protein, 219 aa, Zea mays
  unsure (1)..(219): unsure at all Xaa locations
  Clone ID: MRT4577_180009C.1.pep
MGGSHSREDLDLSDSDSEDAESPRASDNSSDYGTPPPASVSSKLASGAGAATPASIDAIDRHLRQLHLKYNEPISPNPSSGPTPSANPAALNAVKLYLHIGGSSPSAKWIVSDRLAAASFVRAGAGAGDGDDEDDDAPAAGGPWCLVVGSKIRARVGPELQLKAFPAQRRXVDFVADGVWALKFLHSDGFGDFCAKHHSCMFETSYGVAAXDEGRAKYS

SEQ ID NO: 272395 - protein, 65 aa, Zea mays
  unsure (1)..(65): unsure at all Xaa locations
  Clone ID: MRT4577_18000C.1.pep
VNLVRLRSTRSTYNTTKKMKAXSKRASCHKGAQKECHPEEKKADISQLGGSRDSLSPKVRVYIHR

SEQ ID NO: 272396 - protein, 90 aa, Zea mays
  unsure (1)..(90): unsure at all Xaa locations
  Clone ID: MRT4577_180010C.1.pep
PEGEHPGGGGPKQKNTQKGRPREPENRQRADRTRKGPRRASAKLGSFICMTXTGMHRSLGGHISKERPATLDTRQPEQGAIMQTMGNEKA

SEQ ID NO: 272397 - protein, 58 aa, Zea mays
  Clone ID: MRT4577_180011C.1.pep
LVLNNMNTIFAFAVFHFSSDLQFKSELSEEIQLNELNLIVKANTLINVPKLNMYVYIL

SEQ ID NO: 272398 - protein, 104 aa, Zea mays
  unsure (1)..(104): unsure at all Xaa locations
  Clone ID: MRT4577_180012C.1.pep
AQVLLISVTKYLAVQETKPTMYLPHNEVRYSNKGLRNGQSTIKKRHINSVIKPGRCNDHEFRAARILKLFMVXSHLMRSXSTKVQVFFNPIIGSGPRGPINSIG

SEQ ID NO: 272399 - protein, 122 aa, Zea mays
  Clone ID: MRT4577_180013C.1.pep
AVVTTQSTFFFFFFFFFSKGYCLLGIVFFKKGRNRGFRARLFGSMFRKGMPSGKKEESSIAEKRISVLSLSKPVLAIVAEAGLDLELKLMPSCLHLRFLLLPACAHPLLVLSGLSMMKYLEI

SEQ ID NO: 272400 - protein, 119 aa, Zea mays
  unsure (1)..(119): unsure at all Xaa locations
  Clone ID: MRT4577_180014C.1.pep
MGYILPIFFPKKKGRGFFFSQKKKKKNKIKKKKKKKKKKKKKKRKKKKRXSFNPKLPPLGIFWGRCPKKKKKKKKKKKKKKKKNFSLKQKLLPCGICWGRWSKKKKKKKKKKKKKKNFP

SEQ ID NO: 272401 - protein, 45 aa, Zea mays
  Clone ID: MRT4577_180015C.1.pep
TEKHWHQRQEYIAHDTSGKVPFWMSVAFLIMERTRGISLLVSQRM

SEQ ID NO: 272402 - protein, 101 aa, Zea mays
  Clone ID: MRT4577_180016C.1.pep
RSPHRTSRGEERRWEGSTRWEQTGRLGAPSSYKPTAPALEAPIFSAGSRNSILLLGDECGCVGHGADPQGIFCDGPIAGYPHDICGGSINSVICADISVGI

SEQ ID NO: 272403 - protein, 271 aa, Zea mays
  unsure (1)..(271): unsure at all Xaa locations
  Clone ID: MRT4577_180017C.1.pep
LDLEGNLLGGWIAHSSPILSMAVGGSYIFTLAGHGGIRGWNLASPGPLDNILRSELMEKDSSYKSFEYMKVLVGSWNVGQEKASYESLRAWLKLPSPEVGLVVLGLQEVDMGAGFLAMSAAKETXVRINLKQFIGDIENAAVPCGLGRAIGNKGAVGLRMRIHGRNICFVNCHFSAHMEAVSRRNEDFDHVFRSMTFSSPSNGLLTTSVSGSAAQLLRGTNGSRLPELSDTDLIVFLGDFNYRLYNISFDEAMGLVSPRCFDWLRENDQLR

SEQ ID NO: 272404 - protein, 214 aa, Zea mays
  unsure (1)..(214): unsure at all Xaa locations
  Clone ID: MRT4577_180018C.1.pep
YPRVRPVASPGPLDNILRSELXGERFIYKSFEYMKXLVGSWNVGQEKASYESLRAWLNXPSPEVGLVVLGLQEVDMGAGFLAMSAAKETVGLEGSTNGEWWLDVIGQILKVHSFVRVGSRQMAGLLIAVWVRINLKQFIGDIENAAVPCGLGRAIGNKGAVGLRMRIHGRNICFVNCHFSAHMEAVSRRNEDFDHVFRSMTFSSPSNGLLTTSV

SEQ ID NO: 272405 - protein, 445 aa, Zea mays
  unsure (1)..(445): unsure at all Xaa locations
  Clone ID: MRT4577_180019C.1.pep
MIHSDASPAAAATGRRSLSRATTSLHDGDTLLIHSAPPAAWRVCSRPIPPRPAAMGQDLVEIHPSELQFTFEVKKQSSCVVHLINKSNDYVAFKVKTTSPKRYCVRPNTGVILPRKTCEFTVTMQALRTAPPDMQLKDKFLVQTTIVPYGTSDEELVPAFFSKETGRYIEESKLRVVLVSAYQSLEEQPTNKIHDTEPVVEVPVLKEVPNIENEVPDAAKEVSAPLVQAPAIVTGIPSPVEETPGLREFRVXRMKHQLYWKNLLPLKKTLLLLQLNMPLXTIEHSPTISIESSPPLKQSVTVFKESPPSKQSIAAFKEYPPPSKQSIAVFKESPPLEETSPKEAVVLSDRGLFSVQNHQLSHVTEDVQNLKSKLNNLESKLEEAGKMIIRLKEESRSTTQERDKLQQEMVFLRKKGTPRSQVGFPLLFVVYVALLGTLLGYLLRL

SEQ ID NO: 272406 - protein, 67 aa, Zea mays
  unsure (1)..(67): unsure at all Xaa locations
  Clone ID: MRT4577_18001C.1.pep
SLARQMRPVSRVLAPHLNRAYAKDVKFGADARALMLQGVDXLADAVAVTMGPKGRTVIIEQSWGSPN

SEQ ID NO: 272407 - protein, 181 aa, Zea mays
  unsure (1)..(181): unsure at all Xaa locations
  Clone ID: MRT4577_180020C.1.pep
MGQDLVEIHPSELQFTFEVKKQSSCVVHLINKSNDYVAFKVKTTSPKRYCVRPNTGVILPRKTCEFTVTMQALRTAPPDMQLKDKFLVQTTIVPYGTSDEELVPAFFSKETGRYIEESKLRVVLVSAYQSLEEQPTNKIHDTEPVVXEXPVLKEVPNIEDEVPDAGKEVLPLWYKLQRLGL

SEQ ID NO: 272408 - protein, 96 aa, Zea mays
  Clone ID: MRT4577_180021C.1.pep
PCPGPAAGSVRPGCTITPWRLFRSVSQRIQHREETHPSPGDRDFRSRTHEDCCFPPGRMKSRMVAQPGWGILHGCRRNRSRSIQRERPAADFRKRA

SEQ ID NO: 272409 - protein, 79 aa, Zea mays
  Clone ID: MRT4577_180022C.1.pep
LVYKTAGIFWVGSILYNAKKKKKLFYICTQLLVVWYCCYGQKTIRSPELIMQINSPLQHFRGQLPFNSVLLPHMRHPSC

SEQ ID NO: 272410 - protein, 60 aa, Zea mays
  Clone ID: MRT4577_180023C.1.pep
DPGSASARRHRLIFDFTIFRSVRIPDSDAHGGCSSPATGPKKTCAPGVRWLRSPGRGRER

SEQ ID NO: 272411 - protein, 52 aa, Zea mays
  Clone ID: MRT4577_180024C.1.pep
TRTMGAHAVAALLLQLSRGSLGLEVLVFRVDQRKRHHTSVRPNYVTMVMLPS

SEQ ID NO: 272412 - protein, 48 aa, Zea mays
  Clone ID: MRT4577_180025C.1.pep
HFEFSFFMLDRCAQFYPRKKDLAWTTDTIFFFYIGPVGKMADTFFSKP

SEQ ID NO: 272413 - protein, 100 aa, Zea mays
  Clone ID: MRT4577_180026C.1.pep
YPGRRALIFRRAPYSPLFLHCQIHSSASETKNVPGTQTNLVADWLCALPKGDYRYTGVRVRMKMHAHFRTKGTGGYLVVCESMTTHGQSLSCPHAHTHVH

SEQ ID NO: 272414 - protein, 75 aa, Zea mays
  Clone ID: MRT4577_180027C.1.pep
MKLAVTLTLVTLALCCSSASAEICPSFQRVIETLLMDTPSSYEAAMELFSPDQDMREARAQLKKLVATSPKDQRK

SEQ ID NO: 272415 - protein, 64 aa, Zea mays
  Clone ID: MRT4577_180028C.1.pep
FLFYRVGFPINISGNQNQFFPTQHESGRQNQIFTFILPRKKNGKLMGQGNGPSYWHIHAYPSFN

SEQ ID NO: 272416 - protein, 160 aa, Zea mays
  Clone ID: MRT4577_180029C.1.pep
RPAPRLGSIDGRYALVERSTPAVVVCLSASRALSRSSCCSCPGQQPRRSLLFLMFKPPNASALSVSRPYAANSLPRRAPCPLIGPCQVMALALVPCLRSLLVARPLAIGLTFMTQRHRLPCPTRRQPAVRASSTSPARVSLRRAWQQVLHVEAIATIDST

SEQ ID NO: 272417 - protein, 127 aa, Zea mays
  Clone ID: MRT4577_18002C.1.pep
YLFLVRIQNFHPWQGRQGWSSTAARRFLTRPALTLAKIGRAPISTAQSDNLIYWGTNLDSDTCPTLLEAIDQITQPKRPLDKPLRLPLEDVYKIGGIGTAPVGRVETWGINPGMGVTFGPTGLTTEV

SEQ ID NO: 272418 - protein, 100 aa, Zea mays
  unsure (1)..(100): unsure at all Xaa locations
  Clone ID: MRT4577_180030C.1.pep
GSRRRTEVREGAGERVLIRLHTERERIDHLLSAHTNELVDMITKMKNLVKGLXEPHHIIAEYNNANPEAERHTLKDGALEDVLRAPQEAIDIPPWVALAI

SEQ ID NO: 272419 - protein, 96 aa, Zea mays
  unsure (1)..(96): unsure at all Xaa locations
  Clone ID: MRT4577_180031C.1.pep
TVVFYQHFLHGLAIPTIAFLRELLEYYKIELIHLSPSSILHIAILAFLGTPSVVSLVPIFVFIYPHPNKKKQXVVGGVGVQLRGNQVYLYCPSKNS

SEQ ID NO: 272420 - protein, 85 aa, Zea mays
  Clone ID: MRT4577_180032C.1.pep
KGASFGDIKKAFKAASGGPLKGIMGYVGEDLVFPDFLGESRWSIFDAKAGIVLNAPFVKLVSGDDNEGGYSNRGGALTPPMFKTQ

SEQ ID NO: 272421 - protein, 318 aa, Zea mays
  Clone ID: MRT4577_180033C.1.pep
VALGAARGLEYLHEAAAPRILHRDIKSTNILLDDKFRAQITDLGMAKCLMNDGVTSCSSSPARMLGTFGYFAPEYAIVGKASLKSDVFSFGVVVLELITGRQPIHKSSSTRADESLVLWATSRLRDSGLVVTELPDPTLQGKFPAEEMQIMAHLARECLQWDPEARPTMTEVVHILATIAPLQHGAKRRNLPIATAFNLTPSPHVGRCDPEPKDDDIERQMQQQECSPTTAVQWQQQQARCTHAPTGRASWPGDRGNVVSRGAAVSGELVNGTVLMNPHGRGSWRRPPPLGDEEAVDVDLTEPRMEAFTQPAAFQPFR

SEQ ID NO: 272422 - protein, 223 aa, Zea mays
  Clone ID: MRT4577_180034C.1.pep
MASRFVDLAVKHMNGRNIPFSIHRINPADFFYPTGSPVPKQGSAFVPPDEIQLPPATIAFDWPSRQGQPCSMDFMAFGANRDKIVAVDSIGCSYLYDAPVRSISTNMPMMPTCMLQPMSIAVGDNGLLVMSKADHQFVALNDGCDPNSRYLLPMSGWYWQSLKPPPFPSRSYHQNEKGSHHPFEVSSYTVVGNSQFWVSTVGAGTFSFDMNSGAWMKAGNWEL

SEQ ID NO: 272423 - protein, 58 aa, Zea mays
  Clone ID: MRT4577_180035C.1.pep
SSNLAVGSEIPWSMSRECFMSKADFWGQLAYRLYILHGPKFVAVGWNFFKAPKPSYFY

SEQ ID NO: 272424 - protein, 70 aa, Zea mays
  unsure (1)..(70): unsure at all Xaa locations
  Clone ID: MRT4577_180036C.1.pep
RCHAASSAGVHPDGRARHVLGHSRSSQKRAPARSDRXHMHALSFLASHRGEWQQEQEKLNEEKNIVIQEG

SEQ ID NO: 272425 - protein, 107 aa, Zea mays
  Clone ID: MRT4577_180037C.1.pep
RAKGSPEAAKFCTTAAYSLDFRLQRTNAGEGKSSAVTQSWMLGAVWGGGVWPQCHLLTCSSSIIPLHSLLLSRGRQQRREGSPGEPLATVVFQNWHASLGKSLFPIL

SEQ ID NO: 272426 - protein, 91 aa, Zea mays
  Clone ID: MRT4577_180038C.1.pep
VNHCRAIVDAGGARHLVQLVYLGDQLQIEALILLCYIALHVPENEELAQAGVLAVLLWASKQAHMVQDLRVEALLPEAKARLDLFQSRASR

SEQ ID NO: 272427 - protein, 79 aa, Zea mays
  Clone ID: MRT4577_180039C.1.pep
FPWQPRPFFNICPKRGAREIPICCIKLVCAGHFVNLFIALGFFCLFLDFINDISLLLLFHLCIFFFFSFKSSLSKKYQS

SEQ ID NO: 272428 - protein, 153 aa, Zea mays
  Clone ID: MRT4577_18003C.1.pep
NSPDCPVCTGLSDEPTVGPSQRSARANGRPEPTVGRGICARHVVWPTVGKWHRTVRCAPDCPVRQICNGRQRSAALFKEINRAPDSVRCAPDCPVHPTTEGKDGLPDLFSTAPSCLGAIKGTPRRMEENTKHSYNISKHQDIDFAHSFHCDSI

SEQ ID NO: 272429 - protein, 152 aa, Zea mays
  Clone ID: MRT4577_180040C.1.pep
PGNAPQRGRGCCSLEAQKGQRIRPWEKNGGGKGPWNRRARVPGYYFGGVHCSITRDFFVQYLPVITGVPLGGGGCLGGTPVRSYQFLLGGRVRFGLRITWAKKNVGRGEMVVGPGVMGRVPHASPCCTLLCSWVGWVLLLSGELFSGRAFWV

SEQ ID NO: 272430 - protein, 150 aa, Zea mays
  Clone ID: MRT4577_180041C.1.pep
LDYLRNPSLMHAQSILAIWACQVELMGAVEGYQIASGPLGEVTVLLYRGGRLDPLGLDDDPEAFGELKVKELKNGRLAMFFMFGFLDQAIGNRKGPLMNLLDHIGDPGNNNAWAYATIFDPRYGGRRPPAPLRVRMHVSAPWVPACTMME

SEQ ID NO: 272431 - protein, 39 aa, Zea mays
  Clone ID: MRT4577_180042C.1.pep
SCIVICAVSTFSICRFNGNKPSVHKFRNVKTIVNEFGST

SEQ ID NO: 272432 - protein, 45 aa, Zea mays
  Clone ID: MRT4577_180043C.1.pep
VYPNASHLNADANLQNNILGVQYAVPVYAPYLQNAKVFFCPTQQM

SEQ ID NO: 272433 - protein, 45 aa, Zea mays
  Clone ID: MRT4577_180044C.1.pep
IPTHAYAHASCTRVSKLVSTGSVIHQRIGQYNPEPCVHTFDQQPS

SEQ ID NO: 272434 - protein, 102 aa, Zea mays
  Clone ID: MRT4577_180045C.1.pep
GSWMQTRAPDNSSGSGRQLFEYYAAATQHCPIEEEAQDQSFEVALDLHNLEIDNNDAICVFEKVARNFEADIRRTKEKIHRYPECIRDLGDYYTVPRIVAIG

SEQ ID NO: 272435 - protein, 265 aa, Zea mays
  Clone ID: MRT4577_180046C.1.pep
ATLAVVVFLVGVHLALLGIGLLETIWMKALENCSSPPLQNLLLKYCLCQSGLHAFGVAVAELQFCHPEVVPTSKNFWKPLCASLQNLLRCSVDIRINLSPISGNGAGSKDSSVSLVMESREEDREAQDPATSNCRTVVSSGRDCPSPPLGQAKERSSHILGCLHGGAGGDAVDTEPRILSYQKISVVPAASTPGNTPLKAAAAAAGDESKVDDGGVRPGCCSHILPCGACAPRQKPRTREKRRAKLFSCCFCKIGPDCKAKGEAG

SEQ ID NO: 272436 - protein, 69 aa, Zea mays
  Clone ID: MRT4577_180047C.1.pep
PPPKLPPPPYGVLCVNRDHPFSFYVWPPSNPLGEGFIFLGQTSRPEWGCNLSLNFTANGWAWPFRKETQ

SEQ ID NO: 272437 - protein, 87 aa, Zea mays
  Clone ID: MRT4577_180048C.1.pep
RRCYIHIYYASSSSSSRAPPLGRLSCSCSCSWCRRTCNCPPDCGCPCDCCNLYPEVETAAASGILVRRPPRPAPAAATPAGAAGLAG

SEQ ID NO: 272438 - protein, 48 aa, Zea mays
  Clone ID: MRT4577_180049C.1.pep
PIGSKLHKTKFGVQTTHTFRTEHQYYFTALGSNLSRNNTKQIEVQYYS

SEQ ID NO: 272439 - protein, 70 aa, Zea mays
  unsure (1)..(70): unsure at all Xaa locations
  Clone ID: MRT4577_18004C.1.pep
GFLVRLGPSFVVPCLWAGTPGSFLPAPRAAGSRFGGSPSWFPGPFLFFLVFFGARWGXSLKPLPGPGFLG

SEQ ID NO: 272440 - protein, 104 aa, Zea mays
  Clone ID: MRT4577_180050C.1.pep
PPQPSRGGDVCLHTPRPRHHLPSRRPQRSNRGAGASYPIGTNSASACRRLLCVFGEKCLIQEDLQMLHEDSTMQQGPQCLTFFCSFPCTSGREFIEEALIQHYE

SEQ ID NO: 272441 - protein, 71 aa, Zea mays
  Clone ID: MRT4577_180051C.1.pep
SRPAGVDFHVKLTTLDVHTTQAPHMASSIICFYHAPPDLFCCRRSRQLLPLMDSSSLLALCCTTKIENTTL

SEQ ID NO: 272442 - protein, 62 aa, Zea mays
  Clone ID: MRT4577_180052C.1.pep
SLPPCTAGTASAHRPRTSYSSMRCIFALRRRCVLLLILILIILFSSDSPVVPLYDVSVAAVA

SEQ ID NO: 272443 - protein, 74 aa, Zea mays
  Clone ID: MRT4577_180053C.1.pep
GNRAYDPGGSLVIKVRLQLRLPVGSLRVAEWSFLNGEDSDGERYEMRMEAIAAYDHGGDTGLVRIAVPIRPMEA

SEQ ID NO: 272444 - protein, 103 aa, Zea mays
  Clone ID: MRT4577_180054C.1.pep
LGGGGCFSFPWGGARFGFGVVAVGTKRTKQPYATYWKGGKVVLTPRRGAPFGRNWNRFWLHSLVTGTWDHLDLGVLGFRRTPGYFGKNLLIEKGILFFNFSPP

SEQ ID NO: 272445 - protein, 47 aa, Zea mays
  Clone ID: MRT4577_180055C.1.pep
LVMGGGFNFWPLLSSPPFKPGPVFKTLGHNLGPHLCCAKAFIAPLFG

SEQ ID NO: 272446 - protein, 140 aa, Zea mays
  Clone ID: MRT4577_180056C.1.pep
VRKLGPLRGRPCFFFLFFFFLGFLFFFFLSWGGNLLNIMLIRLVTWGGIINKTTALPENGGGGGSWQPGTNPAPPNRGLPQCLPSHSGPQVFAKYPNNGSAGALLLHRGFPPLTGGNARFRALGSFSRGERAGFSARQSS

SEQ ID NO: 272447 - protein, 50 aa, Zea mays
  Clone ID: MRT4577_180057C.1.pep
GQTIIFKRIGQTIKNTVPHTTTILRRLPDYLVKNTENLLDPSYTSNYIWQ

SEQ ID NO: 272448 - protein, 977 aa, Zea mays
  Clone ID: MRT4577_180058C.1.pep
MKTRIVYSREFLLSLGELEHCKKLPPDFDAALLSELQELSAGVLERNKGYYNTSQGRPDGSVGYTYSSRGGNTGGRWDTRSSGSSDRDGEPDRESQTQGRGANQYRRNWQNTEHDGLLGRGGFPRPSGYTGQLSSKDHGNAPQLNRTSERYQPPRPYKAAPFSRKDIDSINDETFGSSELSNEDRAEEERKRRASFELMRKEQHKAVLGKKSGPDILKENPSDDIFSKLQTSTAKANAKTKNEKLDGSVVSSYQEDTTKPSSVLLAPAARPLVPPGFANAFADKKLQSQSSNITHEPKLEDDQSATGFTSESKEKGVSGNDATMGPKHTLPPGSVTSSAELASSVLKGSEDWEADVMDKYSIGKEGKSKNIDPVRKDDSVAILEQFFGNVLSKSGSNLPTYVENQPLKTDDDMITSVPESSKFAHWFLDEDLKPAEDLSSKSLLSMIVKNENPGLENLNHTPLSDAAAQNLSPRAPIDKLDSASELISFTSSTPANGVLEQCIHSDVPEAVPIMTCEDLEQTMLAQVSNSSSTQINATKEQLTVMDEPVAMQKVTVDNHASQHLLSLLQKGTDNKGAPSLGFQRESTDEPLSVDTNLMANGGISGSDPVNSVENVPTSGKDLTLEALFGAAFMNELHSKDAPVSIRGATTGGPTEFAEMGKTLLSSSHEGYYPVEQTVHFNNTKDAAVRREPGIEHSAVPGLSQGSASFDKKGMEIHLPEEDNLFTMSDSLLGQNSDILASVGSSRVEGLLPEKALDNLSYRFQSLVPGDAEHIQVYGPDALGSHPRDSQNMYHLLQGRPPMIAPHPMMDHIVNRKQPAPFDMAQSIHHDSHRSFPSNVNHMQHNLHGPGVPHLDPAGHIMRQHMSMPGRFPPEGLPRGVPPSQPVHHMAGYRPEMGNVNNFHMHPRQPNYGEFGLMMPGPSGPEVRGNHPEAFERLIQMEMSARSKQQQVHHPAMAAGRVPSGMYGHELDAKLRYR

SEQ ID NO: 272449 - protein, 78 aa, Zea mays
  Clone ID: MRT4577_180059C.1.pep
CVVIKISLGLYKHCCTQTPFLYSSRTIISHVPHMPTAGYQHLTYSLHLLSHHYITDRLHHTIDISFNSWVSLFGDTFH

SEQ ID NO: 272450 - protein, 118 aa, Zea mays
  Clone ID: MRT4577_18005C.1.pep
ARAREVRQVPPRAAPMMRSHSLTSTPSSLFSSRNPYAAAQSSSTTSRHGAGCRLPTADFWPGFEADGEDIHASHSSDPQRDKPCFRLALLSRRQHAIQAASCKRSMVSRRAADCSHAA

SEQ ID NO: 272451 - protein, 68 aa, Zea mays
  Clone ID: MRT4577_180060C.1.pep
GDFGWFYPQWHHVYSLPSDNHNYSVDQTQLPFLQALLRVQMKRSHRFLDKLPVVHWHLLTDKSIDPTY

SEQ ID NO: 272452 - protein, 66 aa, Zea mays
  unsure (1)..(66): unsure at all Xaa locations
  Clone ID: MRT4577_180061C.1.pep
MDPVATWGLTPLAGGGGEIYYLLEREKRRQRRGIELIGCENXTSLDDMEALGYGLTNKSIEGMPGA

SEQ ID NO: 272453 - protein, 135 aa, Zea mays
  Clone ID: MRT4577_180062C.1.pep
GRVGSVAILEQFFGNVLSKSGSNLPTYVENQPLKTDDDMITSVPESSKFAHWFLDEDLKPAEDLSSKSLLSMIVKNENSELISFTSSTPANGVLEQYIHSDVPEAVPIMTCEDLEQTMLAQVSNSSSTQINATKE

SEQ ID NO: 272454 - protein, 105 aa, Zea mays
  Clone ID: MRT4577_180063C.1.pep
SNYNCTHVLYLLISIFYCKNYRVYMCTPISFTGSALYIHGRMKTRIVYSREFLLSLGELEHCKKLPPDFDATLLSELQELTADVLERNRGSTHMPGTDIWKRGEY

SEQ ID NO: 272455 - protein, 232 aa, Zea mays
  Clone ID: MRT4577_180064C.1.pep
RVEGLLPEKALDNLSYRFQSLVPGDAEHIQVYGPDALGSHPRDSQNMYHLLQGRPPMMAPHPMMDHIVNRKQPAPFDMAQSIHHDSHRSFPSNVNHMQHNLHGPGVPHLDPAGHIMRQHMSMPGRFPPEGLPRGVPPSQPVHHMAGYRPEMGNVNNFHMHPRQPNYGEFGLMMPGPSGPEVRGNHPEAFERLIQMEMSARSKQQQVHHPAMAAGRVPSGMYGHELDAKLRYR

SEQ ID NO: 272456 - protein, 107 aa, Zea mays
  unsure (1)..(107): unsure at all Xaa locations
  Clone ID: MRT4577_180065C.1.pep
SFLGLLGLLATPPKASIIPHGXLAPSSIIPQFLQQVPXRGFDHQVGKAFRLQQAMAATVLHQPISQLQQQSWAHLTFQTIEPHQQQQFLPALSHLAMVNPAXYLQQQ

SEQ ID NO: 272457 - protein, 109 aa, Zea mays
  unsure (1)..(109): unsure at all Xaa locations
  Clone ID: MRT4577_180066C.1.pep
MVKERQKAFLRASFWSAYSALYDSDKLMKKWGRRIPSXALVAESVADAVGGNECVLRATLRGSRDGNGYGNRLEVEDKVVRIGRATYGKLVKRHAMRDLFRLTLDAASK

SEQ ID NO: 272458 - protein, 299 aa, Zea mays
  unsure (1)..(299): unsure at all Xaa locations
  Clone ID: MRT4577_180067C.1.pep
SPRRLSGRTATAARPAPQEPQSPEAERDTGSQAPACVRTSQSAANDTRRRAEGPRPQAGDRADAXEGHLGLQHEPPLQQRAQLEDTREGHLGLQHGPPLQHRAQPEDPRFPQRDHTFQHAAPFQGVNYLDERSPLAPHLQVTPWPANFRAGTYQKYNGSTDPAKYIMSYQVAVASAGGDDATMAKSFIIDLEGPALTWFTRLPPLSIDSWRSLRDKFLLNFQGYRPDTDALAELSLCKQLEKETLREYYRKFLTLKSQLPSVDDQIAIHYAISXASCRCPLQPLYQRSAQEPPGAISAL

SEQ ID NO: 272459 - protein, 1499 aa, Zea mays
  unsure (1)..(1499): unsure at all Xaa locations
  Clone ID: MRT4577_180068C.1.pep
MAPKRATSKADEAAKAALLAEKKGKALVDTTHQEACEDNALTLEDNHNFPRGFAPPEGADATEDGEVIGVLAEEQLQLRALRIKNRNLQKQKEILEAKRQRVSAQAKVRQMIHDEEQKAQELEQEIALMQSEGQLGLQXPTPPAARTNRRLVHPSARTRRPTRXATFQGINYLDERSPLAPHLQVSPWPANFRAGTYPKYNGSTDPAQYIMSYQVAVASSGGDDATMAKSFIIALEGPALTWYTRLPPLSIDSWRSLRDKFLLNFQGYRPDTDALAELSLCKQLEKETLREYYRKFLTLKSQLRSVDDQIAIHYAISGLRAGVLYSHCIRDPPKNLQELYQLFEKHARSEELHQRKGRGRAQQPRRFYCLFHGEDCAHPTRDCPEMKATRDRMTRAQPADNPRVVAHTYQQPPPPYIHGPAPHPPHHAYQHHQEVQIVPPPPPPPHQQQQNIHHPHAPKQEDFADQPYRGVIHMITGGSSADFDTKRQKRDHYRSINHVAVTGPIVQTKWSHVPLTFDARDVDLRSAPHIDAMVINCSVAGWDLHKVLVDNGSQADIIFLHAFDRMGISHNLLKPSDNPLYGFGGKGTFPLGKIELPLSFGVAPNARSEQVTFDIVDMVYPYNTIMGRGSINKFEAAIHGLYLCMKITGPQGAITVYGNQQAARNIERDFVPGQRNLQSNDGTKTVPLDQATPKQTVTISEDLTSHDEERLLCCLSKNKDVFAWSALDLVGVSRSIIEHSLGIDPSVRPKKQRLRKMSDEKPEAAKAEVHRLLQAKFIEPIAYPTWLANVVMVHKNSGKWRMCIDFTSLNKACPKDNFPLPRIDKIVDSAAECEVMSLLDCFSGYHQIYMKEEDKASTSFITPFGTYCFIRMPEGLKNVGSTFSRLTKTVLEGQVGRNIFTYVDDIVVASRSKEDHLADLAETFANMRDARLRLNPEKCVFGVCQGKILGYLVSHRGIEANPTKIQAIINMTPPQSARDVQRLIGILATLNRFVSKSAERSLPFLKTLCGTKDFAWGPEQAAAFASLKYAALVQEQTVEGMIRQCPVYYVSEVLTPSKCNMTELEKIAYAVVMASRKLRHNFEAFKVRVTSDRGLGELFRNPEASVRIAKWAAELSGYHITFEPRTTIKSQVLVDFVVDWIGPTTQPDPSTEKVWTIHCDGAWCHAGAGAAAVITSPTGVKHRYAARLSFALESNRCTNNIVEYEAVILGFRKLRALGVTTCIIRTDSKGYYHPTDINEAKRLKHRSRDFALIEGQLYKKGVSQPMLKCVTETEGVQILREVHSGTCGSHAGPRALAAKRWGLDIIEPLPTAQGNLKFTFVAVEYFTKWIEVSQDFKDFCFSIGTKLAFTSVYHPQSNGVVERANGKIFTAVKKMLLDDKIGKWADLLPEAVWALNTTECRATGFTPFRLLYGSEAMTPQEIKHGSPRTVPSAVPDVDELTSKDLIDGDRVFALQALNKYQAQTKAWRDHAVIPREFSEGDLVLVRTARTESRGKLEPK

SEQ ID NO: 272460 - protein, 252 aa, Zea mays
  unsure (1)..(252): unsure at all Xaa locations
  Clone ID: MRT4577_180069C.1.pep
PRLRSTGGCGCHRGRRSHRCLSGRTATAARPAHQEPQSPEAERDTXGQAPTCVCTSQGAANDTRRRAEGPGARARDRANXQREGHFGLQHGPPLQQRAQVEDLHFPQRDHAIPHAATFQGVNYLDERSPLAPHLQVTPWPANFRAGTYPKYNGSTDPAQYITSYQVAVASSGGDDATMAKSFIIALEGPALTWFTRLPPLSIDSWRSLRDKFLLNFQGYRPDTDALAELSLCKQLEKETLREYYRKFLTLKS

SEQ ID NO: 272461 - protein, 107 aa, Zea mays
  unsure (1)..(107): unsure at all Xaa locations
  Clone ID: MRT4577_18006C.1.pep
WIRHTRHHITSHDSAGSCAISLIQLQEGMKNIDGSEDSDEQLMKSFXEKKYAMLISLRKINVVDIKTTLSRMCQADLRDSMVCKDALKLRAKAXKKLGTIFQGAQTM

SEQ ID NO: 272462 - protein, 161 aa, Zea mays
  unsure (1)..(161): unsure at all Xaa locations
  Clone ID: MRT4577_180070C.1.pep
SSSGFXXAXPSVPXVPSXXXACFLPVGVSSSGPXLXSXXFSFXLXSAAFLAXWXLFLSLXXFPSRXXXGXSPSSCLLLLRVXXLXLSLXSXVGAXXASXXXXRLXXFGAAPPPAPXAAASXRGGGWVRVXARGRARGXAAPRRAXXLAXGLSVSVXGWXLA

SEQ ID NO: 272463 - protein, 568 aa, Zea mays
  Clone ID: MRT4577_180071C.1.pep
MPEGLKNAGSTFSRLTRAVLEGQCVFGVRQGKILGYLVSHRGIEANPTKIQAIVDMSPPQSARDVQRLTGRLAALNRFISRSAERSLPFLKTLRGAKDFAWGPEQAAAFASLKQYLSELAILTSPDSSLPLLLYVAASPHAVSAALVQEQSVEGTVRQCPVYYVSEVLTPSKCNMTELEKIAYAVVMSSRKLRHYFEAFKVRVTSDRGLGELFRNPEASVRIAKWAAELSGYHISFEPRTAIKSQVLADFVVDWTGPATQSDPSTEKIWTIHCDGTWCHAGAGVAAVVTSPAGVKHRYAARLNFALESDKCTNNIAEYEAVILGLRKLRALGVTTCIIKTDSKIVAGQVEKDYAAKDPALMQYLAAIRSLERQFKGFTLQHVDRARNEEADALAKAAARGEPLPSDVFFHTIGTPAVRSPEGLQITNDSEGHRIVNLIMTEDWRAPITLFLQGYYHPADVSEAKRLRHRSRDFALIEGQLYKKGALNKYQAQTKAWRDHAVIPREFSEGDLVLIRTARTESKGKLEPKWEGPFIVKTKASPSAYRLTTPNGEDLEHSWNIDNLRKFFV

SEQ ID NO: 272464 - protein, 1699 aa, Zea mays
  unsure (1)..(1699): unsure at all Xaa locations
  Clone ID: MRT4577_180072C.1.pep
MAPKKASSKVDEAAKAALLAAKKGKALALTHSTHQEAAKDDVPRTCEDDALHTCGHEGQPQPPPGFAPPEGTDLTEDGEVLGVSAEEQLQLHALRLKNRNLQRQKEILEAKRQRVSALAKVRQMIRDEEQKAQDLEREIALMQREGHLGLQHGPPLQQRAQVEDIREGHLGLQHGPPLQQRVQVEDPHFPQRDYAFPHAAPFQGVNYLDERSPLAPHLQVTPWPANFRAGTYPKYNGSTDPAQYIMSYQVAVASSRGDDATMAKSFIIALEGPALTWFTRLPPLSIDSWRSLRDKFLLNFQGYRPDTDALAELSLCKQLEKETLWEYYRKFLTLKSQLPSVDDQIAIHYAISGLRAGVLYSHCIRDPPKNLQELYQLFEKYAKSEELHQRKVESQRKPKDAPQSSRTWTRTPQPDSGRDGRNQQQVHNIANQHPAGDAPRRQEYPPQGRGSGTRGRGRGRAQPPRRFYCLFHGEDCAHQTKDCPETKATRDRMARAQPADNPRVVAHTYQQHPPPYIHAPAPHPPHHAYQHHQEVQIVPPPPPPPHQQQQNIPHPHTPKQEDFADQPYRGVIHMITGGSSVDFDTKRQKRDHYRSINHVAITGPVVQTKWSHVPLTFDARDVDLRSAPHIDAMVINCSVAGWDLHKVLVDNGSQADIIFLHAFDRMGISHSLLKPSDNPLYGFGGKGTFPIGKIELPLSFGVAPNARSEQITFDIVDMVCPYNAIMGRGSINKFEAAIHGLYLCMKIPGPLGAISVYDNQQTARNIERDFVPGQRNVHCLTAQREVPAPASPTEKQHKAQLQSNDGTKSNRVLGSIXSTTMPVAATSCEHELVNWSXASCPGEDEAASSNSPSLLRFRSPTGPLGRGSRLPSLQADSPRXLHEHTAKSLTXPREKSGKCRMCIDFTILNQACPKDNFPLPRIDKIVDSAAGCKVMSLLDCFSGYHQLSTKEEPKDRTNFISPLRTYSFIRMPEALQNPRSTLSPLFXQCRSSKRGHNLRFRTTPVPTQLKQRQQSFDSQLGVKEGCDQVKXILXVQRLNFSPACATNFXITVLDASGSCTRELPGSSLKNSRNASTTPDVSIYHITSEPRTAIKSQVLADFVVDWTGLITQLDPSAEKVWTIHCDGAWCHAGAGADVVITSPAGVRHRYATRLSFALESDRCTNNIAEYEAVILGLRKLRALGVNTWRVRADSKLVAGQVEKHYAATDGGIMPYVADPRSLQQLLKRPPLQPAVSVCPFSXCNDCARRARSSHAQPRXFCHFFIITTEHGAASATLSNIGDHGPWTYGVGVEHRGSVGSKYLTCQNHGLRRQVSYRHRRPKTGLIWRSMEVXQSSLTTIXELHTQTKGRLILLEVHNGTCRPHARPRALAVKVIRQGFYWPAIICTAKIGFRSREAWRRLSPGTGRPSQLTKLMAHTWPLQCWGRAIVGHRPTAPANPKVTFVALDDLTRWMEVRAVSTIISNTGQKYLSQSMVFRLRAPSELTVVIGRQPDIQHVTAFRGVNYPKERSPFAPHLQVSXHGRPASAQELTPSTTAALTLHSTSXLSSRCRIIXGDDATMAKAFIIALEGPAFTWYTRLPPLSIDSWRSLRDKFLLNFQGYRPDTDVFADRVFRLQALDKYLAQTKGRRDQAVIPREFSEGDLVLVRTARTESRGKLEPMWEGPYIVKSKASPSAYRLATPNGEDLEHSWNIDNLCKFFV

SEQ ID NO: 272465 - protein, 44 aa, Zea mays
  Clone ID: MRT4577_180073C.1.pep
PLLFLSLEFSHKGSLSTCARTAIPRGLQGTRPLQSSRAGGALFL

SEQ ID NO: 272466 - protein, 1665 aa, Zea mays
  unsure (1)..(1665): unsure at all Xaa locations
  Clone ID: MRT4577_180074C.1.pep
MAPKKASPKADEAAKAALLAEKKGKALALVDTTHQEATEDGALSKRQRNEQPTPEGSLRTCSSGGQPQLPPGFAPPEGADVIEDGERGHTIPHAAAFQDVNYLDERSPLAPHLQVTPWPANFRAGTYPKYNGSTDPAQYIMSYQVVVASSGGDDATMAKSFIIALEGPALTWYTRLPPLCIDSWRSLRDKFLLNFQGWKKETLWEYYHKFLTLKSQLPSVDDQIAIHYTISGLRAGVLYSHCIRDPPKNLQELYQLFEKYARSEELHQRKVESQRKPKDTPQSSRTWTRPSQPDSGQDGRNQQQVHNIANQHPAGEAPRRQEYPPQGRGNGTRGRGRGRAQQPRQFYCLFHGEDCAHQTRDCLETKATRDRMARAQPADNPRVVAHTYQQPPPPYIHGPAPHPPHHAYQHHQEVQIVPPPPPPPHQQQQNIHHPHAPKQEDFADQPYRGVIHMITGGSSADFDTKRQKRDHYRSINHVAIIGPVVQTKWSHVPLTFDARDVDLRSAPHIDVMVINCSVAGWDLHKVLVDNGSQADIIFLHAFDRMGISHSLLKPSDNPLYGFGGKGTFPVGKIELPLSFGVAPNARSEQVTFDIIDMVYSYNAIMGRGSINKFEAAIHGLYLCMKIPGPQGAITVYGNQQTARNIERDFVPGQRNVHCLTAQREVPESASPTAREHDKAQLQSNDGTKTVPLDKATPKQTVTISEDLTSHDEEKLLCCLSKNKDVFAWSALDLVGVSRSIIEHSLGIDPSVRPKKQRLRKMSNEKTEAAKAEVHRLLEAKFIEPVAYPTWIANVVMVQKKSGKWRMCIDFTSLNKAYPKENFPLPRIDKIVDSAAGCEVMSLLDCFSGYHQIYMKEEDKASTSFITPFGTYCFIRMPEGLKNVGSTFSRLTKTVLEGQVGRNIFTYVDDIVVASRSKEDHLADLAETFANMRDARLRLNPEKCVFRVRQGKILGYLAIINMTPPQSARDVQRLTGRLAALNRFISKSAERSLPFLKTLCGAKDFAWGPEQAATFASLKQYLLELAILTSPDSSLPLLLYVAASPHAVSAALVQEQTVEGMIRQCPVYYVSEVLTPSKCNMTELEKIAYAVVMASRKLRHYFEAFKVRVTSDRGLGELFRNPEASVWIAKWATELSGYHITFEPRTTIKSQVLADFVVDWTGPITQPDPSAEKSDRCTNNIAEYEAVILGLRKLRALGVTTCIIRTDSKVVASQVKKDYAAKDPALMQYLAAIRSLERQFKGFTLQHVDRAKNEEADALAKAAARGESLPSDVFYHVIGTPPVRSXPKGSKXNDNEGHSIVNLIMTEDWRAPITLFLQGYYHPTDINEAKRLKHRSRDFALIEGQLYKKGVSQPMLKCVTETEGVQILREVHNGTCGSHAGPRALVAKRWGLDIVGPLPTDQGNLKFTFVVVEYFTKWIEARAVSTITSKTAQKFFWQNIVCCFGVPSELTVDNDKQFDSQDFKDFCFSIGTKLAFASVYHPQSNEVVERANGKIFTAVKKMLLDDKKGKWADLLPEAVWALNTTECRATGFTPFRLLYGSEAMTPQEIKHGSPRTVSSAVPDVDEPTSKDHIDGDRVFALQALNKYQAQTKAWRDHVVIPREFSEYDLVLIQIARTESRGKLEPKWEGPFIVKTKASPSAYRLATPAGEDLEHSWNIDNLRKFFV

SEQ ID NO: 272467 - protein, 150 aa, Zea mays
  Clone ID: MRT4577_180075C.1.pep
LQDIHYLKGRLTKLNLNITRTKDRWIQCQLRIHHLDRLELFDTRLLQNQPALYSALNMNSDQGDASDPPGLTRTEHWDLLPMERLRLEDPTSSPTCAPAPIRPTKNPPINSEQWRNSPNRARASNTSRDMDPWHACRLRRCMVAPRTGNP

SEQ ID NO: 272468 - protein, 659 aa, Zea mays
  Clone ID: MRT4577_180076C.1.pep
MAPKRANPKADEAAKAALLAARKGKALALTQSTHQEATEDDTLRTCGPEGQSQPPPGFAPLEGADLTEDGEVLGVSAEEQLQLRTLRLKNRNLQRQKEILEAKRQRVSALAKVRQMIRDEEQKAQDLEREIALMQRDGHLGLQHEPPLQQHAQLEDTREGHLGLQHEPPLQQRAQPEGPRFPQRDHTFPHAAPFQGVNYLDERSPLAPHLQVTPWPANFRAGAYPKYNGSTDPAQYIMSYQLHQRKVESQRKPKDAPQSSRTWTRTPQPDSGRDGRNQQQVHNIANQHPAADPPRRQEYPPQGRGNGTRGRGRGRAQPPRRFYCLFHGEDCAHQTKDCPETKATRDRMARAQPADNPRVVAHTYQQPPPPYIHAPAPHPPHHAYQHHQEVQIVPPPPPPPHQQHQNIPHAPKQEDFADQPYRGVIHMITGGGGSSTDFDTKRQKRDHYRSINHVAVTGPVVQTKWSHIPLTFDARDVDLRSAPHIDAMVINCSVAGWDLHKVLVDNGSQVDIIFLHAFDRMGISHSLLKPSDNPLYGFGGKGTFPVGKIELPLSFGVAPNARSEQVTFDIVDMVYPYNAIMGRGSINKFEAAIHGLYLCMKIPGPLGVITVYGNQQTVRNIERDFVPGQRNVHCLTAQREVPAPASTTDKQHDKAQLQS

SEQ ID NO: 272469 - protein, 267 aa, Zea mays
  unsure (1)..(267): unsure at all Xaa locations
  Clone ID: MRT4577_180077C.1.pep
MAPKRATSKADEAAKAALLAEKKGKALVDTTHQEACEDDALSKRQRNEQPTPEGSLRTCSSGGQPQLPPGFAPPEGADATEDGEVIGVSAEEQLQLRALRIKNRNLQKQKEILEAKRQRVSTQAKVSPWPANFRAGTYPKYNGSTDPAQYIMSYQVVVASSGGDDATMAKLPPLSIDSWRSLRDKFLLNFQGYRPDTDALAELSLYKQLEKETLREYYRKFLTLKSQLPSVDDQIAIHYAISXSGRRPLQPLHQGSAQEPPGVVSAI

SEQ ID NO: 272470 - protein, 1510 aa, Zea mays
  unsure (1)..(1510): unsure at all Xaa locations
  Clone ID: MRT4577_180078C.1.pep
MAPKKASSKADEAAKAALLAARKGKALALTQSTHQEATEDDVLRTREDDTLCTCGLEGQSQPPPGFAPPKGADLTKDAKVRRMIRDEEQKAQDLEREIALMQREGHLGLQHGPPLQQRAQLEDTREGHLGLQHGPPLQQRAQPEDPRFPQRDHTFRHAAPFQGVNYLDERSPLAPHLQVMPWPANFWAGTYPKYNGSTDPTQYIMSYQVAVASSGGDDATMAKSFIIALEGPALTWFTRLPPLSIDSWRSLRDKFLLNFQGYRPDTDALAELSLCKQLEKETPREYYRKFLTLKSQLPSVDDQIAIHYAISGLRVGVLYSHCIRDPPKNLQELYQLFEKYAKSEELHQRKVESQRKPKDAPQSSRTWTRTPQQDSGRDGRNQQQEDFANQPYRGVIHMITGGSNTDFDTKRQKRDHYRSINHVAITGPVVQTKWSHIPLTFDARDVDLRSALHCDAMVINCSVAGWDLHKVLVDNGSQADIIFLHAFDRMGISHNLLKPSDNPLYDFGGKGTFPVGKIELPLSFGVAPNARSEQVTFDIVDMVYPYSTIMGRGSINKFKAAIHGLYLCMKIPGPLGVIRVYGNQQTARNIERDFVPGQRNVHCLTAQREVPAPASPTDKQHDKAQLQSNDGTKTIPLDQATPKQTVTISEDLTSHEEEKLLCCLSKNKDVFAWSALDLVGVSRSIIEHSSGIDRSMSDEKTEAAKAEVHRLLEAKFIEPVAYPTWLSNVVMVQKKSGKWRMCIDFTSLNKACPKDNFPLPRIDKIVDSAAGCEVMSLLDCFSGYHQIYMKEEDKASTSFITPFGTYCFIRMPEGLKNVGSTFSRLTKICVFGVRQGKILGYLVSHRGIEANPTKIQAIINMTPPQSARDVQRLTGRLAALNRFISRSAERSLPFLKTLRGAKDFAWGPEQAAAFASLKQYLSELAVLTSPDSSLPLLLYVAASPHAVSAALVQEQAVEGAIRQCPIYYVSEVLTSSKCNMTELEKIAYAVVMSSRKLRYYFEAFKVRVTSDKGLGELFRNSEASVRIAKWAAELSGYHINFEPRTAIKSQVLADFVVDWTGPITQPDPSAEKVWTIHCDGAWCHAGAGAAAVITSPTGVKHRYAARLIFALESDRCTNNIAEYEAVILGLRKLRALGVTTCIIRIDSKVVAGQVEKDYAAKDPALMQYLAAIRSLERQFKGFTLQHVDRAKNEEADALAKAAARGESLPSDVFYHVIGTPAVRSPEGLQITNDNEGHRIVNLIMTEDWRAPITLFLQGYYHPTDINEAKHLKHRSRDFALIEGQLYKKGVSQPMLKCVTETEGVQILREVHSGTCGSHVGPRALAAKVIRQGFYWPAMICAANWVTRSCEACQKFSPRSGSASQFTKLIAHTWPLQRWGLDIVGPLPTAQGNLKFAFVAVEYFTKWIEARAVSTITSKTAQKFFWQNIVCRFGVPSELTVDNGKQFDSQDFKDFCFSISTKLAFASVYHPQSNGVVERANGKIFTAVKKMLLDXKKGRWADLLPEAVWAL

SEQ ID NO: 272471 - protein, 88 aa, Zea mays
  Clone ID: MRT4577_180079C.1.pep
AWQLCCTGTCIERRSSLSERIPVGLNLGSLKREIQQKHMSILEMLTLKRSLGNYYTGKNCGYIGYHSLKGGYVTADEKVPRELDPDTT

SEQ ID NO: 272472 - protein, 115 aa, Zea mays
  Clone ID: MRT4577_18007C.1.pep
GIIQATTALATFCVIGSLTMPLTLKVGKGCNPEHLVLTPNIATITETEIMDHGLDDFSFELKEGHVDTCTLDTKAPLKYTLCIRFASKVDGYSHLDDVIPENFNAHTSYKTTLKI

SEQ ID NO: 272473 - protein, 1327 aa, Zea mays
  unsure (1)..(1327): unsure at all Xaa locations
  Clone ID: MRT4577_180080C.1.pep
MAPKRANPEADEAAKAALLAARKGKALALTQSTHQEATEDNVPRTCEDDTLRTYGPEGQSQPPPAFAPLEGADLTEDGEVLGVSAEEQLQLRALRLKNRNLQRQKEILESKRQRVSALAKVRQMIRDEEQKAQDLEREIALMQREGHLGLQHGPPLQQRAQLEDTREGHLGLQHGPPLQHRAQPEDPRFPQRDHTFPHAAPFQGVNYLDERSPLAPHLQVTPWPANFWAGTYPKYNGSTDPAQYIMSYQVAVASSGGDDATMAKSFIIALEGPALTWFTRLPPLSIDSWRSLRDKFLLNFQGYRPDTDALAELSLCKQLEKETLREYYRKFLTLKSQLPSVDDQIAIHYAISGLRAGVLYSHCIRDPPKNLQELYQLFEKYAKSEELHQRKVESQRKPKDAPQSSRMWTRTLQPDSSRDGRSQQQVHNIANQHPAADAPRRQEYPPQGRGNGTRCRGRGRVQPPRQFYCLFNDEDCAHQTKDCPETKATRGRMAQAQPADNPRVVAHTYQQPPPPYIHAPAPHPPHHAYQHHPEVQIVPPPPPPPHQQHQNIPNAPKQEDFADQPYRKVIHMITGGSSTDFDTKQHKRDHYRSINHVAVTGPVVQTKWSHIPLTFDARDVDLRSAPHCDAMVINCSVADWDLHKVLVDNGSQADIIFLHTFDRMGISHSLLKPSDNPLYGFGGKGTFPVGKIELPLSFGVAPNARSEQVTFDIVDMVYPYNAIMGRGSINKFEAAIHGLYLCMKIPGPLGIITVYGNQQTARNIERDFVPSQRNVHYLTAERXRSPRPPAQPXQHNKAQLQSNDGTKTVPLDQATPKQTFTICEDLTSHEEEKLLCCLSKNKDVFAWSALDLVGVSRSIIEHSLGIDPSVRPKKQRLRKMSDEKTESAKAEVHRLLEAKFIEPVAYPTWLSNVVMVQKKSGKWRMCIDFTSLNKACPKDNFSLPRIDKIADSAAGCEVMSLLDCFSGYHQIYMKEEDKASTSFITPFGTYCFIRMPEGLKNAGSTFSRLTKTVLEGQVGRNIFTYVDDIVVASKSKEDHLADLAETFANMRDARLRLNPEKCVFGVRQGKILGYLVSHRGIEANPTKIQAIINMTPPQSARDVQRLSGRLAALNRFISSAALVQEQTVEGVVRQCPVYYVSEVLTPSKCNMTELEKIAYAVIMSSRKLRHYFEAFKVRVTSDRGLGELFRNPEASVRIAKWAAELFGYHISFEPRTAIKSQVLADFVVDWTGPTTQPDPSVEKALNKYQAQTKAWRDHTVIPREFSERDLVLVRTARTESRGKLEPKWEGPFIVKTKASPSAYRLTTPNGEDLEHSWNIDNLRKFFV

SEQ ID NO: 272474 - protein, 92 aa, Zea mays
  Clone ID: MRT4577_180081C.1.pep
VRIAWGTQQGCCPSSSLCSLAAAVAVCSALSTKFQVKYWWWVRVVMSSSTTVEVPSVYSKQVKKMTKNITKRSWSGSLLLLLSKSCSVLWCV

SEQ ID NO: 272475 - protein, 224 aa, Zea mays
  unsure (1)..(224): unsure at all Xaa locations
  Clone ID: MRT4577_180082C.1.pep
MWWESTPASGGQHGEHMSLILHFQLVYGVASPSASSPAGGGGFYHIGGRFGVPSPSTSAPPQHNFNGLRVLLLNTDDTSREVTRKLLERLGCQVLPVPSAARCLSLLLGSATATGGGDQPSFQSPYLVLQAVLVDLHTPAAAIADAATAMDDGFEVALRIREVTGDRFSWLLILVALPLPPRASRIDVRDVCKRTGVNGVIYKPIXITLPALAAELYRVLQNDN

SEQ ID NO: 272476 - protein, 268 aa, Zea mays
  unsure (1)..(268): unsure at all Xaa locations
  Clone ID: MRT4577_180083C.1.pep
TLEPGGAPPLGILLVSLGSSGPTAASKLPPSSLRAVPPXFASAPPXLPSLLLLMELDPRLYENVSVSDNDVRNIVLSYLMHNCFKETAEAFLSSTGLNLPVDYSVDVDKRKAIFNFVLEGNALKAIELTEEMAPNLLENDMDLHFDLLSLHFIELVRSKKFTEALDFGQKKLTSFQKVTKYIEKLEDFMALLAYEEPEKSPMFHLLSPEHRQNVAEGLNRAVLAHANLPAYSSLERVVQQATVVRQYLQQEVGKDSYPPFSLKAFLSK

SEQ ID NO: 272477 - protein, 106 aa, Zea mays
  unsure (1)..(106): unsure at all Xaa locations
  Clone ID: MRT4577_180084C.1.pep
SHHKXAGKKKITKKKEKKKKKKKKKKKKKNLCQPQRRGSSNSPISGTQSFPQFPPFSLFSPPRRFPPFNNTLREGIPIHFGQVGIQVGNAGGELNCLGLGFRVDGQ

SEQ ID NO: 272478 - protein, 147 aa, Zea mays
  unsure (1)..(147): unsure at all Xaa locations
  Clone ID: MRT4577_180085C.1.pep
PGAPARPGRXAARRGXGAPAPRXRGGAGXRAPRAGGQARSGGAAGPGTPRPRRRPRRRHRPSPGGGXGATGTDGPDXXGGPRQAAEGRPPGAXGKNTGGPTATPPDAESDDAPDDTSTGDKDRQSDARAPGAHTPDRSRAAGEHSDH

SEQ ID NO: 272479 - protein, 89 aa, Zea mays
  unsure (1)..(89): unsure at all Xaa locations
  Clone ID: MRT4577_180086C.1.pep
VGEDGDLVEGGTWRRPRRFRRGRSSRSLSLLALIFVPAGVSLSSFSFRSLPLRAYGLPLRDLVGAQSVVLLFPLHSCCYCXLLSAVDPS

SEQ ID NO: 272480 - protein, 61 aa, Zea mays
  unsure (1)..(61): unsure at all Xaa locations
  Clone ID: MRT4577_180087C.1.pep
AGSCPPPARRGSAPARRPXXFGGPGALXLAPLGWALCACWXGVPGXASSRPWAGSPSGCXA

SEQ ID NO: 272481 - protein, 86 aa, Zea mays
  unsure (1)..(86): unsure at all Xaa locations
  Clone ID: MRT4577_180088C.1.pep
EILRVDNLVITGKGKLGGQGPAVWSXNSCVKKYDCKILPNSLVMDFVNNGEVCGITLLNFKVFHMNMFKCKDMLIKDINVTGPGDR

SEQ ID NO: 272482 - protein, 174 aa, Zea mays
  unsure (1)..(174): unsure at all Xaa locations
  Clone ID: MRT4577_180089C.1.pep
YDALNCRKKKKKKKKPRPLGXDKEKPRPVKKTRPGPAGKKKKKKKNPRPLDFDKRKPVAGKKNKAWTGRKKKKKKKNPAPWILNKKNPGGEKKKGFEPAKKKKKKKKNPPPGIXKKKPKGGKKKRXKRAKKKKKKKKIPPFGILKRKNQGGKKKECLDRRKKKKKKKKTPPLWI

SEQ ID NO: 272483 - protein, 52 aa, Zea mays
  Clone ID: MRT4577_18008C.1.pep
WSIGIPLTSITVKCPHYPLSPAKRSDEYSPVVLIYPPPCLPNIVLISQTQMS

SEQ ID NO: 272484 - protein, 46 aa, Zea mays
  Clone ID: MRT4577_180090C.1.pep
LASNNGCRRQRASRNCSLLGRRRATTRCCVFVSAVDKDEEEDDGGG

SEQ ID NO: 272485 - protein, 180 aa, Zea mays
  Clone ID: MRT4577_180091C.1.pep
MLRAGGRQLLAPGLRRLGLGTGAAGEVGPAAAAAGMRAYHERVVDHYNNPRNVGSFDKEDPNVGTGLVGAPACGDVMKLQIRVDEDSGKIVDACFKTFGCGSAIASSSVATEWVKGKPMDEVLTIKNTEIAKHLSLPPVKLHCSMLAEDAIKAAVKDYEAKKAKMGQKSEDSPSEKAAEA

SEQ ID NO: 272486 - protein, 118 aa, Zea mays
  unsure (1)..(118): unsure at all Xaa locations
  Clone ID: MRT4577_180092C.1.pep
KAAQNVLLGSVXIFATFVTLCNASCYVIPNEGVPGDSTRKCMVLXKETXHPINSEWQTDNCETCTCYETEISCCTLVSTPVGYDKDNCQRIFKKEDCKYIVVEKKDPKKTCSVSEWII

SEQ ID NO: 272487 - protein, 69 aa, Zea mays
  unsure (1)..(69): unsure at all Xaa locations
  Clone ID: MRT4577_180093C.1.pep
NVYMWGXLLDTRRPHSCXAPVACHVLXXPRAGVGGGYWRXWRPAARPEEFXVXDGQXVAERVLRRLHXR

SEQ ID NO: 272488 - protein, 90 aa, Zea mays
  Clone ID: MRT4577_180094C.1.pep
AVFGIKQGALVFTTHLTGGFPGQFHFSNLNGNTRGGVKVPSFSIQGHRTAHTAKGGPHPGPFFGGFFFKTILLGLIEKTPLGASGINDLG

SEQ ID NO: 272489 - protein, 116 aa, Zea mays
  unsure (1)..(116): unsure at all Xaa locations
  Clone ID: MRT4577_180095C.1.pep
GGFGGXVGGLXRLCPPVFAXVXRGAGXXXGGAGGLXRGAPPGAAGPGPXXXGVGXAVCCXSCVCCRCWLAPPPPXVLVRWCGVSASPFFVVGWSFCGGSFFGPRAGRSVRCVAAAG

SEQ ID NO: 272490 - protein, 42 aa, Zea mays
  unsure (1)..(42): unsure at all Xaa locations
  Clone ID: MRT4577_180096C.1.pep
MRFSQILNGLAHKLPHVNNVFLKPGXRALNWTVGPPGDLKPW

SEQ ID NO: 272491 - protein, 582 aa, Zea mays
  unsure (1)..(582): unsure at all Xaa locations
  Clone ID: MRT4577_180098C.1.pep
MAPKRANPKADEATKAALLAARKGKALALTQFTHQEPTEDNVPRTCEDDTFHTCGPEGQSQPPPGFAPLEGADLTEDGEVLGVSTEEQLQLRALRLKNRNLQRQKEILEAKRQRVSALAKVRQMIRDEEQKAQDLEREIALMQREGHLGLQQEPPLQQREQPEDTREGHLGLQHGPPLQHRAQPDPSTEKVWTIHCDGAWCHAGAGVAAVVTSPAGVKHRYAARLSFALESDRCTNNIAEYEAVILGLRKLRALGVTTCIIKTDSKIVAGQVEKDYAAKDPALMQYLAAIRSLERQFKGFTLQHVDRAKNEEADALAKAAARGETLPSDGYYHPTDVSEAKRLRHRSRDFALIEGQLYKKGVSQPMLKCVTETEGMQILREVHSGTCGSHAGPRALAAKVIRQGFYWPAMICVANRVTRSCEACQKFSPRSGNPSQYTKLIVHTWPLQRWGLDIVGPLPTAQGNLKFAFVAVKYFTKWIEARAVSTITSKTAQKFFWQNIVCRFGVPSELTVDNGKQFDSQDFKDFCFSIGTKLAFASVYHPQSNGVVERANGKIFTAVKKVLLDEXKGRWTDLLPEAVWAL

SEQ ID NO: 272492 - protein, 458 aa, Zea mays
  Clone ID: MRT4577_180099C.1.pep
MSLLDCFSGYHQIYMKEEDKASTSFITPFGTYCFIRMPEGLKNAGSTFSWLTKTVLEGQVGRNIFTYVDDIVVASRSKEDHLADLAETFANMRDAQLRLNPEKCVFGVRQGKILGYLVSHRGIEANQTKIQAIINMTPPQSARDVQRLTGRLAALNRFISKSAERSLPFLKSLRGAKDFAWGPEQAVAFASLKQYLSELAVLTSPDSSLPLLLYVAASPHAVSATLVQEQTVEGVVRQCPVYYISEVLTPSKCNMMELEKIAYAVVMASCKLRHYFEAFKVRVTSDRGLDKLFRNPEASVRIAKWAAELSGYHITFEPRTAIKCTNNIAEYEAVILSLRKLRALGVTTCIIRTDSKVVAGQVEKDYAAKDPALMQYLAAIRSLERQFKGFTLQHVDRAKNEEADALAKAAARGESLPSDVFYHVIGTPAVRSPEGLQITNDNEGVGGLRLPKVLKNKI

SEQ ID NO: 272493 - protein, 66 aa, Zea mays
  Clone ID: MRT4577_18009C.1.pep
PARPTPSGVYASIFLALEQIAGWSKASIISQALRCNIPGSNLILGHPAGCANMRNLAPVSPITYRA

SEQ ID NO: 272494 - protein, 102 aa, Zea mays
  Clone ID: MRT4577_1800C.1.pep
QALAVSTRLELVQLLLSRGLLPVSSIVHESDVHKRVQLTVPARFEESLQILMADLMAYDSSASAVASCDGVVHVPIAVLSDQLSIPEVYVIHSRCYTYCRLY

SEQ ID NO: 272495 - protein, 1748 aa, Zea mays
  unsure (1)..(1748): unsure at all Xaa locations
  Clone ID: MRT4577_180100C.1.pep
MARKRANPKADEAAKAALLAARKGKALVLTQSTHQEPTEDNVPRTCEDDTFRTCGPEGQSQPPPGFAPLEGADLTEDGEVLGVSTEEQLQLRALRLKNRNLQRQKEILEAKRQRMSALAKVRQMIRDEEQKAQDLEREIALMQREGHLGLQQEPPLQQRAQPEDTREGHLGLQHGPPLQHRAQPENPRFPQHDYTFQHDAPFQGVNYLDERSPLAPHLQVTPWPANFRAGTYPKYNGNTDPAQYIMSYQVAVASAGGDDATMAKSFIIALEGPALTWFTRLPPLSIDSWRSLRDKFLLNFQGYRPDTDALAKLSLCKQLEKETLREYYRKFLTLKSQLPSVDDQIAIHYAISGLRAGVLYSHSTRDPPKNLQELYQLFEKYAKSEELHQRKIESQRKPKDAPQSSRTWTRTPQPDSGRDGRSQQQVHNIANQHPAADPLAARNIPXQGRGNGTRGRGRGRAQPPRRFYCLFHGEDCAHQTKDCPETKATRDRMARAQPADNPRIVAHNYQQPPPPYIHAPAPHPLXPRLPTPSXNTDFDTKRQKRDHYRSINHVAVTGPVVQTKWSHIPLTFDARDVDLRSAPHIDAMVINCSVAGWDLHKVLVDNGSQADIIFLHAFDCMGISHSLLKPSDNPLYGFGGKGTFPVGKIELPLSFGVAPNARSEQVTFDIVDMVYPYNAIMGRGSINKFEAAIHGLYLCMKIPGPLGAIMIYGNQQTARNIERDFVPGQRNVHCLTTQREVPAPASPTDKQHDKAQLQSQDGTKTVPLDQAIPKQTVTVSEDLTSHEEEKLLCCLAKNKDVFAWSALDLVEVSRSIIEHSLGIDPSVRPKKQRLRKMSDEKTEATKAEVHRLLEAKFIEPVAYPTWLSNVVMVQKKSGKWRMCIDFTSLNKACPKDNFPLPRIDKIVDSAAGCEVMSLLDCFSGYHQIYMKEEDKASTSFITPFGTYCFIRMPEGLKNARSTFSRLTKTVLEGQVGRNIFTYVDDIVVASKNKEDHLADLAETFANMRDARLRLNPEKCVFGVRQGKILGYLVSHRGIEANPTKIQAIVDMSPPQSARDVQRLTGRLAALNRFISRSAERSLPFLKTLRGAKDFAWGPEQAAAFASLKQYLSELAILTSPDSSLPLLLYVAASPHAVSTALVQEQTVEGAVRQCPVYYVSEVLTLSKCNMTELEKIAYAVVMSSRKLHHYFEAFKVRVTSDRGLGELFRNPEASVRIAKWAAELSGYHISFEPRTAIKSQVLADFVVDWTGPITQPDPSTEKVWTIHCDGAWCHAGAGVAAVVTSPAGVKHRYAARLSFALESDRCTNNIAEYEAVILGLRKLRALGVTTCIIKTDSKIVAGQVEKDYAAKDPALMQYLAAIRSLERQFKGFTLQHVDRAKNEEADALAKAAARGEPLPSDVFFHTIGTPAVRSPEGLQITNDSEGHRIVNLIMTEDWRAPITLFLQGYYHPTDVSEAKRLRHRSWDFALIEGQLYKKRVSQPMLKCVTETEGMQILREVHSGTCGSHAGPRALAAKVIRQGFYWPAMICAANRVAKSCEACQKFSLRSGSPSQYTKLIAHTWPLQRWGLDIVGPLPTAQGNLKFAFVAIEYFTKWIEARAVSTITSKTAQKFFWQNIVCRFGVPSELTVDNGKQFDSQDFKDFCFSIGTKLAFASVYHPQSNGALNKYQAQTKAWRDHAVIPREFSEGDLVLIRTARTESRGKLEPKWEGPFIVKTKASPSAYRLTTPNGEDLEHSWNIDNLRKFFV

SEQ ID NO: 272496 - protein, 827 aa, Zea mays
  unsure (1)..(827): unsure at all Xaa locations
  Clone ID: MRT4577_180101C.1.pep
MAPKKASSKADEATKAALLAAKKGKALALTHTTHQEATEGDALRTCGSEGQPQPPPGLAPPEGADLTEDGEHKGHFGLQHGPPLQQRAQVEDLHFPQRDHAIPHAAAFQGVNYLDERSPLAPHLQVTPWPANFRAGTYPKYNSSTDPTQYIMSYQVAVASSGGDDATMAKSFIIALEGPALTWFTRLPPLSIDSWRSLRDKFLLNFQGYRPDTDALAELSLCKQLEKETLREYYRKFLTLKSQLPSVDDQIAIHYAISGLRASVLYSHCIRDPPKNLQELYHLFEKYAKSEELHQRKVESQRKPKDAPQSSRTWTRTPQPDSGRDGRNQQQVHNITNQHPAGEAPRRQEYPPQGRGNGTRGQGRGRTQPSCRFYCLFHGGDCAHQTRDCPETKATRDRMARVQPVDNPRVVAHTYQQPPPPYIHAPAPHPQHHAYQHHQEVQIVPPPPPPPHQQQQNIHHPHAPKQEDFADQPYRGVIHMITGGSSADFDTKRQKRDHYRSINHVAITGPVVQTKWSHVPLTFDARDVDLHSAPHIDAMVINCSVAGWDLHKVLVDNGSQADIIFLHAFDRMGISHSLLKPSDNPLYGFGGKGTFPVGKIELPLSFGVAPNARSEQVTFDIVNMVYPYNAIMGRGSINKFEAAIHGLYLCMKIPGPLGAITVYGNQQTARNIERDFVPGQRNVHCLTTQREATPKQTVTISEDLTSHDEEKLLCCLSKNKDVFAWSALDLVGVSRSIIEHSLGIDPSVRPKKQRLRKMSDEKTEAAKAEVHRLLEAKFIEPVAYPTWLANVVMVQKKXGKWRMCIDFTSLNKACPKDNFPLPRIDKI

SEQ ID NO: 272497 - protein, 225 aa, Zea mays
  unsure (1)..(225): unsure at all Xaa locations
  Clone ID: MRT4577_180102C.1.pep
AAPASGTSGSGCFDCNICLECATEPVVTLCGHLYCWPCIYEWLRHDVAEAGARSSARRQCPVCKAAVSPDALVPLYGRGGSSSAKKPLASIPRXRPAGPAXRARMTAAAVATTTTIGTQRPARQPGRCGTQPTPTPRSSTPSSXAVRGPRDAALDXTTGGMLGGMAVAVLPLVLRGQARVPGMYYPSPYHLMSPRQRRWHVEVERSLHQIWFFLCVFVVLCLLLF

SEQ ID NO: 272498 - protein, 194 aa, Zea mays
  Clone ID: MRT4577_180103C.1.pep
LLMPLAGTGTNQALQRVARGPPARLAVPTVVPAVELSGTDTAHRTTGRSRRGTSLHGAQTKISRNLPPVLLPHLAAHQQDSRTLIAGRPNWSRRTAPSADPNGNPTTRAPHLTPAAGESEPRKTKVAGGGGATTNRYRRQRKSGSFPTVAPPEAATVTGMSNLGPRLDQNRTLPPEIARRRPLGGSPSSLSCRQ

SEQ ID NO: 272499 - protein, 214 aa, Zea mays
  Clone ID: MRT4577_180104C.1.pep
CAGSMGTAQTNSTIMHNAEQRRSCLLLLADVSSRSTTNQSEQQATNQHGQGLDDLPASRCHCHLIGANVSASWNLKSLHHGDVQPDQPHMSISGLRAAPVSSPSSSSTASPRRAASHRRGEPCAHMGASRQLSLARLVWCFVSSHCCTYYYVSICDVMCHTIKNQRSTRGLSSLSLSPRCVLARSLVFFRRFPANPAARLPVSASPVLCVVTTA

SEQ ID NO: 272500 - protein, 1877 aa, Zea mays
  unsure (1)..(1877): unsure at all Xaa locations
  Clone ID: MRT4577_180105C.1.pep
MVSLPLDRAKIKCSLQIPRSRDVNGDPIPANSWGIPLLRSIGDVFVGAKAKTPPFARCLRRPRCTNGDKTTGRLTLRPIRHRTKTCDEVVSSCDLVQHGGPRVIRPIVTGPAWPLRITGLICKGIPVITESKFQHLVPTIRATKKPPAMAPKKASSKADEAAKAALLAAKKGKALALTHSTHQEATEDDVLRTCEDDTLRTCGPEGQSQPPPGFAPLGGADLTEDGEVLGVSAEEQLQLRTLRLKNRNLQRQKEILEAKRQRVSALAKVRQMIHDEEQKAQDLEREIALMQREGHLDLQHGPPLQQRAQLEDTREGHLGLQHGPPLQQRAQPEDPRFPQRDHTFPHAAAFQGVNYLDERSPLAPHLQVMPCPANFRAGTYPKYNGSTDPAQYIMSYQVVVASSGGDDATMAKSFIIALEGPALTWFTRLPPLSIDSWRSLRDKFLLNFQGYRLDTDALAELSLCKQLEKETLREYYRKFLTLKSQLPSVDDQIAIHYAISGLRAGVLYSHCIRDPPKNLLELYQLFEKYAKSKELHQRKVESQRKPKDAPQSSRTWTRTPQPDSGRDGRNQQQVHNIANQHPAADAPRRQEYPPPQGRGNGTRASRQPRVVTHTYQQPPPPYIHAPAPHPPHHAYQHHQAVQIVPPPPPPPHQQHQNIPHAPKQEDFADQPYRGVIHMITGGSSTNFDKKRQKRDHYRSINHVVVTGPVVQTKWSHIPLTFDARDVDLRSAPHIDAMVINCSVAGWDLHKVLVDNGSQADIIFLHAFDRMGISHSLLKPSDNPLYGFGGKGTFPVGKIELPLSFGVAPNARSEQVTFDIVDMVYPYNAIMGRGSINKFEAVIHGLYLCMKIPGPLGVITVYGNQQTARNIERDFVPGQRNVHCLMAQRXRSPRPPAQPXQHDKAQLQRNDGTKTVPLDQATPKQTVTISEDLTSHEEEKLLCCLTKNKDVFAWSALDLVGVSRSIIEHSLGIDPSVRPKKQRLRKMSDEKTEAAKAEKKSGKWRMCIDFTSLNKACPKDNFPLPRIDKIVDSAAGYEVMSLLDCFSGYHQIYMKEEDKASTSFITPFGTYCFIRMPEGLKNAGSTFSRLTKTVLEGQVGRNIFTYVDDIVVASKSKEDHLVDLAETFANMRDARLRLNPEKCVFGVRQGKILGYLVSNRGIEANPTKIQAIINMTPLQSARDVQRLTGRLAALNRFISRSAERSLPFLKTLRGAKDFGWGPEQAAAFASLKQYLSELVVLTSPDSSLPLLLYVAASPHAVSAALVQEQTVEGVVRQCPIYYVSEVLTPSKCNMIELEKIAYAVVMSSRKLRHYFEAFKVRVTSDRGLGELFRNPEASVSIAKWAAELSGYHINFEPRTAIKSQVLVDFVVDWTGPIAQPDPSAEKVWTIHCDGAWCHAGAGAAAVITSPTGVKHRYAARLSFALESDRCTNNIAEYEAVILGLRKLRALGVTTCIIRTDSKVVAGQVEKDYAAKDPTLMQYLAAIRSLERQFKGFTLQHVDRAKNEEADALAKAAARGESLPSDVFYHVIGTPAVRSPEGLQITNDSEGHRIVNLIMTEDGRAPITLFLQGYYHPTDINEAKRLKHRSRDFALIEGQLYKKGVSQPMLKCVTETEGVQILREVHSGTCGSHAGPRALAAKVIRQGFYWPAMICAANRVTKSCEACQKFSPRSGSPSQFTKLIAHTWPLQRWGLDIIGPLPTAQGNLKFAFVAVDYFTKWIEARAVSTITSKTAQKFFWQNIVCRFGVPSELKVDNGKQFDSQDFKDFCFSIGTKLAFASVYHPQSNGVVERANRKIFTAVKKMLLDEKKGKWADLLPEAVWALNTTECRATGFTPFRLLYGSEAMTPQEIKHGSPRTVPSAVPDVDEPTSKDLIDGD

SEQ ID NO: 272501 - protein, 95 aa, Zea mays
  Clone ID: MRT4577_180106C.1.pep
AVAGTVAWIRSSAEQAFYLCMLCPGGTPIKSTVSPSASEYPPCSTFASPLATSRSAPGLLFWSQASSASSSGLERWAVVSLLKSASSIQHVFAGK

SEQ ID NO: 272502 - protein, 848 aa, Zea mays
  Clone ID: MRT4577_180107C.1.pep
MAPKKANSKADEAAKAALLAARKGKALALTQSTHQEATEDDVLRTCEDDTLRTCGPEGQSQPPRLRPTGGRGPHRGRGLRDKFLLNFQGYRRDTDALAELSLCKQLEKETLREYYRKFLTLKSQLPSVDDQIAIHYAISGLRAGVLYSHCIRDPPKNLQELYQLFEKYAKSEELHQRKVESQRKPKDAPQSSRTWTRTPQPDSGRDGRNQQQVHNIANQHPAADAPRRQEYPPQGRGNGTRGRGRGRAQPPRRFYCLFHGEDCAHQTKDCPETKATRDRMARAQPADNPRVVAHTHQQPPPPYIHTPAPHPPHHAYQHHQEEDFADQPYRGVIHMITGGSSTDFDTKRQKRDHYRSINHVAITGPVVQTKWSHIPLTFDARDVDLRSAPHIDAMVINCSVAGWDLHKVLVDNGSQADIIFLHAFDRMGISHSLLKPSDNPLYGFGGKGTFPVGKIELPLSFGVAPNARKKSGKWRMCIDFTSLNKAYPKDNFPLPQIDKIVDSAAGCEVMSLLDCFSGYHQIYMKEEDKASTSFITPFDTYCFIRMPEGLKNVGSTFSRLTKTVLEGQVGRNIFTYVDNIVVASKSKEDHLADLAETFANMRDARLRLNPENCVFSVRQGKILGYLVSHRGIEANPTKIQAIINMTPPQSARDVQRLTGRLAALYRFISRSAERSLPFLKTLRGAKDFAWGPEQAAAFASLKQYLSDLAVLTSPNSSLPLLLYVAASPHAVSAALVQEQTVEGVVRQCPVYYVSEVLTPSKCNMTELEKIAYAVVMSSRKLRHYFEAFKVRVTSDRGLGELFRNPEASVRIAKWAAELSGYHISFEPRTAIKSQVLADFVVDWTRPIT

SEQ ID NO: 272503 - protein, 1706 aa, Zea mays
  unsure (1)..(1706): unsure at all Xaa locations
  Clone ID: MRT4577_180108C.1.pep
MAPKRANPKADEAAKAALLAARKGKALALTQSTHEEATEDNVPRTCKDDTFRTCGPEGQSQPPPGFAPLEGADLTEDGEVLGVSAEEQLQLRALRLKNRNLQRQKEILEAKRQRVSALAKVRQMIRDEEQNAQDLEREIALMQREGHLGLQQGPPLQQRAQLEDMREGHLGLQHGPPLQHRPQPEDPRFPQRDHTFQHAAPFQGVNYLDERSPLAPHLQVTPWPANFRAGTYPKYNGSTDPAQYIMSYQVAVASAGGDDATMAKSFIIALDGPALTWFTRLPPLSIDSWRSLRDKFLLNFQGYRPDTDALAELSLCKQLEKETLREYYRKFLTLKSQLPSIDDQIAIHYAISGLRAGVLYNHCIRDPPKNLQELYQLFEKYAKSEELHQRKVESQRKPKDAPQSSCTWTRTPQPDSGRDGRNQQQVHNIANQHPAANPHAARNIHPRAXGNGTRGRGRGRAQPPRRFYCLFHGEDCAHQTKDCPETKATRDRMARAQPADNPRIVAHNYQQPPPPYINAPAPHPPHXTLTNTIRNVAGWDLHKVLVDNGSQADIIFLHAFDRMGISHSLLKPSDNPLYGFGGKGTFPVGKIELPLSFGVAPNARSEQVTFDIMDMVYPYNAIMGRGSINKFEVAIHGLYLCMKIPGPLGAITVYGNQQTARNIERDFVPSQRNATPKQTVIISEDLTSHEEERLLCCLSKNKDVFAWSALDLVGVSRSIIEHSLGIDPSVRPKKQRLRKMSDEKTEAAKAEVHRLLEAKFIEPVAYPTWLSNVVMVQKKSGKWRMCIDFTSLNKACPKDNFPLPRIDKIVDSAAGCEVMSLLDCFSGYHQIYMKEEDKASTSFITPFGTYCFIRMPEGLKNAGSTFSRLTKTVLEGQVGRNIFTYVDDIVVASKNKEDHLADLAETFANMRDARLRLNPEKCVFGVRQGKILGYLVSHRGIEANPTKIQAIVDMSPPQSARDVQRLTVRLAALNRFISRSAERSLPFLKTLRGAKDFAWGPEQAAAFASLKQYLSELAILTSPDSSLPLLLYVAASPHAVSAALVQEQTVEGVVLTPSKCNMTELEKIAYAVVMSSRKLRHYFEAFKVRVTSDRGLDELFRNPEASVRIAKWAAELSGYHISFEPRTAIKSQVLADFVVDWTGPITQPGLSTEKVWTIHCDGAWCHAGAGIATVVTSPAGVKHRYAARLSFALESDRCTNNIAEYEAVILGLRKLRALGVTTCIIKTDSKIVAGQVEKDYAAKDPTLMQYLAAIRSLERQFKGFTLQHVDRAKNEEADALAKAAARGESLPSDVFFHTIGTPAVRSPEGLQITNDSEGHRIVNLIMTEDWRAPITLFLQGYYHPTDVSEAKRLRHRSRDFALIEGQLYKKGGPRALAAKVIRQGFYWPAMICAANRVTRSSEVCQKFSPQSGSPSQYTKLIAHTWPLQRWGLDIVGPLPTAQGNLKFAFVAVEYFTKWIEARVVSTVTSKTAQKFFWQNIVCRFGVPSELTVDNGKQFDSQDFKDFCFSIGTKLAFASVYHPQSNGVVERANGKIFTAVKKMLLDEKKGRWTDLLPETVWALNTTECRATGFTPFRLLYGSEAMTPQEIKHGSPRTIPSAVPDVDEPTSKDLIDGDRVFALQALNKYQAQTKAWRDHTVIPREFSEGDLVLVRTARTESKGKLEPKWEGPFIVKTKASPSAYRLTTPNGEDLEHSWNIDNLRKFFV

SEQ ID NO: 272504 - protein, 1094 aa, Zea mays
  Clone ID: MRT4577_180109C.1.pep
MAPKRANPKADEAAKAALLAARKGKALALTQSTHQEPTEDNVPHTCEDDTFRTCGPEGQSQPPPGFAPLEGADLTEDGEVLGVSTEEQLQLRALRLKNRNLQRQKEILEAKRQRVSALAKVRQMIRDEEQKAQDLEREIALMQREGHLGLQQEPPLQQRAQPEDTREGHLGLQHGPPLQHRAQPENPRFPQRDYTFQHGAPFQGVNYLDERSPLAPHLQVTPWPANFRAGTYPKYNGSTDPTQYIMSYQVAVASAGGDDATMTKSFIIALEGPALTWFTRLPPLSIDSWRSLRDKFLLNFQGYRPDTDALAELSLCKQLEKETLREYYRKFLTLKSQLPSVDDQIAIHYAISGLRAGVLYSHCIRDPPKNLQELYQLFEKYARSKELHQRKVESQRKPKDAPQSSRTWTRTPQPDSGRDGRSQQQVHNIANQQPAADPPRRPEYPQGRGNGTRGRGRGRAQLPRRFYCLFHGEDCAHQTKDCPETKATRDRMVRAQPADNPRIVAHNYQPPPPPYIHAPALHPPHHAYQHHPEVQIVPPPPPPPHQQHQNIPHAPKQEDFADQPYRGVIHMITGGSSTDFDTKRQKRDHYRSINHVAVTGPVVQTKWSHIPLTFDARDVDLRSAPHIDAMVINCSVAGWDLHKVLVDNGSQADIIFLHAFDRMGISHSLLKPSDNLLYGFGGKGTFPIPGPLGAITIYGNQQTARNIERDFVPGQRNVHCLTTQREVPPPASPTDKQHDKAQLQSQDGTKTVPLDQATPKQTVTISEDLTSHEEEKLLCCLAKNKDVFAWSALDLVGVSRSIIEHSLGIDPSVRPKKQRLRKMSDEKTEATKAEVHRLLEAKFIEPVAYPTWLSNVVMVQKKSGKWRMCIDITSINKACPKDNFLLPRIDKIVDSAAGCEVMSLLDCFSGYHQIYMKEEDKASTSFITPFDTYCFIRMPEGLKNAGSTFSRLTKTVLEGQVGRNIFTYVDDIVVASKNKEDHLADLAETFANMRDARLCLNPEKCVFGVRQGKILGYLVSHRGIEANPTKIQAIVDMSPPQSARDVQRLTGRLAALNRFISRSAERSLPFLKTLRGAKDFAWGPEQAAAFASLK

SEQ ID NO: 272505 - protein, 81 aa, Zea mays
  unsure (1)..(81): unsure at all Xaa locations
  Clone ID: MRT4577_18010C.1.pep
RTTPILGQCVKFLKHQCSPTATPYXDALRSSRMCCXRVTIVQAXTTCYXQAIFGLVLQSILQHQTTNGQVAALLAAQIAQQ

SEQ ID NO: 272506 - protein, 88 aa, Zea mays
  Clone ID: MRT4577_180110C.1.pep
QDLSLLCDKTQFKFLSERVLILSNSTLCVYMWRQIRSIKSSSLIFLVIALSSQLYANISLSSCVRSQKPYHVYGLCREHKLPFFTNNT

SEQ ID NO: 272507 - protein, 92 aa, Zea mays
  Clone ID: MRT4577_180111C.1.pep
MFAEGSGPESPTSATEVRAKLADIDLFPENGAGGGGVREASVLRYKEKRRTRLFSKKIRYQVRKVNADCRPRMKGRFVRSPSLLRQALEEET

SEQ ID NO: 272508 - protein, 679 aa, Zea mays
  Clone ID: MRT4577_180112C.1.pep
MAQGHISLSAITGPVVQTKWSHVPLTFDARDVDLRSAPHIDAMVINCSVVGWDLHKVLVDNGSQADIIFLHAFDRMGISHSLLKPSDNPLYGFGGNGTFPVGKIELPLSFGVAPNARSEQVTFDIVDMVYPYNAIMGRGSINKFEAAIHGLYLCMKIPGPLGAITVYGNQQTARNIERNFVPGQRNVHCLTAQREVPASDSPTDKEHDKAQLQSNDGTKTVPLDQATPKQTVTISEDLTSYDEEKLLCYLSKNKDVFAWSALDLVGVSRSIIEHNLGIDPSVRPKKQRLRKMSDEKTKAAKAEVHRLLEAKFIEPVAYPTWLANVVMVQKKSEKWWMCIDFTSLNKACPKDNFPLPRIDKIVDSAAGCEVMSLLDCFSGYHQIYMKEEDKASTSFITPFGTYCFIRIPEGLKNAGSTFSRLTKTVLERQVGRNIFTYVDDIVVASRSKEDHLADLAETFANMRDAPLRLNPEKCVFGVCQGKILGYLVSHRGIEANPTKIQAIINMSPPQSARDVQRLTGRLAAINRFISKSAERSLPFLKTLRGAKDFAWGPEQVAAFASLKQYLSELAVLTSPDSLLPLLLYVAASPHAVSAALVQEQTVQGVIRQCPVYYVSEVLNPSKCNMTELEKIAYAVVMASHKLRHYFEAFKVRVTSDRGLGELFRNPEASVRIAKWVAEL

SEQ ID NO: 272509 - protein, 1868 aa, Zea mays
  Clone ID: MRT4577_180113C.1.pep
MAPKRANPKADEAAKAALLAARKGKALVLTQSTHQEPTEDNVPHTGEDDTFRTCGTEGQSQPPPGFAPLEGADLTEDGEVLGVSTEEQLQLRALRLRNRNLQRQKEILEAKRQRVSALAKVWQMIRDEEQKAQDLEREIALMQREGHLGLQQEPPLQQRTQPEDTREGHLGRQHGPPLQHRAQPENPRFPQNDYVSQHGAPFQGVNYLDERSPLAPHLQVTPWPANFRAGAYPKYNGSTDPAQYIMSYQVAVASAGGDDDATMAKSFIIALEGPALTWFTRLPPLSIDSWRSLRDKFLLNFQGYRLDTDALAELSLCKQLEKETLREYYRKFLTLKSQLPSVDDQIAIHYAISGLRAGVLYSHCIRDPPKSLQELYQLFEKYAKSEELHQRKVESQRKPKDAQQSSRTWTRTPQPDSGRDGRRISPQGRGNGTRGRGRGRAQQPPRRFYCLFHGEDCAHQTKDCPETKATRDRMARAQPADNPRIVAHNYQQPPPPYIHAPAPHPPHHAYQHHQEVQIVPPPPPPPHQQHQNIPHAPKQEDFADQPYRGVIHMITGGSSTDFDTKRQKRDHYRSINHVAVTGPVVQTKWSHIPLTFDARDVDLRSAPHIDAMVINCSVAGWDLHKVLVDNGSQADIIFLHAFDRMGISHSLLKPSDNPLYGFGGKGTFPVGKIELPLSFGVAPNARSEQVTFDIVDMVYPYNAIMGRGSINKFEAAIHGLYLCMKIPGPLGAITIYGNQQTARNIERDFVPGQRNVHCLTTQREVPAPASPTDKQHDKAQLQCQDGTKTVPLDQATPKQTVTISEDLTSLEEEKLLCCLAKNKDVFAWSALDLVGVSRAIIEHSLGIDPSVRPKKQRLRKMSDEKTEAAKAEVHRLLEAKFIEPVAYPTWLSNVVMVQKKSGKWRMCIDFTSLNKACPKDNFPLPRIDKIVDSAARCEVMSLLDCFSGYHQIYMKEEDKASTSFITPFGTYCFVRMPEGLKNAGSTFSRLTKTVLEGQVGRNIFTYVDDIVVASKNKEDHLADLAETFANMRDARLRLNPEKCVFGVRQGKILGYLVSRRGIEANPTKIQAIVDMSPPQSARDVQRLTGRMAALNRFISRSAERSLPFLKTLRGAKDFAWGPEQAAAFASLKQYLSELAILTSPDSSLPLLLYVAASPHAVSAALVQEQTVEGAVRQCPVYYVSEVLTPSKCNMTELEKIAYAVVMSSRKLRHYFEAFKVRVTSDRGLGELFRNPEASVRIAKWAAELSGYHISFEPRTAIKSQVLADFVVDWTGPVTQPDPSTEKVWTIHCDGAWCHAGAGVAAVVTSPAGVKHRYAARLSFALESDKCTNNIAEYEAVILGLRKLRALGVTTCIIKTDSKIVVGQVEKDYAAKDPALMQYLAAIRSLERQFKGFTLQHVDRAKNEEADALAKAAARGEPLPSDVFFHTISTPAVRSPEGLQITNDSEGHRIVNLIMIEDWRAPITLFLQGYYHPTDVSEAKRLRHRSRDFALIEGQLYKKGVSQPMLKCVTETEGMQILREVHSGTCGSHAGPRALAAKVIRQGFYWPAMICAANRVTRSCEACQKFSPRSGNPSQYTKLIAHTWPLQRWGLDIVGPLPTAQGNLKFAFVAVEYFTKWIEARAVSTITSKTAQKFFWQNIVCRFGVPSELTVDNGKQFDSQDFKDFCFSIGTKLAFASVYHPQSNGVVERANGKIFTAVKKMLLDERKGRWTDLLPEAVWALNTTECRATGFTPFRLLYGSEAMTPQEIKHGSPRTAPSAAPDVDEPTSKDLIDGDRVFALQALNKYQAQTKAWRDRAVIPREFSTGDLVLIRTARTESKGKLEPRWEGPFIVKTKASPSAYRLTTPNGEDLEHSWNIDNLRKFFV

SEQ ID NO: 272510 - protein, 125 aa, Zea mays
  unsure (1)..(125): unsure at all Xaa locations
  Clone ID: MRT4577_180114C.1.pep
QCVGHYNEVKSVTIGEYLPPHLVIYIDVPVPQVQRGGQKKGHPDXLGITSAYLQDIENAYKKTFLPEMTEKCEVLQHSAREAQDSEKVVDDIEYLKFDKGPWLKQDNRTLYHLRILVHDKFDVRN

SEQ ID NO: 272511 - protein, 50 aa, Zea mays
  Clone ID: MRT4577_180115C.1.pep
ITLLWVGYWFPHRVQPFFKKLRKVLPNREKSPQLFFLKALVLNFLQKKEF

SEQ ID NO: 272512 - protein, 79 aa, Zea mays
  Clone ID: MRT4577_180116C.1.pep
MMMMMGERAHAPPWQRSPAASGVTDADDASPYALLAALQHYLPSNEVAAYDEDDEEAALAAATAAVDAYACDEFRIRQR

SEQ ID NO: 272513 - protein, 151 aa, Zea mays
  unsure (1)..(151): unsure at all Xaa locations
  Clone ID: MRT4577_180117C.1.pep
MMMMGEGAHAPPWQQSPAASGIMDADEVSPYALLAELKHYLPSNEVMAYDEDDEEALAAAAAVDAYACDEFRMYEFKVRRCSRGRSHDWTDCPYAHPGEKARRRDPRRYHYSGAACPDFRKGGCKRGDACEXGHGVFECWLHPSRYRTQPC

SEQ ID NO: 272514 - protein, 395 aa, Zea mays
  unsure (1)..(395): unsure at all Xaa locations
  Clone ID: MRT4577_180118C.1.pep
MMMMMGERAHAPPWQRSPAASGVTDADDASPYALLAALQHYLPSNEVAAYDEDDEEAALAAATAAVDAYACDEFRMYEFKVRRCSRGRNHDWTACPYAHPGEKARRRDPRRYHYSGAACPDFRKGGCKRGDACEFAHGVFECWLHPSRYRTQPCKDGTGCRRRVCFFAHTPDQLRVPPPRQSSPRGAAAASSPLAXESYDGSPLRRQAFESYLTKSGIVSSPPPTSTLVSPPRSPPSESPPMSPDAAAALRRGSWPGVGSPVNEVLASMRQLRLGGGSPRSAPSGGSFLGGGYPFGSPKSPAGLYSLPSTPIRPSPVTVTTSCGATVLTVERLNLGLIGDEEPVMERVESGRALREKVFERLSKEAAVPSDTAASANVEGAAPAPDVGWVSDLIN

SEQ ID NO: 272515 - protein, 260 aa, Zea mays
  Clone ID: MRT4577_18011C.1.pep
MPPRKRPALPPDEPSPSSKHQPEAQPSEPSKPSPDSEQPIISAAILAQLPPQERLAYKLIFEAGNKGMWMLDIRKKLLMGPNIATKVVRTLVTRRLLKEVSDVRHRSRKIFMATDFQPSAEITGGTWYHDGRLDTDAVTTARRCCQAQVERLGAATVQMIHHGILKDDPRAGYTIDKIRDIIKTMVLDKVLEEVKSTGTGEFRDVRAGTMCYRLVTGAPQGGMMEGIPCGVCPRIDECSPEGIISPSTCVYYKKWLQMDF

SEQ ID NO: 272516 - protein, 89 aa, Zea mays
  unsure (1)..(89): unsure at all Xaa locations
  Clone ID: MRT4577_180120C.1.pep
QXXSSILIFSYSSPPPPSLGLSSQEQSTSQPAFPLLPPWADPPPERTDSLAAGPDTHTHWKKRASRARLGHDQSELGHTRGTDLHTQPR

SEQ ID NO: 272517 - protein, 38 aa, Zea mays
  Clone ID: MRT4577_180121C.1.pep
SRDRRVMHPPEPLCAHRLRDPLSATKKGLGRTGSIPAK

SEQ ID NO: 272518 - protein, 54 aa, Zea mays
  unsure (1)..(54): unsure at all Xaa locations
  Clone ID: MRT4577_180123C.1.pep
IQGRYVSVVNNVFIDGLNRPMHLNSMECGSMDTVTXXGIYCKLILRKKWCFLVL

SEQ ID NO: 272519 - protein, 128 aa, Zea mays
  unsure (1)..(128): unsure at all Xaa locations
  Clone ID: MRT4577_180124C.1.pep
HPPSKQLFDKKHIFDHVXKHHFXYDFXHHFHNKPLPPNPKPKPKPEPKPNPXPYYHSPTPTYDSPTPIYHPPPRHLLDKKPYLDHLHIHHDYHHFLHHFHKKPTPQKPKPEPKPEPIPQTKPEYHPAT

SEQ ID NO: 272520 - protein, 151 aa, Zea mays
  unsure (1)..(151): unsure at all Xaa locations
  Clone ID: MRT4577_180125C.1.pep
AQLYLRETNYGGEIGVSSCAGARRGARYAIGVLFLPTLNLRAWAGAAVCLEVIFELALVFLLNLFRCAICDVCCANLLGLTRFVALRLGFIRVTVACLIRLRDLVLLWCFGLDSCXIGVVLLFHLIGLVLLISLGLSDAEVGCPGLFLLSG

SEQ ID NO: 272521 - protein, 87 aa, Zea mays
  Clone ID: MRT4577_180126C.1.pep
LNTPKTDKLSENGENDRLKFGPSTMQGWPATMADAQSAMPDFENQTTILGVFEGQGRKILAKFCCKKPHGQVLKSQAHSTGDLGTAV

SEQ ID NO: 272522 - protein, 44 aa, Zea mays
  Clone ID: MRT4577_180127C.1.pep
KKDQRQGHYQTIAKLKKPTSTGTYALENALKYKKKRPRIPPKKA

SEQ ID NO: 272523 - protein, 62 aa, Zea mays
  Clone ID: MRT4577_180128C.1.pep
MSLIAGEDFQHILHLLNTNVDGKRTIMFAMDSIKGVGRRFCNIVCKKADIDMNQTAGELTPD

SEQ ID NO: 272524 - protein, 66 aa, Zea mays
  unsure (1)..(66): unsure at all Xaa locations
  Clone ID: MRT4577_180129C.1.pep
WIDEEDRSNFPTITIADIDQTMKYSDIHLHALEGVSSRLSQMEXRTHQLXNSIDELKLTIGNYKLL

SEQ ID NO: 272525 - protein, 295 aa, Zea mays
  unsure (1)..(295): unsure at all Xaa locations
  Clone ID: MRT4577_18012C.1.pep
GPSRPAGLLLLPPFCICATCPALPRAAAAAAANPPLPVPCHRENARRRRRRSPPLPRSLDLTRSRPNPTPIPSSRPSTRGSSPNSPXERLVYKLIFEAGNKGMWMLDIRKKLLMAPNVATKVVRTLVASGLLKEVSDVRHRSRKIFMATDFQPSAEITGGTWYHDGRLDTDAVTTARRCCQAQVQRLGAATAQMIHQGILKEDPRAGYTIDKVRDIIKTMVLDKVLEEVKSTGAGDFSAVRAGTMCYRLVTGAPQGGMMEGIPCGVCPRIHECSPEGIISPSTCVYYKKWLQMDF

SEQ ID NO: 272526 - protein, 46 aa, Zea mays
  Clone ID: MRT4577_180130C.1.pep
FFVFGGPKKKKKKKKKKKKKKKKKKKKKKKKKKKKKKKKKKKKKNK

SEQ ID NO: 272527 - protein, 1463 aa, Zea mays
  unsure (1)..(1463): unsure at all Xaa locations
  Clone ID: MRT4577_180131C.1.pep
MAPKRANPKADEAAKAALLAARKGKALALTQSTHQEPTEDNIPRTCEDDTFRTCGPEGQSQPPPGFAPVEGADLTEDGEVLGVSTEEQLQLRALRLKNRNLQRQKEILEAKRQRVSALAKVRQMIRDEEQKAQDLEREIALMQREGHLGLQQEPPLQQRAQPEDTREGHLGLQHGPPLQHRPQPENPRFPQHDYAFQHGAPFQGVNYLDERSPLAPHLQVTPWPANFRAGAYPKYNGSTDPAQYIMSYQVAVASAGGDDATMAKSFIIALEGLALTWFTRLPPLSIDSWRSLRDKFLLNFQGYRPDTDALAELSLCKQLEKETLREYYRKFLTLKSQLPSVDDQIAIHYAISGLRAGVLYSHCIRDPPKNLQELYQLFEKYAKSEELHQRKVESQRKPKDAPQSSRTWTRTPQPDSGRDGRSQQQVHNIANQQPAAGPPRRQEYPPQGRGNGTRGRGRGRAQPPRRFYCLFHGEDCAHQTKDCPETKATRDRMARAQPADNPRIVAHNYQPPPPPYIHAPAPHPPHHAYQHHQEVQIVPPPPPPPHQQHQNIPHAPKQEDFADQPYRGVIHMITGGSSTDFDTKRQKRDHYRSINHVAVTGPVVQTKWSHIPLTFDARDVDLRSAPHIDAMVINCSVAGWDLHKVLVDNGSQADIIFLHAFDRMGISHSLLKPSDNPLYGFGGKGTFPVGKIELPLSFGVAPNARSEQVTFDIVDMVYPCNAIMGRGSINKFEAAIHGLYLCMKIPGPLGAITIYGNQQTARNIERDFVPGQRNVHCLTAQREVPAPASPADKQHEKAQLQSQDGTRTVPLDQATPKQTVTISEDLTSHEEERLLCCLAKNKDVFAWSALDLVGVSRSIIEHSLGIDPSVRPKKQRLRKMSDEKTEAAKAEVHRLLEAKFIEPVAYPTWLSNVVMVQKKSGKWRMCIDFTSLNKACPKDNFPLPRIDKIVDSAAGCEVISLLDCFSGYHQIYMKEEDKASTSFITPFGTYCFIRMPEGLKNAGSTFSRLTKTVLEGQVGRNIFTYVDDIVVASKNKEDHLADLAETFANMRDARLRLNPEKCVFGVRQGKILGYLVSHRGIEANPTKIQAIVDMSPPQSVRDVQRLTGRLAALNRFISRSAERSLPFLKTLRGAKDFAWGPEQAAAFASLKQYLSELAILTSPDSSLPLLLYVAASPHAVSAALVQEQSVEGAVRQCPVYYVSEVLTPSKCNMTELEKIAYAVVMSSRKLRHYFEAFKVRVTSDRGLGELFRNPEASVRIAKWAAELSGYHISFEPRTAIKSQVLADFVVDWTGPATQLDPSTEKIWTIHCDGAWCHAGAGVAAVVTSPAGVKHRYAARLNFALESDKCTNNIAEYEAVILGLRKLRALGVTTCIIKTDSKIVTGQVEKDYAAKDPALMQYLAAIRSLERQFKGFTLQHVDRAKNEEADALAKAAARGEPLPSDVFXHTIGTPAVRSPEGLQI

SEQ ID NO: 272528 - protein, 159 aa, Zea mays
  Clone ID: MRT4577_180132C.1.pep
RLMPIFSLCCPRREHHFPPWPSSTPVRTSHGPLCSSHGAGSSLVRARAGELTPWPWLLVCFLHVRSLSHLAFCPSQVRPSPPCRGFPRATPPGRHPPQIDLPFCAAHHLPLHALSGRHPSSASRSATPSRCFPWTPELQGRTSVSMADQQTSMVELSRT

SEQ ID NO: 272529 - protein, 1504 aa, Zea mays
  unsure (1)..(1504): unsure at all Xaa locations
  Clone ID: MRT4577_180133C.1.pep
LPSRNLSQVQRQHRPGAIHNXIRSLRDKFLXANFQGYRPDTDALAELSLCKQLEKETLREYYRKFLTLKSQLPSVDDQIAIHYAISGLRAGVLYSHCIRDPPKNLQELYQLFEKYAKSEELHQRKVESQRKPKDAPQSNRTWTRTPQLDSGRDGRSQQQVHNIANQHPAADPPRRQEYPPQGRGNGTRGRGRGRAQPPRRFYCLFHGEDCAHQTKDCPETKATRDRMARAQLADNPRIVAHNYQQPPPPYIHAPAPHPPHHAYQHHQEVQIVPPPPPPPHQQHQNISHAPKQEDFADQPYRGVIHMITGGSSTDFDTKRQKRDHYRSINHVAVTGPVVQTKWSHIPLTFDARDVDLRSAPHIDAMVINCSVAGWDLHKVLVDNGSQADIIFLHAFDRMGISHSLLKPSDNPLYGFGGKGTFPVGKIELPLSFGVAPNARSEQVTFDIVDMVYPYNAIMGRGSINKFEAAIHGLYLCMKIPGPLGAITIYGNQQTARNIERDFVPGQRNVHCLTTQREVPAPASPTDKQHDKAQLQSQDGTKTVPLDQAMPKQTVTVSEDLTSHEEEKLLCCLAKNKDVFAWSALDLVGIYMKEEDKASTSFITPFGTYCFIRMPEGLKNAGSTFSRLTKTVLEGQVGRNIFTYVDDIVVASKNKEDHLADLAETFANMRDARLRLNPEKCVFGVRQGKILGYLVSHRGIEANPTKIQAIVDMSPPQSARDVQRLTGRLAALNRFISRSAERSLPFLKTLRGXKTSXGPEQAAAFASLKQYLSELAILTSPDSSLPLLLYVAASPHAVSAALVQEQTVEGAVRQCPVYYVSEVLTPSKCNMTELEKIAYAVVMSSRKLRHYFEAFKVRVTSDRGLGELFRNPEASVRIAKWAAELFGYHISFEPRTAIKSQVLADFVVDWTGPITQPDPSTEKVWTIHCDGAWCHAGAGVAAVVTSPAGVKHRYAARLSFALESDRCTNNIAEYEAVILGLRKLRALGVTTCIIKTDSKIVAGQVEKDYAAKDPALMQYLAAIRSLERQFKGFTLQHVDRAKNEEADALAKAAARGEPLPSDVFFHTIGTPAVRSPEGLQITNDSEGHRIVNLIMTEDWRAPITLFLQGYYHPTDVSEAKRLRHRSWDFALIEGQLYKKGVSQPMLKCVTETEGMQILREVHSGTCGSHAGPRALAAKVIRQGFYWPAMICAANRVAKSCEACQKFSPRSGSPSQYTKLIAHTWPLQRWGLDIVGPLPTAQGNLKFAFVAVEYFTKWIEARAVSTITSKTAQKFFWQNIVCRFGVPSELTVDNGKQFDSQDFKDFCFSIGTKLAFASVYHPQSNGVVERANGKIFTAVKKMLLDEKKGRWTDLLPEAVWALNTTECRATGFTPFRLLYGSEAMTPQEIKHGSPRTVPSAVPDVDEPTSKDLIDGDRVFALQALNKYQAQTKAWRDHAVIPREFSEGDLVLVRTAWTESRGKLEPKWEGPFIVKTKASPSAYRLTTPNGEDLEHSWNIDNLRKFFV

SEQ ID NO: 272530 - protein, 1074 aa, Zea mays
  Clone ID: MRT4577_180134C.1.pep
MAPKKASSKVDEAAKAALLAAKKGKALALVHTTHQEATEDDALRTCGSEGQPQPPPGFAPPEGTDVTEDGEVIGVSAEEQLQLRALRIKNRNLQKQKEILEAKHQRVSAQAKVRQMIRDEEQKAQELEQEIALMQREGHFGLQHGPPLQQRAQVEDLHFPQRDHAIPHAAVFQGVNYLDERSPLAPHLQVTPWPANFRAGTYLKYNGSTDLAQYIMSYQVAVASSGGVDATMTKSFIIALEGLTLTWYTRLPPLSIDSWRSLRDKFLLNFQVYRPDTDALAELSLCNADFNTKRQKRDHYRSINHVAITGPVVQTKWSHVPLTFDARDVDLRSAPHIDAMVINCSVAGWDLHKVLVDNGSQADIIFLHAFDRMGISHSLLKPSDNPLYGFGGKGTFPVGKIELPLSFGVAPNARSEQVTFDIVDMMYPYNAIMGRGSINKFEAAIHGLYLCMKIPGPLGAITVYDNQQTARNIERDFVPGQRNVHCLTTQHEVPTSASPTDKEHDKAQLQSIDGTKTVPLDQATPKQTVTICEDLTSHDKEKLLCCLSKNKDVFAWSALDLVGVSRSIIEHSLGIDPSKTKAAKAEVHRLLEAKFIEPVAYPTWLANVVMVQKKSGKWRMCIDFTSLNKACPKDNFPLPRIDKIVDSVAGCEVMSLLDCFSGYHQIYMKEEDKASTSFITPFGTYCFIRMPEGLKNAGSTFSRLTKTVLEGQVGKNIFTYVDDIVVASRSKEDHLADLAETFANMRDARLRLNPEKCVFGVRQGKILGYLVSHRGIEANPTKIQAIINMTPPLAALNRFISKSAERSLPFLKTLRGAKDFAWGPEQATAFASLKQYLSELAVLTSPDSSLPLLLYVAASPHAVSAALVQEQTVEGVIRQCPVYYVSEVLTPSKCNMTELEKITYALVMASRKLRHYFEAFKVRVTSDRGLGELFRNPEASVRISKWAAELSGYHITFEPRTAIMSQVLADFVVDWTGPITQPDPSAEKVWTIHCDNAWCHAGAGAAAVITSPAGVKHRYAACLNFALESDRCTNNIAEYEAVILGLRKLRALGVTTCIIRTDSKVVTGQVEKDY

SEQ ID NO: 272531 - protein, 1482 aa, Zea mays
  Clone ID: MRT4577_180135C.1.pep
MAPKRANPKADEAAKAALLAARKGKALALTQSTHQEPTEDNVPRTCEDDTFRTCGPEGQSQPPPGFAPLEGADLTEDGEVLGVSTEEQLQLRALRLKNRNLQRQKEILEAKRQRVSALAKRDYTFQHAAPFQGVNYLDERSPLAPHLQVTPWPANFRAGTYPKYNGSTDPAQYIMSYQVAVASAGGDDATMAKSFIIALEGPALTWFTRLPPLSIDSWRSLRDKFLLNFQGYRPDTDALAELSLCKQLEKETLREYYRKFLTLKSQLPSVDDQIAIHYAISGLRAGVLYSHYCAHQTKDCPETKATRDRMARAQPADNPRIVAHNYQQPPPPYIHAPAPHPPHHAYQHHQEVQIVPPPPPPPHQQHQNIPHAPKQEDFADQPYRGVIHMITGGSSTDFDTKRQKRDHYRSINHVAVTGPVVQTKWSHIPLTFDARDVDLRSAPHIDAMVINCSVAGWDLHKVLVDNDSQADIIFLHAFDRMGISHSLLKPSDNPLYGFGGKGTFPVGKIELPLSFGVAPNARSEQVTFDIVDMVYPYNAIMGRGSINKFEAAIHGLYLCMKIPGPLGVITVFGNQQTARNIERDFVPGQRNVHCLTTQREVPAPASPTDKQHDKAQLQSQDGTKTVPLDQATPKQTVTISEDLTSQEEEKLLCCLAKNKDVFAWSALDLVGVSRSIIEHGLGIDPSVRPKKQRLRKMSDEKTEAAKAEVHRLLEAKFIEPVAYPTWLSNVVMIYMKEEDKASTSFITPFGTYCFIRMPEGLKNAGSTFSRLTKTVLEGQVGRNIFTYVDDIVVASKNKEDHLADLAETFASMRDARLRLNPEKCVFGVRQGKILGYLVSHRGIEANPTKIQAIINMTPPQSARDVQRLTGRLAALNRFISRSAERSLPFLKTLRGAKDFAWGPEQAAAFASLKQYLSELAILTSPDSSLPLLLYVAASPHAVSAALVQEQTVEGAVRQCPVYYVSEVLTPSKCNMTELEKIVYAVVMSSRKLRHYFEAFKVRVTSDRGLGELFRNPEASVRIAKWAAELSGYHISFEPRTAIKSQVLADFVVDWTGPITQPDPSTEKHVDRAKNEEADALAKAAARGKPLPSDVFFHTIDTPAVRSPEGLQITNDSEGHRIVNLIMTEDWRAPITLFLQGYYHPADVSEAKRLRHRSRDFALIEGQLYKKGVSQPMLKCVTEAEGMQILREVHSGTCGSHAGPRALAAKVIRQGFYWPAIICAANRVTRSCEACQKFSPRSGNPSQYTKLIAHTWPLQRWGLDIVGPLPTAQGNLKFAFVAVEYFTKWIEARAVSTITSKTAQKFFWQNIVCRFGVPSELTVDNGRWTDLLPEAVWALNTTECRATGFTPFRLLYGSEAMTPQEIKHGSPRIVPSAVPDVDEPTSKDLIDGERVFALQALNKYQAQTKAWRDHAVIPREFSEGDLVLVRTARTESRGKLEPKWEGPFIVKTKASPSAYRLTMPNGEDLQHSWNIDNLRNFFV

SEQ ID NO: 272532 - protein, 530 aa, Zea mays
  Clone ID: MRT4577_180136C.1.pep
MAPKKASSKADEAANTDFDTKRQKRDHYRSINHVAITGPVVQTKWSHVPLTFDARDVDPRSAPHIDAMVINCSVAGWDLHKVLVDNGSQADIIFLHAFDRMGISHSLLKPSDNSLYGFGGKGTFPVGKIELPLSFGVAPNARSEQVTFDIVDMVYPYNAIMGRGSINKFEAAIHGLYLCMKIPGPLGAITVYGNQQTARNIERDFVPGQRNVHCLTAQCEVPASASPTNKEHDKAQLQSNDGTKTVPLDQATPKQTVTISEDLTSHDEEKLLRCLSKNKDVFAWSALDLVGVSRSIIEHSMGIDPSKKSDKWRMCIDFTSLNKACPKDNFPLPRIDKIVDSVAGCEVMSLLDCFSGYHQIYMKEEDKASTSFITPFDTYCFIRMPEGLKNVGSTFSRLTKTVLEGQISRNIFTYVDDIVVASRSKEDHLADLAETFANMRDARLRLNPEKCIFGVRQGKILGYLVSHRGIEANPTKIQAIINMTPSQSARDVQRLTGRLAALNRFISKSAERSLPFLKTLRDAKDFAWGP

SEQ ID NO: 272533 - protein, 78 aa, Zea mays
  Clone ID: MRT4577_180137C.1.pep
NHGFLLKTCAPYSKRQVFFSIKGTGAPPPKCCWVFSGGPIRGGFVYKQGCPFLPGPLAGGKKWGLKPRANILLDVFNV

SEQ ID NO: 272534 - protein, 783 aa, Zea mays
  Clone ID: MRT4577_180138C.1.pep
MARAQPADNPRIVAHNYQPPPPPYIHAPAPHPPHHAYQHHQEVQIVPPPQPPPHQQHQNIPHAPKQEDFADQPYRGVIHMITGGSSTDFDTKRQKRDHYRSINHVAVTGPVVQTKWSHIPLTFDARDVDLRSAPHIDAMVINCSVAGWDLHKVLVDNGSQADIIFLHAFDRMGISHSLLKPSDNPLYGFGGKGTFPVGKIELPLSFDVAPNARSEQVTFDIVDMVYPYNAIMGRGSINKFEAAIHGLYLCMKIPGPLGAITIYGNQQTARNIERDFVPGQRNVHCLTTQREVPAPASPTDKQHDKAQLQSQDGTKTVPLDQATPKQTVTISEDLTSLEEEKLLCCLAKNKDVFAWSALDLVGVSRSIIEHSLGIDPSVRPKKQRLRKMSDKKTEAAKAEVHRLLEAKFIEPVAYPTWLSNVVMVQKKSEKWRMCIDFTSLNKACPKDNFPLPRIDKIVDSAAGCEVMSLLDCFSGYHQIYMKEEDKASTSFITPFGTYCFVRMPEGLKNAGSTFSRLTKTVLEGQVGRNIFTYVDDIVVASKNKEDHLADLAETFANMRDARLRLNPEKCVFGVRQGKILGYLVSHRGIEANPTKIQAIVDMSPLSAERSLPFLKTLHGAKDFAWGPEQAAAFASLKQYLSELAILTSPDSSLPLLLYVAASPHAVSAALVQEQTVEGAVRQCPVYYVSEVLTPSKCNMTELEKIAYAVVMSSRKLRHYFEAFKVRVTSDRGLGELFRNPEASVRIAKWAAELSGYHISFEPRTAIKSQVLADFVVDWTGPVT

SEQ ID NO: 272535 - protein, 83 aa, Zea mays
  unsure (1)..(83): unsure at all Xaa locations
  Clone ID: MRT4577_180139C.1.pep
LARYASMSNFYDHRLSHDKSIRLAHKTFMTMQTNIDSPYTDALLLYNKSYQVLTCPFLYRDNHXHTLATQIEAVIIGTHAKDI

SEQ ID NO: 272536 - protein, 72 aa, Zea mays
  Clone ID: MRT4577_18013C.1.pep
PQDKNEACYTHANAPEDINLLSFNNCLRMRRASTGGTDDGAQHVLICFLFLVMFETACSILDQRYYFHTLIM

SEQ ID NO: 272537 - protein, 1260 aa, Zea mays
  unsure (1)..(1260): unsure at all Xaa locations
  Clone ID: MRT4577_180140C.1.pep
MAPKRANPKADEAAKAALLAARKGKALALTQSTHQEATEDNVPRTCEDDTFRTCGPEGQSQPPPNFAPLEGADLTEDGEVLGVSAEEQLQLRALRLKNRNLQRQKEILEAKRQRVSALAKVRQMIRDEEQKAQDLEREIALMQREGHLGLQQGPPLQQRAQLEDTREGHLGLQHGPPLQHRAQPEDPRFPQRDYTFQHAAPFQGVNYLDERSPLAPHLQVTPWPANFRAGTYPKSLREKFLLNFQGYRPDTDTLAELSLCKQLEKETLREYYRKFLTLKSQLSSVDDQIAIHYAISGLRAGVLYSHCIRDPPKNLQELYQLFEKYSKSEELHQRKVESQRKPKDAPQSSHTWTRTPQPDSGRDGRSQQQVHNIANQHPAADPPRRQEYPPQGRGNGTCATFFTPPPYIHAPTPHPPHHAYQHHQXVQIVPPPPPPPHQQHQNIPHAPKQEDFADPPYRGVIHMITEGSSTDFDTKRQKRDHYRSINHVVVTGPVVQTKWSHIPLTFDARDVDLRSAPHIDAMVINCSVAGWDLHKVLVDNGSQADIIFLHAFDRMGISHSLLKPSDNPLYGFGGKGTFPVGKIELPLSFGVAPNARSEQVTFDIVDMVYPYNAIMGRGSINKFEAAIHGLYLCMKIPGPLGAITVYGNQQMARNIERDFVPGQRNVHCLTTQREVPAPASPTDKQHDKAQLQSQDGTKTVPLDQATPKQTVTISEDLTSHEEEKLLCCLSKNKDVFAWSALDLVGVSRSIIEHSLGIDPSVRPKKQRLRKMFDEKTEAAKAEVHGLLEAKFIEPVAYPTWLSNVVMVQKKSGKWRMCIDFTSLNKACPKDNFPLPRIDKIVDSAAGCEVMSLLDCFSGYHQIYMKEEDKASTSFITPFGTYCFIRMPEGLKNAGSTFSRLTKTVLEGQVGRNIFTYVDDIVVASKNKEDHLTDLAETFANMRDARLRLNPEKCVFGVRQGKILGYLXSAERSLPFLKTLRGAKDFAWGPEQAAAFASLKXPVGAVSAALVQEQTVDGVVRQCPFYYVSEVLTPSKCNMTELEKIAYGVVMSSRKLRHYFEAFKPRTAIKSQVLADFVVDWTGPITQPDPSTEKVWTIHCDGAWCHAGAGVAAVVTSPAGVKHIYAARLSFALESDRCTNNIAEYEAVILGLCKLRALGVTTCIIKTDSKIVAGQVEKDYATKDPALMQYLAATRSLERQFKGFTLQHVDRAKNEEADALAKAAARGESLPSDVFFHIIGTPAIRSPEGLQITNDSEGHRI

SEQ ID NO: 272538 - protein, 72 aa, Zea mays
  Clone ID: MRT4577_180141C.1.pep
NSLVRVPWLDSIACVLWRLNMCPCSLLYLEASSATIQYSSNACKCITSGRHKALIMIRRIPPYVKKACSHFV

SEQ ID NO: 272539 - protein, 1064 aa, Zea mays
  unsure (1)..(1064): unsure at all Xaa locations
  Clone ID: MRT4577_180142C.1.pep
MGRGSINKFEAAIHGLYLCMKIPGPLGVITVYGNQQTARNIERDFVPGQRNVHCLTAQREVPAPASPTDKQHDKAQLQSNDGTKTVPLDQATPKQTVTISEDLTAHEEEKLLCCLSKNKDVFAWSALDLVGVSRSIIEHNLGIDPSVRPKKQRLRKMSDEKTEAAKAEVHRLLEANFIEPVAYPTWLSNVVMVQKKSGKWRMCIDFTSLNKACPKDNFPLPRIDQIVDNAAGYEVMSLLDCFSGYHQIYMREEDKASTSFITPFGTYCFIRMPEGLKNVGSTFSRLTKTVLNGQVGRNIFTYVDDIIVASKSKEDHLADLAETFANMRDARLRLNPDKCVFGVRQGKILGYLVSHRGIEANPTKIQAIINMTPPQSPREVQRLTGRLAALNRFISKSAERSLPFLKTLRGAKDFVWGPEQAAAFASLKQYLMELAVLTSPDSLLPLLLYVAASPHAVSAALVQEQTVEGVIRQCPVYYVSEVLTPSKCNMTELEKIAYAVVMSSRKLRHYFEAFKVRVTSDRGLGELFRNPEASVRIAKWAAELSGYHITFEPRTAIKSQVLADFVVDWTGPITQPEPSAEKVWTIHCDGAWCHAGAGAAAVITSPVGVKHRYAARLSFALESDRCTNNIAEYEAVILGLRKLRALGVTTCIIRTDSKVVAGQVEKDYAAKDPALMQYLAAIRRLEKQFKGFTLQHVDQAKNEEADALAKAAARGEALPSDVFYHVIGTPAVRSPEGLQITNDSEGQRTVNLIMTEDWRAPITLYLQGFYHPVDSNEAKRLHHRSRDFALIEGQLYKKGVSQPMLKCVTETEGVQILREVHRGTCGSHAGPRALAAKVIRQGFYWPAIIYAANRVVRSCEACQKFSPRSGRPSQFTKLIAHTWPLQRWGLDIVGPLPTAQGNLRFTFVAVEYFTKWIEARAVSTITSKMAQKFFWQNIVCRFGVPSELTVDNGKQFDNQDFKDFCFSIGTKLAFASVYHPQSNGVMERANGKIFTAVKKMLLDDKKGKWPDLLPEVVWALNTTECRATVFTPXFRLLYGSEAMTPQEIKHGSPRTAASAVPDVD

SEQ ID NO: 272540 - protein, 1202 aa, Zea mays
  unsure (1)..(1202): unsure at all Xaa locations
  Clone ID: MRT4577_180143C.1.pep
MAGWDLHKVLVDNGSQADIIFLHAFDRMGISHSLLKPSDNPLYGFSGKGTFPVGKIELPLSFGVAPNARSEQETFDIVDMVYPYNAIMGRGSINKFEAAIHGLYLCMKIPGPSGVITVYGNQQTARNIERDFVPGQRNVHYLTAQRXRSPRPPAQPXQHDKAQLQSNDGTKTVPLDQATPKQTVTISEDLTSHEEEKLLCCLTKNKDVFAWSALDLVGVSRSIIEHSLGIDPSVRPRKQRLRKMSDEKTEAAKAEVHRLLEAKFIEPVAYPTWLSNVVMVQKKSEKWQMCIDFTSLNKACPKDNFPLPRIDKIVDSAAGCEVMSLLDCFSGYHQIYMKEEDKASTSFIIPFGTYCFIRMPEGLKNAGSTFSTLTKTVLEGQVGRNIFTYVDDIVVASRSKEDHLADLAETFTNMRDARLRLNPEKCVFGVRQGKILGYLVSHRSIEANPTKIQAIISMTPPQSARDVQRLTGRLAALNRFISRSVERSLPFLKTLRGAKDFAWGPEQAAAFASLKQYLTELAVLTSPDSSLPMLLYVAASPHAVSAALVQEQTVEGVVRQCPVYYVSEVLTPSKCNMTELEKIAYAVVMSSRKLRHYFEAFKVRVTSDRGLGELFRNPEASVRIAKWAAELSSYHISFVPRTAIKSQVLADFVVDWTGPTTQPDQSVERVWTIHCDGAWYHAGEGAAVVITSPVGVKHRYAARLSFALESDRCTNNIAEYEAVILGLCKLRVLRVTTCIIKTDSKVVAGQVEKDYAAKDPALMQYLAAIRSLERQFKGFTLQHVDRAKNEEADALAKAAARGESLPSDVFFHVISTPAVRSPEGLQITNDSEGRRIVNLIMTEDWRAPITLFLQGYYHPTDISEAKRLRHRSRDFALIAGQLYKKGVSQPMLKCVTETEGIQILREVHSGTCGSHAGPRALAAKRWGLDIDGPLPTAQGNLKFAFVAVEYFTKWIEARAVSTITSKTAQKFFWQNIVCRFGVPSELTVDNGKQFDSQDFKDFCFSIGTKLAFASVYHPQSNGVVERANGKIFTAVKKMLLDEKKGRWTDLLPEAVWALNTTECRATGFTPFRLLYGSEAMTPQEIKHGSPRTVPSAVPDVDEPTSKDLIDGDRVFALQALNKYQAQTKAWRDHAVIPREFSEGDLVLVRTTRTESRGKLEPKWEGPFIVKTKASPSAYRLTTPNGEDLEHSWNIDNLRKFFV

SEQ ID NO: 272541 - protein, 86 aa, Zea mays
  unsure (1)..(86): unsure at all Xaa locations
  Clone ID: MRT4577_180144C.1.pep
PGXTHXVRKKKKKKKKKEGGKKKKKKKKGRNDIKGPKLTNASNANVTKCLYSGHLNLISLRPSFYNCAALVKTVGGGQINGPWRTI

SEQ ID NO: 272542 - protein, 59 aa, Zea mays
  Clone ID: MRT4577_180145C.1.pep
NPLDHRAPQAPTHTQNMETLEDPQAEFPGFSESTPFFFFFFFFFYFFFFFFFFFFFGFR

SEQ ID NO: 272543 - protein, 499 aa, Zea mays
  Clone ID: MRT4577_180146C.1.pep
MPEGLKNAGSTFSRLTRAVLEGQCVFGVRQGKILGYLVSHRGIEANPTKIQAIVDMSPPQSARDVQRLTGRLAALNRFISRSAERSLPFLKTLRGAKDFAWGPEQAAAFASLKQYLSELAILTSPDSSLPLLLYVAASPHAVSAALVQEQSVEGTVRQCPVYYVSEVLTPSKCNMTELEKIAYAVVMSSRKLRHYFEAFKVRVTSDRGLGELFRNPEASVRIAKWAAELSGYHISFEPRTAIKSQVLADFVVDWTGPATQSDPSTEKIWTIHCDGTWCHAGAGVAAVVTSPAGVKHRYAARLNFALESDKCTNNIAEYEAVILGLRKLRALGVTTCIIKTDSKIVAGQVEKDYAAKDPALMQYLAAIRSLERQFKGFTLQHVDRARNEEADALAKAAARGEPLPSDVFFHTIGTPAVRSPEGLQITNDSEGHRIVNLIMTEDWRAPITLFLQGYYHPADVSEAKRLRHRSRDFALIEGQLYKKGVSQPMLKCVTETEGM

SEQ ID NO: 272544 - protein, 86 aa, Zea mays
  unsure (1)..(86): unsure at all Xaa locations
  Clone ID: MRT4577_180147C.1.pep
GSAANLHERLFMXSDFSQMHICQTXERVANVVMRSVPGGKKIRGPYCGFCKSSENIVRINVPYGEKLFYQELFSMGISLKFETEVC

SEQ ID NO: 272545 - protein, 77 aa, Zea mays
  unsure (1)..(77): unsure at all Xaa locations
  Clone ID: MRT4577_180148C.1.pep
QHLISYYIFCHDSSVWAQSECLPQLKPAEVTAIINDLYEPCTLVPTGILIGCTKYIMIQSEPGIIIRXQKVTAGITI

SEQ ID NO: 272546 - protein, 112 aa, Zea mays
  unsure (1)..(112): unsure at all Xaa locations
  Clone ID: MRT4577_180149C.1.pep
PRRIIKGTQRLLRERAPGIDASPSEENTALXNVMNPGPAQAPYGGGAHKLGLCVPGEYAMSDPKVRGVNKMCNANVDKVWGICXKVAKGTWAAGLDTGNSGLESTDWYWRAP

SEQ ID NO: 272547 - protein, 67 aa, Zea mays
  Clone ID: MRT4577_18014C.1.pep
VFWRVSALLGRFPQRSSYYFIPNDGTTICSFTNLAKKLLDGPTDFADKELVLSQLDNTAVFTHSTIE

SEQ ID NO: 272548 - protein, 67 aa, Zea mays
  Clone ID: MRT4577_180150C.1.pep
LGGLMPFGYYYRQLLKQSGPILYKEHSGVNIGFRPMADEPTSFLYASYTYFLIHTSASKCHITLHPY

SEQ ID NO: 272549 - protein, 137 aa, Zea mays
  Clone ID: MRT4577_180151C.1.pep
LECAMGGCAGKVRRDDEEKLDFKGGNVHIITSNEGWDQKIAEANRDGKTVVANFSASWCGPCRVIAPVYAEMSKTYPQLMFLTIDVDDLMDFSSSWDIRATPTFFFLKNGQQIDKLVGANKPELEKKVLAAADASTS

SEQ ID NO: 272550 - protein, 100 aa, Zea mays
  Clone ID: MRT4577_180152C.1.pep
SGSIAFSRGPGIMSTLFEHAYCHSRATHMIIGWCLLLQISLHRSPLAPQYYARVCHFSIFNESAIFGLIAYEHPSLVLPPRDITFMMELCCPCLLFLSSV

SEQ ID NO: 272551 - protein, 137 aa, Zea mays; identical to SEQ ID NO: 272549
  Clone ID: MRT4577_180153C.1.pep

SEQ ID NO: 272552 - protein, 57 aa, Zea mays
  Clone ID: MRT4577_180154C.1.pep
MPSQMEHAMETMMFTFHKFAGDKGYLTKEDLRVLMEKEFPGCLENQQDPLSVDRIMK

SEQ ID NO: 272553 - protein, 85 aa, Zea mays
  Clone ID: MRT4577_180155C.1.pep
MAKAVLNVFQQCLTESKSSGIINGGKVESELCNRWRAQRLDELAVLTRRLRLLVEYVEQVGHSSLDSGGFGNVLPTNCPFVVYVA

SEQ ID NO: 272554 - protein, 81 aa, Zea mays
  Clone ID: MRT4577_180156C.1.pep
VDRSSIHALWFDVNSNRVQHMCTVHRSHLDVILHAAVVKVVRWSKLSIVMISDVVCSILSDLKTNMMSPLSYIVLLRCESR

SEQ ID NO: 272555 - protein, 113 aa, Zea mays
  unsure (1)..(113): unsure at all Xaa locations
  Clone ID: MRT4577_180157C.1.pep
LRVRYDCETKGIPCSYIPRRSRPGRVGLYYSRWCMHSEESSIGNGGGWGATACEGLLIHHEDMGMLYEIAKLGIRHGIGGCVXRIETRTSPYHQATDAGAPTTVSALMVRINT

SEQ ID NO: 272556 - protein, 55 aa, Zea mays
  Clone ID: MRT4577_180158C.1.pep
AYHTYTILLNPYAMTFFMGDLGVRRYERRTELTLTDRPMWVYGSIWDTYDWGTDY

SEQ ID NO: 272557 - protein, 442 aa, Zea mays
  Clone ID: MRT4577_180159C.1.pep
MAKPPRAPRPKLQTPRAPARRFVGLGGLGVAAAAYVGVDYLRHLSPAWHGRLQPALWAVLALAAAARAPFYRHWSAELRAALPFLGSIAFMLAAFLCEAISVRFVSAVMGLHWHRTAAPLPDTGQWLLLSLNEKLPQSVVDLLRAHVITLHHYLMLFIMLGFSVLFDCIKAPGLGIATRYMFTMAIGRVLRTITFIATILPSARPWCAVARYQIPQHPHPWAQKYYVPYASDSNAIRRVITQDMAYAAVQAYPDEYKPDWGRMSFLVDILRPTPGEGPSWYHLLKKASGGCNDLMYSGHMLVAVLTAMAWTEAYGGWISVAIWLLVLHSAQREVRERHHYSVDCVAAIYVGVLLWRMTGFIWSARDLARARRLAKLEEVQSRLVHAAKDSDIDEIRGLLKEVELSGQERQGFSQRAILAFAAGTIIFTLSCVLIAFTATSDG

SEQ ID NO: 272558 - protein, 98 aa, Zea mays
  Clone ID: MRT4577_18015C.1.pep
RKRRKRMLLWLLVALSSIGSFLFGCFLHISPSRALSSSPRAPPSPARLRSPACSGNSRFRTSVSLHRRSKDQDKLEFQIIVRVNKFSLTNLIRSSQVQ

SEQ ID NO: 272559 - protein, 640 aa, Zea mays
  Clone ID: MRT4577_180160C.1.pep
MASARDEHLDGIRALMAAHSPPLHGLVVPSEDAHQSEYVSEQDKRREFISGFTGSAGLALITMKEALLWTDGRYFLQATQQLSDRWKLMRMGEDPPVEAWIADNLADEAVIGINPWCISVDSAQRYENSFSKRHQTLFQLSSDLVDEVWKDRPLVEPRPVIVHPVEFAGRSVPEKMKELREKLVHEKATAIIITALDEVAWLYNIRGSDVDYSPVVHSYAIVTLHSAFFYVDKRKVTVEVQKYMSGNGIEIREYETVQSDASLLASGKLQSSVHVEKYMDEVESSKIWIDSGSCCLALYSKLSPHQVLTLQSPIALPKAVKNPTELDGLRKAHIRDGAAVVQYLAWLDNQMQENYGASGYFSEIKGSHKNEHLATKLTEVSVSDKLEGFRATKENFKGLSFPTISSVGPNAAVIHYKPEASTCSEMDADKIYLCDSGAQYLDGTTDITRTVHFGKPSAHEKSCYTAVLKGHIALDIAVFPNGTTGHALDILSRAPLWREGLDYRHGTGHGIGSYLNVHEGPHLISFRPSARNVPLQASMTVTDEPGYYEDGAFGIRLENVLICKDANAKFNFGDKGYLAFEHITWAPYQTKLIDTGLLTPVEIDWVNTYHSDCRKILEPHLNEQEKQWLMKATEPVAARG

SEQ ID NO: 272560 - protein, 84 aa, Zea mays
  Clone ID: MRT4577_180161C.1.pep
LKFRLAQGRRLGHALDILSRAPLWREGLDYRHGTGHGIGSYLNVHEGPHLISFRPSARNVPLQASMTVTDEPGYYEDGALCIRL

SEQ ID NO: 272561 - protein, 82 aa, Zea mays
  Clone ID: MRT4577_180162C.1.pep
AFSSTLHATERQAHLLRGIHIRLAASTGKIIEYAEEQDSLFSTLIFAAKVECLAGCYFFLPLGYVRVLRNGGFLYGTVGYNN

SEQ ID NO: 272562 - protein, 626 aa, Zea mays
  unsure (1)..(626): unsure at all Xaa locations
  Clone ID: MRT4577_180163C.1.pep
MSGVVLAPETTTGVASPQRANPKRTDDTSTLAKDLLGISLVPEITVQSVPDATSPPSIDQEVPSVFHPVPFRFSLDPPSDPASGDHGEDNHLGMPQDDNAPVPASRVDIPREIAVVPVPAGGQDTQLEQFREMQAKLDEEAGRLAQLRQNIEQEWAGQALAGGAPHRAQDVQRRIVDDARARLPPAFSGVGQNLAAAAMLLRAMPEPSTTEGLRIQGELKGLLENAAVRRAESSASRRQGCPSEHRSTSSQLMREASVRTWHARDGTPAAPDRLGDEHHHSDRRARLNEKAWLEHLPPAQISDWDDLVKAFVGXTSKEAIEAIFRKDKQPQGIQKEDAPEASGQRGSKXKAKKKAQAKRDAIDADLVAAAERRNPRKPPGEVNTFDKMLKESCPYHRGPVKHTLEECDMLRRYFVKAGPSAEGGKYQGNNKKGGDKDEEFPEVCDCFMIYGGQVATPVYLDWSDKPITFDQGDHPDYVPSPGRYPLVVDPVIGNARLTKVLMDGGSSLNIIYAETLGLLGIDLSTIQAGAAPFHGIVPGTYHAVLGRPCYAKFMAIPNYTYLKLKMSGPKGIITVGSMYRHAYECDMECVEYAEAIAESEALIADLECLSKEAPDAKHHADNFEPV

SEQ ID NO: 272563 - protein, 61 aa, Zea mays
  Clone ID: MRT4577_180164C.1.pep
GDSEAFRRIIPFVSHSLSVGGFEASLFHLLILGGHVTGVRVFSLPLYILSSVLRYHCFPFF

SEQ ID NO: 272564 - protein, 860 aa, Zea mays
  Clone ID: MRT4577_180165C.1.pep
MAAISLPAGGGIDDVFRTWRKSNIRVYPVTFPADGGGGGAGMAKQEAAPRRLSRYHMRSPWDRLTAVSTYGPLGSEEDDEPDSGWDFSRLDNPSAMRDFMTACDYCLSDCSDSSHSFGDEDCGPSRECFHVDLGGLDEGNHLGTPEDGDPPRPAPRVDILRELDVVPVPAGGQDTQLEQIRVMQARLDEEAGQLMQLRQNIGQEWAGRAPTGEARHLAQDIQHRIADDARARLPPASSGVGQNLAAAAILLRAMPEPSTTEGRRIQGELKNLLEDVAVRRAESSASRRQGYPPEHRAATSRFMREASVHTGRTRNTTPAAPGRLGNEHRRDRRAHLDEKVRRGYHPRRGGRYDSGEDRSPSPEPPGPRAFNRAIRRAPFPTRFRTPTNITKYSGESKPELWLADYRLACQLGGTDDDNLIIRNLPLFLYDAARAWLEHLPPAQISNWDDLVKAFADNFQGTYVSPGNSWDLRSCRQQSEESLRDYIRRFSKQRTELPNITDSDVISAFLASTTCRDLVSKLGRKTPTRASELMDIATKFASAAEHRNPRKPPGGANLFDKMLKESCPYHQGPVKHTLEECVMLWRYFHSAGPPAEGGRAHNNDNKEGHKAEEFPEVHDCFMIYGGHVANALARHRKQERREVCSVKVAAPVYLDWSDKPITFDQGDHPDRVSSPGRYPLIVDPVIGNIRLTKLLMDGGSSLNIIYAETLRLLQIDLSSIQAGAAPFHGIIPGKRETLTFEVVGFRGTYHAILGRPCYTKFMVVPNYTYLKLKMSGPNGVITVGSTYRHAYECDVECVEYAKALAESDALITDLESLSKEVPDAKRHAGNFEPAETVKSVPLDPCNDASKQIRIGSKLDPK

SEQ ID NO: 272565 - protein, 116 aa, Zea mays
  unsure (1)..(116): unsure at all Xaa locations
  Clone ID: MRT4577_180166C.1.pep
MAGKGDGPALGIALGTTYSCVGVWQHDRVQIIVNDHGXRTTPSWGAFTDSERLIRDAANNQVAMNPITTAFGATRXLICRRFSAASVQSDISLPPFKVISGPGEKPLFGVQHRGEE

SEQ ID NO: 272566 - protein, 507 aa, Zea mays
  unsure (1)..(507): unsure at all Xaa locations
  Clone ID: MRT4577_180167C.1.pep
PARRRQNRRRLPRVVEEQHSSSPRPLPRRRRRRRGNQGQAGGSVSSAVERVDGASAPTGGASGIDLAFETKTSAVSPQHADSEQTDDASTLAKGLLDVTLVLETTEQSVPDATSSPPVDQEXLDPPSGFALADALVEASPNPLGFRVRSPWDRLTDVSTYGPSRSEEDDEPDSCWDFSGVGDPSAMRDFMTACDYCLSDCSDGSRSLGDEDCGPSRECFHVDLGGPSEGNHLEPSTTEGRRIQGKLKNLLEGAAVRRAESSAFRRQGYPSEHRAATSRFMREASVHTGRTRTRNEHHHRDCRAHLDERVHRGYHPRRGGRYDSGEDRSPSPEPPGPQAFSRAIRRAPFPTRFRPPATITKYSGETRPELWLADYRLACQLGGTDDDNLIICNLPLFLSDTARAWLEHLPPGQISNWDDLVQAFVGNFQGTYVRPGNSWDLRSCRQQPGESLRDYIRRFSKQRTELPNITDSDVIGAFLAGTTCRDLVSKLGHRFFLHFDPFSEKNHV

SEQ ID NO: 272567 - protein, 40 aa, Zea mays
  Clone ID: MRT4577_180168C.1.pep
QWNVADQEGDRGTTCSFRTGRACSGCLPAKRLSHWGAQRI

SEQ ID NO: 272568 - protein, 906 aa, Zea mays
  unsure (1)..(906): unsure at all Xaa locations
  Clone ID: MRT4577_180169C.1.pep
MGSLQQPLRPGTVLRFGTLEFMSFDGSYDMILLPPPRDYDNGDRQPARRRRNRRRLPRVVEEQHSGSLRSLPRQRRRRRGRQGQAGGRASSAVERIDAPTEGTPDVDLAFKTEASAVPPRHADPEQEDDAGALAESLQDVALEPEMTVQPVPEVTTSLLVDQKVPTNSHLASFRLGLNPPNDLVLAGALIEASATPLRFRMRSPWDRLTDVSTYGPSGSEEDDDPSIGWDFSGLGNPSAVRDFMTACDYCLSDCSDGSRSLGDESCGPSRECFHIELGDPSEGNHLGMPEDASVYTGRTRNTAPAAPGHLGNEHHRRDRRAHLDETVRRGYXQAWDALRQRGGSESLARXPPGPQAFSRAIRRAPFPTRFRPPTTITKYSGETRPELWLADYRLAXPTGWNGRRQPHHPXTSPCSXLRHCSRLVGAPAXPGQISNWDDLVQAFAGNFQGTYVRPGNSWDLRSCRQQPGESLRDYIRRFSKQRTELPNITDSDVIGAFLAGTTCCDLVSKLGRKTPTGASELMDIATKFASGQEAVEAIFRKDKQPQGRPSEEAPEASAPRGAKKKGKKKSQSKRDAADADLVAAAEYKNPRKPPGGANLFDKMLKEPCPYHQGPAGPPAEGGRARDDDKNEDHPAGEFPEVRDCFMIYGGHAANTSARHRKQERREVCSVKVAAPVYLDWSDKPITFDQADHPDHVPSPGKYPLVVDPVVGDVRLTKVLMDGGSCLNIIYVETLKLLRVDLSSVRAGAAPFHGIIPGKRVQPLGRLDLPVCFGTPSNFRRETLTFEVVGFRGTYHAVLGRPCYAKFMAVPNYTYLKLKMPGPNGVITVGPTYKHAFECDVECVEYAEALAESEALIADLENLSKEVPDVKRHAGNFEPAETVKAVPLDPSGDTTKQIRIGSGLDPK

SEQ ID NO: 272569 - protein, 87 aa, Zea mays
  unsure (1)..(87): unsure at all Xaa locations
  Clone ID: MRT4577_18016C.1.pep
MARTQSAVAVAVVAAVLLLATGDTTXEAAISCWQASSAIAXSLNHXRGTGFARAFFCXSGVRNQKGDVSTAVHRGPDWNCLKNAIRG

SEQ ID NO: 272570 - protein, 1769 aa, Zea mays
  Clone ID: MRT4577_180170C.1.pep
MAPKRANPKADEAAKAALLAARKGKALALTQSTHQEPTEDNVPRTCEDDTFRTCGPEGQSQPPPGFAPLEGAELTEDGEVLGVSAEEQLQLRALRLKNRNLQRQKEILEAKRQRVSALAKVRQMIRDEEQKAQDLEREITLMQREGHLGLQQEPPLHQRAQPEDTREGHLGLQHGPPMQHRAQPENPRFPQRDYTFQHGAPFQGVNYLDERSPLAPHLQVTPWPANFRAGTYPKYNGSTDPAQYIMSYQVAVASAGGDDATMAKSFIIALEGPALTWFTRLPPLSIDSWRSLRDKFLLNFQGYRPNTDALAELSLCKQLEKETLREYYRKFLTLKSQLPSVDDQIAIHYAISGLCAGVLYSHCIRDPPKNLQELYQLFEKYAKSEELHQRKVESQRKPKDAPQSSRTWTRTPQPDSGRDGRSQQQVHNIANQQPAADPPRRQEYPPQGRGNGTRGRGRGRAQPPRRFYCLFHGEDCAHQTKDCPETKATRDRMARAQPADNPRIIAHSYQPPPPPYIHAPAPHPPHHAYQHHQEVQIVPPPPPPPHQQHQNIPHAPKQEDFADQPYRGVIHMITGGSSTDFDTKRQKRDHYRIINHVAVTGPVVQTKWSHIPLTFDARDVDLRSAPHIDAMVINCSVAGWDLHKVLVDNGSQADIIFLHAFDRMGISHSLLKPSDNPLYGFGGKGTFPVGKIELPLSFGVAPNARSEQVTFDIVDMVYPYNAIMGRGSINKFEAAIHGLYLCMKIPGPLGAITVYGNQQTARNIERDFVPGQRNVHCLTTQCEVPAPASPTDKQHDKAQLQSQDGTKTVPLDQATPKQTVTISEDLTSHEEEKLLCCLSKNKDVFAWSALDLVGVSRSIIEHSLGIDPSVRPKKQRLRKMFDEKTEAAKAEVHRLLEAKFIEPVAYPTWLSNVVMIYMKEEDKASTSFITPFGTYCFIRMPEGLKNAGSTFSRLTKTVLEGQVGRNIFTYVDDIVVASKNKEDHLADLAETFANMRDARLRLNPEKCVFGVRQGKILGYLVSHRGIEANPTKIQAIVDMSPPQSARDVQRLTGRLAALNRFISRSAERSLPFLKTLRRAKDFAWGPEQAAAFASLKQYLSELAILTSPDSSLPLLLYVAASPHAVSAALVQEQTVEGAVRQCPVYYVSEVLSPSKCNMTEPEKIAYAVVMSSRKLRHYFEAFKVRVTSDRGLGELFRNPEASVRIAMWAAELSGYHISFEPRTAIKSQVLADFVVDWTGPITQPDPSTEKVWTIHCDGAWCHAGAGAAAVVTSPAGVKHRYAARLSFALESDKCTNNIAEYEAVILGLRKLRALGVTTCIIKTDSKIVVGQVEKDYAAKDPALMQYLAAIRSLERQFKGFTLQHVDRAKNEEADALAKAAARVESLPSDVFFHIIGTPAVRSPEGLQITNDSEGHRIVNLIMTEDWRAPITLFLQGYYHPTDISEAKRLRHRSRDFALIEGQLYKKGVSQPMLKCVTETEGMQILREVHSGTCGSHAGPRALAAKGNLKFAFVAVEYFTKWIEARAVSTITSKTAQKFFWQNIVCRFGVPSELTVDNDKQFDSQDFKDFCFSIGTKLAFASVYHPQSNGVVERAIGKIFTAVKKMLLDEKKGRWTDLLPEAVWALNTTECRATGFTPFRLLYGSEAMTPQEIKHGSPRTVLSAVPDVDEPTSKDLIDGDWVFALQALNKYQAQTKAWRDHAVIPREFSEGDLVLVRTARTESRGKLEPKWEGPFIVKTKASPSAYRLTTPNGEDLEHSWNIDNLRKFFV

SEQ ID NO: 272571 - protein, 1663 aa, Zea mays
  unsure (1)..(1663): unsure at all Xaa locations
  Clone ID: MRT4577_180171C.1.pep
MMVEVLKMFEIYLHQITPEALIRVGVFIWAMRSQGVEPDARCFCNIHEFSYQTKSTGKEQYHNNFGCYNFVPQSKANYPVPTFRKKWPCSWMKEWFYVKNDLNQREDVKGVIQHPILSRFGIRRPSIAIGNEVQVCQAAFNIVCTYIGTGDLVQEHIAYKGGLVYLKYTFRFRNQFDEPNYDWLDAIEAISDEVLGAYSKAKDEAMMVALGARGKKRLNRVFDVIGFVYPDYCYPVQKQGRRRKVVASVSASTPKTKKIKVLTRRPRRIETVDVSKFIERVETTTYHCRPGQRARARKGGRKVLEQPKMKVTAPPKLPATTGTPRKRRMASALEDVLESVKTPPPSSSVEASDRKTKDVTEMIVASTSVHVEAGPSETASEDLVKESLLEKPSTSAPEATSSSYLNFIVRHASGKQLSAEQIVETKHYAKELKYPQGSLVYGGDNDDDFLYCLPDSKEINVCREMMDHMGYPKLELALSVMTKDQLADSLAYNSLKEEVSASPDPRARPPPRPRKVVSASPDPRAQPQPRPRKVVSASPDPTTRPQPRPRKVVSVSPDPRARPQPRPRKVVSASPDPRARSQPRPREESRPRPTPASASGGVSASPDLGLGPITPQGMGSLQQPLQPGTLLRFGSLEFMSLDGSYDMVLLPPQRDSDNNGRQLARRRELDDVFPPWRKSSIRDTQLEQIREMQAKLDEEAGQLVQLRQNIEQEWAGRALAGEARHQAQDVQHRITDDARVRLPPASSGVGQNLAAAVILLRAMPEPSTTEGRRIQGELKNLLEDAAVQRAESSASRRQGSPPEHRAATSQFMREALVHTGRTRDATPAAPGRLGNEHHRRDRRARLDEKVHRGYHPRRGGRYDSGEDRSPSPEPPGPQAFSRAIRRAPFPTRFRSPTTITKYSGETRPELWLADYRLACQLGGTDNDNLIICNLPLFLSDAARAWQEHLPPAQISNWDDLVKAFAGNFQGTRRSRPSSERTSSLRDASRKTSLRRPPSVARRRRQKRSQAKRDAADADLIAAAEHRNLRKPPGGANLFDKMLKESCPYHQGPVKHTLEECVMLRCYFHKAGPPVEGGKGQDNDKKEGDKAEEFPKVHGCFMIYGGRVANASARHRKQERQEVCSVKVAAPVYLDWSTSPITFDQGDHXPDCVPSLGKYPLVVDPVIGNVRXLTKVLMDGGSSLNIIYAETLGLLEIDLSTIRAGAAPFQGIIPGKHVLLLGQLDLPICFGTPSNFRRETLTFXRPCYAKFMVVPNYTYLRLKMSGPNGVITVGSTYRHVYECDVECVEYAEALAESEALIADLACLSKEVPDAKRHTGNFEPTRGVLVDFLRANAEVFVWSPSDMPGIPRDVAEHSLDIRAGARPVKQPLRRFDEEKRRAIGEEIHKLMAAWFIKEVFHPEWLANPVLVKKKGGKWRMCVDYTGLKKACPKVPYPLPRIDQIVDSTAGCETLSFLDAYSGYHQIKMKESDQLATSFITPFSMYCYTTMPFGLRNAGATYQMCMNHVFREHIGRTVEAYVDDIVVKTRKASDLLSDLETTFKCLRVKGVKLNPEKCVFGVPRGMLLGFIVSERGIEANPEKIAIVTNMGPIKDLKGVQRVMGCLAALSRFISRLGERGLPLYRLLRKTKRFSWTPEAEEALGNLKALLTSAPILVPXTAGEALL

SEQ ID NO: 272572 - protein, 1672 aa, Zea mays
  unsure (1)..(1672): unsure at all Xaa locations
  Clone ID: MRT4577_180172C.1.pep
MAPKRANPKADEAAKAALLAARKGKALALTQSTHQEPTEDNVPHTGEDDTFRTCGAEGQSQPPPGFAPLGGADLTEDGEVLGVSTEEQLQLRALRLKNRNLQRQKEILEAKRQRVSALAKVRQMIRDEEQKAQDLEREITLMQREGHLGLQQEPPLQQRAQPEDTREGHLGLQHGPPLHHRARPESPRFPQRDYTFQHGAPFQGVNYLDERSPLAPHLQVTPWPANFRAGTYPKYNGSTDPAQYIMSYQVAVASAGGDDATMAKSFIIALEGPALSWFTRLPPLSIDSWRSLRDKFLLNFQGYRPDTDALAELSLCKQLEKETLREYYRKFLTLKSQLPSVDDQIAIHYAISGLRAGVLYSHCIRDPPKSLQELYKLFEKYAKSEELHQRKVESQRKPKDAPQSSRTWTRTPQPDSGRDGRSQQQVHNIANQQPAADPPRRQEYPPQGRGNGTRGRGRGRAQPPCRFYCLFHGEDCAHQTKDCPKTKATRDRMARAQPADNPRIVAHNYQPPPPPYIHAPAPHPPHHAYQHHQEVQIVPPPPPPPHQQHQNIPHAPKQEDFDDQPYRGVIHMITGGSSTDFDTKRQKRDHYRSINHVAVTGPVVQTKWSHIPLTFDARDVDLHSAPHIDAMVINCSVAGWDLHKVLVDNGSQADIIFLHAFDRMGISHSLLKPSDNPLYGFGGKGTFPVGKIELPLSFGVAPNARSEQVTFDIVDMVYPYNAIMGRGSINKFEAAIHGLYLCMKILGPLGAITIYGNQQTTRNIERDFVPGQRNAHCLTTQREVPAPASPTDKQHDKAQLQSQDGTKTVPLDQATPKQTVTISEDLTSLEEEKLLCCLSKNKDVFAWSALDLVGVSRSIIEHSLGIDPSVRPKKQRLRKMSDEKTEAAKAEVHRLLEAKFIEPVAYPTWLSNVVMIYMKEEDKASTSFITPFGTYCFVRMPEGLKNARSTFSRLTKTVLEGQVGRNIFTYVDDIVVASKNKEDHLADLAETFANMRDARLRLNPEKCVFGVRQGKILGYLVSHRGIEANPTKIQAIIGMSPPQSARDVQRLTGRLAAPNRFISRSAERSLPFLKTLRGAKDFAWGPEQAAAFASLKQYLSELAILTSPDSSLPLLLYVAASPHAVSAALVQEQTVEGAVRQCPVYYVSEVLTPSKCNMTELEKIAYAVVMSSRKLRHYFEAFKVRVTSDRGLGELFRNPEASVRIAKWAAELSGYHISFEPRTAIKSQVLADFVVDWTGPVTQPDPSTEKVWTIHCDGAWCHAGAGVAAVVTSPAGVKHRYAARLNFTLESDKCTNNIAEYEAVILGLRKLRALGVTTCIIKTDSKIVAGQVEKDYAAKDPALMQYLAAIRSLERQFKGFTLQHVDRAKNEEADALAKAAARGEPLPSDVFFHTIGTPAVRSPEGLQITNDSEGHRIVNLIMTEDWRAPITLFLQGYYHPTDVSEAKRLRHRSRDFTLIEGQLYKKGILREVHSGTCGSHAGPRALAAKVIRQGFYWPAMICAANRVTRSCEACQKFSPRSGNPSQYTKLIAHTWPLQRWGLDIVGPLPTAQGNLKFAFVAVEYFTKWIEARAVSTITSKTAQKFFWQNIVCRFGVPSELTVDNGKQFDSQDFKDFCFSIGTKLAFASVYHPQSNGVVERANGKIFTAVKKMLLDXKKGRWTDLLPEAVWAL

SEQ ID NO: 272573 - protein, 617 aa, Zea mays
  unsure (1)..(617): unsure at all Xaa locations
  Clone ID: MRT4577_180173C.1.pep
MLGVVPAPETTTGVASQQRANPKRTDDASTLAKDLLGVSLVPEITVHSVHDATSPPSINQEVPSVFHPVPFRFSFDPPSDPASVSAFTRAYPNLPGYHMWSTWDQLTVVSTYGPAGSEEEDDPDFSWDFSGLSDPSAMRDFMSACDYCLSGCSDDGHSLGDEGYDPSRECFHIDQGDHDEDNHLGMPEDDDAPVPASRVEIPRELAVVRVPAGGQDTQLEQLREMHAKLDEEAGRLVQVRQNIEQEWLGGTDDDNLIIRNLPLFLSNTARAWLEHLPPAQISDWDDLVKAFAGNFQATKLAYGQEAVEATFRKDKQPQGRQKEDAPEASAPRGTKKKTRKKAQAKSDAVDMDLVAAAEHRNPRKPPGGANMFDKMIKESCPYHRGPVKHTLEECDMLRRYFNKAGPSAEGGKDQGNNKKGGDKEEEFPEVAAPVYLDWSDKPITFDQGDHPDCVPSPERYPLVVDPVIGNARLTKVLMDGDSSLNIIYAETLGLLGVDLSMIRAGVAPFHGIVLGRRVLPLGQLDLLVCFRTPSNFRKETLTFEVVGFRGTYHAVLGRPCYAKFMAVPNYTYLKLKMSGPNETITIGSTYRHAYECXVECVEYAEALANSEALIAGL

SEQ ID NO: 272574 - protein, 1656 aa, Zea mays
  unsure (1)..(1656): unsure at all Xaa locations
  Clone ID: MRT4577_180174C.1.pep
MAPKRANPKADEAAKAALLAARKGKALALTQSTHQEATEDNVPRTCEDDTFRTCGPEGQSQPPPNFAPLEGADLTEDGEVLGVSAEEQLQLRALRLKNRNLQRQKEILEAKRQRVSALAKVRQMIRDEEQKAQDLEREIALMQREGHLGLQQGPPLQQRAQLEDTREGHLGLQHGPPLQHRAQPEDPRFPQRDYTFQHAAPFQGVNYLDERSPLAPHLQVTPWPANFRAGTYPKYNGSTDPAQYIMSYQIAIHYAISGLRAGVLYSHCIRDPPKNLQELYQLFEKYSKSEELHQRKVESQRKPKDAPQSSHTWTRTPQPDSGRDGRSQQQVHNIANQHPAADPPRRQEYPPQGRGNGTCGRGRGRAQPPRRFYCLFHGEDCAHQTKDCPETKATRDRMARAQPADNPRIVTHNYQQPPPPPPPYIHAPTPHPPHHAYQHHQEVQIVPPPPPPPHQQHQNIPHAPKQEDFADPPYRGVIHMITEGSSTDFDTKRQKRDHYRSINHVVVTGPVVQTKWSHIPLTFDARDVDLRSAPHIDAMVINCSVAGWDLHKVLVDNGSQADIIFLHAFDRMGISHSLLKPSDNPLYGFGGKGTFPVGKIELPLSFGVAPNARSEQVTFDIVDMVYPYNAIMGRGSINKFEAAIHGLYLCMKIPGPLGAITVYGNQQMARNIERDFVPGQRNVHCLTTQREVPAPASPTDKQHDKAQLQSQDGTKTVPLDQATPKQTVTISEDLTSHEEEKLLCCLSKNKDVFAWSALDLVGVSRSIIEHSLGIDPSVRPKKQRLRKMFDEKTEAAKAEVHGLLEAKFIEPVAYPTWLSNVVMVQKKSGKWRMCIDFTSLNKACPKDNFPLPRIDKIVDSAAGCEVMSLLDCFSGYHQIYMKEEDKASTSFITPFGTYCFIRMPEGLKNAGSTFSRLTKTVLEGQVGRNIFTYVDDIVVASKNKEDHLTDLAETFANMRDARLRLNPEKCVFGVRQGKILGYLVXERSLPFLKTLRGAKXRLGTGASSGLRLTKIVPVGAVSAALVQXSRQLTXVRQCPFYYVSEVLTPSKCNMTELEKIAYGVVMSSRKLRHYFEAFKPRTAIKSQVLADFVVDWTGPITQPDPSTEKVWTIHCDGAWCHAGAGVAAVVTSPAGVKHIYAARLSFALESDRCTNNIAEYEAVILGLCKLRALGVTTCIIKTDSKIVAGQVEKDYATKDPALMQYLAATRSLERQFKGFTLQHVDRAKNEEADALAKAAARGESLPSDVFFHIIGTPAIRSPEGLQITNDSEGHRIVNLIMTEDWRAPITLFLQGYYHPTDVSEAKCLRHRSRDFALIEGQLYKKGVSQPMLKCVTKTEGMQILREVHSGTCGSHAGPRALAAKVIRQGFYWPAMICAANRVSRSCKACQKISPRLGSPSQYTKLIAHTWPLQRWGLDIVGPLPTAQGNLKFAFVAVEYFTKWIEARAVSTITSKTAQKFFLQNIVCHFGVPSELTVDNSKQFDNQDFKDFCFSIGTKLAFASVYHPQSNGVVERANGKIFTVIKKMLLDEKKGRWTDLLPEAVWALNTTECRATGFTPFRLLYGSEAMTPQEIKHGSPRTVLSXPRRGRXTSKDLIDGDRVFALQALNKYQAQTKAWRDHTVIPREFSEGDLVLVRTARTXAKGKLEPKWEGPFI

SEQ ID NO: 272575 - protein, 885 aa, Zea mays
  unsure (1)..(885): unsure at all Xaa locations
  Clone ID: MRT4577_180175C.1.pep
MPFGLRNAGATYQRCMNHVFGEHIGRTVEAYVDDIVVKTRKASDLLSDLEVAFQCLKAKGVKLNPEKCVFGVPRGMLLGFIVSERGIEANPEKIAAITSMGPIKDLKGVQRVMGCLAALRRFISRLGERGLPLYRLLRKTECFAWTPEAEEALGNLKALLTKTPNLVPPADGEALLVYVAATTQVASAAIVVERQEEGHALPVQRLVYFVSEVLSETKIRYPQVQKLLYAVILTRQKLRHYFESHPVTVVSSFPLGEIIQCREASGRIAKWAVEIMGETISFAPRKAIKSQVLADFVAEWVDTQLPTAPIQPELWTMFFDGSLMKTGAGAGLLFISPLGKHLRYVLRLHFPASNNVAEYEALVNGLRIAIELGVRRLDARGDSQLVIDQVMKNSHFRDPKMEAYCDEVRRLEDKFYGLELNHIARRYYETADELAKIASGQTTVPPDVFSQDLHRPSVKIDDTPEPEAPSVRPEVPSAQPEALSARPEAPSVQPEVPSAPEGEALHVEEEQSGATPDRNWQTPYLXISAKESYPXTKPRLGGIRSEQAVAFFTNIIHRFGVPNSIITDNGTQFTGRKFLDFCEDHHIRVDWAAVAHPMSNGQVERANGMILQGLKPRIYNDLNKFGKRWMKELPSVVWSLRTTPSRATGFTPLFLVYGAEAILPTDLEYGSPRTRAYSDQSNQVSREDSLDQLEEAWDKALLHSACSSAEAILRAFSTESVTGPHGRAKVRVSGKADRAEGLPRLRDTDTSLITFREKQLSLAQTPLLPTKSPDTRNKRKRDAALQRSEGVCSGLGGRRRHTLQGNLILQARVFTLEGGCSTLGIDDTFSEARPSLGRRRGPGTSPGIRPEQAARPVTPGASANHLPRAPARSEASAGQLQRRSH

SEQ ID NO: 272576 - protein, 143 aa, Zea mays
  Clone ID: MRT4577_180176C.1.pep
MPPKASKKDAEPAERPILGRFSSHLKIGIVGLPNVGKSTFFNIVTKLSIPAENFPFCTIEPNEARVHVPDERFDYLCQLFKPKSEVAAYLEINDIAGLVRGASAGEGLGNAFLSHIRAVDGIFHVLRAFEDTEITHIDDTVDP

SEQ ID NO: 272577 - protein, 1302 aa, Zea mays
  unsure (1)..(1302): unsure at all Xaa locations
  Clone ID: MRT4577_180177C.1.pep
MAPKRANPKADEAAKAALLAARKGKALVLTQSTHQEPIEDNVPHTGEDDTFRTCGTEGQSQPPPGFAPLEGADLTEDGEVLGVSTEEQLQLRALRLRNRNLQRQKEILEAKRQRVSALAKVRQMIRDEEQKAQDLEREIALMQREGHLGLQQEPPLQQRTQPEDTREGHLGRQHGPPLQHRAQPENPRFPQHDYISQHGAPFQGVNYLDERSPLAPHLQVMPWPANFRAGAYPKYNGSTDPAQYIMSYQVAVASAGGDDATMAKSFIIALEGPALTWFTRLPPLSIDSWRSLRDKFLLNFQGYRPDTDALAELSLCKQLEKETLREYYRKFLTLKSQLPSVDDQIAIHYAINGLRAGVLYSHCIRDPPKSLQELYQLFEKYAKSEELHQRKVESQRKPKDAPQSSRTWTRTPQPDFGRDGRSQQQVHNIVNQQPAVDPPRRQEYPPQGRGNGTRGRGRGRAQQPPRXYCLLHGEDCAHQTKDCPETKATRDRMARAQPADNPRIVAHNYQPPPPPYIHAPAPHPPHXTLTNTIRNKRQKRDHYRSINHVAVTGPVVQTKWSHIPLTFDARDVDLRSAPHIDAMVINCSVAGWDLHKVLVDNGSQADIIFLHAFDRMGISHSLLKPSDNPLYGFGGKGTFPVGKIELPLSFGVAPNARSEQVTFDIVDMVYPYNAIMGRGSINKFEAAIHGLYLCMKIPGPLGAITVYGNQQTARNIERDFVPDEKTEAAKAEVHRLLEAKFIEPVAYPTWLSNVVMVQKKSGKWRMCIDFTSLNKACPKDNFPLPRIDKIVDSAAGCEVMSLLDCFSGYHQIYMKEEDKASTSFITPFGTYCFVRMPEGLKNAGSTFSRLTKTVLEGQVGRNIFTYVDDIVVASKNKEDHLADLAETFANMRDARLRLNPEKCVFGVRQGKILGYLVSRRGIEANPTKIQAIVDMSPPQSARDVQRLTGRMAALNRFISRSAERSLPFLKTLRGAKDFAWGPEQAAAFASLKQYLSELAILTSPDPSLPLLLYVAASPHAVSAALVQEQTVEGAVRQCPVYYVSEVLTPSKCNMTELEKIAYAVVMSSRKLRHYFEAFKVRVTSDRGLGELFRNPEASVRIAKWAAELSGYHISFEPRTAIKSQVLADFVVDWTGPVTQPDPSTEKVWTIHCDGAWCHAGAGVAAVVTSPAGVKHRYAARLSFALESDKCTNNIAEYEAVILGLRKLRALGVTTCIIKTDSKIVAGQVEKDYAAKDPALMQYLAAIRSLERQFKGFTLQHVDRAKNEEADALAKAAARGEPLPSDVFFHTIGTPAVRSPEGL

SEQ ID NO: 272578 - protein, 1191 aa, Zea mays
  unsure (1)..(1191): unsure at all Xaa locations
  Clone ID: MRT4577_180178C.1.pep
MAEEQHLSLSRRLPRHRRRRRGNRGQAGGGTSLAVERVDDAGAPAGDTSGVDLAPKTTTSVVSLQHANPKRTDDASTLAEDLLALASLDDEGCGPSRECFHIDLGGLDEGNHLGMPEDDDPPRPAPRVDILWELAVVPVPAGGQDTQLEQIREMQAKLDEEAGQLVQLWQNIGQEWASRALVGEARHQAQDVQCRITDDARARLPPASSGPGESLRDYIRRFSKQRTELPNITDSDVIGAFLAGTTCRDLVSKLGRKTPTRAGELMDIATKFASGQEAVKAIFWKGKQPQGRQQEDVPEASTQRGTKKKAKKKSQAKRDAADTDLIAAAEHRNLRKPPGGANLFDKMLKESCLYHQGRAPGGGRGHDNDKKKGNKAEEFPEVHDCFMIYSGQVANASAQHRKQERREVCSVKVAAPVYLDWSDKAITFDQGDHPDRVPSPGKYPLVVDPVIGHVRLTKVLIDGGSSLNIIYAETLGLLQIDLSTIRAGACVEYVEALAEFEALIAVLECLSREVPDAKRHAGNFEPTKAVKSVPLDPSSDASKQEAVLVDFLRTNAEVFAWSPSDMPGIPRDVAEHSLDIRAGARPVKQPLRRFDEEKCRAIGEEIHKLMAAGFIKEVFHPEWLANPVLVKKKGGKWRMCVDCTGLNKACPKVPYPLPRIDQIVDSTAGCETLSFLDAYSGYHQIKMKESDQLATSFITPFGMYCYITMPFGLRNAGATYQRCMNHVFGEHIGRTVEAYVDDIVVKTRKASDLLSDLETTFKCLRAKGVKLNPEKCVFGVPRGMLLGFIVSERGIEANPEKIAAITNMGPIKDLKGVQRVMGCLAALSRFILRLGERGLPLYRLLRKTERFSWTPEAEEALGNLKALLTSAPILKAIKYQVLADFVAEWVDTQLPTASIQPELWTMYFDGSLMKTGAGAGLLFISPLGKHLRYVLRLHFLASNNVAEYEALVNRLRIAIELGVWRLDARGDSQLVIDQVMKNSNCRDRKMEAYCDEVRCLEDKFYGLELNHVARRYNKTADELAKIASGRTTVPPDVFSRDIHQPSVKTNDTPEPGEASAQPEEALAQPEAPSAAEGEALRVEGEQDGVTPNRNWQTPYLXISTEESSPSTKPKLGDWRGAPSRSSYWVMKGSSTTSTPQAFSNDAYPSLKDMSYCKRYTRGLVVTTQHLEPSLGTPSDKVSTGRPRWPTP

SEQ ID NO: 272579 - protein, 63 aa, Zea mays
  unsure (1)..(63): unsure at all Xaa locations
  Clone ID: MRT4577_180179C.1.pep
LEVQRSDTISIVKAKIQDKKGIPPDQQRMILAGXQMQHDCPLSVYNMQKESTLLLVLRLPGGQ

SEQ ID NO: 272580 - protein, 53 aa, Zea mays
  Clone ID: MRT4577_18017C.1.pep
ECDSVAILNIRDEICMYCIDTVGDDIDATVKYRMCHLSRWIRGISYSELQCKY

SEQ ID NO: 272581 - protein, 141 aa, Zea mays
  unsure (1)..(141): unsure at all Xaa locations
  Clone ID: MRT4577_180180C.1.pep
LCVERLELFMWLLNQSKINHKVSLVEKGVIANPICDLCLQADEACYHIFLWFHYAASFWHRVGVQIPPWTCSCCPTTXQSALVHLCCWAIWEHRNNVVFNQTLPSVQRIRRQCLEEARFWRCRIRGDSSEIDAWCNLTQRV

SEQ ID NO: 272582 - protein, 339 aa, Zea mays
  unsure (1)..(339): unsure at all Xaa locations
  Clone ID: MRT4577_180181C.1.pep
RQCSPHLRRRHLPHLRARRTIAAAPRLRPTGRRGPHRGRRGPRRLNRRTVTAARPAPQEPQSPEAERDTGGQAPACVRTSQSAANNTRRGTEGPRPRARDRADAXEGHLGLQQEPPSQQRAQPEDTREGHLGLQHGPPLQHRAQSENPRFPQRDYTFQHGAPFQGVNYLDERSPLAPHLQVTPWPANFRAGAYPKYNGSTDPAQYIMSYQVAVASAGGDDATMAKSFIIALEGPALTWFTRLPPLSIDSWRSLRDKFLLNFQGYRPDTDALAELSLCKQLEKETLREYYRKFLTLKSQLPSVDDQIAIHYAISXASGRRPLQPLYQRSTQESPGAISAL

SEQ ID NO: 272583 - protein, 328 aa, Zea mays
  Clone ID: MRT4577_180182C.1.pep
MGCLAALSRFISRLGERGLPMYRLLRKTERFTWTPEAEEALGNLKALLTSAPILVPPAAGEGAGAGLLFISPLGKHLRYVLRLHFPASNNVAEYESLVNELRIAIELGVRCLDARGDSQLVIDQVIKNSHCRDSKMEAYYDEVRCLEDKFYGLELNHVARRYNETANELAKIVSGQTTVPPDVFSRDLHQPSVKTDDTPEPEKASALPEAPSAVEGEALRVEEERNEKAPGGFTHLLVAIDKFSKWIERFGVPNSIIIDNGTQFTGRKFLDFCEDHHIGVDWAAVAHPMTNGQVECANGMILQGLKPRIYNDLNKFDRRWMKELPSVF

SEQ ID NO: 272584 - protein, 70 aa, Zea mays
  Clone ID: MRT4577_180183C.1.pep
MRRKAGKETGGEGKEPAKEKEVRGEGKQNDTQKEKAEANVCPQFFKVFFPEQSTERLVRIFTPTHPPVLV

SEQ ID NO: 272585 - protein, 1696 aa, Zea mays
  Clone ID: MRT4577_180184C.1.pep
MAPKRANRKADEAAKAALLAARKGKALALTQSTHQEPTEDNIPHTCEDDTFRTCGPEGQSQPPPGFAPLEGADLTEDGENRNLQRQKEILEAKRQRVSALAKVRQMIRDEEQKAQDLEREIALMQREGHLGLQQEPPLQQRAQPEDTREGHLGLQHGPPLQHQAQPENPRFPQHDYAFQHGAPFQGVNYLDERSPLAPHLQVTPWPANFRAGAYPKYNGSTDPAQYIMSYQVAVASAGGDDATMAKSFIIALEGSALTWFTRLPPLSIDSWRSLRDKFLLNFQGYRPDTDALAELSLCKQLEKETLREYYRKFLTLKSQLPSVDDQITIHYAISGLRAGVLYSHCIRDPPKNLQELYQLFEKYAKSEELHQRKEYPPQGRGNGTRGRGRGRAQPPRRFYCLFHGEDCAHQTKDCPETKATRDRMAQAQPADNPRIVAHNYQPPPPPYIHAPAPHPPHHAYQHHQEVQIVPPPPPPPHQQHQNIPHAPKQEDFADQPYRGVIHMITGGSSTDFDTKRQKRDHYRSINHVAVTGPVVQTKWSHIPLTFDARDIDLRSAPHIDAMVINCSVAGWDLHKVLVDNGSQADIIFLHAFDRMGISHSLLKPSDNPLYGFGGKGTFPVGKIELPLSFGVAPNARSEQVTFDIVDMVYPYNAIMGRGSINKFEAAIHGLYLCMKIPGPLGAITIYGNQQTARNIERDFVSGQRNAHCLTTQREVPAPASPTDKQHDKAQLQSQDGTKTVPLDQATPKQTVTISEDLTSHEEEKLLCCLAKNKDVFAWSALDLVGVSRSIIEHSLGIDPSVRPKKQRLRKMSDEKTEAAKAEVHRLLEAKFIEPVAYPTWLSNVVMVQKKSGKWRMCIDFTSLNKACPKDNFPLPRIDKIVDSAAGCEVMSLLDCFSGYHQIYMKEEDKASTSFITPFGTYCFIRMPEGLKNAGSTFSRLTKTVLEGQVGRNIFTYVDDIVVASKNKEDHLADLAETFANMRDARLRLNPEKCVFGVRQGKILGYLVSHRGIEANPTKIQAIVDMSPPQSARDVQRLTGRLAALNRFISRSAERSLPFLKTLRGAKDFAWGPEQAAAFASLKQYLSELAILTSPESSLPLLLYVAASPHAVSAALVQEQTVEGAVRQCPVYYVSEVLTPSKCNMTELEKIAYAVVMSSRKLRHYFEAFKVRVNSDRGLGELFRNPEASVRIAKWAAELSGYHISFEPRTAIKSQVLADFIVDWTGPITQPDPSTEKVWTIHCDGAWCHAGAGVAAVVTSPAGVKHRYAARLSFALESDKCTNNIEEYEAVILGLRKLRALGVTTCIIKTDSKIVAGQIEKDYAAKDPALMQYLAAIRSLERQFKGFTLQHVDRAKNEEADSLAKAAARGEPLPSDVFFHTIGTPAGYYHPTDVSEAKRLKHRSRDFALIEGQLYKKGVSQPMLKCVTETEGMQILREVHSGMCGSHAGPRALAAKVIRQGFYWPAMICAANRVSRVPSELTVDNGKQFDSQDFKDFCFSIGTKLAFASVYHPQSNGVVERANGKIFTAVKKMLLDEKKGRWTDLLPEAVWALNTTECRATGFTPFRLLYGSEAMTPQEIKHGSPRTVPSAVPDVDEPTSKDLIDGDRVFALQALNKYQAQTKAWRDHAVIPREFSEGDLILVRTARTESRGKLEPKWEGPFIVKTKASPSAYRLTTPNGEDLEHSWNIDNLRKFFV

SEQ ID NO: 272586 - protein, 101 aa, Zea mays
  Clone ID: MRT4577_180185C.1.pep
RITMYIFLDVEVAVVASTASSQNVIRTILRQNITCSIQSTKVESNYNTIIIPLKINFFTKSLKINLKSMSFLSLLLRVDVGPVHAQGRVVDERQRDAQRVE

SEQ ID NO: 272587 - protein, 1800 aa, Zea mays
  Clone ID: MRT4577_180186C.1.pep
MAPKRANRKADEAAKAALLAARKGKALALTQSTHQEPTEDNIPHTCEDDTFRTCGPEGQSQPPPGFAPLEGADLTEDGENRNLQRQKEILEAKRQRVSALAKVRQMIRDEEQKAQDLEREIALMQREGHLGLQQEPPLQQRAQPEDTREGHLGLQHGPPLQHQAQPENPRFPQHDYAFQHGAPFQGVNYLDERSPLAPHLQVTPWPANFRAGAYPKYNGSTDPAQYIMSYQVAVASAGGDDATMAKSFIIALEGSALTWFTRLPPLSIDSWRSLRDKFLLNFQGYRPDTDALAELSLCKQLEKETLREYYRKFLTLKSQLPSVDDQITIHYAISGLRAGVLYSHCIRDPPKNLQELYQLFEKYAKSEELHQRKEYPPQGRGNGTRGRGRGRAQPPRRFYCLFHGEDCAHQTKDCPETKATRDRMAQAQPADNPRIVAHNYQPPPPPYIHAPAPHPPHHAYQHHQEVQIVPPPPPPPHQQHQNIPHAPKQEDFADQPYRGVIHMITGGSSTDFDTKRQKRDHYRSINHVAVTGPVVQTKWSHIPLTFDARDIDLRSAPHIDAMVINCSVAGWDLHKVLVDNGSQADIIFLHAFDRMGISHSLLKPSDNPLYGFGGKGTFPVGKIELPLSFGVAPNARSEQVTFDIVDMVYPYNAIMGRGSINKFEAAIHGLYLCMKIPGPLGAITIYGNQQTARNIERDFVSGQRNAHCLTTQREVPAPASPTDKQHDKAQLQSQDGTKTVPLDQATPKQTVTISEDLTSHEEEKLLCCLAKNKDVFAWSALDLVGVSRSIIEHSLGIDPSVRPKKQRLRKMSDEKTEAAKAEVHRLLEAKFIEPVAYPTWLSNVVMVQKKSGKWRMCIDFTSLNKACPKDNFPLPRIDKIVDSAAGCEVMSLLDCFSGYHQIYMKEEDKASTSFITPFGTYCFIRMPEGLKNAGSTFSRLTKTVLEGQVGRNIFTYVDDIVVASKNKEDHLADLAETFANMRDARLRLNPEKCVFGVRQGKILGYLVSHRGIEANPTKIQAIVDMSPPQSARDVQRLTGRLAALNRFISRSAERSLPFLKTLRGAKDFAWGPEQAAAFASLKQYLSELAILTSPESSLPLLLYVAASPHAVSAALVQEQTVEGAVRQCPVYYVSEVLTPSKCNMTELEKIAYAVVMSSRKLRHYFEAFKVRVNSDRGLGELFRNPEASVRIAKWAAELSGYHISFEPRTAIKSQVLADFIVDWTGPITQPDPSTEKVWTIHCDGAWCHAGAGVAAVVTSPAGVKHRYAARLSFALESDKCTNNIEEYEAVILGLRKLRALGVTTCIIKTDSKIVAGQIEKDYAAKDPALMQYLAAIRSLERQFKGFTLQHVDRAKNEEADSLAKAAARGEPLPSDVFFHTIGTPAVSSPEGLQITNDSEGHRIGYYHPTDVSEAKRLKHRSRDFALIEGQLYKKGVSQPMLKCVTETEGMQILREVHSGMCGSHAGPRALAAKVIRQGFYWPAMICAANRVSRSCEACQKFSPRSGNPSQYTKLIAHTWPLQRWGLDIVGPLPTAQGNLKFAFVAVEYFTKWIEARAVSTITSKTAQKFFWQNIVCRFRVPSELTVDNGKQFDSQDFKDFCFSIGTKLAFASVYHPQSNGVVERANGKIFTAVKKMLLDEKKGRWTDLLPEAVWALNTTECRATGFTPFRLLYGSEAMTPQEIKHGSPRTVPSAVPDVDEPTSKDLIDGDRVFALQALNKYQAQTKAWRDHAVIPREFSEGDLILVRTARTESRGKLEPKWEGPFIVKTKASPSAYRLTTPNGEDLEHSWNIDNLRKFFV

SEQ ID NO: 272588 - protein, 1607 aa, Zea mays
  unsure (1)..(1607): unsure at all Xaa locations
  Clone ID: MRT4577_180187C.1.pep
MAPKRANPKADEAAKAALLAARKGKALALTQSTHQEPTEDNIPRTYEDDTFRTCGPEGQSQPPPGFAPLEGADLTEDGEVLGVSTEEQLQLRALRLKNRNLQRQKEILEAKRQRVSALAKVRQMIRDEEKKAQDLEREIALMQREGHLGPQQEPPLQQRAQPEDMREGHRGLQHGPPLQHRAQPENPCFPQHDYAFQHGAPFQGVNYLDERSPLAPHLQVTPWPANFRAGAYPKYNGSTDPAQYIMSYQVAVASVGGDDATMAKSFIIALEGPALTWFTRLPPLSIDSWRSLRDKFLLNFQGYRPDTDALAELSLCKQLEKETLREYYRKFLTLKSQLPSVDDQIAIHYAISGLRAGVLYSHCIRDPPKNLQELYQLFEKYAKSEELHQRKVESQRKPKDAPQSSRTWTRTPQPDSGGSSTDFDTKRQKRDHYRSINHVAVTGPVVQTKWSHIPLTFDARDVDLRSAPHIDAMVINCSVAGWDLHKVLVDNGSQADIIFLHAFDRMGISHSLLKPSDNPLYGFGGKGTFPVGKIELPLFFGVAPNARSEQVTFDIVDMVYPYNAIMGRGSINKFEAAIHGLYLCMKIPGPLGAITIYGNQQTARNIERDFVPGQRNVHCLTTQHEAPAPASPTDKQLEKAQLQSQDGTKTVPLDQATPKQTVTISEDLTSHEEEKLLCCLAKNKDVFAWSALDLVGVSRSIIEHSLGIDPSVRPKKQRLRKMSDEKTEAAKAEVHRLLEAKFIEPVAYPTWLSNVVMVQKKSGKWRMCIDFTSLNKACPKDNFPLPRIDKIVDSAAGCEVMSLLDCFSGYHQIYMKEEDKASTSFITPFGTYCFIRMPEGLKNAGSTFSRLTKTVLEGQVGRNIFTYMDDIVVASKNKEDHLADLAETFANMRDARLRLNPEKCVFGVRQGKILGYLVSHRGIEANPTKIQAIVDMSPPQSVRDVQRLTGRLAALNRFISRSAERSLPFLKTLRGAKDFAWGPEQAAAFASLKQYLSELAILLSPDSSLPLLLYVAASPHAVSAALVQEQTVEGTVRQCPIYYVSEVLTPSKCNMTELEKIAYAVVMSSRKLRHYFEAFKVRVTSDRGLGELFRNPEASVRIAKWAAELSGYHISFEPRTAIKSQVLADFVVDWTGPVAQPDPSTERVWTIHCDGAWCHAGAGVAAVVTSPTGVKHRYATRLNFALESDKCTNNIAEYEAVILGLRKLRALGVTTCIIKTDSKIVAGQVEKDYAAKDPALMQYLVAIRSLERQFKGFTLQHVDRAKNEEADALAKAAARGEPLPSDVFFHTIGTPAVRSPEGLQITNDSEGHRIVNLIMTEDWRAPITLFLQGYYHPTDVSEAKRLRHRSRDFALIEGQLYKKGVSQSMLKCVTETEGMQILREVHSGTCGSHAGPRALAAKVIRQGFYWPAMICAANRVTRSCEACQKFSPRSGNPSQYTKLIAHTWPLQRWGLDIVGPLPTAQGNLKFAIVAVEYFTKWIEARAVSTITSKTAQKFFWQNIVCRFGVPSELTVDNGKQFDNQDFKDFCFSIGTKLAFASVYHPQSNGVMERANGKIFTAVKKMLLDXKKGRWTDLLPEAVWALNTTECRATGFTPFRLLYGSEAM

SEQ ID NO: 272589 - protein, 1632 aa, Zea mays
  unsure (1)..(1632): unsure at all Xaa locations
  Clone ID: MRT4577_180188C.1.pep
MAPKKANSKADEAAKAALLAAKKGKALALTHSTHQEATKDDVLHTCEDDALRTCGLEGQSQPPPGFAPPEGANLTEDSEVLGVSAEEQLQLCALRLKNRNLQRQKEILEAKRQRVSALAKVRQMIRDEEQKAQDLEWEITLMQRAGHLGLQHGPPLQQRAQLEGIREGHLGPQHGPPLQQRAQMEDPHFPQRDHAFPHAVPFQGVNYLDERSPLAPHLQVTPWPANFRAGTYPKYNDSMDPAQYIMSYQVAVASSGGDDATMAKSFIIALEGLALTWFTRLPLLSIDSWRSLRDKFLLNFQGYRPDTDALAELSLCKQLEKETLREYYRKFLTLKSQLPSVDDQIAINYAMSGLRAGVLYSHYIRDPPKNLQELYQLFEKYAKSEELHQRKVESQRKPKDAPQSSHTWTRTPQPDSGRDGRNQQQVHNIANQHPAADALAARSIPPGPRKQNSRDYPETKATKDRMARAQPADNPRVVAHTYQQPPPPYIHAPAPHPPHHAYQHHQEVQIVPPPPPPPHQQHQNIPHPHAPKQEDFADQPYRGVIHMITGGSSTDFDTKRQKRDHYRSINHVTITGPVVQMKWSHVPLTFDARDVDLRSAPHIDAMVINCSVAGWDLHKVLVDNGSQADIIFLHAFDRMGISHNLLKPSDNPLYGFGGKGTFPVGKIELPLSFGVAPNARSEQITFDIVDMVYPYNAIMGRGSINKFEAAIHGLYLCMKIPGPLGAIAVYGNQQTARNIERDFVPRQRNVHCLTAQREVPASVNPTDKEHDKAQLQSNDGTKTVPLDQATPKQTVTISEDLTSHEEEKLLCCLSKNKDVFAWSALDLVGVSRSIIEHSLGIDPSVRPKKQRLRKMSDEKTEATKAEVHRLLEAKFIESVAYPTWLSNVVMVQKKSGKWRMCIDFTSLNKACPKDNFPLPRIDKIVDSAAGCEVMSLLDCFSGYHQIYMKEEDKASTSFITPFGTYCFIRMPEGLKNAGSTFSRLTKTVLEGKVGRNIFTYVDDIVVASKSKEDHLADLAETFANMRDARLRLNPEKCVFGVRQGKILGYLVSHRGIEANPTKILAIINMTPPQSTRDVQRLTGRLAALNRFISKSAERSLPFLKTLRGAKDFAWGPEQVAAFASLKQYLSELAVLTSPDSSLPLLLYVAASPQAVSAALVQEQTVEGVIRQCPVYYVSEVLTRSKCNMTELEKIAYGVVMSSRKLRHYFEAFKVRVTSDRGLGELFRNPEASVRIAKWAAELSGYHINFEPRTAIKSQVLADFVVDWTRPITQPDPSAEKVWTIHCDGVWCHAGAGAAAVITSPAEVKHRYAARLSFALESDRCTNNIAEYEVVILGLRKLRALGVTTCIIRTDSKVVAGQVEKDYAAKDPALMQYLAAIRSLERQFKGFTLQHVDRAKNEEADALAKAAARGESLPSDVFYHVIGTPAVRSPEGLQITNDSEGHRIVNLIMTEDWRAPITLFLQGYYHPTDINEAKRLKHRSRDFALIEGQLYKKGVSQPMLKCVTETEGIQILREVHSGTCGSHAGPRALAAKVIRQGFYWPAMICAANRVARVPSELTVDNGKQFDSQDFKDFCFSIGTKLAFTSVYHPQSNGVEERANGKIFTAVKKMLLDXKKGKWADLLSEAVWAL

SEQ ID NO: 272590 - protein, 71 aa, Zea mays
  Clone ID: MRT4577_180189C.1.pep
MGERRVRFAADVVDNEGATRPVRFFPPAPSSSAATCGDAARSEDPMMPANREALYRGMLRDRSTHRVTCSY

SEQ ID NO: 272591 - protein, 74 aa, Zea mays
  Clone ID: MRT4577_18018C.1.pep
RKSCYYIPVRQRRGQKRLLKPPAKRLPVGHPLLGVPSLLTFSGLDPKLPLHPSRRKKKMFNGWVNSFNCCSYSN

SEQ ID NO: 272592 - protein, 1622 aa, Zea mays
  Clone ID: MRT4577_180190C.1.pep
MAPKKASSKADEAAKAALLAARKGKALALTHSTHQEAAEDNALRTCGPEGQPQLPPGFAPPEGADLTEDGERQKEILEAKRQRVSALAKVRQMIRDEEQKAQDLEREIALMQREGHLGLQHGPPLQHRAQVKDTREGHRGLQHGPPLQQRAQAEDPHFPQRDYAFAAVAPFQGVNYLDERSPLAPHLQVTPWPANFRAGTYPKYNGSTDPAQYIMSYQVAPLSIDSWRSLRDKFLLNFQGYRPDTDALAELSLCKQLEKETLREYYRKFLTLKSQLPSVDDQIAIHYAISGLRAGVLYSHCIRDPPKNLQELYQLFEKYAKSEELHQRKQQQNIPHPHAPKQEDFADQPYRGVIHMITGGSSVDFDTKRQKRDHYRSINHVAITGLVVQTKWSHVPLTFDARDVDLCSAPHIDAMVINCSVAGWDLHKVLVDNGSQADIIFLHAFDRMGISHNLLKPSDNPLYGFGGKGTFPIGKIELPLSFGVAPNARSEQITFDIVDMVYPYNAIMGRGSINKFEAVIHGLYLCMKIPGPLGAISVYGNQQTARNIERDFVPGQRNVHCLTAQREVPAPASSTEKQHKAQLQSNDGTKIVPLDLATPKQTVTISEDLTSHDEEKLLCCLSKNKDVFAWSALDLVGVSRSIIEHSLGIDPSKKSGKWRMCIDFTSLNKACPKDNFPLPRIDKIVDSAAGCEVMSLLDCFSGYHQIYMKEEDKASTSFITPFGTYCFIRMPEGLKNAGSTFSWLTKTVLEGQVGRNVFTYVDDIVVASRNKEDHLADLAETFANMRDARLCLNPDKCVFGVRQGKILGYLVSHRGIEANPTKIQAIINMAPPQSAREVQRLTGRLAALNRFISKSAERSLPFLKTLRGAKDFAWGPEQAAAFASLKQYMMELAVLTSPDSSLPLLLYVAASPHAVSAALVQEQTVEGVIRQCPVYYVSEVLTPSKCNMTKLEKIAYAVIMYSRKLRHYFEAFKVRVTSDRGLGELFRNLEASVRIAKWAAELFGYHITFEPRTAIKSQVLADFVVDWTGPITQLEPSAEKVWTIHCDGAWCHAGAGAAAVITSPAGVKHRYAARLSFALESDRCTNNIAEYEAVILGLRKLRALGVTTCIVRTDSRVVAGQVKKDYAAKDPALMQYLAAIRSLEKQFKGFTVQHVDRAKNEEADALAKAAARGEALPSDVFYHVIGTPAVRSPEGLQITNDSEGQRMINLIMIEDWRAPITLYLQGFYHPVDSNEAKRLHHKSRDFALIEGQLYKKGVSQPMLKCVTETEGVQILREVHRGTCGSHAGPRALAAKVIRQGFYWPAIICAANRVVRSCEACQKFSPRSARPSQFTKLIAHTWPLQRWGLDIVGPLPTAQGNLKFTFVAVEYFTKWIEARAVSTITSKMAQKFFWQNIVCRFGVPSELTVDNGKQFDNQDFKDFCFSIGTKLAFASVYHPQSNGVVERANDKIFTAVKKMLLDDKKGKWPDLLPEVVWALNTTECKATGFTPFLLLYGSEAMTPQEIKHGSPRTAASAVPDVDEPTSKDLIDGDRVFALQALDKYQAQTKAWRDQAVIPREFSEGDLVLIRTARTESRGKLEPMWEGPYIVKSKASPCAYRLATPNGEDLEHSWNIDNLRKFFV

SEQ ID NO: 272593 - protein, 126 aa, Zea mays
  Clone ID: MRT4577_180191C.1.pep
GKKRKKTPGLGQAKKKITTFFGPPKNMETSTNNSKRQEVQSFPVSPYFFKTPMAWNGMGQNPIHLSIKNSRLVTRTKAKRHYFKQGLSFLEARTTSRLGEWADFFSRPRLKKPISPAFFSVLIEGF

SEQ ID NO: 272594 - protein, 125 aa, Zea mays
  Clone ID: MRT4577_180192C.1.pep
RKLRAATGETDHVTEQELDLRPLSERLRIFLIRPFQLLFGELIVFLISVYMSVLYGLLYMFFVAFPIIYQKGKGYSAGKTGLMFIPVAVGVLLSAACSPWVNNHYLSLVKKHNGHPPAEVRLIPM

SEQ ID NO: 272595 - protein, 94 aa, Zea mays
  Clone ID: MRT4577_180193C.1.pep
LSSPMRRHVRQRGFPFRDREVLHRYDPGDLQKPLGHRRPDLPCHRLSASAFNSLPTLMTTAAGSCTRISSGSASRCADRRATSSAPPVVVSLSR

SEQ ID NO: 272596 - protein, 136 aa, Zea mays
  Clone ID: MRT4577_180194C.1.pep
ILIHSTRAVPAPGAAPTTKQGETKSRPEGKPKPAPTPNNKPPTSPKHKTCSPQKRKKQKKKRKSEPTTRQPKKQKTHQQKKTTQPPTKRKKQMAQRAPNQITNHRRKGVRQSAAATAHPKPKGRASPKAGNTASKN

SEQ ID NO: 272597 - protein, 80 aa, Zea mays
  unsure (1)..(80): unsure at all Xaa locations
  Clone ID: MRT4577_180195C.1.pep
TVXAKEAGTRRRLSGRRAAAAXEVVGXSKGWEVXRAGGFVGARSSDKEGQATGGGGXRRRLXGQSAGPGGTGXXAASSRR

SEQ ID NO: 272598 - protein, 48 aa, Zea mays
  Clone ID: MRT4577_180196C.1.pep
IISTNPTQSRLPIIGHLKLFSFTKVTIFVLNSALTLQFSAITSPYTDL

SEQ ID NO: 272599 - protein, 87 aa, Zea mays
  unsure (1)..(87): unsure at all Xaa locations
  Clone ID: MRT4577_180197C.1.pep
LGYLFGSGEPPQPAVAPAXQVLPLFKTPXSPKIYSANQVSFGVSPPPNNSPRVVGXNLGNFLWGRPSTKVPAAPGGGFSLGPLLGGK

SEQ ID NO: 272600 - protein, 84 aa, Zea mays
  unsure (1)..(84): unsure at all Xaa locations
  Clone ID: MRT4577_180198C.1.pep
MAXVQQQQDTXXKLLNRWTFDDAQLNHLSLQDYLAVNATKHAMHLPHIAGXHSKKXFRKAQSPIAQRLSNSIMMHGSXNDQQPH

SEQ ID NO: 272601 - protein, 63 aa, Zea mays
  Clone ID: MRT4577_180199C.1.pep
SRTCYNHKCTKHCLLDSKYAYDLRHSYFGIMTNKTYTKCASTPIPTPSAVGLAVYYQLMRSTS

SEQ ID NO: 272602 - protein, 115 aa, Zea mays
  Clone ID: MRT4577_18019C.1.pep
ILEFLKKKKKKKKKKKKKKKKKKKKKKKKKKPQKKKKKKKKKKKKKKKKTPPLVGLFFSPPPFGGKRGPPPPHFFFTLFSPPQKENFFFGGNFFFSPPSIFPGGPPGVPPPIFRP

SEQ ID NO: 272603 - protein, 70 aa, Zea mays
  Clone ID: MRT4577_1801C.1.pep
PLAPRGGFKSLKPGPFLGLQTSKGPCSKCHEQKGCLVTSKKHPSGGLKMAPKGFQKPTFLGGAEQPSVDP

SEQ ID NO: 272604 - protein, 45 aa, Zea mays
  Clone ID: MRT4577_180200C.1.pep
PTHPYSICQFTCSTITYSALFKVSTNITPLNLIIQPYNLHTHLIQ

SEQ ID NO: 272605 - protein, 191 aa, Zea mays
  Clone ID: MRT4577_180201C.1.pep
MQSSLARPPVLAGCGERRGLAAVARCRAEAAAPVWTASRAPVGPYTGRDPEVKKPAWLRQRAAQGEKYARLRESIGELKLNTVCVEAQCPNIGECWNGGGGAGGEGDGIATATIMVLGDTCTRGCRFCAVKTSNKPPPPDPLEPLNTALAVASWGVDYVVLTSVDRDDLPDGGSSHFAQTVKALKELLIGI

SEQ ID NO: 272606 - protein, 1157 aa, Zea mays
  Clone ID: MRT4577_180202C.1.pep
MARAQPADNPRVVTHTYQQPPPPYIHAPAPHPPHHAYQHYQEVQIVPPPPPPPHQQHQNIPHAPKQEDFADQPYRGVIHMITGGSSTDFDTKRQKRDHYRSINHVAVTGPVVQTKWSHIPLTFDARDVDLRSAPHYDAMVINCSVAGWDLHKVLVDNGSQADIVFLHAFDRMGISHSLLKPSDNPLYGFGGKGTFPVGKIELPLSFGVAPNARSEQVTFDIVDMVYPYNAIMGRGSINKFEAAIHGLYLCMKIPGLLGVITVYGNQQTARNIERDFVPGQRNVHCLTAQREVPAPASPTNKQHDKAQLQSNDGTKTVPLDQATPKQTVTISEDLTSHEEEKLLCCLSKNKDVFTWSALDLVGVSRSIMEHSLGIDPSVRPKKQRLRKMSDEKTEAAKAEVHRLLEAKFIEPVAYPTWLSNVVMVQKKSGKWRMCIDFTSLNKACPKDNFPLPQIDKIVDSAAGCEVMSLLDCFSGYHQIYMKEEDKASTSFVTPFGTYCFIRMPEGLKNAGSTFSRLTKTVLNGQVGRNIFTYVDDIVVASKSKADHLADLVETFANMRDARLRLNPEKCVFGVRQGKILGYLVSHRGIEANPTKIQAIINMRPPQSARDVQRLTGRLAALNRFISRSAERSLPFLKTLRGARDFAWGLEQAAAFASLKQYLSELAVLTSLDSLLPLLLYVAASPHAVSTALVQEQTVEGTIRQCPIYYVSEVLTPSKCNMTELEKIAYAVVMSSRKLRHYFEAFKVRVTSDRGLGELFRNPEASVRIVKWAAELSGFHINFEPRTAIKSQVLADFVVDWTGPITQPEPPAEKVWTIHCDGAWCHAGAGAAAVITSPTRVKHRYAARLSFALESDRCTNNIAEYEAVILGLRKLRALGVTTCIIRTDSKVVAGQVEKDYAAKDPALMQYLAAIRSLERQFKGFTLQHVDRAKNEEADALAKAAARGESLPSDVFYHVIGTPAVRSPEGLQITNDSEGHRIVNLIMTEDWRAPITLFLQGYYHPTDINEAKRLKHRSRDFAPIEGQLYKKGISQPMLKCVTETEGVQILREVHSGTCGSHAGPRALAAKVIRQGFYWPTMICAANRVTRSCEACQKFSPRSGSPSQFTKLIAHTWPLQRWGLDIVGPLPTAQGNLKFAFVAVEYFTKWIEARAVSTIT

SEQ ID NO: 272607 - protein, 440 aa, Zea mays
  Clone ID: MRT4577_180203C.1.pep
MRVLEEDLFPSTPGKVKIERAGAMNRQLHRCFASTSTMFLWALFLVAMTASYLSFQSFVDTSSKYFAASWGGLHWERQIRASAVPRRPPGSAAGAGMSVLVTGAAGFVGTHCSLALRRRGDGVVGVDNFNAYYDPSLKKARRALLASHGVFVVEGDINDGRLLAKLFDVVPFTHVLHLAAQAGVRYAMENPASYVHSNVAGLVTLLEACKDADPQPAIVWASSSSVYGLNDKVPFSERDRTDQPASLYAATKKAGEEITHTYNHIYGLSITGLRFFTVYGPWGRPDMAYFSFTRNILQGKPITVYRGKDHVDLARDFTYIDDIVKGCLASLETAGKSTGTGGKKRGPAPYRIFNLGNTSPVTVPNLVSILEKHLRVKAKKNVVEMPGNGDVPFTHANISLAREQLGYKPTTNLDVGLKKFVKWYLSYYGYTRGGSKNSRH

SEQ ID NO: 272608 - protein, 1057 aa, Zea mays
  Clone ID: MRT4577_180204C.1.pep
MARAQPADNPRIVAHNYQQPPPPYIHAPAPHPPHHAYQHHQEVQIVPPPPPPPHQQHQNIPHAPKQEDFADQPYRGVIHMITGGSSTDFDTKRQKRDHYRSINHVAVTGPVVQTKWSHIPLTFDARDVDLRSAPHIDAMVINCSVAGWDLHKVLVDNDSQADIIFLHAFDRMGISHSLLKPSDNPLYGFGGKGTFPVGKIELPLSFGVAPNARSEQVTFDIVDMVYPYNAIMGRGSINKFEAAIHGLYLCMKIPEKSGKWRMCIYFTSLNKACPKDHFPLPRINKIVDSAAGCEVMSLLDCFSGYHQIYMKEEDKASTSFITPFGTYCFIRMPEGLKNAGSTFSRLTKTVLEGQVGRNIFTYVDDIVVASKNKEDHLADLAETFASMRDARLRLNPEKCVFGVRQGKILGYLVSHRGIEANPTKIQAIINMTPPQSARDVQRLTGRLAALNRFISRSAERSLPFLKTLRGAKDFAWGPEQAAAFASLKQYLSELAILTSPDSSLPLLLYVAASPHAVSAALVQEQTVEGAVRQCPVYYVSEVLTPSKCNMTELEKIVYAVVMSSRKLRHYFEAFKVRVTSDRGLGELFRNPEASVRIAKWAAELSGYHISFEPRTAIKSQVLADFVVDWTGPITQPDPSTEKHVDRAKNEEADALAKAAARGKPLPSDVFFHTIDTPAVRSPEGLQITNDSEGHRIVNLIMTEDWRAPITLFLQGYYHPADVSEAKRLRHRSRDFALIEGQLYKKGVSQPMLKCVTEAEGMQILREVHSGTCGSHAGPRALAAKVIRQGFYWPAIICAANRVTRSCEACQKFSPRSGNPSQYTKLIAHTWPLQRWGLDIVGPLPTAQGNLKFAFVAVEYFTKWIEARAVSTITSKTAQKFFWQNIVCRFGVPSELTVDNGRWTDLLPEAVWALNTTECRATGFTPFRLLYGSEAMTPQEIKHGSPRIVPSAVPDVDEPTSKDLIDGERVFALQALNKYQAQTKAWRDHAVIPREFSEGDLVLVRTARTESRGKLEPKWEGPFIVKTKASPSAYRLTMPNGEDLQHSWNIDNLRNFFV

SEQ ID NO: 272609 - protein, 70 aa, Zea mays
  Clone ID: MRT4577_180205C.1.pep
TTVKPKQVHSLLLLVLLNLCAYTCQNPHIQYTFINHSTMFKRKFQKIIFDLNQTSSILYQAISSYVCTKT

SEQ ID NO: 272610 - protein, 439 aa, Zea mays
  Clone ID: MRT4577_180206C.1.pep
MRVLEEDLFPSTPGKVKIERAGAMNRQLHRCFASTSTMFLWALFLVAMTASYLSFQSFVDTSSKYLAASWGGLHWERQIRASAAPRRPPGSAAGAGMSVLVTGAAGFVGTHCSLALRKRGDGVVGVDNFNAYYDPSLKKARRALLASHGVFVVEGDINDGRLLAKLFDVVPFTHVLHLAAQAGVRYAMQNPASYVHSNIAGLVTLLEACKDADPQPAIVWASSSSVYGLNDKVPFSERDRTDQPASLYAATKKAGEEITHTYNHIYGLSITGLRFFTVYGPWGRPDMAYFSFTRNILQGKPITVYRGKDRVDLARDFTYIDDIVKGCLGSLDTAGKSTGTGGKKRGPAPYRIFNLGNTAPVTVPNLVSILEKHLRVKAKKNVVEMPGNGDVPFTHANITLARQQLGYKPTTNLDVGLKKFVKWYQSYYGYTRGSKNSRQ

SEQ ID NO: 272611 - protein, 1511 aa, Zea mays
  unsure (1)..(1511): unsure at all Xaa locations
  Clone ID: MRT4577_180207C.1.pep
MAPKKASSKADEAAKAALLAAKKGKALALTHSTHQEATEDDVLRTCEDDTHRTCEDDAHRTCGPEGQPQPPLGFAPPEGTDFTEDGEVISVSAEEQLQLRALRIKNRNLQKQKEILEAKRQRVSAQAKVRQMIRDKEQKAQELEQEIALMQREVHFGLQQGPPLQQRAQFEDLHFPQRDHAIPHAATFQGVNYLDEQSPLAPHLQVTPWPANFRARTYPKYNCSTNPAQYIMSYQVAVASSGGDDATMAKSFIIALEGPALTWFTRLPPLSIDSWRSLRDKFLLNFQGYRPDTDALAELSLCRQLEKETLREYYHKFLTLKSHLPSVDDQIAIHYAISGLGPASSTATASGIRQKPPGVPYRGVIHMITGGSSTDFDTKRQKWDHYRSINHVAITSPVVQTKWSHVPLTFDTRDVDLRSAPHIDAMVINCSVAGWDLHKVLVDNGSQADIIFLHAFDRMGISHNLLKPLDNLLYGFGGKGTFPVGKIELPLSFGVAPNARSEQVTFDIVDMVYPYNAIMGRGSINKFEAAIHGLYLCMKIPGPLGAITVYGNQQTAHNIERDFVPGQRNVHCLTAQRKVPASASPTDKEHDKTQLQSNDGTKTVPLDQATPKQTVTISEDLTSHDEEKLLCCLSKNKDVFAWSALDLVGVNRSIIEHSMGIDPSVRPKKQRLRKMSNEKTEAAKAEVHRLLEAKFIEPVAYPTWLSNVVMVQKKSGKWRMCIDFTSLNKACPKDNFPLPRIDKIVDSTAGCEVMSLLDYFSGYPQIYMKEEDNAGTSFITPFDTYCFIRMPEGLKNAGSTFSRLTKTVLEGQVGRNIFTYVDDIVVASRSKEDHLADLTETFANMRDARLRLNPKKCVFGVRQGKILGYLVSHRGIEANPTKIQAIINMTPPQSARDVQRLMGRLAALNRFISKSTERSLPFLKTLRGAKDFTWGPEQAVAFASLKQYLSELAVLTSPDSSLPLLLYVADSPHPVSAALVQEQTIEIAYAVVMSSRKLRHYFEAFKVRVTSDRGLGELFRNPEASVRITKWAAKLSGYHITFEPRTAIKSQVLADFIVDWTGPITQPDPSAEKVWTIHYDGAWCHAGAGAAAVITSPVGVKHRYATRLSFALESDRCTNNIAEYEVVILGLRKLRALGVTTYIVRTDSKVVAGQVEKDYAAKDPALMQYLVAIRSLERQFKGFTLQHVDRAKNEEADALAKAAARGESLPSDVFYHVIGTPAVRSPEGLQIINDSEGHRIVNLIMTEDWRAPITLFLQGYYHPTDINEAKRLKHRSRDFTLIEGQLYKKGVSQPMLKCVTETKGVQIMREVHSGTCGSHAGPRALAAKVIRQGFYWPAMICTANRVTRSCEACHKFSPRSGSPSQFIKLIAYTWPLQRWGLDIVGPLPTAQGNLKFTFVAVEYFTKWIEARAVSTITSRTAQKFFWQNIVCRFGVPSELTVDNGKQFDSQDFKDFCFSIGTKLAFASVYHPQSNGVVERANGKIFTAVKKMLLDXKKGRWADLLPKAVWAL

SEQ ID NO: 272612 - protein, 1043 aa, Zea mays
  Clone ID: MRT4577_180208C.1.pep
MAPKKASSKVDEAAKAALLAAKKGKALALVHTTHQEATEDDALRTCGSEGQPQPPPGFAPPEGTDVTEDGEVIGVSAEEQLQLRALRIKNRNLQKQKEILEAKHQRVSAQAKVRQMIRDEEQKAQELEQEIALMQREGHFGLQHGPPLQQRAQVEDLHFPQRDHAIPHAAVFQGVNYLDERSPLAPHLQVTPWPANFRAGTYLKYNGSTDLAQYIMSYQVAVASSGGVDATMTKSFIIALEGLTLTWYTRLPPLSIDSWRSLRDKFLLNFQVYRPDTDALAELSLCNADFNTKRQKRDHYRSINHVAITGPVVQTKWSHVPLTFDARDVDLRSAPHIDAMVINCSVAGWDLHKVLVDNGSQADIIFLHAFDRMGISHSLLKPSDNPLYGFGGKGTFPVGKIELPLSFGVAPNARSEQVTFDIVDMMYPYNAIMGRGSINKFEAAIHGLYLCMKIPGPLGAITVYDNQQTARNIERDFVPGQRNVHCLTTQHEVPTSASPTDKEHDKAQLQSIDGTKTVPLDQATPKQTVTICEDLTSHDKEKLLCCLSKNKDVFAWSALDLVGVSRSIIEHSLGIDPSKTKAAKAEVHRLLEAKFIEPVAYPTWLANVVMVQKKSGKWRMCIDFTSLNKACPKDNFPLPRIDKIVDSVAGCEVMSLLDCFSGYHQIYMKEEDKASTSFITPFGTYCFIRMPEGLKNAGSTFSRLTKTVLEGQVGKNIFTYVDDIVVASRSKEDHLADLAETFANMRDARLRLNPEKCVFGVRQGKILGYLVSHQRSLPFLKTLRGAKDFAWGPEQATAFASLKQYLSELAVLTSPDSSLPLLLYVAASPHAVSAALVQEQTVEGVIRQCPVYYVSEVLTPSKCNMTELEKITYALVMASRKLRHYFEAFKVRVTSDRGLGELFRNPEASVRISKWAAELSGYHITFEPRTAIMSQVLADFVVDWTGPITQPDPSAEKVWTIHCDNAWCHAGAGAAAVITSPAGVKHRYAACLNFALESDRCTNNIAEYEAVILGLRKLRALGVTTCIIRTDSKVVTGQVEKDY

SEQ ID NO: 272613 - protein, 86 aa, Zea mays
  unsure (1)..(86): unsure at all Xaa locations
  Clone ID: MRT4577_180209C.1.pep
EGILSLFSFPPLPGWDPFPDYFFRPYKFYFPPPPKPVVIFNIFSRPVLLLLCEKKKKKKKKKKKKKKRXKKKKKKKXKYSALLPLL

SEQ ID NO: 272614 - protein, 96 aa, Zea mays
  Clone ID: MRT4577_18020C.1.pep
QGIRTGPLQRRVSPDNRITGTLWPGLRTPQMFPFHPRRLWLPAVGWSILPGQKDPDYSYHWTDFPPPPLGLETKGNHFLWVGVNVTQAEKNSFLFW

SEQ ID NO: 272615 - protein, 1628 aa, Zea mays
  unsure (1)..(1628): unsure at all Xaa locations
  Clone ID: MRT4577_180210C.1.pep
MAPKRANSKADEAAKAALLAARKGKALVLTQSTHQEPTEDNVPHTGEDDTFRTCGTEGQSQPPPGFAPLEGADLTEDGEVLGVSTEEQLQLRALRLKNRNLQRQKEILEAKRQRVSALAKVRQMIRDEEQKAQDLEREIALMQREGHLGLQQEPPLQQRAQPEGTREGHLGLQHGPPLHHRARPESPRFPQRDHTFQHGAPFQGVNYLNERSPLAPHLQVTPWPANFRAGTYPKYNGSTDPAQYIMSYQVAVASAGGDDATMVKSFIIALEGPALTWFTRLPPLSIDSWRSLRDKFLLNFQGYRPDTDALAELSLCKQLEKETLREYYRKFLTLKSQLPSVDDQIAIHYAINGLRVGVLYSHCIRDPPKSLQELYQLFEKYAKSEELHQRKVESQRKPKDAPQSSRTWTRTPQPDSGRDGHSQQQVHNIANQQPAADPXSSPGISPQGRGNGTRGRGRGRAQPPRRFYCLFHGEDCAHQTKDCPKTKATRDRMARAQPADNPRIVAHNYQPPPPPYIHAPAPHPPHXTLTNTIRNTDFDTKRQKRDHYRSINHVAVTGPVVQTKRSHIPLTFDARDVDLLSAPHIDAMVINCSVAGWDLHKVLVDNGSQADIIFLHAFDRMGISHSLLKPSDNPLYGFGGKGTFPVGKIELPLSFGVAPKARSEQVTFDIVDMVYPYNAIMGRGSINKFEAAIHGLYLCMKIPGPLGAITIYGNQQTARNIERDFVPGQRNVHCLTTQREVPMPASPTDKQHDKAQLQSQDGTKTVPLDQATPKQTVTISEDLTSLEEERLLCCLAKNKDVFAWSALDLVGVSRSIIEHSLGIDPSARPKKQRLRKMSDEKTEAAKAEVHRLLEAKFIEPVAYPTWLSNVVMIYMKEEDKASTSFITPFGTYCFVRMPEGLKNAGSTFSRLTKTVLEGQVSRNIFTYVDDIVVASKNKEDHLADLAETFANMRDARLRLNPEKCIFGVRQGKILGYLVSHRGIEANPTKIQAIVGMSPPQSARDVRRAKFPFLKTLRGAKDFAWGPEQAAAFASLKQYLSELAILTSPDSSLPLLLYVAASPHAVSAALVQEQTVEGAVRQCPVYYVSEVLTPSKCNMTELEKIAYAVVMSSRKLRHYFEAFKVRVTSDRGLGELFRNPEASVRIAKWAAELSGYHISFEPRTAIKSQVLADFVVDWTGPVTQPDPSTEKVWTIHCDGAWCHAGAGVAAVVTSPAGVKHRYAACLNFALESDKCTNNIAEYEAVILGLRKLRALGVTTCIIKTDSKIVVGQVEKDYAAKDLALMQYLAAIRSLERQFKGFTLQHVDRAKNEEADALAKAAARGEPLPSDVFFHTIGTPAVRSPEGLQITNDSEGHRIVNLIMTEDWRAPITLFLQGYYHPTDVSEAKRLRHRSRDFALIEGQLYKKGVSQPMLKCVTETEGMQILREVHSGTCGSHAGPRALAAKVIRQGFYWPAMICAANRVTRSCEARQKFSPRSGNPSQYTKLIAHTWPLQRWSLDIVGPLPTAQGNLKFAFVAVEYFTKWIEARAVSTITSKTAQKFFWQNIVCRFGVPSELIVDNGKQFDSQDFKDFCFSIGTKLAFASVYHPHSNGVVERANGKIFTAVKKMLLDXKKGRWTDLLPEAVWAL

SEQ ID NO: 272616 - protein, 247 aa, Zea mays
  unsure (1)..(247): unsure at all Xaa locations
  Clone ID: MRT4577_180211C.1.pep
SPRRLSGRTATAARPAPQEPQSPEAERDTGGQAPARVRASQXHGPPLQQHAQPQDPHFPQRDHTFPHAAPFQGVNYLDERSPLAPHLQVMPWPANFRAGTYPKYNGSTDPAQYIMSYQVAVASSGGDDATMAKSFIIALEGPALTWFTRLPPLSINSWRSLRDKFLLNFQGYRPDTDALAELSLCKQLEKETLREYYRKFLTLKSQLPLVDDQIAIHYAISXASRQRPLQSLHQGPTQEPSGVISTI

SEQ ID NO: 272617 - protein, 260 aa, Zea mays
  unsure (1)..(260): unsure at all Xaa locations
  Clone ID: MRT4577_180212C.1.pep
GFFPWRWHRAPSSSPVYRRSPLRPLASSSALSPPPPXLPAATSPVPAAARGAVRCFATQPATSSLRDSSPNWSNRPPKETILLDGCDFEHWLVVMEPPAGDAANPDVTRDEIIDSYIKTLAQVVGSEQEARQKIYSVSTRHYFAFGALVSEELSYKLKELPKVRWVLPDSYLDVRNKDYGGEPFIGGEAVPYDPKYHEEWVRNNARANERSRRSDRPRNFDRSRNFERRRENMQNXNRDAPPGQQGFNGPPPWQNPGSMP

SEQ ID NO: 272618 - protein, 1783 aa, Zea mays
  Clone ID: MRT4577_180213C.1.pep
MAPKRANPKADEAAKAALLAASKGKALALTQSTHQEPTEDNVPRTCEDDTFRTCGPEGQSQPPPGFAPLEGAGLTEDGEVLGVSAEEQLQLRALRLKNRNLQRQKEILEAKRQRMSTLAKVRQMIRDEEQKAQDLEREIALMQREGHLGLQQGPPLQQRPQPEDTREGHLGLQHGPPLQHRAQPEDPRFPQRDYTFQHAAPFQGVNYLDERSPLAPHLQVTPWPANFRAGTYPKYNGSTDPAQYIMSYQVAVASARGDDATMAKSFIIALEGPALTWFTRLPPLSIDSWRSLRDKFLLNFQGYRPDTDALAELSLCKQLEKETLREYYRKFLTLKSQLPSVDDQIAIHYAISGLRAGVLYSHCIRDPPKNLQELYQLFEKYAKSEELHQRKVESQRKPKDAPQSSRTWTRTPQPDSGRDGRSQQQVHNIANQHPAADPPRRQEYPPRAAGMELVEDFADQPYRGVIHMITGGSSTDFDTKRQKRDHYRIINHVAVTGLVVQTKWSHVPLTFDARDVDLRSAPHIDAMVINCSVAGWDLHKVLVDNGSQADIIFLHAFDRMGISHNLLKPSNNPLYGFGGKGTFPVGKIELPLSFGVAPNARSEQVTFDIVDMVYPYNAIMGRGSINKFEAAIHGLYLCMKILGPLGAITVYGNQQTTRNIERDFVPGQRNVHCLTAQHEVSAPARPTDKQHDKAQLQSQDGTKTVPLDQATPKQTVTISEDLTSHEEEKLLCCLSKNKDVFAWSALDLVGVSRSIIEHSLGLDPSVRPKRQRLRKMSDEKTEAAKAEVHHLLEAKFIESVAYPTWLSNVVMVQKKSGKWRMCIDFTSLNKACPKDNFPLPRIDKIVDSAAGCEVMSLLDCFSGYHQIYMKEEDKANTSFITPFGTYCFIRMPEGLKNAGSTFSRLTKTVLEGQVGRNIFAYVDDIVVASKNKEDHLADLAETFTNMRDARLRLNPEKCVFGVRQGKILDYLVSHRGIEANPTKIQAIINMTPPQSARDVQRLTGRLAALNRFISRSAERSLPFLKTLRGAKDFAWGPEQAAAFASLKQYLSELAILTSPDSSLPLLLYVAASPHAVSAALVQEQTVEGVVRQSPVYYVSEVLTPSKCNMTELEKIAYAVVMSSRKLRHYFEAFKVRVTSDRGLGELFRNPEASVRIAKWAAELSGYHISFEPRTAIKSQVLADFVVDWTGPVTQPDPSTEKVWTIHCDGAWCHAGAGAAAVVTSPAGVKHRYAARLSFALESDRCTNNIAEYEAVILGLRKLRALGVTTCIIKTDSKIVVGQVEKDYAAKDPTLMQYLAAIRSLERQFKGFTLQHVDRAKNEEADALAKAAARGEPLPSDVFFHTIGTPAVRSPEGLQITNDSEGHRIVNLIMTEDWRTPITLFLQGYYHPTDVSEAKRLRHRSRDFALIEGQLYKKGVSQPMLKCVTETEGMQILREVHSGTCGSHAGPRALAAKVIRQGFYWPAMICAANRVTRSCEACQKFSPRSGSPSQYTKLIAHTWPLQRWGLDIVGPLPTAQGNLKFAFVAVEYFTKWIEARAVSTITSKTAQKFFWQNIVCRFGVPSELTVDNGKQLDSQDFKDFCFSIGTKLAFASVYHPQSNGVVERANGKIFTAVKKMLLDEKKDRWTDLLPEAVWALNTTECRATGFTPFRLLYGSEAMTPQEIKHGSPRTVPSAVPDVDEPTSKDLIDGDRVFALQALNKYQAQTKAWRDHAVIPREFSEGDLVLVRTARTESRGKLEPKWEGPFIVKTKASPIAYRLTTPNGEDLEHSWNIDNLRKFFV

SEQ ID NO: 272619 - protein, 68 aa, Zea mays
  unsure (1)..(68): unsure at all Xaa locations
  Clone ID: MRT4577_180214C.1.pep
KTKPTLKTRRLKNTAGQTSSPFKISNLSSPTIQLTYSFLISPKTNSLTPFFQPSLFKNPTLTQFNXLS

SEQ ID NO: 272620 - protein, 57 aa, Zea mays
  Clone ID: MRT4577_180215C.1.pep
LCLTERSQRNLVQLERYYLKSTSACYKDNDNRPSIAVSSKCPSRYWSPTSSIGEAND

SEQ ID NO: 272621 - protein, 1562 aa, Zea mays
  unsure (1)..(1562): unsure at all Xaa locations
  Clone ID: MRT4577_180216C.1.pep
MAPKRANPKADEAAKAALLAARKGKALALTQSTHQEPTEDNVPRTCEDDTFRTCGPEGQSQPPPGFAPLEGADLTEDGEVLGVSTEEQLQLRALRLKNRNLQRQKEILEAKRQRVSALAKRDYTFQHAAPFQGVNYLDERSPLAPHLQVTPWPANFRAGTYPKYNGSTDPAQYIMSYQVAVASAGGDDATMAKSFIIALEGPALTWFTRLPPLSIDSWRSLRDKFLLNFQGYRPDTDALAELSLCKQLEKETLREYYRKFLTLKSQLPSVDDQIAIHYAISGLRAGVLYSHYCAHQTKDCPETKATRDRMARAQPADNPRIVAHNYQQPPPPYIHAPAPHPPHHAYQHHQEVQIVPPPPPPPHQQHQNIPHAPKQEDFADQPYRGVIHMITGGSSTDFDTKRQKRDHYRSINHVAVTGPVVQTKWSHIPLTFDARDVDLRSAPHIDAMVINCSVAGWDLHKVLVDNDSQADIIFLHAFDRMGISHSLLKPSDNPLYGFGGKGTFPVGKIELPLSFGVAPNARSEQVTFDIVDMVYPYNAIMGRGSINKFEAAIHGLYLCMKIPGPLGVITVFGNQQTARNIERDFXRSKKRALSHDSARGPCARQPNRXQHDKAQLQSQDGTKTVPLDQATPKQTVTISEDLTSQEEEKLLCCLAKNKDVFAWSALDLVGVSRSIIEHGLGIDPSVRPKKQRLRKMSDEKTEAAKAEVHRLLEAKFIEPVAYPTWLSNVVMIYMKEEDKASTSFITPFGTYCFIRMPEGLKNAGSTFSRLTKTVLEGQVGRNIFTYVDDIVVASKNKEDHLADLAETFASMRDARLRLNPEKCVFGVRQGKILGYLVSHRGIEANPTKIQAIINMTPPQSARDVQRLTGRLAALNRFISRSAERSLPFLKTLRGAKDFAWGPEQAAAFASLKQYLSELAILTSPDSSLPLLLYVAASPHAVSAALVQEQTVEGAVRQCPVYYVSEVLTPSKCNMTELEKIVYAVVMSSRKLRHYFEAFKVRVTSDRGLGELFRNPEASVRIAKWAAELSGYHISFEPRTAIKSQVLADFVVDWTGPITQPDPSTEKVWTIHCDGAWCHAGAGVAAVVTSPAGVKHRYAARLSFALESDKCTNNIAEYEAVILGLRKLRALGVTTCIIKTDSRIVAGQHVDRAKNEEADALAKAAARGKPLPSDVFFHTIDTPAVRSPEGLQITNDSEGHRIVNLIMTEDWRAPITLFLQGYYHPADVSEAKRLRHRSRDFALIEGQLYKKGVSQPMLKCVTEAEGMQILREVHSGTCGSHAGPRALAAKVIRQGFYWPAIICAANRVTRSCEACQKFSPRSGNPSQYTKLIAHTWPLQRWGLDIVGPLPTAQGNLKFAFVAVEYFTKWIEARAVSTITSKTAQKFFWQNIVCRFGVPSELTVDNGRWTDLLPEAVWALNTTECRATGFTPFRLLYGSEAMTPQEIKHGSPRIVPSAVPDVDEPTSKDLIDGERVFALQALNKYQAQTKAWRDHAVIPREFSEGDLVLVRTARTESRGKLEPKWEGPFIVKTKASPSAYRLTMPNGEDLQHSWNIDNLRNFFV

SEQ ID NO: 272622 - protein, 1827 aa, Zea mays
  Clone ID: MRT4577_180217C.1.pep
MAPKRANPKADEAAKAALLAARKGKALALTQSTHQEPTEDNIPRTCEDDTFRTCGPEGQSQPPPGFAPVEGADLTEDGEVLGVSTEEQLQLRALRLKNRNLQRQKEILEAKRQRVSALAKVRQMIRDEEQKAQDLEREIALMQREGHLGLQQEPPLQQRAQPEDTREGHLGLQHGPPLQHRPQPENPRFPQHDYAFQHGAPFQGVNYLDERSPLAPHLQVTPWPANFRAGAYPKYNGSTDPAQYIMSYQVAVASAGGDDATMAKSFIIALEGPALTWFTRLPPLSIDSWRSLRDKFLLNFQGYRPDTDALAELSLCKQLEKETLREYYRKFLTLKSQLPSVDDQIAIHYAISGLRAGVLYSHCIRDPPKNLQELYQLFEKYAKSEELHQRKVESQRKPKDAPQSSRTWTRTPQPDSGRDGRSQQQVHNIANQQPAADPPRRQEYPPQGRGNGTRGRGRGRAQPPRRFYCLFHGEDCAHQTKDCPETKATRDRMARAQPADNPRIVAHNYQPPPPPYIHAPAPHPPHHAYQHHQEVQIVPPPPPPPHQQHQNIPHAPKQEDFADQPYRGVIHMITGGSSTDFDTKRQKRDHYRSINHVAVTGPVVQTKWSHIPLTFDARDVDLRSAPHIDAMVINCSVAGWDLHKVLVDNGSQADIIFLHAFDRMGISHSLLKPSDNPLYGFGGKGTFPVGKIELPLSFGVAPNARSEQVTFDIVDMVYPYNAIMGRGSINKFEAAIHGLYLCMKIPGPLGAITIYGNQQTARNIERDFVPGQRNVHCLTAQREVPAPASPADKQHEKAQLQSQDGTRTVPLDQATPKQTVTISEDLTSHEEERLLCCLAKNKDVFAWYALDLVGVSRSIIEHSLGIDPSVRPKKQRLRKMSDEKTEAAKAEVHRLLEAKFIEPVAYPTWLSNVVMVQKKREMANIYMKEEDKASTSFITPFGTYCFIRMPEGLKNAGSTFSRLTKTVLEGQVGRNIFTYVDDIVVASKNKEDHLADLAETFANMRDARLRLNPEKCVFGVRQGKILGYLVSHRGIEANPTKIQAIVDMSPPQSVRDVQRLTGRLAALNRFISRSAERSLPFLKTLRGAKDFAWGPEQAAAFASLKQYLSELAILTSPDSSLPLLLYVAASPHAVSAALVQEQSVEGAVRQCPVYYVSEVLTPSKCNMTELEKIAYAVVMSSRKLRHYFEAFKVRVTSDRGLGELFRNPEASVRIAKWAAELSGYHISFEPRTAIKSQVLADFVVDWTGPATQPDPSTEKIWTIHCDGAWCHAGAGVAAVVTSPAGVKHRYAARLNFALESDKCTNNIAEYEAVILGLRKLRALGVTTCIIKTDSKIVAGQVEKDYAAKDPALMQYLAAIRSLERQFKGFTLQHVDRAKNEEADALAKAAARGEPLPSDVFFHTIGTPAVRSPEGLQITNDSEGHRIVNLIMTEDWRAPITLFLQGYYHPADVSEAKHLRHRSRDFALIEGQLYKKGVSQPMLKCVTETEGMQILREVHSGTCGSHAGPRALAAKAIRQGFYWPAMICAANRVTRSCEACQKFSPRSGNPSQYTKLIAHTWPLQRWGLDIVGPLPTAQGNLKFAFVAVEYFTKWIEARAVSTITSKTAQKFFWQNIVCRFGVPSKLTVDNGKQFDSQDFKDFCFSIGTKLAFASVYHPQSNGVVERANGKIFTAVKKMLLDERKGRWTDLLPEAVWALNTTECRATGFTPFRLLYGSEAMTPQEIKHGSPRTVPSAVLDVDEPTSKDLIDGDRVFALQALNKYQAQTKAWRDRAVIPREFSEGDLVLIRTARTESKGKLEPKWEGPFIVKTKASPSAYRLTTPNGEDL

SEQ ID NO: 272623 - protein, 71 aa, Zea mays
  unsure (1)..(71): unsure at all Xaa locations
  Clone ID: MRT4577_180218C.1.pep
DMVELEKSNILVMGPTGXSGKALLAKTLARFVNVPFVIADATSLTQCTRRYFVPATIFLYRTRRRTAHLIH

SEQ ID NO: 272624 - protein, 1519 aa, Zea mays
  unsure (1)..(1519): unsure at all Xaa locations
  Clone ID: MRT4577_180219C.1.pep
SPRRLSGRTATAARPAPQEPQSPEAERDTGGQAPARVRTSQSATNDTRRRAEGPGPRAGDRADAARRPPRPTARATPVAVASSGGDDATMAKSFIIALEGPALTWFTRLPPLSIDSWRSLRDKFLLNFQGYRPDTDALVELSLCKQXEKETLREYYRKFLTLKSQLPSVDDQIAIHYAISGLRVGVLYSHCIRDPPKNLQELYQLFEKYAKSEELHQRKVESQRKPKDAPQSSRTWTRTPQPDSGRDGRNQQQVHNIANQHPAADAPRCQEYPXQGRGNGTRGRGRGRAHPPRRFYCLFHGEDCAHQTKDCPXTKATRDRMARAQPADYPRVVAHTYQQPPPPYIHAPAPHPPQHAYQHHQEVQIVPPPPPPPHQQHQNIPHAPKQEDFADQPYRGVIHMITGGSSTDFDTKRQKRDHYRNINHVAVTGPVVQTKWSHISLTFDARDVDLRSAPHIDAMVINCSVAGWDLHKVLVDNGSQADIIFLHAFDRMGISHSLLKPSDNPLYGFGGKGTFPVGKIELPLSFGVAPNARSEQVTFDIVDMVYPYNAIMGRGSINKFEAAIHGLYLCMKIPGPLGVITVYGNQQTARNIELDFVPGQRNVHCLTAQREATPKQTVIINEDLTSHEEEKLLCCLSKNKDVFAWSALDLVGVSRSIIEHSLGIDPSVRPKKQRLRKMSDEKTEAAKAEVHRLQEAKFIEPVAYPTWLSNVVMVQKKSGKWRMCIDFTSLNKACPKDNLPLPRIDKIVDSAAGCEVMSLLDCFSGYHQIYMKEEDKASTSFITPFGTYCFIRMPEGLKNVGSTFSRLTKTVLEGQVGRNIFTYVDDIVVASKSKEDHLADLAETFANMRDARLRLNPEKCVFGVRQGKILGYLVSHRGIEANPTKIQAIINMMPPQSARDVQRLTGRLAALNRFISRSAERSLPFLKTLRGAKDFAWGPEQAAAFASLKQYLSELAVLTSPDSSLPLLLYVAASPHAVSAALVQEQTVEGVVRQCPVYYVSEVLTPSKCNMTELEKIAYAVVMSSRKLCHYFEAFKVRVTSDRGLGELFRNPEASVRIAKWAVELSGYHISFEPRTAIKSQVLADFVVDWTGPITQPDPFAEKVWTIHCDGAWCHAGAGAAAVITSPARVKHRYAARLSFALESDRCTNNIAEYEAVILGLRKLRALGVTTCIIKTDSKVVAGQVEKDYAAKDPALMQYLAAIRSLERQFKGFTLQHVDRAKNEEADALAKAAARGESLPSDVFFHVIGTPAVRSPEGLQITNDSEGLRIVNLIMTEDWRAPITLFLQGYYHPTDISEAKRLRHRSRDFTLIEGQLYKKGVSQPMLKCVTETEGIQILREVHSGTCGSHAGPRALAAKVIRQGFYWPAMICAANRVTRSCAACQKFSPRSGSPSQYTKLIAHTWPLQRWGLDIVEPLPTAQKNLKFAFVAVEYFTKWIEARAVSIITSKTAQKFFWQNIVCRFGVPSELTVDNGKQFDSQDFKDFCFSIGTKLAFASVYHPQSNGVVERANGKIFTAVK

SEQ ID NO: 272625 - protein, 83 aa, Zea mays
  Clone ID: MRT4577_18021C.1.pep
MLTTMGEHHQQQLTVSRIRTAVSMLTRRTGHARFRRGPVAERHHASSSDHHQLRPPAAGGGVALDLDLLVAKTCDDAAAGFSA

SEQ ID NO: 272626 - protein, 243 aa, Zea mays
  unsure (1)..(243): unsure at all Xaa locations
  Clone ID: MRT4577_180220C.1.pep
DKSLSFFSHGGCASPASVSNRQLAPSGRFDRARAAAQGPIVHVAEVVAYRLVFLDSHHSFYGGLYVGGVADARIRPALRALKQNLSLLVSILVDRAQPVAVREVMKASFQGFLIVLLAGGSDRSFTVEDHAMVEEDFRSLKRAFCTRGEGLVSEQVVEAEARAAEGVVALMALTAEQLXVEEFGIAAYECTEAVSERQRLPLPPTTRRWSRSEPNTILRVLCHRDDEVASHFLKRTFQLPKRR

SEQ ID NO: 272627 - protein, 70 aa, Zea mays
  Clone ID: MRT4577_180221C.1.pep
LTAEQLVEEFGIAAYECTEAVSERQRLPLPPTTRRWSRSEPNTILRVLCHRDDEVASHFLKRTFQLPKRR

SEQ ID NO: 272628 - protein, 474 aa, Zea mays
  Clone ID: MRT4577_180222C.1.pep
MARRSRGSGSVTDAASKADAAAMRMVSRRGAVRLVLVSATAWAMLGLVALAFHLRPCSSRVAFLSALCKKDSKVLSVLDSMGLSSKPLHRCPIPVADDPNVVVIPKRTPNTIVKKLAYITVDKQDKDPSPLFGGRQNWKQREESFKLNSTMKVHCGFMKNSGADMDIIDVKYIQKCKFVVASGIFDGYDIPHQPSNISRRSQKLFCFLMVVDEVSLDFIQKNTTVKIDSAGGKWVGIWRLLTVHRLPFDEPRRNGKIPKILTHRLFPEAWYSIWIDGKMELIVDPLLILERYLWRGKNTFAVAAHKHHRSIYEEGDAIKRRKRYARPLVDLQMKLYYYEGMEPWSPKKKMPSDVPEGAVLIREHTATTNLFSCLWFNEVNLFTPRDQISFGYVARRLGDALELFMFPNCEYNSLFVLHRHTREHSSKVEWAKTVDEIVEKGLRESRGGLGLWTPYPADLSSVELPAVRRTSPAG

SEQ ID NO: 272629 - protein, 168 aa, Zea mays
  unsure (1)..(168): unsure at all Xaa locations
  Clone ID: MRT4577_180223C.1.pep
HHRSIXEEGHAIKLRKRYARPLVDLQMNMYYYXRMEPWSPKKKMPGDVPEGTVLIRERSATSNLFSCLWFNEVNLFTPRDQISFGYVACRLGDALELFMFPNCEYNSLFVLHRPTREHSSKVEWAKTVDEIVEKGLRDSRGGLGLWTPYPADLSSVELPAVRRTSPAG

SEQ ID NO: 272630 - protein, 391 aa, Zea mays
  unsure (1)..(391): unsure at all Xaa locations
  Clone ID: MRT4577_180224C.1.pep
MEEEGHGIVIVGGGICGLATALALHRKGIASVVLEKSETLRSDGAAIGVHANGWRALEQLGVAAELRETADLITGTHDVWQGTNKTAQQVPVRKELRCLKRKDLMETMAKNIPAGSIRFGCHVVAIQQDPGTNGAILTTVDGGTIRAKVLIGCDGGSSAVAKYLGLSEPKAIPRTVLRGFTGYPHGHPFGTEFLRIRSGGEFAVGRLPVTRNLVHFFVTGPNXSNRNGXNKDVSATKDFMLEKLRGCAPEIVEMVQDSDPESLNVVNSIRYRPPWQVALGTFHRGAVTVAGDAMHAMGPFIGQGGSSALEDAVVLARSLSRAAAGAGGHGAAVREYVRERRPRVALLSLESFLAGTLLRARSLVGKLACLAVLALLGTRSLRHADYDCGRL

SEQ ID NO: 272631 - protein, 99 aa, Zea mays
  Clone ID: MRT4577_180225C.1.pep
LPCQPPDLPCPRACTPSPCAMVTMLTRLLPHRGQTGARGQPPPTNLHLPRAITCAHRELEHLEEVVFEGVYSSACSSSGWSYLTKGWVEGSRTSSLQQR

SEQ ID NO: 272632 - protein, 104 aa, Zea mays
  Clone ID: MRT4577_180226C.1.pep
GTKGRNGKKKNPSGPGKNKGGEKKPKPRGGKAPGAPPNKGGPPPTQVGVPPKPPPRGKPPATRKKAGGSPNKAAQLKGDPSSPLGDKEGSRGAPPKQKGDPNNP

SEQ ID NO: 272633 - protein, 102 aa, Zea mays
  Clone ID: MRT4577_180227C.1.pep
VCLTLNRAQQSLSGDHNQQFTYITVARTESSHRGTGAAGSLTVDRSTGVIPGQSRARTETLEEHLEEVVFEGVYSSACSSSGWSYLTKGWVEGSRTSSLQQR

SEQ ID NO: 272634 - protein, 126 aa, Zea mays
  unsure (1)..(126): unsure at all Xaa locations
  Clone ID: MRT4577_180228C.1.pep
ANGPPQSSGLPLSPFPRLRGPVPALDLPGGLHALPALADHGPPPRLCFGRVIALIGPSDPLVFSHPPGFLFAPLVILPIGPAFFLHGRRGPGSPFSPKKKKKKKKKKKKKKKKKXXKKXXKKXRAA

SEQ ID NO: 272635 - protein, 77 aa, Zea mays
  Clone ID: MRT4577_180229C.1.pep
KSVPVHVFQTSRVPKGGQKTLHFRSSISYAGIYLTENSALNFPWPIPRKLPTNNFTRLMGKRSGQRVYAYLRGHGGH

SEQ ID NO: 272636 - protein, 402 aa, Zea mays
  Clone ID: MRT4577_18022C.1.pep
PSEFPVADASAALLETRYPFDLTSEQANESRSYGGANSSHDEPIPVACHLQSALLRRHESFTEGAPFLSDFLQDTQPSRFRPYFMTEKMANGEMTDPVLEGETSEKSNSKASSAQDSDSTSSVADQESQKDVLEDCSNQGQQSSFSQTEEHAHIARHAREVSLSLDMEPPVLISDSSDDDISLSGEHINDWEEAQQSENFSLSQNTWQEDPNVMQHHQEIDITSNGLNQMSPHSNDLELTSSSTETTDDPFEVNDIEPPAKEVVVVDDTHVVDPVYDSSPSGSERPAPTGLVIDGPVLKDGHACTLVVEATIEEGGSSSRMEVSSSEVAGPSLSSVEQSESPEKEASEIREQSMVGHDEAHGGSVSHADPSVSDISSQPSTESSTNGDSGSGVTPSFTNAVL

SEQ ID NO: 272637 - protein, 42 aa, Zea mays
  Clone ID: MRT4577_180230C.1.pep
LVEHLKEVVFEGVYFSACSSSGWSYLTKGWVEGSRTSSLQQR

SEQ ID NO: 272638 - protein, 140 aa, Zea mays
  Clone ID: MRT4577_180231C.1.pep
PLHMSTIPTDPPSHEQVRATREHTTPFRRSFARRVRATLAISPLPVRDCLFTYGIAGFRLTHDEVCGQIKGPRSSGQQSVRSLIDTDGRPFLLSVWSHFKLFQNFGAWQRGPCLDNEFINVLMPSLSQAYFLFCKNMSHR

SEQ ID NO: 272639 - protein, 92 aa, Zea mays
  Clone ID: MRT4577_180232C.1.pep
SSLCSLLQLYCGVLPIMGPWATPPTNLHLSRAITCVHRELEHLEEVVFEGVYTSACSSSGWSYLTKGWVEGSRTSSLQQRQAPVHATSSLCF

SEQ ID NO: 272640 - protein, 63 aa, Zea mays
  Clone ID: MRT4577_180233C.1.pep
PGRPTRPATYCVVLQSFFHHLPHGELSGLIAALVAHHLTSICGLQLQHPGPCPCNAAAVGVYY

SEQ ID NO: 272641 - protein, 176 aa, Zea mays
  Clone ID: MRT4577_180234C.1.pep
MPPAPAAVAPEPQKLSLTPTPPTQQCRRPRSPLANGLAAGDFELRHWRTPKKRAAPQWAPPPVIEIPNGGAGSDGDDSNSSGGGGGHGYTSLRDILSSPEYAAAGGSPGACGGGGCGSCGDIHMIRHPLVKHAAYAYLQMTPSAREDPGRRGRRWRGSLCRMLLGCLSFIGALFRP

SEQ ID NO: 272642 - protein, 64 aa, Zea mays
  Clone ID: MRT4577_180235C.1.pep
NLFSATKVMRSIQGVPVAGGRFQFWGRIKLGLGISFGGFLPSCYCNKLCTLSISGLVINVTLPM

SEQ ID NO: 272643 - protein, 65 aa, Zea mays
  unsure (1)..(65): unsure at all Xaa locations
  Clone ID: MRT4577_180236C.1.pep
RAVTFFXSVVYLVAGGDMQFALXALDTNLGPQQIRICEGDGIDRVEKLSFGGRKHEKALXNTCFG

SEQ ID NO: 272644 - protein, 124 aa, Zea mays
  Clone ID: MRT4577_180237C.1.pep
LRLQGSDQVSTLRGYNGDPNRFTQLRISNHKTYVALNPCICQPFPRILHYMNRSTPPESTPPLLGDPLPGGVRATLAISPLPVRDCLFMYGIAGFKLTLSHIQGMWPVKIVLDHTCLHTHPILN

SEQ ID NO: 272645 - protein, 118 aa, Zea mays
  Clone ID: MRT4577_180238C.1.pep
MGSSTFCAFFLLCAILAVHVAQSSSSTLDLDAFFLPLKSGCRGSVAECSLLAGDDAEFLMESESNRRILAGRSYISYGALRRNTVPCSRRGASYYNCRPGAQANPYSRGCSAITRCRR

SEQ ID NO: 272646 - protein, 40 aa, Zea mays
  Clone ID: MRT4577_180239C.1.pep
RSKPRPPVTSTVPLTKAVIAGIRTYVRACLRLVPLLSGTS

SEQ ID NO: 272647 - protein, 75 aa, Zea mays
  Clone ID: MRT4577_18023C.1.pep
TLSSNHNHSNVAVPRCPDTASFRCMYVRSSSSSTRPSCSSSKERPACEWKHNDTYGLRPYQLETLQCFFLKTWIM

SEQ ID NO: 272648 - protein, 72 aa, Zea mays
  Clone ID: MRT4577_180240C.1.pep
WMEPNSHAFLSASRALRPRTERFGGSEREQDRTQTWYILPARAPGLDDSKILLPYPHLDHVFLQCYRKRDRL

SEQ ID NO: 272649 - protein, 208 aa, Zea mays
  Clone ID: MRT4577_180241C.1.pep
MDPSGPGPSSVIGAAGGDEAAAVALQRPAQLSRYESQKRRDWNTFLQYLRNHRPPLTLARCSGAHVIEFLRYLDQFGKTKVHAAGCAYYGQRAPPGPCPCPLRQAWGSLDALIGRLRAAYEESGRTPESNPLAARAVRIYLREVRDSQAKARGIPYEKKTKRKRAQQQATEPSTSSSDAAAGSGRARAAAAAASAAQAGGSSAAPSST

SEQ ID NO: 272650 - protein, 80 aa, Zea mays
  Clone ID: MRT4577_180242C.1.pep
RPGSSRTMPLIYRNESKKIANQWIVNEGSSACSSWPSSRGNRSRSAARRYYVRGEINRIPPCTAKGGRCSRSYARLCLIP

SEQ ID NO: 272651 - protein, 1887 aa, Zea mays
  unsure (1)..(1887): unsure at all Xaa locations
  Clone ID: MRT4577_180244C.1.pep
MAPKRANPKADEAAKAALLAARKGKALALTQSTHQEPTEDNVPRTCEDDTFRTCGPEGQSQPPPGFAPLEGADLTEDGEVLGVSAEEQLQLRALRLKNRNLQRQKEILEAKRQRVSALAKVRQMIRDEEQKAQDLEREIALMQREGHLGLQQEPPLQQRAQPEDTREGHLGLQHGPPLQHRAQPENPRFPQRDYAFQHGAPFQGVNYLDERSPLAPHLQVTPWPANFRAGAYPKYNGSTDPAQYIMSYQVAVASAGGDDATMAKSFIIALEGPALTWFTRLPPLSIDSWRSLRDKFLLNFQGYRPDTDALAELSLCKQLEKETLREYYRKFLTLKSQLPSVDDQIAIHYAISGLRAGVLYSHCIRDPPKNLQELYQLFEKYAKSEELHQRKVESQRKPKDAPQSSRTWTRTPQPDSGRDGRGHQQVHNIANQHPAADPPRRQECPPQDRGNGTRGRGRGRAQPPRRFYCLFHGEDCAHQTKDCPETKATRDRMARAQPADNPRIVAHNYQPPPPPYIHAPAPHPPHHAYQHHQEXKSYLPPPPPPHQQHQXPHAPKQEDFADQPYRGVIHMITGGSSTDFDTKRQKRDHYRSINHVAVTGPVMQTKWSHIPLTFDARDVDLRSAPHIDAMVINYSVAGWDLHKVLVDNGSQADIIFLHAFDRMGISHSLLKPSDNPLYGFGGKGTFPVGKIELALSFGVAPNARSEQVTFDIVDMVYSYNAIMGRGSINKFEAAIHGLYLCMKIPGPLGAITIYGNQQTARNIERDFVPGQRNVHCLTAQREVPAPASPADKQHKKAQLQSQDGTRTVPLDQATPNHTVTISEDLASHAEEMLLCCLAINKDVLAWSALDLVGDSRSIXICQTXETDPSVRPKQRSLGEMSDEKTADAKAVAHRVLEDKFIEPVAYPTWLSNVVMVQKKSGKWRMCIDFTSLNKACPKDNFPLPRIDKIVDSAAGCEVMSLLDCFSGYHQIYMKEEDKASTSFITPFGTYCFIRMPEGLKNAGSTFSRLTKTVLEGQVGRNIFTYVDDIVVASKNKEDHLADLAETFANMRDARLRLNPEKCVFGVRQGKILGYLVSHRGIEANPTKIQAIVDMSPPQSVRDVQRLTGRLAALNRFISRSAERSLPFLKTLRGAKDFAWGPEQAAAFASLKQYLSELAILTSPDSSLPLLLYVAASPHAVSAALVQEQTIEGTVRQCPIYYVSEVLTPSKCNMTELEKIAYAVVMSSRKLRHYFEAFKVRVTSDRGLGELFRNPEASVRIAKWAAELSGYHISFEPRTAIKSQVLADFVVDWTGPVAQPDPSTEKVWTIHCDGAWCHAGAGVAAIVTSPTGVKHRYAARLSFALESDRCTNNIAEYEAVILGLRKLRALGVTTCIIKTDSKIVAGQIEKDYAAKDPALMQYLAAIRSLERQFKGFTLQHVDRAKNEEADALAKAAARGEPLPSDVFFHTIGTPAVRSPKGLQITNDSEGHRIVNLIMTEDWRAPITLFLQGYYHPTDVSEAKRLRHRSRDFTLIEGQLYKKGVSQPMLKCVTETEGMQILHEVHSGTCGSHAGPRALAAKVIRQGFYWPAMICAANRVTRSCEACQKFSPRSGNPSQYTKLIAHTWPLQRWGLDIVGPLPTAQGNLKFAFVAVEYFTKWIEARAVSTITSKTAQKFFWQNIVCRFGVPSELTVDNGKQFDSQDFKDFCFSIGTKLAFASVYHPQSNGVVKRANGKIFTAVKKMLLDERKGRWTDLLPEAVWALNTTECRATGFTPFRLLYGSEAMTPQEIKHGSPRTVPSAVPDVDEPTSKDLIDGDRVFALQALNKYQAQTKAWRDHAVIPREFSEGDLVLVRTARTESKGKLEPKWEGPFIVKTKASPSAYRLTTPNGEDLEHSWNIDNLRKFFV

SEQ ID NO: 272652 - protein, 53 aa, Zea mays
  Clone ID: MRT4577_180245C.1.pep
MSRSGSGMAVCDECMLKFQDLSACRSFGFIVFKMNQNVQQVGLDRLRGPGDIL

SEQ ID NO: 272653 - protein, 61 aa, Zea mays
  Clone ID: MRT4577_180246C.1.pep
PPHVLIILVPPLSNMVSNAYHLDSEKRCDRTVSLGTAIASAPSIALSASTGSSAERQLRRA

SEQ ID NO: 272654 - protein, 1707 aa, Zea mays
  Clone ID: MRT4577_180247C.1.pep
MAPKRANPKADEAAKAALLAARKGKALALTQSTHQEPTDDNIPRTSEDDTFRTCGPEGQSQPPLGFAPLEGADLTEDGEVLGVSTEEQLQLCALRLKNRNLQRQKEILEAKRQRVSALAKVRQMIRDEEQKAQDLEREIALMQREGHLGLQQEPPLQQRAQPEDMREGHLGLQHGPPLQHRAQPENPRFPHHDYAFQHGAPFQGVNYLDERSPLAPHLQVTPWPANFRAGAYPKYNGSTDPAQYIMSYQVAVASAGGDDATMVKSFIIALEGPALTWFTRLPPLSIDSWRSLRDKFLLNFQGYRPDTDALAELSLCKQLEKETLREYYRKFLTLKSQLPSVDDQIAIHYAINGLRAGVLYSHCIRDPPKSLQELYQLFEKYAKSEELHQRKVESQRKPKDAPQSSRTWTRTPQPDSGRDGRSQQQVHNIANQQPAADPPRRQEYPPQGRGNGTRGRGRGRAQPPRRFYCLFHGEDCAHQTKDCPKTKATRDRMARAQPADNPRIVAHNYQPPPPPYIHAPAPHPPHHAYQHHQEVQIVPPPPPPPHQQHQNIPHAPKQEDFADQPYRGVIHMITGGSSTDFDTKRQKRDHYRSINHVAVTGPVVQTKWSHIPLTFDARDVDLRSAPHIDAMVINCSVAGWDLHKVLVDNGSQADIIFLHAFDRMGISHSLLKPSDNPLYGFGGKGTFPVGKIELPLSFGVAPNARSEQVTFDIVDMVYPYNAIMGRGSINKFEAAIHGLYLCMKTPGPLGAITIYGNQQTARNIERDFVPGQRNVHCLTTQREVPAPASPTDKQHDKAQLQSQDETKTIPLDQATPKQTVTISEDLTSLEEERLLCCLAKNKDVFAWSALDLVGVSRSIIEHSLGIDPSVRPKKQRLRKMSDEKTEAAKAEVRRLLEAKFIEPVAYPTWLSNVVMVQKKSGKWRMCIDFTSLNKAYPKDNFPLPRIDKIVDSAAGCEVMSLLDCFSGYHQIYMKEEDKASTSFITPFGTYCFVRMPEGLKNAGSTFSRLTKTVLEGQVGRNIFTYVDDIVVASKNKEDHLADLAETFANMRDARLRLNPEKCAFGVRQGKILGYLVSHRGIEANPTKIQAIVGMSPPQSARDVQRLTGRLAALNRFISRSAERSLPFLKTLRGAKDFAWGPEQAAAFASLKQYLSELAILTSPDSSLPLLLYVAASPHAVSAALVQEQTVEGAVRQCPVYYVSEVLTPSKCNMTELEKIAYAVVMSSRKLRHYFEAFKVRVTSDRGLGELFRNPEASVRIAKWAAELSGYHISFEPRTAIKSQVLADFVVDWTGPVTQSDPSTEKIWTIHCDGAWCHAGAGVATVVTSPAGVKHRYAARLNFALESDKCTNNIAEYEAVILGLRKLRALGVTTCIIKTDSKIVAGQVEKDYAAKDPALMQYLAAIRSLERQFKGFTLQHVDRAKNEEADALAKAAAKGEPLPSDVFFHTIGTPAVRSPEGLQITNDSEGHRIVNLIMTEDWRAPITLFLQGYYHPTDVSEAKRLRHRSRDFALIEGQLYKKGVSQPMLKCVTETEGMQILREVHSGTCGSHAGPRALAAKVIRQGFYWPAMICTTNRVTRSCEACQKFSPRSGNPSQYTKLIAHTWPLQRWGLDIVGPLPTAQGNLKFAFVAVEYFTKWIEARAISTITSKTAQKFFWQNIVCRFGVPSELTVGNGKQFDSQDFKDFCFSIGTKLAFASVYHPQSNG

SEQ ID NO: 272655 - protein, 1852 aa, Zea mays
  unsure (1)..(1852): unsure at all Xaa locations
  Clone ID: MRT4577_180248C.1.pep
MAPKRAKPKADEAAKAALLAASKGKALALTQSTHQEVTKDNVPRAREDNTFRTCAPEGQSQPPPGFATLEGADLAEDGEVLGVSAEEQLQLRALRLKNRNLQRQKEILEAKRQRVSALAKVRQMIRDEEQKAQDLKREIALMQREGHLGLQHEPPLQQRAQLEDTREGHLGLQHGPPLQHRAQPEDPRFPQRDHTFQHAAPFQGVNYLDERSPLAPHLQVTPWPANFRAGTYQKYNGSTDPAKYIMSYQVAVASAGGDDATMAKSFIIDLEGPALTWFTRLPPLSIDSWRSLRDKFLLNFQGYRPDTDALAELSLCKQLEKETLREYYRKFLTLKSQLPSVDDQIAIHYAISGLRAGVLYSHCIRDPPKNLQELYQLFEKYAKSEELHQRKVESQRKPKDAPQSSRTWTRTPQPDSGRDGRNQQQVHNIANQRPAADPPRRQEYPPQGRGNGTRGRGRGRAQPPHRFYCLFHGEDCAHQTKDCPETKATKDRMARAQPADNPRIVAHNYQQPPPPYIHAPAPHPPHHAYQHHQEVQIVPPPPPPPHQQHQNIPHAPKQEDFADQPYRGVIHMITGGSSTDFDTKRQKRDHYRSINHVTVTGPVVQTKWSHIPITFDARDVDLRSAPHCDAMVINCSVAGWDLHEVLVDNGSQADIIFLHAFDRIGISHSLLXPSDNPFTXNARSEQITFDIVDMVYPYNAIMGRGSINKFEAAIHGLYLCMKIPGPLGVITVFGNQQTARNIERDFVPGQRNVHCLTAQREVPAPASPTDKQHDKIQLQSQDRTKTVPLDQAMPKQTVTISEDLTSHEEERLLCCLSKNKDVFAWSALDLVGVSRSIIEHSLGIDPSVRPKKQRLRKMSDEKTEAAKAEVHRLLEAKFIEPVAYPTSLSNVVMVQKKSGKWRMCIDFTSLNKACPKDNFPLPRIDKIVDSAAGCEIYMKEEDKASTSFITPFGTYCFIRMPEGLKNAGSTFSRLTKTVLEGQVGRNIFTYVDDIVIASKNKEDHLADLAETFANMRDARLRLNPEKCVFGVRQSKILGYLVSHRGIEANPTKIQAIVDMLPPQSARDVQRLTGRLAALNRFISRSAERSLPFLKTLRGAKDFAWGPEQAAAFTALKQYLSELAILTSPDSSLPLLLYVAASPHAVSAALVQEQTVEGMVRQCPVYYVSEVLTPSKCNMTELEKIAYAVVMSSRKLRHYFEAFKVRVTSDRGLGELFRNPEASVRIAKWAAELSGYHISFEPRTAIKSQVLADFVIDWTGPITQPDPSTEKVWTIHCDGAWCHAGAGAAAVITSPAGVNHRYAARLSFALESDRCTNNIAEYEAVILGLRKLRALGVTTCIIKTDSKVVTGQVEKDYAAKDPALMQYLAAIRSLEKQFKGFTLQHVDRAKNEEADALAKAAARGESLPSDVFFHIIGTPAVRSPEGLQITNDSEGHRIVNLIMTEDWRAPITLFLQGYYHPTDVSEAKRLRYRSRDFALIEGQLYKKGVSQPMLKCVTETEGIKILREVHSGTCGSHAGPRALAAKVIRQGFYWPAMICAANRVTRSCEACQKFSPRSSSPSQYTKLIAHTWPLQRWGLDIVGPLRTAQGNLKFAFVAVEYFTKWIEARTASTITSKTAQKFFWQNIVCRFGVPSELTVDNDKQFDSQDFKDFCFSIGTKLAFASVFHPQSNGVVERGNGKIFTAVKKMLLDEKKGRWTDLLPEAVWALNTTECRATGFTPFRLLYGSEAMAPQEIKHGSPRTVPSAVPDVDEPTSKDLIDGDRVFALQALNKYQAQTKAWRDHTIIPRKFSEGDLVLVRTARTESKGKLEPKWEGPFIVKTKASPSAYRLTTPNGEDLEHSWNIDNLRKFFV

SEQ ID NO: 272656 - protein, 870 aa, Zea mays
  unsure (1)..(870): unsure at all Xaa locations
  Clone ID: MRT4577_180249C.1.pep
MGARNWAETHRLALSTRGGERSKSGEVDLGPPVKSGLVRGLGKLHGPLAELAEALARLGGGWSGLATVAEALVAMAGGNALAGAKERGLAGEAGCEVMSLLDCFSSYHQIYMKEEDKASTSFITPFGMYCFIRMLEGLKNVGSTFSRLTKTVLEGQVGRNIFTYVDDIVVASRSKEDHLADLAETFANMRDARLCLNPEKCVFGVCQGKILGYLVSHREIEANPTKIQAIINMTPPQSARDVQRLTGRLAALNRFISKSAERSLPFLKTLRGAKKXAWGPEQAADFTSLKQYLSELAVLTSPDSSLPLLLYVAASPHXELEKIAYAVVMTSRKLRHYFEAFKVQVTSDRGLGELFRNPEASVRIAKWAAELSGYHITFEPKTAIKSQVLADFVVDWTGPITQPDPSAEKVWTIHCDGAWCHAGADAAAIITSTAGVKHRYAARLSFALESDRCTNNIAEYEVVILGLRKLRALGVTTCIVRTDSKVVADQVEKDYALKDPALMQYLAAIRSLERQFKGFTLQHVDRAKNEEADALAKATFRGESLPSDVFYHVISTPAVRSPEGLQITNDSEGHRIVNLIMTEDCRAPITLFLQGYYHPTDINEAKRLKHRSRDFALIEGQLYKKGVSQPMLKCVTETEGVQILREVHSVPYELTVDNGKQFDSQDFKDFCFSIGTKLAFASIYHPQSNRVVERANGKIFTAVKKMLLDEKKGRWADLLPEAVWALNTTECRATGFTPFRLLYGSEAMTPQEIKHGSPRTVSSTIPDVDEPTSKDLIGGDCVFALQALNKYQAQTKAWRDHAVIPREFSKGDLVLIRTARTESRGKLEPEWDDPFIVKTKASPSAYRLATPIGEDLEHSWNIDNLRKFFV

SEQ ID NO: 272657 - protein, 83 aa, Zea mays
  Clone ID: MRT4577_18024C.1.pep
FGSSRIVQLTLFRPPCCVYYREVFITRSGNSTDLFLQDDLLRVRVSPEVYARNKIRYTRPVAIHRCETNVLAYGYQTVANHRP

SEQ ID NO: 272658 - protein, 294 aa, Zea mays
  unsure (1)..(294): unsure at all Xaa locations
  Clone ID: MRT4577_180250C.1.pep
RTAATSPRLCFTGEHGCHRGRRSHRCLSGRTATAARPAHQEPQSPEAKRDTXGQAPTCVCTSQGAANDTRRRAEGPGARARDRANXQREGHFGLQHGPPLQQRAQVEDLHFPQRDHAIPHAATFQGVNYLDERSPLAPHLQVTPWPANFRAGTYPKYNGSTDPAQYIMSYQVAIASSGGDDATMAKSFIIALEGPALTWYSRLPPLSIDSWRSLRDKFLLNFQGYRPDTDALAELSLCKQLEKETLREYYRKFLTLKSQLPSVDDQIAIHYAISXASGRRPLQPLHQGSAQAPL

SEQ ID NO: 272659 - protein, 1335 aa, Zea mays
  unsure (1)..(1335): unsure at all Xaa locations
  Clone ID: MRT4577_180251C.1.pep
MAPKRANPKADEAAKAALLAARKGKALVLTQSTHQEPTEDNVPRTCEDDTFRTCGPEGQSQPPPGFAPLEGADLTKDGEVRQMIRDEEQKAQDLEREIALMQREGHLGLQQEPPLQQRAQPEDTREGHLGLQHGPPLQHRAQPENPRFPQHDYTFQHGAPFQGVNYLDERSPLAPHLQVTPWPANFRAGTYPKYNGSTDPAQYIMSYQVAVASTGGDDATMAKSFIIALEGPALTWFTRLPPLSIDSWRSLRDKFLLNFQGYRPDTDALAELSLCKQLEKETLREYYRKFLTLKSQLPSVDDQIAIHYAISGLRAGVLYSHCIRDPPKNLQELYQLFEKYAKSEELHQRKVESQRKPKDAPQSSRTWTRTPQPDSGRDGRSQPQVHNIANQQPAADPPRRQEYPPQGRGNGTRGRGRGRAQPPRRFYCLFHGKDCAHQTKDCPKTKATRDRMARAQPADNPRIVAHNYQPPPPPYIHAPAPHPPHHAYQHHQEVQIVPPPPPPPHQQHQNIPHAPKQEDFADQPYRGVIHMITGGSSTDFDTKRQKRDHYRSINHVAVTGPVVQTKWYHIPLTFDARDVDLRSAPHIDAMVINCSVAGWDLHKVLVDNGSQADIIFLHAFDRMGISHSLLKPSDNPLYGFGGKGTFPVGKIELPLSFGVAPNARSEQVTFDIVDMVYPYNAIMGRGSINKFEAAIHGLYLCMKIPGPLGAITIYGNQQTARNIERDFVPGQRNVHCLTTQREIYMKEEDKASTSFITPFGTYCFIRMPEGLKNAGSTFSRLTKTVLEGQVGRNIFTYVDDIVVASKNKEDHLADLAETFANMRDARLRLNPEKCVFGVRQGKILGYLVSHRGIEANPTKIQAIVDMSPPQSARDVQRLTGRLAALNRFISRSAERSLPFLKTLRGAKDFAWGPEQAAAFASLKQYLSELAILTSPDSSLPLLLYVAASPHAVSAALVQEQTVEGAVRQCPVYYVSEVLTSSKCNMTELEKIAYAVVMSSRKLRHYFEAFKHVDRAKNKEADALAKAAARGEPLPSDVFFHTIGTPAVRSPEGLQITNDSEGHRTVNLIMTEDWRAPITLFLQGYYHPTDVSEAKRLRHRSRDFALIEGQLYKKGVSQPMLKCVTETEGMQILREVHSGTCGSHAGPRALAAKVIRQGFYWPAMICAANRVTRSCEACQKFSPRSGNPSQYTKLIAHTWPLQRWGLDIVGPLPTAQGNLKFAFVAVEYFTKWIEARAVSTIPSKTTQKFFWQNIVCRFGVPSELTVDNGKQFNSQDFKDFCFSIGTKLAFASVYHPQSNGVVERANGKIFTAVKKMLLDXKKGRWTDLLPEAVWAL

SEQ ID NO: 272660 - protein, 715 aa, Zea mays
  Clone ID: MRT4577_180252C.1.pep
MAPKKASSKADEAAKAALLAAKKGKALALTHSTHQEATEDDVLRTCEDDVLRTCEDDALRTCGPEGQPQPPPGFAPPEGTDFIEDGEIIGVSAEEQLQLRALRIKNRNLQKQKEILEAKRQRVNYLDERSPLAPHLQVTPWHANFRARTYPKYNGSTDPAQYIMSYQVVVASSGGDDATMAKSFIIALEGPALTWFTRLPPLSIDSWRSLRDKFLLNFQGYRPDTDALAELSLCKQLEKETLREYYRKFLTLKSQLPSVDDQIAIHYAISGLRAGVLYSHCIRDPPKNLQELYQLFEKYAKSEELHQRKVESQRKPKDAPQSSRTWTRTPQPDSDCAHQTRDCPETKATKDRMARAQPADNPRVVAHTYQQPPPPYIHAPAPHPPHHAYQHHQEVQIVPPPPPPPHQQQQNTPHPHAPKQEDFADQPYRGVIHMITGGSSADFDTKRQKRDHYRSINHVAITGPVVQTKWSHVPLTFDARDVDLRSAPHIDAMVINCSVAGWDLHKVLVDNGSQADIIFLHAFDRMGISHSLLKPSDNPLYGFGGKGTFPVGKIELPLSFGVAPNARSEQVTFDIVDMVYPYNAIMGRGSINKFEAAIHGLYLCMKIPGPLGAITVYGNQQTARNIERDFVPGQRNVHCLTAQREVPAPASPTDKEHDKAQLQSNDGTKAVPLDQATPKQTVTISEDLTSHDEEKLLCCLSKNKDVFAWSGSADP

SEQ ID NO: 272661 - protein, 1481 aa, Zea mays
  unsure (1)..(1481): unsure at all Xaa locations
  Clone ID: MRT4577_180253C.1.pep
MSILRKADALARSGPASNTHHLVVCCVGSGPRRSLAEGTRGLPHLLVALDKFSKWIEVRPLNSIRSEQAVAFFTNIIHRFGVPNSIITDNDTQFTGTKFLDFCEDHHIRVDWAAVAHLMTNGQVERANGMILQGLKPRIYNDLNKFGRLGIRIPEDEGVRRPKQPHQPRRLTGPAGRGSGHGLTTLGSVSAVPTTLPRPRGLVPRPPGGRLGASATTRRSRAPQAHASLGRTVHHRQDFEAWNIQADQQSRRGLQQRSEHPTATSLLPLRCFQVVHIPHLHTQIKSNHQGRVSLASAKPDPPSGARRGEPPLRQNFPQKKSFCQNIFRAFRLLRKWDPENDGVHDQTSAGGAAAPSVPTPPSAESDPASDGNTQVPTFGAHRSCYEKNHPRWHPIELTRRLTRLRRQHCSPQERARPSFLTQSTHQEATEDNVPRTCEDDTLRTCGPEGQSQPPSGFAPLEGADLTEDGEILGVSAEEQLQLRGLRLKNRNLQRQKEILEAKRQRVSALAKVRQMIRDEEQKAQDLEREIALMQREGHLGLQNGPPLQQRAQLEDTREGHLGLQHGPPLQHRAQPEDPRFPQRDHTFPHAVPFQGVNYLDERSPLAPHLQVTPWPANFRAGTYPKYNGSTDPAQYIMSYQVTVASSGGDDATMAKSFIIALEGPALTWFTRLPPLSIDSWRSLRDKFQLNFQGYRPDTDALAELSLCKQLEKETLREYYRKFLTLKSQLPSVDDQIAIHYAISGLRVGVLYSHCIRDPPKNLQELYQLFEKYAKSEELHQRKVESQRKPKDAPQSSRTWTRTPQPDSGRDGRNQQQVHNIANQHPAADAPRRQEYPPQGHGNGTRDCAHQTKDCPETKATRDRMARAQPANNPRVVAHTYQQPPPPYIHALTPHPPHHAYQHHPEVQIVPPPPPPPHQQQQNIPHAPKQEDFADQPYRGVIHMITGGSSTDFDTKRQKRDHYCSINHVAVTGPVVQTKWSHIPLTFDARDVNLRSAPHCDAMVINCSVAGWDLHKVLVDNGSQADIIFLHAFDRMGISHSLLKPSDNPLYGFGGKGTFPVGKIELPLSFDVAPNARSEQVTFDIVDMVYPYNGIMGRGSINKFEAAIHGLYLCMKIPGPLGVITVYGNQQTARNIERDFVPGQRNVHYLTAQREATPKQTVTICEDLTSHEEEKLLCCLSKNKDIFAWSALDLVGVSRSIIEHSLRIDPSVRPKKQRLCKMSDEKTEATKAEVHRLLEDKFIESVAYPTWLSNVVMVQKKSGKWRMCIDFTSLNKACPKDNFPLPRIDKIVDSAAGCEVMSLLDCFSGYHQIYMKEEDKASTSFITPFGTYCFIRMPGGLKNAGSTFSRLTKTVLEGQVGRNIFTYVDDIVVASKSKEDHLADLAETFANMRXARLRLNPEKCVFGVRQGKILGYLVSHRGIEANPTKIQDIINMTPPQSARDVQRLTGRLAALNRFISRSAERSLPVGGLRLTKVLKNRI

SEQ ID NO: 272662 - protein, 149 aa, Zea mays
  unsure (1)..(149): unsure at all Xaa locations
  Clone ID: MRT4577_180254C.1.pep
GAYPKFNGSTDPAQYIMSYQVAVASAGGDDXTMAKSFIIALEGPALTWFTRLPPLSIDSWRSLRDKFLLNFQGYRPDTDALAELSLCKQLEKETLREYYRKFLTLKSQLPSVDDQIAIHYAISXASCRRPLQPLYQRSAQEPPGAISAL

SEQ ID NO: 272663 - protein, 116 aa, Zea mays
  Clone ID: MRT4577_180255C.1.pep
PPAVPVFLPRSGFFFVFKRNLGKTLGPGLWRCLDKRLEIFFFLAVGGLHGMGASAVTMGWVLALGPTPQINFFRDFIPPQEPFFFFKKKKKKKKKKKKKKKKKKKKKKLERGARVP

SEQ ID NO: 272664 - protein, 1564 aa, Zea mays
  unsure (1)..(1564): unsure at all Xaa locations
  Clone ID: MRT4577_180256C.1.pep
MAPKRANPKADEAAKAALLAARKGKALALTQSTHQEATEDNVPRTCEDDTLCTCGPEGQSQPPPGFAPLEGADLTEDGEVLGVSAEEQLQLRALRLKNRNLQRQKEILEAKRQRVSALAKVRQMIRDEEQKAQDLEREIALMQREGHLGLQHGPPLQQRAQLEDTREGHLGLQHGPPLQDRAQPEDPRFPQRDHTFPLVAPFQGVNYLDERSPLAPHLQVTPWPANFRAGTYPKYNGSTDPTQYIMSYQVVVASSGGDDATMAKSFIIALEGPALTWFTRLPPLSIDSWRSLRDKFLLNFQGYRPDTDALAELSLCKQLEKETLREYYRKFLTLKSQLPSVDDQIAIHYAISGLCAGVLYSHCIRDPPRNLQELYQLFEKYAKSEELHQRKVESQRKPKDAPQSSRTWTRTPQPDSGRDGRNQQQVHNIANQHPAADAPRRQEYPPQGRGNGTRGRGRGRAQPPRRFYCLFHGEDCAHQTKDCPETKATRDRMARAQPVDNPRVVAHTYQQPPPPYIHAPAPHPPHHAYQHHQEVQIVPPAPPPPHQQHQNIPHAPKQEDFADQPYRGVIHMITGGSSTDFDTKRQKRDHYRSINHVAVTGLVVQTKWSHIPLTFDARDVDLRSAPHCDAMISGPLGVITVYGNQQTARNIERDFVPGQRNMHCLMAQREVPAPASPTDKQHDKAQLQSNDGTKTVPLDQATPKQTVTISEDLTSHEEEKLLCCLSKNKDVFAXVMVQKKSGKWRMCXDFTSLNKACPKDNFPLPRIDKIVDSAAGCEVMSLLDCFSGYHQIYMKEEDKASTSFITPFGTYCFIRMPEGLKNAGSTFSRLTKTVLNGQVGRNIFTYVDDIVVASKSKADHLADLAETFANMRDARLRLDPEKCVFGVRQGKILGYLVSHRGIEANPTKIQAIINMTPPQSARDVQRLTGRLAALNRFISRSAERSLPFLKTLRGAKDFAWGPEQAAAFASLKQYLTELAVLTSPDSSLPLLLYVAASPHAVSAALVQEQTVEGVVRQCPVYYVSEVLTPSKCNMTELEKIAYAVVMSSRKLRHYFKAFKVRVTSDRGLGKLFRNPEASVRIAKWAAELSGYHISFEPRTAIKSQVLADFVVDWTGPTTQPDPSAEKVWTIHCDDAWCHAGAGAAAVITSPVGVKHRYAARLSFALESDRCTNNIAEYEAVILGLRKLRALGVTTCIIKTDSKVVAGQVEKDYAAKDPALMQYLAAIRSLERQFKGFTLQHVDRAKNEEANALAKAAARGESLPSDVFFHVIGTPAVRSPEGLQITNDSEGHRIVNLIMTEDWRAPITLFLQGYYHPTDISEAKRLRHRSRDFAMIEGQLYKKGVSQPMLKCVTETEGIQILREVHTGTCGSHAGPRALAAKVIRQGFYWPAMIRAANRVTRSCEACQKFSPRSSSPSQYTKLIAHTWPLQRWGLDIVGPLPTAQGNLKFAFVAVEYFTKWIEARAVSTITSKTAQKFFWQNIVCRFGVPSKLTVDNGKQFDSQDFKDFCFSIGTKLAFALVYHPQSNGVVERANGKIFTAVKKMLLDXKKGRWTDLLPEAVWAL

SEQ ID NO: 272665 - protein, 34 aa, Zea mays
  Clone ID: MRT4577_180257C.1.pep
ERHCAGSGRPAAYSRDASEEAAARLMIYRNRVCV

SEQ ID NO: 272666 - protein, 197 aa, Zea mays
  Clone ID: MRT4577_180258C.1.pep
DLRYCQKCCHYKPPRAHHCRVCKRCVLKMDHHCIWINNCVGHENYKIFLVFVLYAVVASFYALILIVGSVLHSVPKDEQPGSDSSRTSIIICGVILSPLALALAVLLGWHIYLILQNKTTIEYHEGVRAMWLAEKGGDLYHHPYDLGVYENLISVLGPNIFCWLCPVLNTVGNGLRYRTSYDIPVSTPPKKIAAHSQ

SEQ ID NO: 272667 - protein, 371 aa, Zea mays
  unsure (1)..(371): unsure at all Xaa locations
  Clone ID: MRT4577_180259C.1.pep
MAMSSARSSRATPRSLSALLSTRMVILSTSTVTSRVTPTLGRKRRRKRSTSLPLLVPPSTRPATLSTAAVRSLAVLLRAMSLLLLARRSTARVRSGTTLATSLDVPSLSSAKTPAPKDRSLASRVFRSTRMRPSPLPQETSLVVSPRATSRSFLVTPLKKMAASSTRTATRSVLPSAGSLRRRSVASTPCLECVSTRRVRSAMRTETSSVVSPTATLDTASARRSMITATLLTMTATRSASALFSRTSTRRSTRAPPRRSSLRPRSASRSVXAQKMNXSASRLSSASSPSASRSRSTWTRPTVPPGTSSTRRSLSTTSSPSSKRPVVTCKSATAPFAASTPTARSLLRLRAARALARRLLRSTLSLRASRS

SEQ ID NO: 272668 - protein, 132 aa, Zea mays
  unsure (1)..(132): unsure at all Xaa locations
  Clone ID: MRT4577_18025C.1.pep
MVVTFSLDQIDFICSMNNILFFGSCRVGVLPCLIPEVGMEFNTIDEVWMFWIAYGGQKGVEVRKSYTNKRKSDGKIRSCRYICAEAGHRKXDKRDHLTKXCPRAEXRTDCQVRMGVVLDQEKEKHKVVVLVL

SEQ ID NO: 272669 - protein, 291 aa, Zea mays
  Clone ID: MRT4577_180260C.1.pep
MGGRPGYLTLPIFSVVAAIGYVYYTTVFVAVPRWLGLSTAAGVANAAAFTALAAACLATYAVAVRRDPGRVPPGFVPDVEDAESTVHEIKRKGGDLRYCQKCCHYKPPRAHHCRVCKRCVLKMDHHCIWINNCVGHENYKIFLVFVLYAVVASFYALILIVGSVLHSVPKDEQPGSDSSRTSIIICGVILSPLALALAVLLGWHIYLILQNKTTIEYHEGVRAMWLAEKGGDLYHHPYDLGVYENLISVLGPNIFCWLCPVLNTVGNGLRYRTSYDIPVSTPPKKIAAHSQ

SEQ ID NO: 272670 - protein, 100 aa, Zea mays
  unsure (1)..(100): unsure at all Xaa locations
  Clone ID: MRT4577_180261C.1.pep
PAGPLFPGHHPHPGLXLAEPQIEPIVSGNLPPGFDASTCRSVYVDDIHVEVTGTGLGEVFQSIGTGEGCMLIRKEKSWLWLNSXYERAYAVVGVVSVNGT

SEQ ID NO: 272671 - protein, 80 aa, Zea mays
  Clone ID: MRT4577_180262C.1.pep
LLVHTTHARSNTSAHERTCSIKSNQCLTTLQGQAHFHGGVHTRSCVLAPVEPVDSPSRAARLRILACVPRSTMSHTNTPY

SEQ ID NO: 272672 - protein, 56 aa, Zea mays
  Clone ID: MRT4577_180263C.1.pep
KTKSSCAQFGLFGRERARSVVSNKAQKSGFFFSHFFPFFVNKWNKFGSKKFTFWPS

SEQ ID NO: 272673 - protein, 69 aa, Zea mays
  Clone ID: MRT4577_180264C.1.pep
IRPGCDGSNVMLGPVIKTTSQCGPVMPGGRQCLKYLGQCFFIRKKTLQKIKKKPNKKKKRKGGHQLVSS

SEQ ID NO: 272674 - protein, 48 aa, Zea mays
  Clone ID: MRT4577_180265C.1.pep
FFYRRVAWRAGQSYSRTPTVAVLHEVGPISHALPRSGGWLSFRWHHGD

SEQ ID NO: 272675 - protein, 216 aa, Zea mays
  unsure (1)..(216): unsure at all Xaa locations
  Clone ID: MRT4577_180266C.1.pep
MARLQLSVVAACAVLFALAAPSLAGDADMLQDVCVADLASPIKINGFPCKANITADDFFFAGLKKAGNTNNPAGSVVTAANVQSFPGVNTLGVSMARIDYAVGGQNPPHTHPRATEIIFVTEGTLEVGFITTANKLFTRFVTVGEVFVFPRGLVHFQQNRGHRPASVIAAFNSQLQGTQAIATTLFAATPPVPTDVLARXFRVDNEDIDAVKGRFN

SEQ ID NO: 272676 - protein, 72 aa, Zea mays
  Clone ID: MRT4577_180267C.1.pep
GEFGVYCLRSWKKYVDVSHALAHLARPWTVESNWTDGHQGLPKGVQDGALASGSAYTDQRLSSTIVTSCFIL

SEQ ID NO: 272677 - protein, 41 aa, Zea mays
  Clone ID: MRT4577_180268C.1.pep
LITAIVSHNQTAEATVHCSITKVTQAIPVRARIIGPVIQSL

SEQ ID NO: 272678 - protein, 148 aa, Zea mays
  unsure (1)..(148): unsure at all Xaa locations
  Clone ID: MRT4577_180269C.1.pep
LSGKADCARQHEPRLVFPRIGRRPRHTXMMAAMALNEAHDGHKGHAQRDIQTLKYPIXEHAIVTKWHDMEKIWHHTFYNELRVTPEEHPVLLTXEVPLTPYARREKMTPIMXETFNDPVMYVTIHSVLSLYASALTXTDIELDSDDDV

SEQ ID NO: 272679 - protein, 260 aa, Zea mays
  Clone ID: MRT4577_18026C.1.pep
TRPGDTQCRTDKIVFKLFDKVPSDLPPVLRSQILGWLSSSPSDIESHIRPGCIILTVYVRLVESAWQELSENMSLLLGKLLNSSTDEFWASGLVFVMVRHHLAFMLNGQIMLDRPLAPSSHHYCKILCVRPVAAPYSATINFRVEGFNLLSTSSRLICSFEGHCIFHEDTDSGAENVEYKDRDIECLSFCCSVPGPRGRGFIEVEDSGFSNGFFPFIIAEKDVCAEVSELESIFESSSNEHANARDQALEFLNELGWLLQ

SEQ ID NO: 272680 - protein, 67 aa, Zea mays
  unsure (1)..(67): unsure at all Xaa locations
  Clone ID: MRT4577_180270C.1.pep
PKGDVPQKKPGKRLAQVVXPPSLPKSGGXWKGNKNPPPPKNQLFEEATDPPKAKKLWETNKKLVGLG

SEQ ID NO: 272681 - protein, 46 aa, Zea mays
  Clone ID: MRT4577_180271C.1.pep
SPYKKLFVYKFFSTNNFISLYHIHFLFNLFFQHLLYLSSFTSIVFF

SEQ ID NO: 272682 - protein, 98 aa, Zea mays
  Clone ID: MRT4577_180272C.1.pep
MALKLGWRRGGGGWLALPLGNRTTASSSACSSSNLFVGGLSYDTNETALKDVFSQCGDVIAAKVICHPTSGKSKGFGFVKFSSQNQADAALQKMNGQR

SEQ ID NO: 272683 - protein, 94 aa, Zea mays
  Clone ID: MRT4577_180273C.1.pep
QLTVEEATDDAAFLFIFSAGLSYDTNETALKDVFSQCGDVIAAKVICHPTSGKSKGFGFVKFSSQNQADAALQKMNGQVLDGRKIRVHYANGTG

SEQ ID NO: 272684 - protein, 149 aa, Zea mays
  unsure (1)..(149): unsure at all Xaa locations
  Clone ID: MRT4577_180274C.1.pep
MALKLGWRRGGGGWLALPLGNRTTASSSACSSSNLFVGGLSYDTNETALKDVFSQCGDVIAXLLLLFYILLMKLLFGYEKNRSFSHDDSFTIYLCTAAKVICHPTSGKSKGFGFVKFSSQNQADAALQKMNGQVLDGRKIRVHYANGTG

SEQ ID NO: 272685 - protein, 154 aa, Zea mays
  unsure (1)..(154): unsure at all Xaa locations
  Clone ID: MRT4577_180275C.1.pep
QGMWVELSGKMHVLARXLGHLRQKTDDRIVLVSNYTQTLDLFVQLCRERRYPYVRLDGSTSINKRQKLVNQFNDLSRDEFVFLLSSKAGGCGLNLVGGNRLVLFDPDWNPANDKQAAARVWRDGQKKRVYIYRFLSTGTIEEKVYQRQMSKEGL

SEQ ID NO: 272686 - protein, 112 aa, Zea mays
  unsure (1)..(112): unsure at all Xaa locations
  Clone ID: MRT4577_180276C.1.pep
MALKLGWRRGGGGWLALPLGNRTTASSSACSSSNLFVGGLSYDTNETALKDVFSQCGDVIAAKVICHPTSGKSKGFGFVKFSSQNQADAALQKMNGXLDGRKIRVHYANGTG

SEQ ID NO: 272687 - protein, 132 aa, Zea mays
  unsure (1)..(132): unsure at all Xaa locations
  Clone ID: MRT4577_180277C.1.pep
AQCIQIFDSWGGQLPPHVWEQWSKPYIXTGVDVIGLDWTVDMTDGRRRLGNGISVQGNVDPAFLFSPLPVLTDEIHRVVKAAGPKGHILNLGHGVLQKTPEEAVAHFFDVTRRLRYDTLFQGSVAEELHHVA

SEQ ID NO: 272688 - protein, 41 aa, Zea mays
  Clone ID: MRT4577_180278C.1.pep
TLPGRRHRQKGEMSSRGLPISGSTALANGHFLSYLLASKEV

SEQ ID NO: 272689 - protein, 108 aa, Zea mays
  Clone ID: MRT4577_180279C.1.pep
MALKLGWRRGGGGWLALPLGNRTTASSSACSSSNLFVGGLSYDTNETALKDVFSQCGDVIAAKVICHPTSGKSKGFGFVKFSSQNQADAALQKMNGQARLSSFIYIII

SEQ ID NO: 272690 - protein, 113 aa, Zea mays
  Clone ID: MRT4577_18027C.1.pep
GIYLHRGRRPNACMRASSCSTASPAGSYDHTHHGHDQMEHGSMEVMVQGSRRRSTRHAVSPATSQADVLWTADWTCMHVRSEIIQPSSIGEKLLPRNFFGTVHASSYAVAYAC

SEQ ID NO: 272691 - protein, 367 aa, Zea mays
  Clone ID: MRT4577_180280C.1.pep
SELHAACPEEPLLVRAARGEDGLPRPPAWMMRQAGRYMAEYQALAKRHPSFRERSENTDLIVEITLQPWRAFAPDGVILFSDILTPLPAIGVPFDISDSKGPVIQSPVRSEGQVRELVPIDLDMLQFVGESLKILRNEIDGKAALLGFVGAPWTIATYIVEGGMTNTYTNIKNMCHTAPDVLRCLLSHLAEAISDYIIYQVNSGAQCIQIFDSWGGQLPPHVWEQWSKPYIKKIVNRIKKECPHVPLVLYINGNGGLLERMKDTRVDVIGLDWTVDMADGRKRLGNGISVQGNVDPAFLFSPLPVLTDEIRRVVKAAGTKGHILNLGHGVLQKTPEEAVAHFFDVTRSLRYDTHFQGSVAEGLQPVA

SEQ ID NO: 272692 - protein, 39 aa, Zea mays
  unsure (1)..(39): unsure at all Xaa locations
  Clone ID: MRT4577_180281C.1.pep
VIXFVPLDAIMCNRMLRLLDTRKSFHFFVTDCFLIPFDA

SEQ ID NO: 272693 - protein, 82 aa, Zea mays
  Clone ID: MRT4577_180282C.1.pep
SSGTCYCDYLVSRKKKKKKKKKKKKKKKKKKKKKKKKKKKKKKKKKKKKKKKKKKKRGGPFKEPNLTSAGLKVKSFFIGPPN

SEQ ID NO: 272694 - protein, 78 aa, Zea mays
  Clone ID: MRT4577_180283C.1.pep
MKLLFGYEKNRSFSHDDSFTIYLCTAAKVICHPTSGKSKGFGFVKFSSQNQADAALQKMNGQVLDGRKIRVHYANGTG

SEQ ID NO: 272695 - protein, 126 aa, Zea mays
  unsure (1)..(126): unsure at all Xaa locations
  Clone ID: MRT4577_180284C.1.pep
RKRLGNGMSVQGNVDPAFLFWGLPVLTDEIXDLRTGEVIGTGRYCRAAPRLYISDTLRLPFLATSIAHXFRVVKAPGTKGHILNLGHGVLXKTPEEAVSHFFDVTRXLRYDTHFQGSVAEGLHPVA

SEQ ID NO: 272696 - protein, 400 aa, Zea mays
  Clone ID: MRT4577_180285C.1.pep
MMLPTATATAVFLTAAPSSFSTRRRRSRAIFASLSPSFSASEEPLLVRAARGEDGLPRPPAWMMRQAGRYMAEYQALAKRHPSFRERSENTDLIVEITLQPWRAFAPDGVILFSDILTPLPAIGVPFDISDSKGPVIQSPVRSKEQVRELVPIDLDMLQFVGESLKILRNEIDGKAALLGFVGAPWTIATYIVEGGMTNTYTNIKSMCHTAPDVLKGLLSHLAQAISDYIIYQVNSGAQCIQIFDSWGGQLPPHVWEQWSKPYIKQIVSRIKKECPNVPLVLYINGNGGLLERMKNTGVDVIGLDWTVDMTDGRRRLGNGISVQGNVDPAFLFSPLPVLTDEIHRVVKAAGPKGHILNLGHGVLQKTPEEAVAHFFDVTRRLRYDTLFQGSVAEELHHVA

SEQ ID NO: 272697 - protein, 254 aa, Zea mays
  unsure (1)..(254): unsure at all Xaa locations
  Clone ID: MRT4577_180286C.1.pep
GPRRLNRRTATAARPAREEPQSPEAERDTGGQAPACVRTSQGVANDTRRGAEGPRPRARDRADAXEGHLGLQQEPPLQQRAQPEGTREGHLGLQHGPPLHHRARPESPRFPQRDYTFQHGAPFQGVNYLDERSPLAPHLQVTPWPANFRAGTYPKYNGSTDPAQYVMSYQVAVASAGGDDATMAKSFIIALEGPALTWFTRLPPLSIDSWRSLRDKFLLNFQGYLSHPVFRRQTECEPCTCQDQAITYTASRQV

SEQ ID NO: 272698 - protein, 83 aa, Zea mays
  Clone ID: MRT4577_180287C.1.pep
VISTIFNEDRFAKMQGQHDSSKKSTGNIDNSELLDTIVEVAKEVFKRHCAKRFQISPLHTLEWNFTKNRGHTVKILTQGGEML

SEQ ID NO: 272699 - protein, 124 aa, Zea mays
  Clone ID: MRT4577_180288C.1.pep
MAGKQGRKKARSPPGCPQLRPIGSTVSGSKKPAAATVPSCKYHLSEASVQAVLNHKRVPFVLGGYFDDLTPEEQQLTLEVAAQHEEVEDRYAKYQERVRKELDEKGFVALPDDVDKRRAALNAR

SEQ ID NO: 272700 - protein, 1355 aa, Zea mays
  unsure (1)..(1355): unsure at all Xaa locations
  Clone ID: MRT4577_180289C.1.pep
MARAQPADNPRIVAHNYQPPPPPYIHAPAPHPPHHAYQHHQEGGSSTDFDTKRQKRDHYRSINHVAVTGPVVQTKWSHIPLTFDARDVDLRSAPHIDAMVINCSVAGWDLHKVLVDNGSQADIIFLHAFDRMGISHSLLKPSDNLLYGFGGKGTFPVGKIELPLSFGVAPNARSEQVTFDIVDMVYPYNAIMGRGSINKFEAAIHGLYLCMKIPGPLGAITIYGNQQTARNIERDFVPGQRNVHCLTTQREVPAPASPTDKQHEKAQLQSQDGTKTVPLDQATPKQTVTISEDLTSHEEEKLLCCLAKNKDVFAWSALDLVGVSRSIIEHSLGIDPSVRPKKQRLRKMSDEKTEAAKAEVHRLLEAKFIEPVAYPTWLSNVVMVQKKXGKWRMCIDFTSLNKACPKDNFPLPRIDKIVDSAAGCEVLSLLDCFSGYHQIYMKEEDKASTSFITPFGTYCFIRMPEGLKNAGSTFSRLTKTVLEGQVGRNIFTYVDDIVVASKNKEDHLADLAETFANMRDARLRLNPEKCVFGVRQGKILGYLVSHRGIEANPTKIQAIVDMSPPQSVKDVQRLTGRLAALNRFISRSAERSLPFLKTLRGAKDFAWGPEQAAAFASLKQYLSELAILTSPDSLLPLLLYVAASPHAVSAALVQEQTVEGTVRQCPVYYVSEVLTPSKCNMTELEKIAYAVVMSSRKLRHYFEAFKVRVTSDRGLGELFRNPEASVRIAKWAAELSGYHISFEPRTAIKSQVLADFVVDWTGPKTQPDPSTEKVWTIHCDGAWCHAGAGVAAVVTSPAGVKHRYAARLSFALESDRCTNNIAEYEAVILGLRKLRALRVTTCIIKTDSKIIAGQIEKDYAAKDPALMQYLAAIRSLERQFKGFTLQHVDRAKNEEADALAKAAARGEPLPSDVFFHTIGTPAVRSPKGLQITNDSEGHCIVNLIMTEDWRAPITLFLQGYYHPTDVSEAKRLRHRSRDFALIEGQLYKKGVSQPMLKCVTETEGMQILREVHSGTCGSHAGPRALAAKVIRQGFYWPAMICAANRVSRSCEACQKFSPRSGNPSQYTKLIAHTWPLQRWGLDIVGPLPTAQGNLKFAFVAVEYFTKWIEARAVSTITSKNAQKFFWQNIVCRFGVPSELTVDNGKQFDSQDFKDFCFSIGTKLAFASVYHPQSNGVVERANGKIFTAVKKMLLDXKKGRWTDLLPEAVWALNTTECRATGFTPFRLLYGSEAMTPQEIKHGSPRTVPSAVPDVDEPTSKDLIDGDRVFALQALNKYQAQTKAWRDHAVIPREFSEGDLVLVRTARTESRGKLEPKWEGPFIVKTKASPSAYRLTTPNGEDLEHSWNIDNLRKFFV

SEQ ID NO: 272701 - protein, 185 aa, Zea mays
  unsure (1)..(185): unsure at all Xaa locations
  Clone ID: MRT4577_18028C.1.pep
MAHQPPLAPAPLAPNDPLPAPTAAQSARPQPVVATATATVLGHLPRTAPRDRAGVRVLDDGTVSPADPARPLADAMSVRGGRVLRVGSCECVKGXDVLLCLFLPLILCPVWSVFLXELEGPRTRELNLTGNVVLLGFVDSHVHFIDGGLQIQEGTAGWHKVANEAARTIPGRENGGPQTLKLFEV

SEQ ID NO: 272702 - protein, 1043 aa, Zea mays
  unsure (1)..(1043): unsure at all Xaa locations
  Clone ID: MRT4577_180290C.1.pep
SEGCFHNHIQDCPEILLAEHRLPLRXVPPHHAYQHHQEVQIVPPPPPPPXPATSKHPPCPKAGRLRRPTIXGVIHMITGGSSTDFDTKRQKRDHYRSINHVAVTGPVVQTKWSHIPLTFDARDVDLHSAPHIDAMVINCSVAGWDLHKVLVDNGSQADIIFLHAFDRMGISHSLLKPSDNPLYGFGGKGTFPVGKIELPLSFGVAPNARSEQVTFDIVDMVYPYNAIMGRGSINKFEAAIHGLYLCMKIPGPLGAITIYGNQQTARNIERDFVPGQRNVHCLTTQREVPAPASPTDKQHDKAQLQSQDGTKTVPLDQATPKQTVTISEDLTSLEEEKLLCCLAKNKDVFAWSALDLVGVSRSIIEHSLGIDPSVRPKKQRLRKMSDEKTEAAKAEVHRLLEAKFIEPVAYPTWVSNVVMVQKKSGKWRMCIDFTSLNKACPKDNFPLPRIDKIVDSAAGCEVMSLLDCFSGYHQIYMKEEDKASTSFITPFDTYCFVRMPEGLKNAGSTFSRLTKIVLEGQVGRNIFTYVDDIVVASKNKEDHLADLAETFANMRDARLRLNPEKCVFGVRQGKILGYLVSHRGIEANPTKIQAIVDMSPPQSARDVQRLTGRLAALNRFISRSAERSLPFLKTLRGAKDFAWGPEQAAAFASLKQYLSELAILTSPXLLLYVAASPHAICSXRLNFALESDKCTNNIAEYEAVILGLRKLRALGVTTCIIKTDSKIVVGQVEKDYAAKDPALMQYLAAIRSLERQFKGFTLQHVDRAKNEEADALAKAAARGEPLPSDVFFHTIGTPAVRSPEGLQITNDSEGHRIVNLIMTEDWRTPITLFLQGYYHPTDVSEAKRLRHRSRDFALIEGQLYKKGVSQPMLKCVTETEGMQILREVHSGTCGSHAGPRALAAKVIRQGFYWPAMICAANRVTRSCEACQKFSPRSGNPSQYTKLIAHTWPLQRWGLDIVGPLPTVQGNLKFAFVAVEYFTKWIEARAVSTITSKTAQKFFWQNIVCRFGVPSELTVDNGKQFDSQDFKDFCFSIGTKLAFA

SEQ ID NO: 272703 - protein, 1293 aa, Zea mays
  unsure (1)..(1293): unsure at all Xaa locations
  Clone ID: MRT4577_180291C.1.pep
MARAQPADNPRVVAHTYQQPPPPYIHAPAPHPPHHAYQHHQEVQIVPPPPPPPHQQQQNIHHPHAPKQEDFADQPYRGVIHMITGGSSTDFDTKRQKRDHYRSINHVAITGPVVQTKWSHVPLTFDARDVDLRSXPHIDAMSXADIIFLHAFDRMGISHSLLKPSDNPLYGFGGKGTFPVGKIELPLSFGVAPNARSEQVTFDIVDMVYPYNAIMGRGSINKFEAAIHGLYLCMKIPGPLGAITVYGNQQTARNIERDFVPGQRNVHCLTAQREVPASANPTDKEHDKAQLQSNDGTKTVPLDQATPKQTVTINEDLTSYDEEKLLCCLSKNKDVFAWSALDLVGVSRSIIEHSLGIDPSVRPKKQRLHKMSDEKTEAAKAEVHRLLEAKFIEPVAYPTWLANVVMVQKKSGKWRMCIDFTSLNKACPKDNFPLPRIDKIVDSVAGCEVMSLLDCFSSYHQIYMKEEDKASTSFITPFGTYCFIRMPEGLKNAGSTFSRLTKTVLEGQVGRNIFTYVDDIVVASRSKEDHLADLAETFANMRDARLRLNPEKCIFGVRQGKILGYLSARDVQRLTGRLAALNRFISKSAERSLPFLKTLRGAKDFAWGPEQAAAFASLKQYLSELAVLTSPDSSLPLLLYVAASPHVVSAALVQEQTVEGVIRQCPVYYVSEVLTPSKCNMTELEKIAYAVVISSRKLRHYFKAFKVRVTLDRGLGELFRNPEASVRIAKWAVELSGYHITFEPRTTIKSQVLADFVVDWTGPITQPDPSTEKVWTIHCDGAWCHAGAGAAAVITSPAGVKHRYAARLSFALESDRCTNNIAEYEAVILGLCKLRALGVTTCIVRTDSKVVTDQVEKDYAAKDPALMQYLTAIRSLERQFKGFTLQHVDRAKNEEAAALAKAAARGESLPSDVFYHVIGTPAVRSPEGLQITNDSEGHRIVNLIMTEDWRAPITLFLQGYYHPTDINEAKRLKHRSRDFALIEGQLYKKGVSQPMLKCVTETKGVQILREVHSGTCGSHAGPRALAAKVIRQGFYWPTIICAANRVTRSCEACQKFSPRSGSPSQFTKLIAHTWPLQRWGLDIVGPLPTAQGNLKFTFVAVEYFTKWIEARAVSTITSKTAQKFFWQNILCRFGVPSELTVDNGKQFDSQDFKDFCFSIGTKLAFALVYHPQSNGVVEHANGKIFTAVKKMLLDEKKAKWADLLPEAVWALNTTECRATGFTPFRLLYGSEAMTPQEIKHGSLKGKYALRPFLSILVIKGQHKCLSVNICKEVNKVQIKSKGMFLDLVHCFMD

SEQ ID NO: 272704 - protein, 118 aa, Zea mays
  unsure (1)..(118): unsure at all Xaa locations
  Clone ID: MRT4577_180292C.1.pep
MAASTMAISSTAMAGTPIKVVSFGEGRITMRKTVCKPKGAGCGRPXYXPDRVKYXGPFSEEXPSYLTXDSPSNYKMXTDKLAADSETFHMNRELEVIALARWDNVLGALXCNFRKLLV

SEQ ID NO: 272705 - protein, 103 aa, Zea mays
  unsure (1)..(103): unsure at all Xaa locations
  Clone ID: MRT4577_180293C.1.pep
MRALGGGGFPSAGLLLLLQLARASHVAYNHRDLEAYAATRTDQVPTSILNPLLRTVFHXSLPXNWINAPNAPMDYKAWSHFLYQYKPKGALCFYIILAHIGVV

SEQ ID NO: 272706 - protein, 1618 aa, Zea mays
  unsure (1)..(1618): unsure at all Xaa locations
  Clone ID: MRT4577_180295C.1.pep
MAPNRANPKADEAAKAALLAARKGKALALTQSTHQEPTEDNVPRTCEDDTLRTCGPEGQSQPPPGFAPLEGADLTEDGEVLGVSTEEQLQLRALRLKNRNLQRQKEILEAKRQRVSALAKVRQMIRDEEQKAQDLEREIALMQREGHLGLHQEPPLQQRAQPEDTREGHLGLQHGPPLQHRAQPENPRFPQRDYTFQHAVPFQGVNYLDERSPLAPHLQVTPWPANFRAGTYPKYNGSIDPAQYIMSYQVAVASAGGDDATMAKSFIIALEGPALTWFTRLPPLSIDSWRSLRDKFLLNFQGYRPDTDALAELSLCKQLEKETLREYYRKFLTLKSQLPSVDDQIAIHYAISGLRAGVLYSHCIRDPPKNLQELYQLFEKYAKSEELHQRKVESQRKPKDASQSSRTWTRTPQPDSGRDGRNCAHQTKDCPETKATRDRMARAQPADNPRIVAHNYQQPPPPYIHAPAPHPPHHAYQHHQEVQIVPPPPPPPHQQHQNIPHAPKQEDFPDQPYRGVIHMITGGSSTDFDTKRQKRDHYRNINHVAVTGPVVQTKWSHIPLTFDARDVDLRSAPHIDAMVINCSVAGWDLHKVLVDNGSQADIIFLHAFDHMGISHSLLKPSDNPLYGFGGKGSFPVGKIELPLSFGVAPNARSEQVTFDIVNMVYPYNAIMGRGSINKFEAAIHGLYLCMKIPGPLGVITVFGNQQTAHNIERDFVPGQRNVHCLTAQREVPAPASPTDKQYDKAQLQSQDGTKTIPLDQATPKQTVTISEDLTSQEEEKLLCCLAKNKDVFAWSALDLVGVSRSIIEHGLGIDPSVRPKKQRLRKMSNEKTEATKAEVHRLLEAKFIEPVAYPTWLSNVVMIYMKEEDKASTSFITPFGTYCFIRMPEGLKNAGSTFSRLTKTVLEEQVGRNIFTYVDDIVVASKNKEDHLADLAETFASMRDARLRLNPKKCVFGVRQGKILGYLVSHRGIEANPTKIQAIINMTPPQSARDVQRLTGRLAALNRFISRSAERSLPFLKTLRGAKDFAWGPEQAAAFASLKQYLSELAILTSPDSSLPLLLYVAASPHAVSAALVQEQTVEGAVRQCPVYCVFEVLTPSKCNMTELEKIAYAVVMSSRKLRHYFEAFKVRVTSDRGLDELFRNPEASHVDRAKNEEADALAKAAARGEPLPSDVFFHTIGTPAVRSXPKXQITNDSDGHRIVNLIMTEDWRAPITLFLQGYYHPADVSEAKRLRHRSRDFALIEGQLYKKGVSQPMLKCVTEAEGMQILREVHSGTCGSHAGPRALAAKVIRQGFYWPAMICAANRVTRSCEACQKFSPRSGSPSQYTKLIAHTWPLQRWGLDIVGPLPTAQGNLKFAFVAVEYFTKWIEARVVSTITSKTAQKFFWQNIVCRFGVPSELTVDNGKQFDSQDFKDFCFSIGTKLAFASVYHPQSNGVVERANGKIFTAVKKMLLDEKKGRWTDLLPEAVWALNTTEWRATGFTPFRLLYGSEAMTPQEIKHGSPRTVLSAVPDVDEPTSKDLIDGERVFALQALNKYQAQTKAWRDHTVIPREFREGDLVLVRTARTESRGKLEPKWEGPFIVKTKASPSAYRLTTPNGEDLQHSWNIDNLRKFFV

SEQ ID NO: 272707 - protein, 1890 aa, Zea mays
  unsure (1)..(1890): unsure at all Xaa locations
  Clone ID: MRT4577_180296C.1.pep
MAPKRANPKADEAAKAALLAARKGKALALTQSTHQEPIEDNVPHTGEDDTFRTCGTEGQSQPPPGFAPLEGADLTEDGEALGVSTEEQLQLRALRLRNRNLQRQKEILEAKRQRVSALAKVRQMIRDEEQKAQDLEREIALMQREGHLGLQQEPPLQQRAQPEDMREGYLGRQHGQPLQHRAQPENPRFPQHDYAPQHGAPFQGINYLDERSPLAPHLQVTPWPANFRAGAYPKYNGSTDPAQYIMSYQVAVASAGGDDATMAKSFIIALEGPALTWFTRLPPLSIDSWRSLRDKFLLNFQGYRPDTDALAELSLCKQLEKETLREYYRKFLTLKSQLPSVDDQIAIHYAINGLRAGVLYSHCIRDPPKSLQELYQLFEKYAKSEELHQRKVESQRKPNSQTPQSSRTWTRTSQPDSSRDSRSQQQVHNIVNQQPAADPPRRQEYPPQGRGNGTRGRGRGRAQQPPRRFYCLFHGEDCAHQTKDCPETKATRDRMARAQPADNPRIVAHNYQPPPPPYVHAPAPHPPHHAYQHHQEVQIVPPPPPPPHQQHQNIPHPPKQEDFADQPYRGVIHMITGGSSTDFDTKRQKRDHYRSINHVAVTGPVVQTKWSHIPLTFDARDVDLRSAPHIDAMVINCSVAGWDLHKVLVDNGSQADIIFLHAFDRMGISHSLLKPSDNPLYGFGGKGTFPVGKIELPLSFGVAPNARSEQITFDIVDMVYPYNAIMGRGSINKFEAAIHGLYLCMKIPGPLGAITIYGNQQTARNIERDFVPGQRNVHCLTTQREVPAPASPTDKQHDKAQLQCQDGTKTVPLDQATPKQTVTISEDLTSLEEEKLLCCLAKNKDVFAWSALDLVGVSRAIIEHSLGIDPSVRPKKQKLRKMSDEKTEAAKAEVHRLLEAKFIEPVAYPTWLSNVVMVQKKSGKWRMCIDFTSLNKSCPKDNFPLPRIDKIVDSAAGCEVMSLLDCFSGYHQIYMKEEDKASTSFITPFGTYCFVRMPEGLKNAGSTFSRLTKTVLEGQVGRNVFTYVDDIVVASKNKEDHLADLAETFASMRDARLRLNPEKCVFGVRQGKILGYLVSRRGIEANPTKIQAIVDMSPPQSARDVQRLTGRMAALNRFISRSAERSLPFLKTLRGAKDFAWGPEQAAAFASLKQYLAELAILTSPDSSLPLLLYVAASPHAVSAALVQEQTVEGTVRQCPVYYVSEVLTPSKCNMTELEKIAYAXVVMSSRKLRHYFEAFKVRVTSDRGLGELFRNPEASVRIAKWAAELSGYHISFEPRTAIKSQVLADFVVDWTGPVTQPDPSTEKVWTIHCDGAWCHAGAGVAAVITSPAGVKHRYAARLSFALESDKCTNNIAEYEAVILGLRKLRALGVTTCIIKTDSKIVAGQVEKDYAAKDPALMQYLAAIRSLERQFKGFTLQHVDRAKNEEADALAKAAARGEPLPSDVFFHTIGTPAVRSPEGLQITNDSEGHRIVHLIMTEDWRAPITLFLQGYYHPTDVSEAKRLEHRSRDFALIEGQLYKKGVSQPMLKCVTETEGIQILREVHSGTCGSHAGPRALAAKVIRQGFYWPAMICAANRVARSCEACQKFSPRSGNPSQYTKLVAHTWPLQRWGLDIVGPLPTAQGNLKFAFVAVEYFTKWIEARAVSTITSKTAQKFFWQNIVCRFGVPSELTVDNGKQFDNQDFKDFCFSIGTKLAFASVYHPQSNGVVERANGKIFTAIKKMLLDEKKGRWTDLLPEAVWALNTTECRATGFTPFRLLYGSEAMTPQEIKHGSPRTAPSATPDVDEPTSKDLIDGDRVSALQALNKYQAQTKAWRDRAVIPKEFSAGDLVLIRTARTESKGKLEPKWEGPFIVKTKASPSAYRLATPDGEDLEHSWNIDNLRKFFV

SEQ ID NO: 272708 - protein, 84 aa, Zea mays
  Clone ID: MRT4577_180297C.1.pep
VDPTLLRIYARYAGWHYSADGVGRCHQTRLGVDGMNSARVEGERERACLACVRPYFGSYFFMGRVNCYVILHNFRYLYVFVREV

SEQ ID NO: 272709 - protein, 77 aa, Zea mays
  Clone ID: MRT4577_180298C.1.pep
IRHEDLFPFRCAHLMCGSVTVEREVGEAAIRSWWSEPDLLGCIVKGPEIGTAPTSGGGRRLLLLDLETNVSSPIQQF

SEQ ID NO: 272710 - protein, 53 aa, Zea mays
  Clone ID: MRT4577_180299C.1.pep
WGYMIVILINGATHAQICQIPPWGHFGHTVLTKPNTFGTSAGGRGQTNAKKAR

SEQ ID NO: 272711 - protein, 88 aa, Zea mays
  unsure (1)..(88): unsure at all Xaa locations
  Clone ID: MRT4577_18029C.1.pep
PATVLSEETXPSHQSRNRYNILXXFNXLXLAVVHLXQTRXHSXXVLPLQYAQTLYKKXKRHLHXRXHXYXXAXLPXNSVXTXPPXTTY

SEQ ID NO: 272712 - protein, 47 aa, Zea mays
  Clone ID: MRT4577_1802C.1.pep
LQAFSCQLNLNKITSHMSKCQKVIFLDTVKYSSKKSSRCAFLLVTLI

SEQ ID NO: 272713 - protein, 93 aa, Zea mays
  unsure (1)..(93): unsure at all Xaa locations
  Clone ID: MRT4577_180300C.1.pep
RLHTKTIGSFPLSXCSSPVRPLFPFRCAHLMCGSVTVEREVGEAAIRSWWSEPDLLGCIVKGPEIGTAPTSGGGRRLLLLDLETNVSSPIQQF

SEQ ID NO: 272714 - protein, 103 aa, Zea mays
  unsure (1)..(103): unsure at all Xaa locations
  Clone ID: MRT4577_180301C.1.pep
MDSHGEVASTAPNQTSKPGLQQDRAXSEAVMTDLLLLSGKSXCRALAMPLRNTLELPMRQAITSETDRTVYLKTVTDCYTRTTKLLDDSMTGRTTNERSSGTR

SEQ ID NO: 272715 - protein, 64 aa, Zea mays
  Clone ID: MRT4577_180302C.1.pep
FTCNHVSCNVRVYVLLISAAVFILLDSLLSTYDHATIIHMITITWGAFVVTNHFFSLSSFSFAF

SEQ ID NO: 272716 - protein, 54 aa, Zea mays
  Clone ID: MRT4577_180303C.1.pep
MERMHRMLTRKSLSWRWDSHIKPKNSAGLADNEADDHKAFKEMLTLIKDKSDVF

SEQ ID NO: 272717 - protein, 43 aa, Zea mays
  Clone ID: MRT4577_180304C.1.pep
ARSVFLHLMKVDPDSTWFLLNELYCPVQFTPPHPSLHPVQLHG

SEQ ID NO: 272718 - protein, 64 aa, Zea mays
  Clone ID: MRT4577_180305C.1.pep
KKHAGTAFIAQSNTKYTKQARVTTVVRHHKSKNDVLSSDNSGQDATGRQMYVEINRRQPSSTIL

SEQ ID NO: 272719 - protein, 108 aa, Zea mays
  Clone ID: MRT4577_180306C.1.pep
GVEGSQCIKGFPSNSYKPNAHFARLKVCKKSFKNTRKGLHASRLAWKNIKLVLLDVDHLTINLCSDTCSIYPSPGLSTSITMQRSPRLTTSCGQLNFGPCPLLRTILS

SEQ ID NO: 272720 - protein, 46 aa, Zea mays
  Clone ID: MRT4577_180307C.1.pep
VPDRQNKHLTMNHIIKGFEGDPSQLMFRCQIILPKLNNLLSDVLMQ

SEQ ID NO: 272721 - protein, 212 aa, Zea mays
  unsure (1)..(212): unsure at all Xaa locations
  Clone ID: MRT4577_180308C.1.pep
MGKKGKWLGAVKKVFSPESKEKKEESMFXMPPPPPAVPSPHQTEEVQVRDVELEQEQEQSKHVTVEAAPDAPAQTSAALPPGVSREELAAIKIQTAFRGYLARRALRALKGLVRLKSLVEGNSVKRQAASTLRCMQTLARVQSQIRSRRLKMSEENQALQRQLLLKQELDSLRMGEHXDDTTQSKEKIEASLISRQEAAIRRERALAYAFSH

SEQ ID NO: 272722 - protein, 107 aa, Zea mays
  Clone ID: MRT4577_180309C.1.pep
MGKKGKWLGAVKKVFSPESKEKKEEKLRKKLAARDPSPPDLTPSTSLEVNVLMPPPPPAVPSPHQTEEVQVRDVELEQEQEQSKHVTVEAAPDAPAQTSAALPPGVS

SEQ ID NO: 272723 - protein, 38 aa, Zea mays
  Clone ID: MRT4577_18030C.1.pep
AGDQIMREANTNTYLVHITTNARETTENHGHDLLHFIG

SEQ ID NO: 272724 - protein, 283 aa, Zea mays
  Clone ID: MRT4577_180310C.1.pep
GRDTVVIVALNLLTSPTDKPKDPSEPRDTKEEKQVPSIKQPDGDESKEGVTTNAPLAPPPKPTQNGSDNDYFSSGNKPTHFSSEPNPFENAFGSNPADTPGKPQLPGVTSLTSPASLLPSATPGWPGSLRSGPLSPAMLTGPTSNNDYFSGDHHFSGSFPTPNESSLRTGLTPGGGGSMFPQPSPNSQALYNSLQSGGATPGTLDFHRTAMTARAHSQANNNFNMPASTSQPQQNPNIQPDLDSKPYNPNGQAQQPEAQDPFSSHQTNDAANGLFMLAQAGGQ

SEQ ID NO: 272725 - protein, 97 aa, Zea mays
  Clone ID: MRT4577_180311C.1.pep
PFSFLPIWNPGGLALLRTPFFLGFLRCSQHPGRRPWHGNPRETIPLNVFPNLHRGNGTNVPSFGSGKARDRKTAHIRLKGFYFWAQKAGPVKILFQP

SEQ ID NO: 272726 - protein, 55 aa, Zea mays
  Clone ID: MRT4577_180312C.1.pep
KIISNKSSLLPVQPNKELGKFFPFKSKKIKIYVGEFFPQSFWGGTLISKHPELAH

SEQ ID NO: 272727 - protein, 81 aa, Zea mays
  Clone ID: MRT4577_180313C.1.pep
VFSSPPLSSTGVMFLHAVFGAVATVLSHVCLGEVGPTVGPYSNTAVAAPSSTSTRTSLCMAAPAYLWWEKTLCYAIASTHA

SEQ ID NO: 272728 - protein, 155 aa, Zea mays
  Clone ID: MRT4577_180314C.1.pep
PVKLRPDLGYLVKPFSMSIEEFLATESRLPGMFEYSRRCTFDDHVKDSRTENGKDKFLSICESITLKVLSNSNLHLVSVDLPVANSLEDATGLRLRFSSKILSSEIPLLITITVEGKCTEVLNLTVKINCEETVFGLNLLNRIANFMVEPSSSAT

SEQ ID NO: 272729 - protein, 41 aa, Zea mays
  Clone ID: MRT4577_180315C.1.pep
ESNSLNSFLLVLVEVTMGSKFYTIKFKDRTLILFIFEPKFI

SEQ ID NO: 272730 - protein, 178 aa, Zea mays
  unsure (1)..(178): unsure at all Xaa locations
  Clone ID: MRT4577_180316C.1.pep
HNASYLSNDDFGRLYIDLAEIEMXPDSWCXRDHLGPPKHLDEATISTPFHMTMHTAGLIHILTALSCEARWWSWNIFSTHDCTADXITRDXSSAGLACNGYILNDYCRYTDGCLHWGHAVGPDLFLYDVGDPTLLIHEGVKAEEDYEKTGKIPHPESTDNSEIKIELTIILDGVKADP

SEQ ID NO: 272731 - protein, 32 aa, Zea mays
  Clone ID: MRT4577_180317C.1.pep
SIQGVVSGPEKHRFAGKRKIILLMARKHTISH

SEQ ID NO: 272732 - protein, 146 aa, Zea mays
  unsure (1)..(146): unsure at all Xaa locations
  Clone ID: MRT4577_180319C.1.pep
FVSRGAARVLFAFPPFXXVLLPGLPAXVAALLWSVWXXPPPXWGGSXPWFGLALSXXRPPGGVPAGGGFFCCGRGPVPFVFFSPFCPVLGFLLLPXPCGFVLLWGFFRLXGXPLLARGLFPLLSLRFXALNVPPLVFVCAXLDTKX

SEQ ID NO: 272733 - protein, 84 aa, Zea mays
  Clone ID: MRT4577_18031C.1.pep
ARLSTLYSRANWSLSSLPRPPTVRDCIQDTRAHKTRVAMIKGSVCGPPCAGYLTSNKAKCLPIKKWNNLSLSARDRMVDNCARC

SEQ ID NO: 272734 - protein, 363 aa, Zea mays
  unsure (1)..(363): unsure at all Xaa locations
  Clone ID: MRT4577_180320C.1.pep
MVTSHCCRERDIVVRLPLPVMEAGAGEAAPSAPRRLTLPWKVRLLLLCLDVVAGLSMRRDGTINRSIFNLFDLRATASTRPDRQGVRSADVDVDASRGLWARVFWPSPESSAAPLPVVVYFHGGAFTLLSAASYVYDAMCRRFCRELGAVVVSVNYRLAPEHRCPAAYEDGVAMLRYLASAGLPDSVDVPVDLSRCFLAGDSAGANIAHHVAXRAGRRPPPRRVPXVRLAGAILVQPYFGGEERTEAEVRLDGNVPVVTVRGSDWMWRAFLPEGADRNHSAAHVTDDNANLADGFPPVMVVIGGFDPLQEWQRRYADVLRRRGKEVRVVEFPDAIHTFFLFPELTDYGTLVEAMKAFIREQRI

SEQ ID NO: 272735 - protein, 70 aa, Zea mays
  Clone ID: MRT4577_180321C.1.pep
AVSKTLHSSAFQSSAQEKGRKDEPEPLSRHLTPPIGRLRSSTRSCCRVCRPLLPPLKPSPPPSASHRLLA

SEQ ID NO: 272736 - protein, 93 aa, Zea mays
  Clone ID: MRT4577_180322C.1.pep
STTTRVFSSLPPAWAPRSSCGTVAMSRSAVAGVGRLQSAWQKSACPAIAASSSSTEKVLLGGGEGMGKGRWMHRRLVHGGGLEEVESRAAELR

SEQ ID NO: 272737 - protein, 1035 aa, Zea mays
  Clone ID: MRT4577_180323C.1.pep
MASFNDQAGAASAPKLVLPITGGSCSEPANKKQKKEAQRRVQHVGVQGPFIKSRWSHIPITFSQEDLQLKDYPHNDVMVISCVIKGFLVHNVLVDTGSAADIIFAKAFRQMQEPEDKIHDATHPFCGFGGRQIVALGKITMSVTFGFVNNTRTEQVVFDIVDMEYPYNAIIGRGTLNAFEAILHPAYLCMKIPSDQGPIAIHGSQEAARRAEGNWTDSKAIHNIDGAEASNDLCGVNRDVIEHSLNVDPSFRPRKQRLQKMSDDKAEGARNEVKRLLSAGVNREVKYPEWLANTVMVKKANGKWRMCIDFTDLNKACPKDEFPLPRIDSLVDAAASSELMSLLDCYSDYHQIWMKKEDEPKTSFITPSGTYCYLRMPEGLKNAGGSFSRMTANVLHSQIGRNVLTYVDDIIVKSTKQDNHIAGLQETFANFRQAGLKLNPEKCVFGVKKGKFLGCLVSTKGIEANPNKIEAILRMEPPSTKKGAQRLTGRLASLNRFISRSAERNLPFFEVLKSAEVFQWGPVQQKAFEELKQYLIDLTTLTPPMPGAPLLLYVAASHSAVSAALVQEKLEGQVKKQAPIYFVSEVLSLSKKNYTELEKVLYAVLMASRKLRHYFQAYNIIVPSSQPLKDIIRNREATRRIGKWAAELNEFCIDYVHRSSIQSQALADFIADWTPGAQEEEMNKDAEAWTVFCDGSWGTFGAGAAAVLVSPSKVRTCYAIYKARDPKLEKYLDTARRIEASFEGFSVKNIPRGENEYADLLAKSAAQGLPLPSDVFFETIKAPSVELLERAVLNISPVYSEDWRTEIISFLQVPKAITVDNGTQFDFEAFREFCDQIGTKIHFASVRHPESNGLVERANGIIMTGIMKSIFNRPRGKWPEELIKVVWSHNTTASRSTGFTPFKLLFGDEAITPEEAKAGSIRTIASAEGEDEADCSMEKDAIEGIRLQAVENINKYQAETVKWRDRKVRLKNIKPGHLVLRRVANPDTVGKLQLKWEGPSLVVSSSRPGSYRLKDMYGNDIPRSWNADELRRYYV

SEQ ID NO: 272738 - protein, 297 aa, Zea mays
  Clone ID: MRT4577_180324C.1.pep
MGIRRAILKTDSQVISGHVDKSYKARDLKLEKYLDTVRRIETSFEGFSVKNIPRGENEYADLLAKSAAPGLPLPSEVFFETIKAPSVELLERAVLNISPVYSEDWRTEIISFLQGNFLSDDEAYNKRIEARARPYVIIEGELYKRGVCSPLLKYLSRSEGFTPFKLLFGDEAITPEEAKAGSIRTVASAEGEDEVDCSVEKDAIEGIRLQAVENINKYQAETIKWRDRKVKLKNIEPGHLVLRRVANPETVGKLQLKWEGPFLVVSSSRPGSYRLKDMDDNDIPRSWNVDELRRYYV

SEQ ID NO: 272739 - protein, 969 aa, Zea mays
  Clone ID: MRT4577_180325C.1.pep
MEYPYNAIIGRGTLNAFEAILHPAYLCMKIPSDQGPIAIHGSQEAARRAEGNWTDSKAIHNIDGIEACEQYKFRREKAASADQPKPMLLCEDIAEQKVLLGSQLSEEQEKTLIRFLFNNKDVFAWSANDLCGVNRDVIEHSLNVDPSFRPRKQRLRKMSDDKAEGARNEVKRLLSAGVIREVKYPEWLANTVMVKKANGKWRMCIDFTDLNKACPKDEFPLPRIDSLVDAAASSELMSLLDCYSGYHQIWMKKEDEPKTSFITPSGTYCYLRMPEGLKNAGGSFSRMTARVLHSQIGRNVLTYVDDIIVKSTKQDNHIADLQETFANFRQAGLKLNPEKCVFGVKKGKFLGCLVSTKGIEANPSKIEAILRMEPPSTKKGAQRLTGRLASLNRFISRSAERNLPFFEVLKSAEVFQWGPIQQKAFEELKQYLIDLTTLTPPTPGAPLLLYVAALHLAVSAALVQEKLEGQVKRQAPIYFESEVLSLSKKNYTELEKVLYAVLMASRKLRHYFQAYNIIVPSSQPLKDIMRNREATGRIGKWAAELNEFCIDYVHRSSIQSQALADFIADWTPGAQEEETNKDAEGWTVFCDGSWGTFGAGAAAVLVSPSKVKTCYAAKLDFSCTNNIAEYEALLLGLRKLKAMGIRRVILKTDSQVISGHIDKSYKARDPKLEKYLDTVRRIEASFEGFSVKNIPRGENEYADLLAKSAAQGLPIPSEVFFETIKAPSVELLERAILNISPVHSEDWRTEIVSFLQGNFLSDDEAYNRRIEARARPYVIIEGELYKHGVCSPLLKCLSRSEVPKAIIVDNGTQFDSEAFREFCDQIGTKIHFASVRHPESNGLVERANGIIMTGIMKSIFNQPRGKWPDELIKVVWSHNTTISRSTGFMPFKLLFGDEAITPEEAKAGSIRTVASAEGEDEADSSVEKDAIEGIRLQAVENINKYQAETIKWRDRKVKLKNIEPGHLVL

SEQ ID NO: 272740 - protein, 418 aa, Zea mays
  unsure (1)..(418): unsure at all Xaa locations
  Clone ID: MRT4577_180326C.1.pep
GSWGTFRAGAAAVLVSPSKVKTCYAAKLDFSCTNNIAEYEALLXLGLRKLKAMGIRRAILKTDSQVVSGHIDKSCKAKDPKLEKYLDMVRRVEASFEGFSVKNIPRGQNEHADLLAKSASQGLPLPSDVFFETIKAPSVELLERAVLNISPVYSEDWRTEIISYLQGKFLSDDETYNRRIEARARPYVMIEGELYKHGVCAPLLKCLSRTEGIELMKEIHAGLCGSHIGSRPLLGKVFRQGFYWPKAASDAAELVQKGKWPDQLTKVVWSHNTTTSRSTGFTPFKLLFGDEAITPEEAKTGSIRVVASADSGSEAAYSVEKDALEGIRLQAVENINKYQAETIKWRDRKVRLKNIEPXDTWCFXRMANPETVGKLQLKWDGPFLVASSSRPGSYRLKDMDGNDIPTSWNADELRRYYV

SEQ ID NO: 272741 - protein, 68 aa, Zea mays
  Clone ID: MRT4577_180327C.1.pep
MASMMGGDFVEAYVLRNAYKEKLRRMDQAEAAAAQRAPRTPPVPLERRRRLLLAAVVVRAAGEASLAS

SEQ ID NO: 272742 - protein, 407 aa, Zea mays
  Clone ID: MRT4577_180328C.1.pep
MNVCYHQIWMKKEDEPKTSFITPSGTYCYLRMSEGLKNAGGSFSRMTAKVLHSQIGRNVLTYFDDIIVKSTKQENHIADLQETFANFRQASLKLNPEKCVFGVKKGKFLGCLVSTKGIEANPNKIEAILRIEPPSTKKGAQRLTGRLTSLNRFISRSAERNLLFFEVLKSAEVFQWGPVQQRAFKELKQYLIDLTTLTPPTPGAPLLLYVAASHSAVSAALVQEKLEGQVKKQAPIYFVSEVLSLSKKNYTELEKVLYAVLMASRKLRHYFQAYNIIVPSSQPLKDIMRNREATGRVGKWAAELNEFCIDYVHRSSIQSQALADFIADWTPGAQEEETSKDAEVWTVFCDGSWGTFGVGAAAVLVAPSKVKTCYATNNIAEYEALLLGLRKLKAMGIRRAVLKTDSQ

SEQ ID NO: 272743 - protein, 202 aa, Zea mays
  Clone ID: MRT4577_180329C.1.pep
IPERYILNRWTKYARKGTYPFPVDEFAEQDRTEVAFVYRNRAMWFVYDLLTKSKSHHNTRKLILDALENGEKSLESMCDLKRLHMNTLGKEKDGSRVEKRKKKSTKQEKHSRNVKQAVLPQTADPVFVDPPNQDQYFAAEDIASNQSVGRPFFYQGYPMTVVSTSQIQGHTNMHSEPQCASQEYSAYGTVQPPSQFGGGRNF

SEQ ID NO: 272744 - protein, 67 aa, Zea mays
  unsure (1)..(67): unsure at all Xaa locations
  Clone ID: MRT4577_18032C.1.pep
VDPNETNSPVLNGITFGYLISLAVXKGLFLQLMNIVIAYLYGSLGSNINVKVPGGIPILLPGKNRNM

SEQ ID NO: 272745 - protein, 35 aa, Zea mays
  Clone ID: MRT4577_180330C.1.pep
MAAAVALLLLSALGGAAAQVFPPWNGTFPMGPGFF

SEQ ID NO: 272746 - protein, 1102 aa, Zea mays
  Clone ID: MRT4577_180331C.1.pep
MASFNIQAGAASVPKLVLPITGGSCSEPANKKQKKEAQRRVQHVGVQGPFVKSRWFHIPITFSQEDLQLKDYPHNDAMVISCVIKGFLVHNVLVDTGSAADIIFAKAFRQMQKPEDKILDATHPLCGFGGRQIVALGKISMSVAFGFINNTRTEQIPSDQGPIAIHGSQEAARKAEGNWTDSKAIHNIDGTKACEQYKFRREKAASADQPKPMLLCEDIAEQKVLLVSQLSEEQEKTLIRFLFNNKDVFAWSANDLCGVNRDVIEHSLNVDPSFRPRKQRLWKMSDDKAEGARNEVKRLLSAGVIREVKYPEWLANTVMVKKANGLKNAGGSFSRMTAKVLHSQIGRNVLTYVDDIIVKSTKQDNHIADLQETFANFRQAGLKLNPEKCVFGVKKGKFLGCLVSTKGIEANPSKIEAILRMEPPSTKKGAQRLIGRLASLNRFISRSAERNLPFFEVLKSAEVFQWGPIQQNAFEELKQYLIDLTTLTPPTPGAPLLLYVAASHSASQSLADFIADWTPGAQEEETNKDAEAWTVFCDGSWGTFGAGAAAVLVSPSKVKTCYAAKLDFSCTNNIAEYEALLLGLRKLKAMGIRRAILKTDSQVISGHIDKSYKARDPKLEKYLDTVRRIEASFEGFSVKNIPRGENEYADLLAKSVAQGLPVPSEVFFETIKAPSVELLERAILNISHVYSEDWRTEIISFLQGNFLSDDEAYNRRIEARARPYVIIEGELYKRGVCSPLLKCLSRSEGIELMKDIHAGLCGSHIGSRPLLGKVFRLVFYWPKAASDAADLVQKCEGCQKCARDQKQPSSLTQLIQPTWPLQRWGLDLLGPLPPAQGNLRYVVVAVEYFSKWIEAKPLATITSFTIQKFFWQNIVCRFGVPKAITVDNGTQFDSEAFREFCNQIGTKIHFASVRHLESNGLVERANGIIMTGIMKSIFNQPRGKWPDELIKVVWSHNTTISRSTGFTPFKLLFGDEAITPEEAKTGSIRTVASAEGEHEADCSVEKDAIEGIRLQAVENINKYQAETIKWRDRKVKLKNIEPGHLVLRRVANPETVGKLQLKWEGPFLVVSSSRPGSYRLKDLDGNDIPRSWNADELRRYYV

SEQ ID NO: 272747 - protein, 1094 aa, Zea mays
  Clone ID: MRT4577_180332C.1.pep
MASFNIQTGAASAPKLVLPITGGSCSEPANKKQKKEAQRRVQHVGVQGPFIKSRWSHIPITFSQEDLQLKDYPQNDAMVISCVIKGFLVHNVLVDTGSAADIIFAKAFRQMQEPEDKILDATHPLCGFGGRQIVALGKISMPITFGFINNTRTEQVVFDIVDMEYPYNAIIGRGTLKAFEAILHPAYLCMKIPSDQGPIAIHGSQEAARRAEGNWTDSKAIHNIDGAEASNDLCGVNRDVIEHSLNVDPSFRPRKQRLRKMSDDKAEGARNEVKRLLSAGVIREVKYPEWLANTVMVKKANGKWRMCIDFTDLNKACPKDEFPLPRIDSLVDAAASSELMSLLDCYSGYHQIWMKKEDEPKTSFITPSGTYCYLRMPEGLKNVGGSFSRMTAKVLHSQIGRNVLTYVDDIIVKSTKQDNHIADLQETFANFRQAGLKLNLEKCVFGVKKGKFLGCLVSTKGIEANPSKIEAILRMEPPSTKKGAQRLTGRLASLNRFISRSAERNLPFFEVLKSAEVFQWGPIQQKAFEELKQYLIDLTTLSPPTPGAPLLLYVAASHSAVSAALVQEKLEGQVKKQAPIYFVSEVLSLSKKNYTELEKVLYAVLMASRKLRHYFQAYNIIVPSSQPLKDIMRNREATGRIGKWAAELNEFCIDYVHRSSIQSQALVDFIADWTPGAQEEETNKDAETWTVFCDGSWGTFGAGAAAVLVSPSKVKTCYAARLNFSCTNNIVEYEALLLGLRKLKAMGIRRAILKTDSQVISGYVDKSYKARDPKLEKYLDTVRRIEASFEGFSVKNIPRGENEYAGLLAKSAAQGLPIPSEVFFETIKAPSVELLERAILNISPVYSEDWRTEIISFLQGNFLSDDEAYNRRIEARARPYVIIEGELYKRGVCSPLLKCLSRSEVRHPESNGLVERANGIIMTGIMKSIFNQPRGKWPDELIKVVWSHNTTMSRSTGFTPFKLLFGDEAITPEEAKAGSIRTVASAEGEDKVDCSVEKDAIEGFRLQAVENINKYQAETIKWRDRKVKLKNIEPGHLVLQRVANPETVGKLQLKWEGPFLVVSSSRPGSYRLKDMDGNDIPRSWNADELRRYYV

SEQ ID NO: 272748 - protein, 64 aa, Zea mays
  Clone ID: MRT4577_180333C.1.pep
LAFPRWRLSYLRGQAKELLGIYLLGSSTMSALFSLLINPQAPAALLGALFHGVCTLYISGRGYL

SEQ ID NO: 272749 - protein, 66 aa, Zea mays
  unsure (1)..(66): unsure at all Xaa locations
  Clone ID: MRT4577_180334C.1.pep
DSIKFETHNSXGGRFYYICQTNXTLYTTFTIQRYPTIWLQTAHLISNQFQKDYIKFQDKTPKYHIS

SEQ ID NO: 272750 - protein, 1129 aa, Zea mays
  Clone ID: MRT4577_180335C.1.pep
MASFNDQAGAASAPKLVLPITGGSCSEPANKKQKKEAQRRVQHIGVQGPFIKSRWSHIPITFSQEDLQLKDYPHNDAMVISCVIKGFLVHNVLVDTGSAADIIFAKAFRQMQEPEDKIHDATHPLCGFGGRQIVALGKITMPITFGFINNTRTEQVVFDIVDMEYPYNAIIGRDGAEACEQYKFRREKAASADQPKPMLLCQDIAEQKVLLGSQLSEEQEKTLIRFLFNNKDVFAWSANDLCRVNRDVIEHSLNVDPSFRPRKQRLRKMSDDKAEGARNEVKRLFSAGVIREVKYPEWLANTVMVKKANGKWRMCIDFTDLNKACPKDEFPLPRIDSLVDTAASSELMSLLDCYSGYHQIWMKKEDEPKTSFITPSGTYCYLRMPEGLKNAGGSFSRMTAKVLHSQIGRNVLTYVDDIIVKSTKQDNHIADLQETFANFRQAGLKLNPEKCVFGVKKGKFLGCLVSTKGIEANPSKIEAILRMEPPSTKKGAQRLTERLAFLNRFISRSAERNLPFFVVLKSAEVFQWGPVQQRAFEELKQYLIDLTTLTPPTPGAPLLLYVAASHSAGTFGAGAAAVLVSPSKVKTCYAARLDFSCTNNIAEYEALFLGLRKLKTMGIRRAILKTDSQVISGHIDKSYKARDPKLEKYLDTVRRIEASFEGFSVKNIPRGENEYADLLAKSAAQGLPLPSEVFFETIKAPSVELLERAVLNISPVYSEDWRTEIISFLQGNFLSDDKAYNRRIEARARPYVIIEGELYKRGVCSPLLKCLSRSEGIELMKEIHAGLCGSHIRSRPLLGKVFRQRFYWPKAASDAADLVQKCEGCQKCARDQKQPSSLTQLIQPTWLLQRWGLDLLGPLPPAQGNLRYVVVAVEYFSKWIEAKPLATITSFTIQKFFWQNIVCRFGVPKAITVDNGTQFDSEAFREFCDQIGTKIHLASVRHPESNGLVERANGIIMTGIMKSIFNQPRGKWPDELIKVVWSHNTTMSRSTGFTPFKLLFGDEAITPEEAKAGSIRTVASTEGEDEADCSVEKDAIEGIRLQAVENINKYQAETIKWRDRKVKLKNIEPGHLVLRRVANPETVGKLQLKWKGPFLVVSSSRPGSYRLKDMDGNDIPRSWNADELRRYYV

SEQ ID NO: 272751 - protein, 80 aa, Zea mays
  Clone ID: MRT4577_180336C.1.pep
PPARPFFFFPGRPALSVHLCTPRAVAGRLFFFRLGLLRRDTLAPGGPGPPCCPAARLSGPARSSGAAAWFLVTLRAGSPV

SEQ ID NO: 272752 - protein, 734 aa, Zea mays
  unsure (1)..(734): unsure at all Xaa locations
  Clone ID: MRT4577_180337C.1.pep
MASFNIQAGAASVPKLVLPITGGPCSEPANKKQKKEAQRRVQHVGVQGPFIKSRWSHIPITFSQEDLQLKDYPHNDAMVISCVIKGFLVHNVLVDTGSAADIIFAKAFRQMQEPEDKILDATHPLCGFGGRQIVALGKISMSVAFGFINNTRTEQIMFDIVDMEYPYNAIIGRGTLNAFEAILHPAYLCMKIPSDQGPIAIHGSQESARRTEGNWTDSKAIHNIDGTEACEQYKFRREKAASADQPKPMLLCEDIAEQKAEGARNEVKRLLSAGVIREVKYPEWLANTVMVKKANGYHQIWMKKEDEQKTSFITPSGTYCYLQMPEGLKNAGGSFSRMTAKVLHSQIGRNVLTYVDDIIVKSTKQDNHIADLQETFANFRQAGLKLNPEKCVFGVKKGKFLGCLVSTKGIEANPKRNLPFFEVLKTAEVFQWGPLQQKAFEELKQYLIDLTTLTPPTPGAPLLLYVAASHSVVSAALVQEKLEGQVKRQAPIYFVSEVLSLSKKNYTELEKVLYAVLMASRKLRHYFQAYNIIVPSSQPLKDIMRNREATGRIGKWAVELNEFCIDYVHRSSIQSQALADFIADWTPGAQEEETSKDAEAWTVFCDGSWGTFGAGAAAVLVSPSKVKTCYAARLDFSCTNNIAEYEALLLGLRKLKAMGIRRAILKTDSQVISGHIDKSYKARDPKLERYLDTVRRIEASFEDFSVKNIPRGENEYADLLAKSAAQGXPIPSEQ

SEQ ID NO: 272753 - protein, 48 aa, Zea mays
  Clone ID: MRT4577_180338C.1.pep
KINCVHIVLPCHLRYLLYRIVLLIRIVSPSFHIINAYLNGLSSLRTRG

SEQ ID NO: 272754 - protein, 50 aa, Zea mays
  Clone ID: MRT4577_180339C.1.pep
QQVGSHCIIRDDLITTSKIRDYWMMVRYRSCLVSTMLVQLSVYSQFYLRW

SEQ ID NO: 272755 - protein, 87 aa, Zea mays
  Clone ID: MRT4577_18033C.1.pep
VRMLGIRLEEMAARCFSSTGGFHVKTCFPRARVTVYWSATGGDGNVSSSSVSIEYYVKTFSAALALTWVLLFWVDTCHPPVGVSIES

SEQ ID NO: 272756 - protein, 216 aa, Zea mays
  unsure (1)..(216): unsure at all Xaa locations
  Clone ID: MRT4577_180340C.1.pep
MPSCARISSAVSTAAASSSSPPPHPPRCSRRILAAATARVREGTLRPEEAHDLLDELQRRGTPVLDRDLNGFLAALARAPSSAACGSGPALAVALFNRAASRAQGPRVLSPTSYTYAILMDCCTRAHRPELALAFFGQLLRTGLRVDAIIASHLLKGFCEAKRTDEALDILLHRTPELGCVPEFFSYTXLLKSLCXQGKSGQADDLLRMMAEXXTV

SEQ ID NO: 272757 - protein, 208 aa, Zea mays
  unsure (1)..(208): unsure at all Xaa locations
  Clone ID: MRT4577_180341C.1.pep
MSSRSLPPKDRRMRTERTSYRDAPYRRDSRHGPSRFRNDLCNNCKRPGHFARECPSVAVCHTCGLPGHIAAECSSKGVCWNCKEPGHMANSCPNEGICRNCGKSGHIARDCTAPPVPPGEVILCSNCYKPGHFREECTNEKACNNCRQSGHLARNCTNDPVCNLCNVAGHLARQCPKSDTLGERGXGPPSXRGVGAPFHDVGAPFRGG

SEQ ID NO: 272758 - protein, 87 aa, Zea mays
  Clone ID: MRT4577_180342C.1.pep
NYAPFASDLRGLSQLNIKYQLGTPYKPFDQLMGDIPARSAHALPLPARQPMTDPKSASDWLLSYRFWSPYEWEEILLTRNCTTTENW

SEQ ID NO: 272759 - protein, 256 aa, Zea mays
  unsure (1)..(256): unsure at all Xaa locations
  Clone ID: MRT4577_180343C.1.pep
FPCPPRSLSRCDDCVEYRPRPLTPRRRRPRRLRQVPRDGPFIFVSLFAGRRAPARHIAAECSSKGVCWNCKEPGHMANSCPNEGICRNCGKSGHIARDCTAPPVPPGEVILCFFCYKPGHFREECTNEKACNNCRQSGHLARNCTNDPVCNLCNVAGHLARQCPKSDTLGERGGPPPFRGVGAPFHDVGAPFRGGFSDVVCRACNQIGHTSRDCMAGAFMICHNCGGRGHMAYECPSASLMDRFXPPRPFLKEGPS

SEQ ID NO: 272760 - protein, 84 aa, Zea mays
  Clone ID: MRT4577_180344C.1.pep
RSPPLSCCCWWSSSSCAGSIVPSSGLVRAQSLVVVVVVLRVCCSSSTPGEVSTEQGPCLPSMLQMRRSQEEREAAPERARSVWV

SEQ ID NO: 272761 - protein, 261 aa, Zea mays
  Clone ID: MRT4577_180345C.1.pep
MSSRSLPPKDRRMRTERTSYRDAPYRRDSRHGPSRFRNDLCNNCKRPGHFARECPSVAVCHTCGLPGHIAAECSSKGVCWNCKEPGHMANSCPNEGICRNCGKSGHIARDCTAPPVPPGEVILCSNCYKPGHFREECTNEKACNNCRQSGHLARNCTNDPVCNLCNVAGHLARQCPKSDTLGERGGPPPFRGVGAPFHDVGAPFRGGFSDVVCRACNQIGHTSRDCMAGAFMICHNCGGRGHMAYECPSASLMDRFPPRRF

SEQ ID NO: 272762 - protein, 254 aa, Zea mays
  unsure (1)..(254): unsure at all Xaa locations
  Clone ID: MRT4577_180346C.1.pep
PSPSFSLSLRRLCGVPPPPPQALTPRRRRPRRLRQVPRDGPFIFVSLFAGRRAPARFRNDLCNNCKRPGHFARECPSVAVCHTCGLPGHIAAECSSKGVCWNCKEPGHMANSCPNEGICRNCGKSGHIARDCTAPPVPPGEVILCSNCYKPGHFREECTNEKACNNCRQSGHLARNCTNDPVCNLCNVAGHLARQCPKSDTLXERGGPPXFRGVGAPFHDVGAPFRGGFSDVVCRACNQIGHTSRDCMAGXFMI

SEQ ID NO: 272763 - protein, 145 aa, Zea mays
  Clone ID: MRT4577_180347C.1.pep
PTTHAIGLNTNTPITWGRPRHLLQGPSEGLASPHQGQPLHTLLAEYAGAKNTPLSTRSGDQPMDSTLGADTFPEHLEPVNVPGRNHGHKPNGSCPQGRPPGRTGLERAPHRLQWPDQTSTPMANMLRRSPLEQHHLPSQTRPSGS

SEQ ID NO: 272764 - protein, 332 aa, Zea mays
  unsure (1)..(332): unsure at all Xaa locations
  Clone ID: MRT4577_180348C.1.pep
MSMASPVLHRLILLSVSLSVAIAAADASAVPVEYLYPTLNLTYIHSIDTDGVFLRSPSANFSAAICTPAGAGQSSDDSQSRFFFSVLHTASRTPVWTATATGSTMFNSIVLSVAPTGLALYDPSAAKPDDPAWSTPRLREPVVALRLLDTGELALIDSRNATLWSSFDRPTDTLLPGQPLLLGSPLTSSASDRDLSPGAYRLVLTPNDALLQWATNASTAFLTYWSMSSDPAALQDSNQAVAAMAVNSSGLYLFAANGRDTVYRLLFPSPXASKSESRILKLYPSGXLRAVALTXAXTVXTIWAAPANDCDLPLPCPSLSLCTSDANGSTCT

SEQ ID NO: 272765 - protein, 44 aa, Zea mays
  Clone ID: MRT4577_180349C.1.pep
ESYLGPPNFLVRLPPSTRSLLGSFLAQFTSFVGVSFPCWHGSIL

SEQ ID NO: 272766 - protein, 116 aa, Zea mays
  unsure (1)..(116): unsure at all Xaa locations
  Clone ID: MRT4577_18034C.1.pep
TFPHWPPAFPRMGLFDIGPLGVSGSPRRFGVMPRPGASCSPVRGVLYCGMVLRSXGQRVVGVPVKRGVKKRSPRGSGGFFLKXLKTEEGRSTGARDTDSGGLRDKLPXHEAVXIAX

SEQ ID NO: 272767 - protein, 54 aa, Zea mays
  unsure (1)..(54): unsure at all Xaa locations
  Clone ID: MRT4577_180350C.1.pep
LVSQWXKKKKKKKKKKKKKKKKKKKKKKKKKKKKKTLKSLPLLGLQPSSPLNSF

SEQ ID NO: 272768 - protein, 98 aa, Zea mays
  Clone ID: MRT4577_180351C.1.pep
VGEPRHGGGGNEKGTHQSSSIWVCKEVISYLPPLHPPTRFLSSHRIACAQHTLAMPVWPQQIGSAASCTPTLQSSPSSGMKCVREQLLHVQSQSLVHL

SEQ ID NO: 272769 - protein, 261 aa, Zea mays
  unsure (1)..(261): unsure at all Xaa locations
  Clone ID: MRT4577_180352C.1.pep
PRVRPRVRLILSQINHRNVVKLLGCCLEVEVPMLVYEYVPNGSLHAYIHGXATAAAAVARPSXLPPGARLRIAAESADALAYMHSSASPPILHRDVKSANILLDGDLAAKVSDFGASRLAPAGEEAVATLVQGTLGYLDPEYLLTSQLTSKSDXGGPGSIQCFAVVVLELLTGRKAFVXGGXEEEEEGGLAFCFVTAAQAGRHREIMDQRVIEEVGAEVLDEASELLMRCLSIIGDERPTMKEVADKLQKLRRHACSSSRL

SEQ ID NO: 272770 - protein, 87 aa, Zea mays
  Clone ID: MRT4577_180353C.1.pep
AVPWPKGPRVVGVEGFVVSKERAAVAGWPTRPQKLSLSVGKVSQNPPSAWWGGSFVVVKNFGPGDSRSVPCYRGYWQTLSDTVRVFS

SEQ ID NO: 272771 - protein, 142 aa, Zea mays
  unsure (1)..(142): unsure at all Xaa locations
  Clone ID: MRT4577_180354C.1.pep
AILDQLGXLVEVDVPRALFQEQGQQLYGAKLLQLQAERKLDKDQLASLSTKRSVQAYLEDEKENITRIIKQMLAVGEIFKSENLQYSTDQLVKEVENSIAEFKHYNQDYDEDSIRQQVQDVLEAAKVLEWLKENCTVEYIRR

SEQ ID NO: 272772 - protein, 60 aa, Zea mays
  unsure (1)..(60): unsure at all Xaa locations
  Clone ID: MRT4577_180355C.1.pep
KKSVPRAPRXXVVXQGPGRXGLSPAXASLSXXLGPGPSLRAPLXRPLRAVSVVDSPRGPP

SEQ ID NO: 272773 - protein, 118 aa, Zea mays
  Clone ID: MRT4577_180356C.1.pep
QLYGAKLLQLQAERKLDKDQLASLSTKRSVQAYLEDEKENITRIIKQMLAVGDIFKSENLQYSTDQLVKEVENSIAEFKHYNQDYDEENIRQQVQDVLEAAKVLEWLKENCTVEYIRR

SEQ ID NO: 272774 - protein, 95 aa, Zea mays
  Clone ID: MRT4577_180357C.1.pep
ARSWWDPWTSARRANRCSRARCCIALSIRETWRLIVRYTVNCMTPWLDLLNACEDHLLEHHWTMRSILSYTQVNHICLTTLTIVLLKAPLLNTGC

SEQ ID NO: 272775 - protein, 75 aa, Zea mays
  unsure (1)..(75): unsure at all Xaa locations
  Clone ID: MRT4577_180358C.1.pep
IIXEGFFFFFFFFGRVARNKLKLGGGDQNVVRLQTSQSITISVGTNEVLNPFEGGFSATKATIKGPFNRGFFIFA

SEQ ID NO: 272776 - protein, 48 aa, Zea mays
  unsure (1)..(48): unsure at all Xaa locations
  Clone ID: MRT4577_180359C.1.pep
PPLSFHIQPQYPYQLNLFFGNKLFFFFQLXYQPPNFNFPPPNFYYLLI

SEQ ID NO: 272777 - protein, 157 aa, Zea mays
  Clone ID: MRT4577_18035C.1.pep
EGTGIPPDIGDLEAGRVQKICSLAAEFKSGKLPSEDEVAKWSGQEWELYLENLPADVEASQVTALDERYKLSESRDYEVKVAFLQLAIPTGCKCYFNEVEKCLKQVGRMKYLRPLYSSLAKCSSEEKMLAQRIFSEAQEFYHPIARSVAEAILSKHS

SEQ ID NO: 272778 - protein, 145 aa, Zea mays
  Clone ID: MRT4577_180360C.1.pep
MAGIDLNDTVEEDEEEAEPGNACSQQSRTSSAATFPPPPPNQPRPSAAVCLELWHACAGPVAPLPRKGSVVVYLPQGHIEHLGDAAAAGGGAPPPVALPPHVFCRVVDVTLHADASTDEVYAQLALVAENEDVARRLRGRSEDGS

SEQ ID NO: 272779 - protein, 95 aa, Zea mays
  Clone ID: MRT4577_180361C.1.pep
FSYPSCSFSFSLSSPIFGFVNYQIEMAPIKFSIPLLLSLPFLFHLLPLPSQHLQHLLLIPLFQYHPLSIYSYFPLLLLLHLLHFIYYSLTPFISL

SEQ ID NO: 272780 - protein, 139 aa, Zea mays
  Clone ID: MRT4577_180362C.1.pep
SACFFFSASFFSSWSRSTRPPSRGSPPPSRGKGSKKRAPPPLWAKPLPLKVRLSIRSWVPPRAKGGACFFGERKKKGVFPPRPLGLNWIFKTREKKLVSPVLDPKLILVQVYNHACNLSKVPPPKTIPSDPCMTRCSEF

SEQ ID NO: 272781 - protein, 74 aa, Zea mays
  Clone ID: MRT4577_180363C.1.pep
KGGVEKQDSNPLWPILFIYQGNKGPLGGTPNYKMVLVHNNNLLFLREGGGLKNSGGGGHDGGGAPPNTHFQVWK

SEQ ID NO: 272782 - protein, 83 aa, Zea mays
  Clone ID: MRT4577_180364C.1.pep
LCRSSARAFGHLYIHTIMMVLASVVTTSFVILLLFSLPSCLHLRATPFSVEDVGAGASSPYSSDTSPDTDSRSGYCTFTRTFP

SEQ ID NO: 272783 - protein, 121 aa, Zea mays
  unsure (1)..(121): unsure at all Xaa locations
  Clone ID: MRT4577_180365C.1.pep
GGLPPPGVVPGAIPGVRGVFPPVQKFVPQGFLLEGESRKRVGPGGNDPPPPQLGGVWGWNXDWGCFKNXLFQGGPDPGKGQKLLGINEKVLGVALGSRAGGKGNINFLGKGGFGLLVFGGP

SEQ ID NO: 272784 - protein, 495 aa, Zea mays
  Clone ID: MRT4577_180366C.1.pep
MVDTGGGRLYQRRGAVAFVAANKALLAAAWVVGFALVFLWQSASMSFGSAGGGGYLRLLSAPPPPPRPAPRLRPTAYNITDFGAVGDGRAVNTAAFERAVEAIAALAERGGGQLNVPPGRWLTAPFNLTSHMTLFLADGAEILGITDEKYWPLLPALPSYGYGRERKGPRFGSLIHGQNLKDVVITGHNGSINGQGEVWWMKHRRRILNNTRPPLVQLMWSKDIIVANITLRNSPFWHLHPYDCTNVTVSNVTIMSPVSGAPNTDGIDPDSCQDVLIENCYISVGDDAIAIKSGWDQYGIAYGRPSSNISIRNVTARSLVSAGISIGSEMSGGVANVTVENVRIWESRRGVRIKTATGRGGYIRNISYRNITFDNVRAGIVIKVDYNEHADDGYDRTAFPDITSISFKGIHGQGVRVPVRAHGSDVIPIKDISFQDMSVGISYKKKHIFQCSYLEGRVIRPVFPKPCENLDVYDEQGQLVKRAVALNSTELDYDI

SEQ ID NO: 272785 - protein, 72 aa, Zea mays
  Clone ID: MRT4577_180367C.1.pep
NIITRKLAQAVIEAFKHTNFTAFRNTKSTLKDGVFPNYKRYVKCNTVKIKQLFTQRATQTKVKAYTLYMAII

SEQ ID NO: 272786 - protein, 224 aa, Zea mays
  unsure (1)..(224): unsure at all Xaa locations
  Clone ID: MRT4577_180368C.1.pep
IASDPRVSLLSCIAARRHQPAPPPRRHQPAPRAPPLLHHAPAVTAPPRAPPTPAPPPRAPTVDIGNNRFYGDIPRWIGTFVPALKILRLSSNNFSGQIPPELSQLSXLQLLDLAHNGLTGLIPRELGDLASMKHPKINSNTGSLDGSIYQDRIDIIWKGQELTFQRILELMTGIDLEGAGAHVLEDTRADEDSGSHQVTPPPHDDFADRCLNTSGGATNNNPMF

SEQ ID NO: 272787 - protein, 53 aa, Zea mays
  Clone ID: MRT4577_180369C.1.pep
APPLPPLENVFLAAPPCHAFVHPLKKVAWACSCVAVGSVGLAWAFVGLGSFRP

SEQ ID NO: 272788 - protein, 611 aa, Zea mays
  Clone ID: MRT4577_18036C.1.pep
MAPVDPHSYTDGAHPVVSRAALAFYLDFAASTIHASAVLTLSAPHSGDLLLDTRALAVHSASTDADPPEPIPFSLAAAPDPVLGTALTLALPRDTASFRLTFSTSPAASALQWLAPPQTASAQPFVFSQCQSIHARSVFPCHDTPAARITFSLLLNVPEQLSAVAAARHVARRDPLPSDHRGACDDGLWCAPGRIVEEFQMDQSVPPYLFAFAAGSIGFRDLGPRTRVYAEGGDTVLDEAAREFAGVEEMVKVGEGLFGPYEWERFDLLVLPPSFPYGGMENPRMVFLTPTVIKGDAAGAQVVAHELAHSWTGNLITNKTNEDFWLNEGFTTYAERRIVEVVQGEERAALNMGIGWRGLNRMMERFKDNMEFTKLKPKMAGIDPDDVYSEVPYEKGFQFLWRIEREIGRPAFDEFLKKYIATFKFQSIDTETFLEFLKTNVPGIENKIDLHLWVEGTGIPPDAMEPDSATYKKICSLAAEFKSGKLPSEDEVAKWSGQEWELYLENLPADVEASQVTALDERYKLSESRDYEVKVAFLQLAIPTGCKCYFNEVEKCLKQVGRMKYLRPLYSSLAKCSSEEKMLAQRIFSEAQEFYHPIARSVAEAILSKHS

SEQ ID NO: 272789 - protein, 333 aa, Zea mays
  unsure (1)..(333): unsure at all Xaa locations
  Clone ID: MRT4577_180370C.1.pep
MAEHARGSQILLMYLCLLLLSSLAHLVTSMDLDSYDDYDNFSDELVAPADYDNVDDGSFSDEAAEVPARRRLYDISLNASSSNRSGAAFCRLLFLQILDLSNNKLTGELPDCLWEMQALQFMDLSNNSFSGKIPEAPPSHNCSLASLHLAGNSFTGEFPTVVGGCQQLATVDIGNNRFYGDIPRWIGTFVPALKILRLSSNNFSGQIPSXELSQLSQLQLLDLAHNGLTGLIPRELGDLASMKHPKINSSTGSLDGSIYQDRIDIIWKGQDFTFQRILELMTGIDLSGNSLSHCIPDELTNLQGLRFLNLSRNRLSCGIPSSIGIKKKKKKAA

SEQ ID NO: 272790 - protein, 72 aa, Zea mays
  Clone ID: MRT4577_180371C.1.pep
KRISREGKRKACPRNLISLTPTKTPPKSHLKKRLRSPSFRCPQFLNLNQGALSANSVVFFRFESMRKILLFR

SEQ ID NO: 272791 - protein, 41 aa, Zea mays
  Clone ID: MRT4577_180372C.1.pep
PVISFSLSSYFFNVRLPRTCASRTLCMSAGGGRTRGDRDAD

SEQ ID NO: 272792 - protein, 66 aa, Zea mays
  Clone ID: MRT4577_180373C.1.pep
GSDRGMLPPPPQQSAAVNLPQARVSFLLKDPKFFQPVKFFSSRRRLLRKSWSPSWSRSLISVSIPN

SEQ ID NO: 272793 - protein, 205 aa, Zea mays
  Clone ID: MRT4577_180374C.1.pep
MRPGAHGTHPRRERRGNQAMPSARDTNMDLMEVLSPPAAARDHQKSQVHAAARALPHQSASVVVDGRMPPPAAVASLTLQVPGGAHDVTSLATSPRTMAVPGTTEQLTIFYSGSMVKFDNVPREKAEEVIFFAAKKSPDAGHQHVPQQQQPAYPNKKKRIFCYQAPERDADGLFIHENKADACSQRQHRSPEDGYATIKETNPCS

SEQ ID NO: 272794 - protein, 71 aa, Zea mays
  Clone ID: MRT4577_180375C.1.pep
DQFSTKVTGFYRFPFFPRPFNNRGFGMGKPHFLTLPDPTGNRRLDFTFINLGSSTIIRPITGGTFGAIIGT

SEQ ID NO: 272795 - protein, 59 aa, Zea mays
  Clone ID: MRT4577_180376C.1.pep
ASCQVAFQSPKYLFIGPLHLYVCFICLFKISQSWRLCPQSIFFSYTSHIPMVGLTGRFF

SEQ ID NO: 272796 - protein, 68 aa, Zea mays
  Clone ID: MRT4577_180377C.1.pep
VRCEGALFFFFFFFFFFFFFFFFFFFKGGGPIQLSFFFNPPTPRGLGFPTFNTFYRRTNFLDNHSFAG

SEQ ID NO: 272797 - protein, 115 aa, Zea mays
  Clone ID: MRT4577_180378C.1.pep
DLSLVCYQTTILLYAESENCVIECMRRRTGTLHVYHYIYGYTCLCLMHRCAGTNPYLPARTVGRSSPSTLTVVDICTSLRTSNGEIMGLLDGCVDHLTTKNALQLEWRQRSPVSR

SEQ ID NO: 272798 - protein, 247 aa, Zea mays
  unsure (1)..(247): unsure at all Xaa locations
  Clone ID: MRT4577_180379C.1.pep
MADGEDIQPLVCDNGTGMVKAGFAGDDAPRAVFPSIVGRPRHTGVMVGMGQKDAYVGDEAQSKRGILTLKYPIEHGIVSNWDDMEKIWHHTFYNELRVAPEEHPVLLTEAPLNPKANREKMTQIMFETFNAPAMYVAIQAVLSLYASGRTTGIVLDSGDGVSHTVPIYEGYALPHAILRLDLAGRDLTDSLMKILTERGYSFTTTAEREIVRDIKEKLAYVALDYEQELETXKSSSSVERAXELPDG

SEQ ID NO: 272799 - protein, 108 aa, Zea mays
  Clone ID: MRT4577_18037C.1.pep
SHCRSNVWSLKIYIHNKSANILYGYRRVQSLHTCYPKNVSIRVWHILNWVSPICKEMDIRGVFKFGWIGWPLNFGKYMHMQIVGFVLQMQSHQGWNFAGQETDQEIQP

SEQ ID NO: 272800 - protein, 97 aa, Zea mays
  Clone ID: MRT4577_180380C.1.pep
IFVFSSITTSTACSGRRRASRCRSSRSMLVVTGVHPDQLFAHNKGDIQDLPPVQGDDRVELLFAVRERGFGVCETAGDAERVLHKASSVPAGLEVPN

SEQ ID NO: 272801 - protein, 60 aa, Zea mays
  Clone ID: MRT4577_180381C.1.pep
LPQAHQEWTLKLVHGINHRDQQSHSRTITFATAYGLHSSNWDLPCYISVTSIETGVLPGR

SEQ ID NO: 272802 - protein, 51 aa, Zea mays
  unsure (1)..(51): unsure at all Xaa locations
  Clone ID: MRT4577_180382C.1.pep
GGWVVGKFLKKKKKKKKKKKKKKKKKKKKKKKKKKKKKKKXKALYLPGRPL

SEQ ID NO: 272803 - protein, 417 aa, Zea mays
  Clone ID: MRT4577_180383C.1.pep
FGSSGNPVCIGQNQLNISQYCQSGTYVARGGSADNSTVCPPCSSDFPFERIPMSPIPCSCVVPVYVGYRLKSPGFSNFIPYESQFQQYLTSGLSLSSYQLEVSTFMWEEGPRLKMDLKIFPNNTPFFTVSEVFRLNGMFTAWQIADSDIFGPYELISFNQGWYNTIIPQGTKSGLSTGAIVGVVMAAFVAAAILSSLVTIIILRRRSRQSSSNKRTAKRISMKIAGVKDFTFDELSHCTHDFNDSTLIGQGGYGKVYRGVLADGIVVAIKRAQQGSLQGSKEFFTEIELLSRLHHRNLVSLLGYCDEDDEQMLVYEYMPNGNLRDHLSARAKVPLDFPMRLRIALGSSRGILYLHTEADPPIYHRDIKASNILLDSKFVAKVADFGLSRLAPLPKTEGSAPGHVFTDRKGTPCYLDP

SEQ ID NO: 272804 - protein, 75 aa, Zea mays
  Clone ID: MRT4577_180384C.1.pep
GRVASTCRSGSCQYPNCRKVKGLFRHGMQCKTRASGGCVLCKKMWYMLQLHARACKDSDCNVPRCRDLKEHLRRL

SEQ ID NO: 272805 - protein, 115 aa, Zea mays
  Clone ID: MRT4577_180385C.1.pep
PVPNAEFFSIVPPCTCRSSCLSFTVAVHVGAHKLPKKLGRALSLRTWISACTTMRTSIIISLIMCCSIYCEYMIVHMICHLPRASRARAGHTHTYTHTPLPSSLPCSMMQSWMHT

SEQ ID NO: 272806 - protein, 179 aa, Zea mays
  Clone ID: MRT4577_180386C.1.pep
DFLHCVGHWPYPWPHSIVFLPPRARPSRSSLLPVPLWLLLSAAQPTSSSRRAPAPSSWPRPLPASARSRAPRSAALLLLAHGSRAPWSSHARRRPQAYLPWRPPCYSLPHLPHTVFPSRAHAEILPASLAQIRGALDVRPSHLWPRSGFPLFASVSMYERIDSPIPELTLRRLGTPAIR

SEQ ID NO: 272807 - protein, 83 aa, Zea mays
  Clone ID: MRT4577_180387C.1.pep
PLGMAPSPPNTFLIKGFCWERPQELPLVGNVNPRKTFFETAWPLGFPIKAGWSTKKRGEKKNSFGPPPNAKFFFYRDKPGPPF

SEQ ID NO: 272808 - protein, 59 aa, Zea mays
  Clone ID: MRT4577_180388C.1.pep
LTIRKAGTLCRVPILYSRRDSTRPLKVHDTRRQSGVEHEARAGRLLSSSGCSVTAWYDG

SEQ ID NO: 272809 - protein, 62 aa, Zea mays
  Clone ID: MRT4577_180389C.1.pep
ARWACAPPVSWSPRVGVVPARPARSISPPLTQLAPCHLGLRITLPSHTHFVLFLIVVPMGIV

SEQ ID NO: 272810 - protein, 154 aa, Zea mays
  Clone ID: MRT4577_18038C.1.pep
GIPPDAMEPDSATYKKICSLAAEFKSGKLPSEDEVAKWSGQEWELYLENLPADVEASQVTALDERYKLSESRDYEVKVAFLQLAIPTGCKCYFNEVEKCLKQVGRMKYLRPLYSSLAKCSSEEKMLAQRIFSEAQEFYHPIARSVAEAILSKHS

SEQ ID NO: 272811 - protein, 236 aa, Zea mays
  Clone ID: MRT4577_180390C.1.pep
MERVVVVSEDAAASVSSAPSSSFAETRVICRVCQKQFAQYTCPRCNSRYCSLTCYKGHSVQCTESFMRENVTEELKQIQPEDESKRKMLDILRRFHLEEEMESDGEDESMLSEELIQKAISGDEIKLEDLSDDEIKRFRQALASGELSKMIEPWTPWWKNPSAKSISLSHDGSQLIRQISTDDTTLSDPMTASESIINEIPEGPESPLPSLKQLTRAEPSPPLTGHLVDILYSYCF

SEQ ID NO: 272812 - protein, 61 aa, Zea mays
  Clone ID: MRT4577_180391C.1.pep
VAQESAPLGGLSSYVVLTPVLICCPKCAFHSICAFSDGVLYGKSQSISWTLVNCSRLDFFH

SEQ ID NO: 272813 - protein, 61 aa, Zea mays
  Clone ID: MRT4577_180392C.1.pep
PIHCVRVTVVFLTPPIYPGIDRLHSNMSNYLCLGMLPLEYVSRLVFVIPISDIQTDARSFS

SEQ ID NO: 272814 - protein, 63 aa, Zea mays
  Clone ID: MRT4577_180393C.1.pep
RYKPVTYAKWRNKRKYILNLALTFCSVALVYWIIFILLLQHLTNNYVYSIEQNNSQFILNNFQ

SEQ ID NO: 272815 - protein, 99 aa, Zea mays
  unsure (1)..(99): unsure at all Xaa locations
  Clone ID: MRT4577_180394C.1.pep
KPFGLLRLPSCASLLVPLXLAACSNSDRGCSSLLPLVFCLDRSPSCESCSPRFPRGCFLPHGLTPLRCSGAPWSLFLFCSLGLPSPYPFSPFSRFPLSF

SEQ ID NO: 272816 - protein, 232 aa, Zea mays
  unsure (1)..(232): unsure at all Xaa locations
  Clone ID: MRT4577_180395C.1.pep
YAVNSVRGMQDIPGHYSGDPSARPIRXSACCKHHAAYDVDNWHNQTRFTHDARVSERDMAETFLRPFEMCVREGDVSSVMCSYNRVNGVPACADARLLSGTVRGEWHLNGYIVSDCDAVRVMTDNATWLNFTAAESSAASLRAGMDLDCAESWIEQEGRPLRDYLSEYGMAAVAXGKMREXDIDNALTTLXMTLMRLGYFDNIPRYASPHETGVCTGEHKSLALDGAKQGIV

SEQ ID NO: 272817 - protein, 97 aa, Zea mays
  unsure (1)..(97): unsure at all Xaa locations
  Clone ID: MRT4577_180396C.1.pep
HSGGWGALFFLCRAADPGGVEGPASARLCPTWMVKQLWVLPXLHLVPGRTPLLXPPGTMARVEMPGVVSPTVLPSMMCLMMMPQCACDAVSRLMLRP

SEQ ID NO: 272818 - protein, 63 aa, Zea mays
  Clone ID: MRT4577_180397C.1.pep
STHAMLSSLGFKLHITFRNWRAKILLVTAHQYKKAYLTYQNVFIAKLCFFLLILFIFIGMTNP

SEQ ID NO: 272819 - protein, 100 aa, Zea mays
  unsure (1)..(100): unsure at all Xaa locations
  Clone ID: MRT4577_180398C.1.pep
TPDCRLTPFNRVSKEGGVRGPGMGNHSNXHGGFSSGIWGWGRGRGQHRSRDQGHGACRGKAEDKEWMPITKLGRLVKDMKIKSLEESYLFSXPIKESEII

SEQ ID NO: 272820 - protein, 173 aa, Zea mays
  Clone ID: MRT4577_180399C.1.pep
QRQEPLLGRNSHARPRAPDTGNRSKRGLGCSAPAICKLKDDSVPAPPKETTGTASAGEPCKRRASVSGSSDRCVKKPQCGAGSNKQLQRGGSSSSSGGSSIRAGMQLRRLSGCYECHMVVAGSASMRATTICPCPDCGEVFVRQESLQLHQSIRHAVSELGTDDTSRNIIEII

SEQ ID NO: 272821 - protein, 176 aa, Zea mays
  unsure (1)..(176): unsure at all Xaa locations
  Clone ID: MRT4577_18039C.1.pep
PPGLGPRKGLVGKGGPQPKTGAGPRPPLKTKISGKNPLKXKSPPGGGAARLSPLPPGRDGAPQGGPPGGREKKKKGEENFPAPKTPGXKNYPAPAPPGVEPPPGVXPPGKVFFPPPPPFFGGAXPKKGPNPFFFGGFFFPPAPLFCSPEKKKKKKKKKKKKKKKKKKNKKKKKKLT

SEQ ID NO: 272822 - protein, 41 aa, Zea mays
  unsure (1)..(41): unsure at all Xaa locations
  Clone ID: MRT4577_1803C.1.pep
GGDSPKEQXYYFRNTLDKTLTMSINKILRMISNTAGRPLIA

SEQ ID NO: 272823 - protein, 321 aa, Zea mays
  unsure (1)..(321): unsure at all Xaa locations
  Clone ID: MRT4577_180400C.1.pep
MYMSAQVLGVGNGDNHMRIIQEDIIETVNNHPSAGWTASRNPYFSNYTIAQFKHILGVKPAPQNALSNVPVKTYSRSLELPKEFDARSAWSRCSTIGNILDQGHCGSCWAFGAVECLQDRFCIHLNMSILLSVNDLLACCGFMCGDGCDGGYPIEAWRYFVQNGVVTDECDPYFDPVGCXHPGCEPAYPTPKCEKKCKEQNQVWQEKKHFSIDAYRINSDPHDIMAEVYKNGPVEVAFTVYEDFAHYKSGVYKHIPGGIMGGHAVKLIGWGTSDAGEDYWLLANQWNRGWGDDGYSKGRYVADATSLWSSGIILIRTTISI

SEQ ID NO: 272824 - protein, 77 aa, Zea mays
  Clone ID: MRT4577_180401C.1.pep
SSTLITCFQYDGHLAAGPLHYADVHPASRISLLEAPTPPNPYTGVPGTCGVSAVSIATRRRAHALSTSVAHRPRTRV

SEQ ID NO: 272825 - protein, 347 aa, Zea mays
  Clone ID: MRT4577_180402C.1.pep
MGGELLLALLLVSAAAAPQVLGVGNGDNHMRIIQEDIIETVNNHPSAGWTASRNPYFSNYTIAQFKHILGVKPAPQNALSNVPVKTYSRSLELPKEFDARSAWSRCSTIGNILDQGHCGSCWAFGAVECLQDRFCIHLNMSILLSVNDLLACCGFMCGDGCDGGYPIEAWRYFVQNGVVTDECDPYFDPVGCKHPGCEPAYPTPKCEKKCKEQNQVWQEKKHFSIDAYRINSDPHDIMAEVYKNGPVEVAFTVYEDFAHYKSGVYKHITGGIMGGHAVKLIGWGTSDAGEDYWLLANQWNRGWGDDGYFKIIRGKNECGIEEGVVAGMPSTKNMVPNFGGAVGRAIV

SEQ ID NO: 272826 - protein, 42 aa, Zea mays
  Clone ID: MRT4577_180403C.1.pep
GTQLRKEKSGLRGHDRRFSDPYTTFFRVLGTRQFFYRGDANY

SEQ ID NO: 272827 - protein, 92 aa, Zea mays
  Clone ID: MRT4577_180404C.1.pep
KKGKVGKKEGKKRKGRGGKGIGNDKGKVGGNKKNGGVNGAVKGGVHLAIRVGKCLERGLVGGFLVIRKLGKRGFCGKGFSLGKAGVLKVRRC

SEQ ID NO: 272828 - protein, 40 aa, Zea mays
  Clone ID: MRT4577_180405C.1.pep
IRLEASLTDVLQLATRGTAGQGMKNCHAPMSEESVENAAS

SEQ ID NO: 272829 - protein, 68 aa, Zea mays
  Clone ID: MRT4577_180406C.1.pep
ILHSLFHSINFKNGAGAPVQLECPKNISAQSISNLLQNMLSGIGLTYFGKNPHKTFQSDVSTPISSLW

SEQ ID NO: 272830 - protein, 49 aa, Zea mays
  Clone ID: MRT4577_180407C.1.pep
VLTNYKHDLVNAFLMGRKGTCLQRGFMKRIKIDFLLVHIGAILLYYVVR

SEQ ID NO: 272831 - protein, 116 aa, Zea mays
  unsure (1)..(116): unsure at all Xaa locations
  Clone ID: MRT4577_180408C.1.pep
NGSSLAEGMELDGKDVVVKKLGESXPAVSRAAMMEEPVEKVFSEILRNRSREKKFPSPTRYSVVLAXKKKKDDDSATLAAKTRRPARFRSAHHEHMLQHRLPQHRRQRRPTRGFLG

SEQ ID NO: 272832 - protein, 39 aa, Zea mays
  Clone ID: MRT4577_180409C.1.pep
GSHRKPGPYKMVKRDPKIIKTLLLPTLKNFGPPQPFYLG

SEQ ID NO: 272833 - protein, 68 aa, Zea mays
  Clone ID: MRT4577_18040C.1.pep
CKNRLLLHKTGLMVVHYDNLVPKFPTCLDLFTNPQFSHFYQSFPFVPKSRRCHGTANCLCFLHPYAGK

SEQ ID NO: 272834 - protein, 72 aa, Zea mays
  Clone ID: MRT4577_180410C.1.pep
RVHSYGFFFLYKKRPWQLFILQQGPNVFFSPGERSPKETGTHFGARPVAPGGNSPRSRGGAHKTVRPGQNSG

SEQ ID NO: 272835 - protein, 53 aa, Zea mays
  Clone ID: MRT4577_180411C.1.pep
SWNACRNRARIKYRVYQVNMLRAAFFFFFGGRTNIIFRLSYRECMPGSYALIY

SEQ ID NO: 272836 - protein, 52 aa, Zea mays
  unsure (1)..(52): unsure at all Xaa locations
  Clone ID: MRT4577_180412C.1.pep
AASCARVRLGHAWCVDRGPGLAREERLGDEAAGRINAGAAPGXQAKDQLXSG

SEQ ID NO: 272837 - protein, 77 aa, Zea mays
  Clone ID: MRT4577_180413C.1.pep
WPGPAAAAVVYGYRNVAGVGLAVGLCGRRQKRWRGMMMGEGPRRCLRGRQSSRGRLGVLHKLVIGSLASRLARIQIR

SEQ ID NO: 272838 - protein, 110 aa, Zea mays
  Clone ID: MRT4577_180414C.1.pep
PHPLFLCPITPNPSPPPESHRRSIDQARRYADQPAGEGSVRWQTGRGLQRRRGGAPSLLCLPALLCSARAVARVRTRSRPDAEATTLCLSGLRPLIGCNSTFTCLVIDKG

SEQ ID NO: 272839 - protein, 118 aa, Zea mays
  Clone ID: MRT4577_180415C.1.pep
LQAYSPLGSTGSPLSKDEEVVRIAKKHDVEPATVLISYQVNRGVIVLPKSVTPSRIESNLKVIKLDSEDVKALDGLAAAGKQQRVNTPAWGTDFGFADWYGPGNKNAPEGAKLVSTQA

SEQ ID NO: 272840 - protein, 72 aa, Zea mays
  Clone ID: MRT4577_180416C.1.pep
QRRVLFFFFFFFFFFFFFFFFKTKFDIPLNSEGVYKGFLGRNSKIRGKNKIHRGGGKAVFKISPKAPFTLRG

SEQ ID NO: 272841 - protein, 426 aa, Zea mays
  Clone ID: MRT4577_180417C.1.pep
MRRSRRSQVSLFPTFPAGPLFQAMAKLPVLARSSIRSKPNENMRLVVVTIVGAVFGFLIGISFPTVNITKLHFPSSIVSYIEDKNSGISAQAILNHAWTAARNARGNGSQPISLDNFKVYVPTNPRGAESLAPGIVVPESDFHQHRLWGNPDEDLPFKPKYLVTFTVGISQKDNINRAVKKFSKDFAILLFHYDGRVTEWDEFEWSKRAIHVSVRKQAKWWYAKRFLHPDIVAAYEYIFIWDEDLGADHFNGEEYIKLVKKYRLEISQPGLEPDRGLTWQMTKRRGDRQVHMVTEEREGWCSDPHVPPCAGFVEIMAPVFSRDAWRCVWHMIQNDLVHGWGLDFALRKCVEPAHEKIGVVDSQWIVHQVIPSLGNQGQSENGRAPWEGVRERCRKEWGLFQTRMAEAEKAYYEMMGITPPNVTFVS

SEQ ID NO: 272842 - protein, 182 aa, Zea mays
  unsure (1)..(182): unsure at all Xaa locations
  Clone ID: MRT4577_180418C.1.pep
NRVTEEREGWCSDPHVPPCAGFVEIMAPVFSRDAWRCVWHMIQXNTVSVSALGLVWLISCRSXNDLVHGWGLDFALRKCVEPAHEKIGVVDSQWIVHQVIPSLGNQVRKKKKKQMCTIRFYCSALIASSKCXGQSENGRAPWEGVRERCRKEWGLFQTRMAEAEKAYYEMMGITPPNVTFVS

SEQ ID NO: 272843 - protein, 66 aa, Zea mays
  Clone ID: MRT4577_180419C.1.pep
RPHFYDVVSSPQQRSVPLQRSLIEPMSLALLRQHCLQHMIPSIHDHPVRVRSDPADAPARAVVRRV

SEQ ID NO: 272844 - protein, 68 aa, Zea mays
  unsure (1)..(68): unsure at all Xaa locations
  Clone ID: MRT4577_18041C.1.pep
GGIGLSLRVKVLFYGFKPGHIGLLALFGLCPILMRRVCILYECVYLHLGNVRGKGKFLAPXFFLCVLL

SEQ ID NO: 272845 - protein, 282 aa, Zea mays
  unsure (1)..(282): unsure at all Xaa locations
  Clone ID: MRT4577_180420C.1.pep
MSNSGRWRRRTRSVAPSPATSSPSSPGLREAQPFRLPQWKFSQVLGELPPAAEARRDGAPRPQDDDDADEISAIEFDGRGEYLAGGDNAGRVILFRRTDDDGDGDDARPRAELERTDRAEAPPPRYSYATEFQSHEREXFDVLDSLDISERIKKVRWCARPNSSLLMLAANDRTVKLWKXVSEHKAEAPKKGNGRPSWGTTPRGCSSAEPDERPEKVAGGVGDGYSAKCRRVFGRAHEFNIHSVSTNCDGXETLVSADDVRINLWHAGVTRQXLNIGGMKPA

SEQ ID NO: 272846 - protein, 104 aa, Zea mays
  Clone ID: MRT4577_180421C.1.pep
NMVNCSPHVANCPVTQALIVHPKPFCILLRTRNNRELKVIILWPNATGSNFGLSRLELTISHLNENIFTTKKNINSIKSNQTKTKKKKPTSPRTRGRTRGRTRG

SEQ ID NO: 272847 - protein, 106 aa, Zea mays
  Clone ID: MRT4577_180422C.1.pep
DIMIWFSLFAHNDRLRHRLGTRSDSSMTVLWGLSSLVWCSHCPVRAGGQVLVSFECTSSVLGFPVLLYCAPAPNSASLVSYVYFSSLCQYGAVSALLMAHAWSSAL

SEQ ID NO: 272848 - protein, 52 aa, Zea mays
  unsure (1)..(52): unsure at all Xaa locations
  Clone ID: MRT4577_180423C.1.pep
CWLGGLLQVQFFLVPFACVVWSEFCFHLSLVGRLVLVRCQCLVLVSWFXMMS

SEQ ID NO: 272849 - protein, 76 aa, Zea mays
  Clone ID: MRT4577_180424C.1.pep
PCNLEYQDELVLWTESGDVGKGFRCMRMVNNIRLNFDALYGYKGHSGLLDGTTVVLWECAKGDNQSWKILAWGDED

SEQ ID NO: 272850 - protein, 81 aa, Zea mays
  Clone ID: MRT4577_180425C.1.pep
GREGFPPPSGGKRGPGKWKPPPERANWAPQKQAGAAARAEGKPQKSPLGGARPRGKPFFFFFFFLNHKLIFEMCLLIFFFA

SEQ ID NO: 272851 - protein, 63 aa, Zea mays
  Clone ID: MRT4577_180426C.1.pep
QQDPMAEIVRLTSCNVNELEYLRAEDMKEQPYEAKRELTKDPELYCTDSVSPLLGLAQVMANR

SEQ ID NO: 272852 - protein, 127 aa, Zea mays
  unsure (1)..(127): unsure at all Xaa locations
  Clone ID: MRT4577_180427C.1.pep
HSLVICDCIDHTGTPETARGTXTWNRLATAICCGHDYRDKARPELELKAIQTLQRRECEXHQKICIDPYKAGYTFFPAVTGPFTPRSTADPLAILYYVGPAPLLDMDWLIATAYGPTCYTRDYLFSL

SEQ ID NO: 272853 - protein, 89 aa, Zea mays
  Clone ID: MRT4577_180428C.1.pep
CSPPPSCPMEWPLRIRYLINYLISSPCPPRQLFRLLLFQRGCGNKKGITTIILLVIKNNCLILLLFLTKNKKKKKKKKKKKKKKGGLAI

SEQ ID NO: 272854 - protein, 116 aa, Zea mays
  unsure (1)..(116): unsure at all Xaa locations
  Clone ID: MRT4577_180429C.1.pep
MHPWPCTSTALLTPHGTPAPPAPLPPPRPPPLPNPPNGPAPATAPPNGPNPATPPPSGPWTPPKRPPPPVRPPNTXRSWPARRPRPRRRHCRRPPRRRKPCRSRGALLPLPPPMRR

SEQ ID NO: 272855 - protein, 124 aa, Zea mays
  Clone ID: MRT4577_18042C.1.pep
MKPALLVWWKASEQRFPILSRLARDVHAIPISSVASESAFSTGGRILDDFCSSLTPFMLEALVCTQDWLRWTIPVDITENIEELTKLEEELFEEFGKVKQAASSKTNVTIRIESNSIDLGTSTI

SEQ ID NO: 272856 - protein, 71 aa, Zea mays
  Clone ID: MRT4577_180430C.1.pep
STWIVRCFIHLFVLAEFEFIFLFLCRASRVSSIVTSLHPCVHNMIHQLFLLRSLIPVFSCPCFLLLVAVKA

SEQ ID NO: 272857 - protein, 72 aa, Zea mays
  unsure (1)..(72): unsure at all Xaa locations
  Clone ID: MRT4577_180431C.1.pep
HPFSFNTNKXLTVGFYRKRGKKKNKTSKIYSIIFLLLTLPLNPYILIIYPSLLLYPSFTSLTTQTIFPLKHT

SEQ ID NO: 272858 - protein, 55 aa, Zea mays
  Clone ID: MRT4577_180432C.1.pep
SVVNGKNHGSSSTVQSDRWNSSLYTGKAMREFCHVYSNKDFNKVHETYIMDRYGS

SEQ ID NO: 272859 - protein, 206 aa, Zea mays
  unsure (1)..(206): unsure at all Xaa locations
  Clone ID: MRT4577_180433C.1.pep
MGMPAVRRRERDAEAELNLPPGFRFHPTDDELVEHYLCRKAAGQRLPVPIIAEVDLYRFDPWALPDRALFGTREWYIFTPRDRKYPNGSRPNRAAGNGYWKATGADKPVAPRGGRTMGIKKALVFYAGKAPKGVKTDWIMHEYRLADAGRAAASKKGSLRLDDWVLCRLYNKKNEXEKMQLQQQGGEEMMAEPKRRTRDRHGGHLA

SEQ ID NO: 272860 - protein, 159 aa, Zea mays
  unsure (1)..(159): unsure at all Xaa locations
  Clone ID: MRT4577_180434C.1.pep
MGGGGGGSLRALAAAPRPKGSPATSCPFFVRLAPGLPRRLRRLRSARRLPRAPRGASDSAFEASGGVNYAEPDDSEKDKEVGGGGSGDDEGAGEVVDDHSVXVSGRVXDEVEEEGXEYLXPPEEAKGYGGNLPYDGDRERLAQLFDQXAGCDEGAEGIY

SEQ ID NO: 272861 - protein, 83 aa, Zea mays
  Clone ID: MRT4577_180435C.1.pep
LDPTLLNFPVHRGKVNIYIHVDTTRYSPYPIGVPQANAHADTYTLILCGRLAHFDISELPLITLWTTTTANKGHHVMVKHTDL

SEQ ID NO: 272862 - protein, 116 aa, Zea mays
  unsure (1)..(116): unsure at all Xaa locations
  Clone ID: MRT4577_180436C.1.pep
AKRHSARLQEQNSNKGGTNRTAGKGAXAASAPAXQQPPAPARRRGPARARGGRATTAGAGGRRPXAEPAGQPQXNPXAAAPHXAGXGQTSAXXQPXRQQXXQQQXRXXDXQXXAQQ

SEQ ID NO: 272863 - protein, 76 aa, Zea mays
  Clone ID: MRT4577_180437C.1.pep
RRTGNGKKNFRGPNGKLFWEKGKTPPPNRKHPPFLLQKGGPKRAPKKKLFKSQRVKPPGASKKNPLLPKVGAPRSY

SEQ ID NO: 272864 - protein, 183 aa, Zea mays
  Clone ID: MRT4577_180438C.1.pep
MAAGALARVHGREIRHEAVVAEAKAHAVAVLTSQREKARQRTMATVQRTLQAMDEDNIRDESRTGRLVVLAALAAGAISIGKRMPLLAPSPPSSWRRWPPVGLEKKLEAREPARARSLTSRAGSVRLASRLEARSKLLQDDGMLVISTVPGSPPTLRIKAVALENFCPRAFSLLSIAGLSGFC

SEQ ID NO: 272865 - protein, 98 aa, Zea mays
  unsure (1)..(98): unsure at all Xaa locations
  Clone ID: MRT4577_180439C.1.pep
YCIAVGPLDEVVDPLYPGGSFDPLGLAAAPEAFAEVKVEELKSGRLAMFSMFAFFVQAIVPGEGPLXNRLDHTAGPVNNNVWACATKVVPGKLGRPRR

SEQ ID NO: 272866 - protein, 246 aa, Zea mays
  Clone ID: MRT4577_18043C.1.pep
MSPTPAPAARAGEELPSTEVVVVRHGETAWNASRVVQGQMDPELNEAGRRQAVVVARRLSREAKPAAVYSSDLRRAAETAETIARACGVSNVVLTEALRERHMGYLQGLRWDDAVDKSPDSLHIVKVIEGSDPDSRNQELPGGGESLNQLNERCVCFVNKIAQEHAGERVVVVSHGAAILELCRHTDPPGSCVRRHVPNTSLSVFRVSAATGQWALERCGDVGHLKGHGDGDGFLEGSFGGDGASA

SEQ ID NO: 272867 - protein, 63 aa, Zea mays
  unsure (1)..(63): unsure at all Xaa locations
  Clone ID: MRT4577_180440C.1.pep
SKQHLAPFTAFPSLVXFRPRAVARCXNTTRKPXPPSLYARCLGLASSSLRNASTHPCRSTQSH

SEQ ID NO: 272868 - protein, 72 aa, Zea mays
  Clone ID: MRT4577_180441C.1.pep
AGPPAGAGPEYIAGTTFLLVGGRPNGLSPNVQAKDTAPILLHKRQPKRNHLTPGLHRLVYATSVNRRCTPRT

SEQ ID NO: 272869 - protein, 129 aa, Zea mays
  Clone ID: MRT4577_180442C.1.pep
QALDADHRPDLPRYSYDSQPCSVNHAHVAASSTRRRVPGRSRRALHGHRRPAAARHARASPKSSPSRRHQAGSPTVHVVVRPCFIIVELVVSPGPMILRAPGKLIVLRGILQGWIGEMTNDDHVEDVVS

SEQ ID NO: 272870 - protein, 49 aa, Zea mays
  Clone ID: MRT4577_180443C.1.pep
ARNSARGDSRNFVGAGGQTARRGDFIGTFCLLSQKLRGTLGHCESLSLR

SEQ ID NO: 272871 - protein, 133 aa, Zea mays
  Clone ID: MRT4577_180444C.1.pep
MDVVRSQIPDANVNTVDEKDGPPEVTTPTMEKDDGMPDRCHDATQNQKEASGHAGAAADATGRPHRGSQAPPEEHTGPQVVVNDKFWEQFLTERPGCPEAEEASFTLRRDPDHTHAYDEGTGSDTRDMGQLKL

SEQ ID NO: 272872 - protein, 77 aa, Zea mays
  unsure (1)..(77): unsure at all Xaa locations
  Clone ID: MRT4577_180445C.1.pep
MNPTGHSLLNDFGMWFQLRRIRQVVPGGDDNDXELNAESHFLSXVQRFGQXYKDXDEHAXYXLXVFXANLRXAXXXQ

SEQ ID NO: 272873 - protein, 74 aa, Zea mays
  Clone ID: MRT4577_180446C.1.pep
AGGPKKKYFWLRQRPPQEKGGPFGFLKKKKKKKKKKKKKKKKKKKKKKKKKKKKKKNKKKKKKKKKAYLPGRPH

SEQ ID NO: 272874 - protein, 39 aa, Zea mays
  Clone ID: MRT4577_180447C.1.pep
VCLFAASVMLASDFLRSTRLKSCVRSMPHHAIFKVGVPP

SEQ ID NO: 272875 - protein, 80 aa, Zea mays
  Clone ID: MRT4577_180448C.1.pep
NKPSYFIGRVTGNTNKPNPLGINPFFLEKKNQNRAERKLIFLIPPREFITRGRGGKHRGGGGFTGQTGCGKSKTFPKKTG

SEQ ID NO: 272876 - protein, 207 aa, Zea mays
  Clone ID: MRT4577_180449C.1.pep
IGYLEAGREKNSKKKKKKKKKKKKKKKKKKKKKKKKKKKKKKKPFLKTRFKFEFVTPPSSGRRRRRRLPGPRQASGPGGLLPTGKKPEVWGTPPPEGEVKVPRSLKPNLWRRLFPKKYVSAQAAHTQKETVACSESSKKKLLKQNLESTRDVQEVEKMEKLLGKRLLLKEIPEGPFHLKKKQKSLGKGKAVINSAKKLEAKLLELQC

SEQ ID NO: 272877 - protein, 91 aa, Zea mays
  unsure (1)..(91): unsure at all Xaa locations
  Clone ID: MRT4577_18044C.1.pep
DCTCPDAYNIAKHDLIDVHNSDASIYDRLTRLHFHDCFHQGXNDSMLQHAVTMVANSTEKLTPTNNNSDREDTTAEXVKAAMENCWPCVVS

SEQ ID NO: 272878 - protein, 94 aa, Zea mays
  Clone ID: MRT4577_180450C.1.pep
PKNFFSHKFNGGGHKGKKRYKILKKKEEKGLFYLKTPPKWPNTQENLKFPKAPPWRGPMPMITIHEKSVPNRKKLRGPKKPKQVLLGEHHWRGA

SEQ ID NO: 272879 - protein, 48 aa, Zea mays
  Clone ID: MRT4577_180451C.1.pep
CRKCVRLCQSDRNRTYANLPISSYLWELCKKSISTQVERLLYAYCISY

SEQ ID NO: 272880 - protein, 157 aa, Zea mays
  unsure (1)..(157): unsure at all Xaa locations
  Clone ID: MRT4577_180452C.1.pep
NPNPTPTHKPSASSPPSLPSNPRNERAGEEDPRRRMAAAARVFRGSLFLMSPAAGAKASAAKKTGITKPMPVSDEFRRFAGGAPEVARSEAIKLIWAHIKAHGLQNPAKKTEINCDATLKSLFGGRDKVGMLEXHRLLNAHFPRTSKQQSVVPVIAL

SEQ ID NO: 272881 - protein, 259 aa, Zea mays
  unsure (1)..(259): unsure at all Xaa locations
  Clone ID: MRT4577_180453C.1.pep
SRRRIQGWRVGGTASTTGPADLLSRFMAAMDDXGGSDSELGAMFPTPAAKLRFLRDVVVTFVLAGKDTTSSALTWFFWLLAANPRCERRAHEEAASCCGDGGDVKGMHYLHAAITEAMRLYPPVPFNGRVAVRDDVLPSGAALRAGWYANYSAYAMGRMEKLWGKDCLEFVPERWLGEGGEFVPVDAARFPVFHAGPRVCLGKEMAYVQMKTVAAAVLRRFRLDVVAPVANMEAPPAYEMTATMKMKGGLLVRLCSRED

SEQ ID NO: 272882 - protein, 134 aa, Zea mays
  Clone ID: MRT4577_180454C.1.pep
MAAAARVLRGSLFLMSPAAGAKASAAKKAGAAAAAAAVAKKTEAATTKPRLPTGITKPMPVSDEFRRFAGGAPEVARSEAIKLIWAHIKAHGLQNPAKKTEINCDATLKSLFGGRDKVGMLEINRLLNAHFPKK

SEQ ID NO: 272883 - protein, 62 aa, Zea mays
  Clone ID: MRT4577_180455C.1.pep
SFVHPEMQNPFSRAIYSVYIMLDNRLIPKVLEVSYCSNCCRACKNNTHALVGSQDTIRWPLI

SEQ ID NO: 272884 - protein, 85 aa, Zea mays
  Clone ID: MRT4577_180456C.1.pep
WKTPPSSSPRITGWLDREQQIARYGQLDCRTQLHDQASNRADEAVDLPSPGEARAQHLLHCSQDDSEPIGQVYEESTPEKPVHCE

SEQ ID NO: 272885 - protein, 62 aa, Zea mays
  Clone ID: MRT4577_180457C.1.pep
VFPGSPLPSSLFSEKTPPVKRGGRSQLKRSRSRAKEGPRVAGAPRANHVEGAPYSPCMQAQE

SEQ ID NO: 272886 - protein, 202 aa, Zea mays
  Clone ID: MRT4577_180458C.1.pep
SRSSSSSGKAPSGEHRRYAGSKRSYDFDHERRGGGGDVDECDWGREGAAVARPSPRRRSPERKRSSSHDGRAGSGSGSQSRRISRSPGRRADVVPAPGSSATGERGARQQPGKMVSVPAREKGRAPSPVKAASSGKRYPSPRSNSPARAAASGNENAGVQSTHGPSLSRSTSRKAEQSPFRRNPMAELDENTHHHHHNSNGR

SEQ ID NO: 272887 - protein, 62 aa, Zea mays
  Clone ID: MRT4577_180459C.1.pep
VDIFPPGGVYSPKNPTEGFLFWFPPSLLRLVCRPCTVRASWESPLALGDLLCRSLKKKKKIE

SEQ ID NO: 272888 - protein, 190 aa, Zea mays
  Clone ID: MRT4577_18045C.1.pep
MSPTPAPAARAGEELPSTEVVVVRHGETAWNASRVVQGQMDPELNEAGRRQAVVVARRLSREAKPAAVYSSDLRRAAETAETIARACGVSNVVLTEALRERHMGYLQGLRWDDAVDKSPDSLHIVKVIEGSDPGSCVRRHVPNTSLSVFRVSAATGQWALERCGDVGHLKGDGDGDSFLEGSFGGDGASA

SEQ ID NO: 272889 - protein, 50 aa, Zea mays
  Clone ID: MRT4577_180460C.1.pep
PRLQVERHARHHQTLHTTHICTHAYIVSTLIHRRTLLSIHLSNTTAAASA

SEQ ID NO: 272890 - protein, 56 aa, Zea mays
  Clone ID: MRT4577_180461C.1.pep
TRPSNTLSRFTGAIAGIMRIHLVEDVTDSLAKRFLRLVVRYPYITASVQALRTNIP

SEQ ID NO: 272891 - protein, 87 aa, Zea mays
  unsure (1)..(87): unsure at all Xaa locations
  Clone ID: MRT4577_180462C.1.pep
SDFLARTHXLRMVLTPKERCPPFSLNPPTSFSSMRTLSTIASTSFSPSLPRKIDQTPFLLKPLFFLPSYVSFFPSKDHSQLSTSSTA

SEQ ID NO: 272892 - protein, 105 aa, Zea mays
  Clone ID: MRT4577_180463C.1.pep
LLSFSVVHGQAHINFDCKPKTIGGNLRGHYLCDEESGPKSFVDGTTFGADPPTITAPGGDKHGASLRSMRQTCREPRPGHSRKRPTAIYLYPVAEGRATTPQEMS

SEQ ID NO: 272893 - protein, 68 aa, Zea mays
  Clone ID: MRT4577_180464C.1.pep
NSGHPQRRKVRPSASKAHVSFGSFIFGRPFFFFFFFFFFFFFFFFFFFFFFFFFLRTAWVRPREFPVP

SEQ ID NO: 272894 - protein, 99 aa, Zea mays
  Clone ID: MRT4577_180465C.1.pep
PRGRAGQQIAMASSKDAVVAAIFIQALLLMVSSYCAEAKICTKPNPFYLTLCQSDKACGDSCIHFGIGTSGFCKGRRPPTRVCTCNFECPGQERSNTFT

SEQ ID NO: 272895 - protein, 256 aa, Zea mays
  unsure (1)..(256): unsure at all Xaa locations
  Clone ID: MRT4577_180466C.1.pep
KGSGEVGKKIKFELMPETLYLTMYIIDQYLSLQPVLRRELQLVGVSAMLIACKYEEIWAPEVXKAPNLFPSLTFQVSLNSFTCAFFFFQVNDFILISDSAYSREQILSMEKGILNSLEWNLTVPTVYMFLVRFLKAAALGNKVEKEMENMVFFFAELALMQYGLVTRLPSLVAASVVYAARLTLKRAPLWTDTLKHHTGFRGSEAELIECTXRCWSAHTRPXADSKLRSVYKKYSSEQFGGVALRPPAPAVGVCLV

SEQ ID NO: 272896 - protein, 489 aa, Zea mays
  unsure (1)..(489): unsure at all Xaa locations
  Clone ID: MRT4577_180467C.1.pep
MASRNHNAAAPQLHHHNRAGVPALGKTKAVPARPDALNRRPPLGDIGNLVSVRPATGNPQEQVNRPITRSFGAQLVKKAQAKAAIKSVRPAEXGSLSRSIXPITRSFGAQLVKNVQANAAIKNAAILPARHAPRQERKAPAKQPPPEDVIVLSSDSEQSRTQLESSASSVRSRKKVINTLSSVLSARSKAACGITDKRRQVVVIEDIDKLDVNNELAVVEYIEDIYTFYKIAQHDRRPCDYIDTQVEINPKMRAILAGWIIEVHHKFELMPETLYLTMYIIDQYLSLQPVLRRELQLVGVSAMLIACKYEEIWAPEVNDFILISDSAYSREQILSMEKGILNSLEWNLTVPTVYMFLVRFLKAATLGNKVEKEMENMVFFFAELALMQYGLVTRLPSLVAASVVYAARLTLKRAPLWTDTLKHHTGFRESEAELIECTXRCWSAHTRRPXADSKLRAVYKKYSSEQFGGVALRPPAAAVEIKXTKITSC

SEQ ID NO: 272897 - protein, 71 aa, Zea mays
  unsure (1)..(71): unsure at all Xaa locations
  Clone ID: MRT4577_180469C.1.pep
CCLFLVPFLPRXGVRGXGCPLRGXGGCFLXPLXCSLAVLLPCVLVVXLXFLWWLACGCGVLPLFCFAVLGL

SEQ ID NO: 272898 - protein, 108 aa, Zea mays
  Clone ID: MRT4577_18046C.1.pep
MGYLQGLRWDDAVDKSPDSLHIVKVIEGSDPDSRNQELPVSTRPSRELCSVHSRFDYLNFFQGGGESLNQLNERCVCFVNKIAQEHSWERVVVVSHGAAILELCRHTD

SEQ ID NO: 272899 - protein, 79 aa, Zea mays
  Clone ID: MRT4577_180470C.1.pep
ILFYVWILLKLTVRNPLQQTRLLPRFFIPLAIACPSLGTFAEAVGLAISPSCPPAAFHSRASPLALLASRRFGALPVLA

SEQ ID NO: 272900 - protein, 112 aa, Zea mays
  Clone ID: MRT4577_180471C.1.pep
YVQYATCKIVSARYLRGGCVWDVQRSRVLPGGVGVAAKDYTDTPPGPLIDVVDLGYWWLYRAVIVRAHHHADVPVHHIWAPRSGTNTRRKHLRRLPTWHDWWWHVLNINCVF

SEQ ID NO: 272901 - protein, 74 aa, Zea mays
  Clone ID: MRT4577_180472C.1.pep
RRPYTCRSSSIRSWRTLSDDSSNIAPVYLLVHSSETGECPVDSVLSMGASLYPVKMANVFWRQRSIVYLKHFLM

SEQ ID NO: 272902 - protein, 45 aa, Zea mays
  unsure (1)..(45): unsure at all Xaa locations
  Clone ID: MRT4577_180473C.1.pep
XGAXGTACPRSKSAHTHAGKGHPLLDMQICPHMAFLSSSQHIYHV

SEQ ID NO: 272903 - protein, 32 aa, Zea mays
  Clone ID: MRT4577_180474C.1.pep
PIRPLDDGSVRRLARFVAITLAYALGSRAHLP

SEQ ID NO: 272904 - protein, 73 aa, Zea mays
  Clone ID: MRT4577_180475C.1.pep
PAFFCFSPGNFPSRALRRGGWGPFNPTGGGCFPQKFVCFVGPKMIDAQKFFYPAPPQLTFSFGPPKKKVLFPF

SEQ ID NO: 272905 - protein, 109 aa, Zea mays
  unsure (1)..(109): unsure at all Xaa locations
  Clone ID: MRT4577_180476C.1.pep
MRPPTRPPKRPPTRERTSGRSTGGATFGEKRGGERSELDVXYISSFWKEMEXXXKGMXKDKKPXEGGKRRAQXVDKTXQCXFPGMRLSDETRGRHEGREKKSEKKKRRG

SEQ ID NO: 272906 - protein, 58 aa, Zea mays
  Clone ID: MRT4577_180477C.1.pep
DTVDKIKSTWMKKEGSEYSTEFYTLGMKTLLMTSTEFTEERSTPSHSNITDFLTNDWN

SEQ ID NO: 272907 - protein, 111 aa, Zea mays
  Clone ID: MRT4577_180478C.1.pep
RHSNSVKDEEGYPAFALVNRVTGEAIKHSQGEGHPVKLVPYNPSYQDESVLWTESRDVGHGFRCVRMVNNIYLNFDAFHGDKDHGGVRDGTNIVLWKWCEGDNQRWKIVPW

SEQ ID NO: 272908 - protein, 45 aa, Zea mays
  Clone ID: MRT4577_180479C.1.pep
PVTTKNLLFSVQFVWFTHLCSVLFLHLNKVLLFMMLQLSQIQLRL

SEQ ID NO: 272909 - protein, 83 aa, Zea mays
  Clone ID: MRT4577_18047C.1.pep
RRKQKAQHTEKGVKQEQHDRLTAAIQDSKKKRALRDSCFPKSSFFTPIWFTFENQDPQIKFDGVGNIKINPQCKKLTISQFNM

SEQ ID NO: 272910 - protein, 88 aa, Zea mays
  Clone ID: MRT4577_180480C.1.pep
NCIHVGHTPVMDSLKNGAPDKWRLGKAHGTAVGLPSDDDMGNREVGHNALGAERSVVQGAKLVDQALASGKIYDGDGFNYIKESFENG

SEQ ID NO: 272911 - protein, 377 aa, Zea mays
  unsure (1)..(377): unsure at all Xaa locations
  Clone ID: MRT4577_180481C.1.pep
MFGFGHHGHHGQNPPAHGGVHQPTFKIFCKADEGYCLTVRDGNVVLAPANPRDEHQHWYKDMRFSTQVKDEEGNPAFALVNKATGLAIKHSLGQSHPVPVCTPDLLSIGQDEGGLDLISFWLLYPFVQVKLVPFNPEYQDESVLWTESGDVGKGFRCIRMVNNIRLNFDAFHGDKGHGGVHDGTTVVLWEWAKGDNQSWKILPWGDEAYAGGGSSAANAPRFGGGEPTVRIYCKADEGFSATVRNGAVCLAPTNPRDEYQHWIKDMRHSNSVKDEEGYPAFALVNRVTGEAIKHSXGEGHPVKLVPYNPGYQDESVLWTESRDVGHGFRCVRMVNNIYLNFDAFHGDKDHGGVRDGTNIVLWKWCEGDNQRWKIVPW

SEQ ID NO: 272912 - protein, 376 aa, Zea mays
  unsure (1)..(376): unsure at all Xaa locations
  Clone ID: MRT4577_180482C.1.pep
MFGFGHHGHHGQNPPAHGGVHQPTFKIFCKADEGYCLTVRDGNVVLAPANPRDEHQHWYKDMRFSTQVKDEEGNPAFALVNKATGLAIKHSLGQSHPVXFVLLFFYPSARTREGLISFWFLYPFVQVKLVPFNPEYQDESVLWTESGDVGKGFRCIRMVNNIRLNFDAFHGDKGHGGVHDGTTVVLWEWAKGDNQSWKILPWGDEAYAAGGSSAANAPRFGGGGEPTVRIYCKADEGFSATVRNGAVCLAPTNPRDEYQHWIKDMRHSNSVKDEEGYPAFALVNRVTGEAIKHSQGEGHPVKLVPYNPGYQDESVLWTESRDVGHGFRCVRMVNNIYLNFDAFHGDKDHGGVRDGTNIVLWKWCEGDNQRWKIVPW

SEQ ID NO: 272913 - protein, 68 aa, Zea mays
  Clone ID: MRT4577_180483C.1.pep
PTGGHPGKNGWGCSNPEIPGKGTAARDQANEGAANGANPVPNGGWVKASSRHRPKKAGRLNGGPVTDR

SEQ ID NO: 272914 - protein, 351 aa, Zea mays
  Clone ID: MRT4577_180484C.1.pep
MFGFGHHGHHGQNPPAHPPAHGGVHQPTFKIFCKADEGYCLTVRDGNVVLAPANPRDEHQHWYKDMRFSTQVKDEEGNPAFALVNKATGLAIKHSLGQSHPVKLVPFNPEYQDESVLWTESGDVGKGFRCIRMVNNIRLNFDAFHGDKGHGGVHDGTTVVLWEWAKGDNQSWKILPWGDEAYAAGGSSAANAPRFGGGGEPTVRIYCKADEGFSATVRNGAVCLAPTNPRDEYQHWIKDMRHSNSVKDEEGYPAFALVNRVTGEAIKHSQGEGHPVKLVPYNPSYQDESVLWTESRDVGHGFRCVRMVNNIYLNFDAFHGDKDHGGVRDGTNIVLWKWCEGDNQRWKIVPW

SEQ ID NO: 272915 - protein, 173 aa, Zea mays
  Clone ID: MRT4577_180485C.1.pep
MFGFGHHGHHGQNPPAHGGVHQPTFKIFCKADEGYCLTVRDGNVVLAPANPRDEHQHWYKDMRFSTQVKDEEGNPAFALVNKATGLAIKHSLGQSHPVKLVPFNPEYQDESVLWTESGDVGKGFRCIRMVNNIYLNFDAFHGDKDHGGVRDGTNIVLWKWCEGDNQRWKIVPW

SEQ ID NO: 272916 - protein, 98 aa, Zea mays
  Clone ID: MRT4577_180486C.1.pep
LGFMGRLSWLPSACVGPMVMATVYKGLFFLRGTVRPAVIVGPRSPWPRMVGVFLPFEGSAGVLLPPQAEMSGFSIAGPVVKGCVALWPRVASSAILFV

SEQ ID NO: 272917 - protein, 344 aa, Zea mays
  Clone ID: MRT4577_180487C.1.pep
MFGFGHHGQNPPAHGGVHQPTFKIFCKSDEGYCLTVRDGNVVLAPANPRDEHQHWYKDMRFSTQVKDEEGNPAFALVNKATGLAIKHSLGQSHPVKLVPFNPEYQDESVLWTESGDVGKGFRCIRMVNNIRLNFDAFHGDKGHGGVHDGTTVVLWEWAKGDNQSWKILPWGDEAYAAGGSSAANAPRFGGGGEPTVRIYCKADEGFSATVRNGAVCLAPTNPRDEYQHWIKDMRHSNSVKDEEGYPAFALVNRVTGEAIKHSQGESHPVKLVPYNPGYQDESVLWTESRDVGHGFRCVRMVNNIYLNFDAFHGDKDHGGVRDGTNIVLWKWCEGDNQRWKIVPW

SEQ ID NO: 272918 - protein, 347 aa, Zea mays; identical to SEQ ID NO: 240485
  Clone ID: MRT4577_180488C.1.pep

SEQ ID NO: 272919 - protein, 206 aa, Zea mays
  unsure (1)..(206): unsure at all Xaa locations
  Clone ID: MRT4577_180489C.1.pep
MFGFGHHGQNPPAHGGVHQPTFKIFCKSDEGYCLTVRDGNVVLAPANPRDEHQHWYKDMRFSTQVKDEEGNPAFALVNKATGLAIKHSLGQSHPVLFVLLILLPLFFFWRGLVRCWSDFILVLVSICSXKLVPFNPEYQDESVLWTESGDVGKGFRCIRMVNNIRLNFDAFHGDKGHGGVHDGTTVVLWEWAKGDNQSWKILPWGD

SEQ ID NO: 272920 - protein, 74 aa, Zea mays
  Clone ID: MRT4577_18048C.1.pep
QPAHPRTKSNIFRFVRGRATSCAQQPAPRTKINIFRFGRAARTHTPSITNYDVHSPTWGDGLPTHPPSAMPPLA

SEQ ID NO: 272921 - protein, 202 aa, Zea mays
  unsure (1)..(202): unsure at all Xaa locations
  Clone ID: MRT4577_180490C.1.pep
MAFPTAMAAVAVALCAAFALAALGGAEAQQLSPAYYDDSCPHVYDTVRRVIQEARASDPRILASLLRLHFHDCFVNGCDASLLLDETPTMRSEKEANPNKGSARGFPVVDDIKAALENACPGVVSCADVLALAAEVSVELAGGPYWRVMLGRTDGMAANFDGAQNLPNPTEPLNDLEAEFADLGLDDTXFVALQGAHTIGRA

SEQ ID NO: 272922 - protein, 95 aa, Zea mays
  Clone ID: MRT4577_180491C.1.pep
LQRNAGAYTPMASAQLSTDLYKTSCPDAEKIIFDVVQKRIKADPDTTAGLLRLVLHDCFENGCDAYILNDPMSNQAFEKEDGPNVYMKGYDVTRR

SEQ ID NO: 272923 - protein, 39 aa, Zea mays
  Clone ID: MRT4577_180492C.1.pep
LTSNDSRVGEKKHKKVQCFNTFLGLKAQNLLDQQPHLKS

SEQ ID NO: 272924 - protein, 49 aa, Zea mays
  Clone ID: MRT4577_180493C.1.pep
KKSSKYRPLQEFGAQVHLLGQLGLNPKKGLYLKTPGNLLTEKPGVLKKG

SEQ ID NO: 272925 - protein, 84 aa, Zea mays
  Clone ID: MRT4577_180494C.1.pep
MHAAKKVDQLPVTLRPLLDVERKAWPRSCLDLELDPLEDLLVLLRRLHVVAGSGVVVVVALHHQGALPRRTHHRLLQNRLLFKT

SEQ ID NO: 272926 - protein, 69 aa, Zea mays
  Clone ID: MRT4577_180495C.1.pep
NMYTWATHRVLPLPKHTHTHLLDEGKSSYMVLSQCLGKRSFCWVPTITHVLFQKVYKTDSLHGFVGLHT

SEQ ID NO: 272927 - protein, 247 aa, Zea mays
  unsure (1)..(247): unsure at all Xaa locations
  Clone ID: MRT4577_180496C.1.pep
AGRSLIDVTNERNTAFAAAIDRAMASSSKPAATFHTLPRIRDPPTVTNDVNLLLGYFEIIRRYNEHLRELLRSIPRQSVHAVVVDSFSNAALDVAAELGVPAYSFFTSNASALAVCLQLPWARAEGQPPSFKELGDATVNFHGVPPMPASHLIPEVLEDPGTEIYKAMMNSLSKNLEAGGILVNTFASLEARAVAALKDPHFLAESRLRMPPVYCVGPLVXEAAETKEEHACDACLAWLDEHPELSV

SEQ ID NO: 272928 - protein, 120 aa, Zea mays
  unsure (1)..(120): unsure at all Xaa locations
  Clone ID: MRT4577_180497C.1.pep
MSPGPTKIAVDDYEAEDDGHGGDYRDYDELSGDASGKSKPIHXEKRSRKALLXLGMKPITGVSRITVXKPKIILFAFCKPDVLQXSTNSDSFVIFCXAKYRDLIYQLQTQAAEQLKASDL

SEQ ID NO: 272929 - protein, 102 aa, Zea mays
  Clone ID: MRT4577_180498C.1.pep
IFFSLGRQDLNVECIDGLAAVLSVQHYEKFKGDTRYNLWQPYFCCRQIDNGDIKPFDVTQLQGYWSQEVLRTMFNATSFLKVLWGEHPTIVSWLPCGSTLSG

SEQ ID NO: 272930 - protein, 471 aa, Zea mays
  unsure (1)..(471): unsure at all Xaa locations
  Clone ID: MRT4577_180499C.1.pep
MKRLIAYVEDLYEDTNSCNMVKVQWFDKVDEVGVPLPMDFDDREIFFSLGRQDLNVECIDGLAAVLSVQHYEKFKGDTSCNLWQPYFCCRQIDNGDIKPFDVTQLQGYWSQEVLRTMFNATSSLKXFQGPXSRPSSDGGLKRKRDAFNDDANPQKFISSGASTSRFYGENIQQLCPGCHVEVLSQDSGIRGCWFRCLILKRHKDKIKVRYLELQDADETGNLEEWVMLTRVAKPDQLGVRFLGRPMVRPQRVEQSKASCFDVGAIVDAWWHGGWWEGIVLYQVGSGRLQVYFPGEKRTAEFGEDELRCSLEWVGNKWNPLKGRKDVTSKLTSTADCGSEYLIAKQDPLNFHVPKNSEPQLEGHQYDKRGIEKSSVSTISRDQKRVLADLTNDLKLDNLRWRPRKRSRRSGSRKQSDTSSGSSSGDMDLFSPSPSGSFGQHNLVPDEETCKSSGEQTFMGVPVQVPNLVMSR

SEQ ID NO: 272931 - protein, 127 aa, Zea mays
  Clone ID: MRT4577_18049C.1.pep
MGKGFLMGIDIFHGYEFGTTKPSGFIPIAISTMKVESETVPSQPLPQPQPQSQTGLPWHLYEQATLKKFRTNSPNAQGQGQGLSVRESGATAAAGTVLGETGYAETASVARPLTAGRRRRSLHKSLT

SEQ ID NO: 272932 - protein, 104 aa, Zea mays
  Clone ID: MRT4577_1804C.1.pep
LSSRLYHKLGQRCVQILKHLFPPREANAKVGNRVVTFKNIEDTIEVRHHVFVKTGYQSVELAEVGPRMSMRLFEIRAGTLDNKEGDVEWHLNQYTRTGRKKDYL

SEQ ID NO: 272933 - protein, 65 aa, Zea mays
  unsure (1)..(65): unsure at all Xaa locations
  Clone ID: MRT4577_180500C.1.pep
SRWFAIHGGKPPTRRSHLRGRRYGEDMGTNLELKLGGCLCKLILSLTFASKFVFRXKTRKRNRTH

SEQ ID NO: 272934 - protein, 426 aa, Zea mays
  unsure (1)..(426): unsure at all Xaa locations
  Clone ID: MRT4577_180501C.1.pep
MEAMEEANRTAVESCHRVLALLSNPHGQLVPSRELVATTGEAVARFGSLAAKLSSSNGNGLQGHARVRKTKKPLPIFYSNLFLESSSAVAAAATVAKTGGDGGGQQDGSGELPPGAGAPLQPARPARPQPEPDPXLQLFPRYHQFEGSSSQDPXPIPTQLPKRLLLEKPTAGMEGSTSQSPPIVQMVQPVSVAPPGGTPSPALPPGRLHFNQQQQSYQRFQLMQQMKIQSEMMKRSNLGDQGGSLSGGGGGGRKGLNLKFDSSNCTASSSRSFLSSLSMEGSLASLDGSRASRPFQLVSGSQTASTPELGLVQRRRCAGKEDGTGQCATGSRCHCSKKRKLRIRRSIKVPAISNKVADIPADEFSWRKYGQKPIKGSPHPRGYYKCSSVRGCPARKHVERCVDDPSMLIVTYEGDHNHNRVLAQPA

SEQ ID NO: 272935 - protein, 181 aa, Zea mays
  unsure (1)..(181): unsure at all Xaa locations
  Clone ID: MRT4577_180502C.1.pep
MLPMFSGQLMEVPLHLVGWGRRTPPPNTNEXQLLRGFLGVYDTDWYVWLCDHGHLCYSHINQELLRPXSFFVKDQGYCLCEAELENLDRLIQQYILESYDFKEVLLGIYDYHTLRDCSAYPDRFMLDQLTGSYDCVLFYXSTNSLVVXSTPTPGSSLFWKIASHDXVAFSDDIDMVTGSCV

SEQ ID NO: 272936 - protein, 55 aa, Zea mays
  Clone ID: MRT4577_180503C.1.pep
MEFRFPTSEFDIKQVVAVVSNTKDSLEFASARRVEIRTRVTVACEDWVVDHNVDA

SEQ ID NO: 272937 - protein, 160 aa, Zea mays
  Clone ID: MRT4577_180504C.1.pep
ASSSRSFLSSLSMEGSLASLDGSRASRPFQLVSGSQTSSTPELGLVQRRRCAGKEDGSGQCATGSRCHCSKKRKLRIRRSIKVPAVSNKVADIPADEFSWRKYGQKPIKGSPHPRGYYKCSSVRGCPARKHVERCVDDPSMLIVTYEGDHNHSRVLAQPA

SEQ ID NO: 272938 - protein, 48 aa, Zea mays
  Clone ID: MRT4577_180505C.1.pep
IRPALPPPFLRVCHGHAFWGSDRGACGFRIRRRIAATCFVAIYRLVCV

SEQ ID NO: 272939 - protein, 86 aa, Zea mays
  Clone ID: MRT4577_180506C.1.pep
MPVAIQERPQLATSFGAQFTLLYLCQNMQITDTHKAHRPCRGYYKCSSVRGCPARKHVEGCVDDPSMLIVTYEGDHNHSRVLAQPA

SEQ ID NO: 272940 - protein, 197 aa, Zea mays
  unsure (1)..(197): unsure at all Xaa locations
  Clone ID: MRT4577_180507C.1.pep
MEGMEEANRTAVESCHRVLALLSNPHGQLVPSKELVAATGEAVAKFGSLTAKLSNSNGDGLLQGHARVRKVKKPLHIFDSNLFLESSAVAAAAAAAAAPAKTPSPSPIAGLQLFPRYHQFEGSSSKDPVRIPTQFPKRLLLEKPTAGMDGSTSQSPPIVQMGQPVSVAPPAGTPXPALSPAYPYFIQSQQXYQRVQL

SEQ ID NO: 272941 - protein, 103 aa, Zea mays
  Clone ID: MRT4577_180508C.1.pep
FQDDTCPRTAVKMTTGQATIKAGITVVHPLRREIAMRPHKFQWVKVKTPLVHLYDPHKPSIEDGSTLDVSRRRRSSAFLPSCRSLLSTLSLSLYVLSYEPTRP

SEQ ID NO: 272942 - protein, 55 aa, Zea mays
  Clone ID: MRT4577_180509C.1.pep
VKQRSIVDRVYIHTYIHTYIHGRYKLDYPAINIDGDGDKITNNHLYLWSTYYNKT

SEQ ID NO: 272943 - protein, 86 aa, Zea mays
  Clone ID: MRT4577_18050C.1.pep
KKKKKGRPGLKKKNFPNPTIRPPRLKKPNPTIPSIHRLITSIGPPKTNSLPIFINLHHMKNPAVTKLNNFPKHISFPNSFKTKKAQ

SEQ ID NO: 272944 - protein, 148 aa, Zea mays
  Clone ID: MRT4577_180510C.1.pep
CSTHARMSARASYGLLSSVLTLITCSPSACVTSLMFTPTGCSPTSCATAVSWSTGASTPTARERNVTGSWKPQRCKEAETTSWSSMKSETSYESKQGVKAFRAGPQSIAQSTERASRKRCGLVSAYAARLGGHRDRQRQAPRPRCLKP

SEQ ID NO: 272945 - protein, 153 aa, Zea mays
  Clone ID: MRT4577_180511C.1.pep
IKNNILAGISSSRCWASSSPSARARLPARSVAREAAQGRARMQRVCHWCPPWPFFHRVQLCILRGGDADLGFLRGRQVAVDRPEAGAEGRRCLWLGDGRTGWRSGAWSRRKQRIWRRPARPHVEGQAGSQHGGRGAGRRDLSARPGRCAACRA

SEQ ID NO: 272946 - protein, 531 aa, Zea mays
  Clone ID: MRT4577_180512C.1.pep
MDPYKHRPSSAFNAPYWTTNSGAPVWNNDSSLTVGARGPILLEDYHLVEKLANFDRERIPERVVHARGASAKGFFEVTHDITHLTCADFLRAPGVQTPVIVRFSTVIHERGSPETLRDPRGFAVKFYTREGNWDLVGNNFPVFFIRDGIKFPDMVHALKPNPRTHIQDNWRILDFFSHHPESLHMFSFLFDDVGIPADYRHMDGSGVHTYTLVSRAGTVTYVKFHWRPTCGVRSLMDDEAVAVGGANHSHATKDLTDAIAAGNFPEWTLYIQTMDPEMEDRLDDLDPLDVTKTWPEDAFPLQPVGRLVLNRNIDNFFAENEQLAFCPGLIVPGIYYSDDKLLQTRIFSYSDTQRHRLGPNYLLLPANAPKCAHHNNHYDGSMNFMHRHEEVDYFPSRYDAVRNAPRYPIPTAHIAGRREKTVISKENNFKQPGERYRAMDPARQERFITRWVDALSDPRLTHEIRTIWLSNWSQADRSLGQKLASRLSAKPSITLVEDRTRPKQHRHCIHGYCAEAELLVSVECLAGFPSE

SEQ ID NO: 272947 - protein, 494 aa, Zea mays
  unsure (1)..(494): unsure at all Xaa locations
  Clone ID: MRT4577_180513C.1.pep
MDPYKHRPSSAFNAPYWTTNSGAPVWNNDSSLTVGARGPILLEDYHLVEKLANFDRERIPERVVHARGASAKGFFEVTHDITHLTCADFLRAPGVQTPVIVRFSTVIHERGSPETLRDPRGFAVKFYTREGNWDLVGNNFPVFFIRDGIKFPDMVHALKPNPRTHIQDNWRILDFFSHHPESLHMFSFLFDDVGIPADYRHMDXGSGVHTYTLVSRAGTVTYVKFHWRPTCGVRSLMDDEAVAVGGANHSHATKDLTDAIAAGNFPEWTLYIQTMDPEMEDRLDDLDPLDVTKTWPEDAFPLQPVGRLVLNRNIDNFFAENEQLAFCPGLIVPGIYYSDDKLLQTRIFSYSDTQRHRLGPNYLLLPANAPKCAHHNNHYDGSMNFMHRHEEVDYFPSRYDAVRNAPRYPIPTAHIAGRREKTVISKENNFKQPGERYRAMDPARQERFITRWVDALSDPRLTHEIRTIWLSNWSQADRSLGQKLASRLSAKPSM

SEQ ID NO: 272948 - protein, 84 aa, Zea mays
  Clone ID: MRT4577_180514C.1.pep
CIRLCGRTYVQWSRMRLTLTCEKAYSECTLVARWQAYMIQTMTTQAMLAAYQESRQPSTEGQNGRTRRAACGDFVRDPMQQISG

SEQ ID NO: 272949 - protein, 39 aa, Zea mays
  Clone ID: MRT4577_180515C.1.pep
GRSISKVTAVLKLTQKVVASIRKLGNCTSRNLSPMASSQ

SEQ ID NO: 272950 - protein, 367 aa, Zea mays
  unsure (1)..(367): unsure at all Xaa locations
  Clone ID: MRT4577_180516C.1.pep
LLGQGGFGFVHKGVLPDGTEVAVKQLRDGSGPGQREFQAEVQIISRLHHKHLVSLVGYCISGAHRLLVYEFVPNNTLEFHLHGRSRPTLDWPTRLKIALGSAKGLAYLHEDCHPKIIHRDIKASNILLDLRFEAKVADFGLAKFTSDANTHVSTRVMGTFGYLAPEYAASGKLTEKSDVFSFGVMLLELITGRRPVNSRQADDNLVDWARPLMIKAFEDGNHDALVDPRLGSEYNDNEMARMIACAAACVRHSSRRXPRMGQVVRALEGDVSLDDLNEGVRPGHSRFVGSYGSSTSDYDTSQYKEDLKKFRKMALGGSGLQSSSAQTPTSEHGENPSVSVSSSDGDGGAGGGGGAGEEREDRRQAAS

SEQ ID NO: 272951 - protein, 38 aa, Zea mays
  Clone ID: MRT4577_180517C.1.pep
PPFMLQHIDSSLGDTGGHTPVTDGDCRACQSPLNAPTV

SEQ ID NO: 272952 - protein, 77 aa, Zea mays
  Clone ID: MRT4577_180518C.1.pep
PPGQVQAFFFFFFFFFFYGFFFFFDLSIIDIKRPIDPKKPKLFYEPSNLLLAIPNMMVFPHILNYDIWGGGEMDRGN

SEQ ID NO: 272953 - protein, 122 aa, Zea mays
  Clone ID: MRT4577_180519C.1.pep
HPQFSNLATGPLRPLGRSAIACAGARVGRYTIPNYGTAFRIDLRECTCTATSGTITTTISTRCTYGVFQRLSEQPILGRSLDVRESRFTVTGGGNHLPPAVPGDLEPTGLHEAISGTLPPTV

SEQ ID NO: 272954 - protein, 129 aa, Zea mays
  Clone ID: MRT4577_18051C.1.pep
EGTVVVVVCVQKKNKKKKKKKKKKKKKKKKKKKKKKKKKKKKKKKKKKKKKKCKKKKKTKKKISFPGPPLRGKFQKIGGPFLGVRVWAQIWGKIGIKFFLGKIVFPVQFAKKKGAGVKKVKPGGALGGG

SEQ ID NO: 272955 - protein, 81 aa, Zea mays
  Clone ID: MRT4577_180520C.1.pep
GHILLLKHDIQLIASGQKGVYIYMRANTTKFNICKPRQENYPNKQKHSTGCGLQKEMALMVISFRVTKDLWNNLKLRRTIS

SEQ ID NO: 272956 - protein, 46 aa, Zea mays
  Clone ID: MRT4577_180521C.1.pep
EKLIKFACRRASYHDLSSFECFLDSGLYYLPKGNEACSKEKENVKR

SEQ ID NO: 272957 - protein, 67 aa, Zea mays
  Clone ID: MRT4577_180522C.1.pep
MRCYLNRLHHHLDYRFFLQASFRSFPTKDGKVWQGDGGRNPPPKAPPLVVPTPEIESLGPKSPPAKN

SEQ ID NO: 272958 - protein, 60 aa, Zea mays
  Clone ID: MRT4577_180523C.1.pep
RSMRIVQKGENQRVPKNSYSLKSSKPNCCYPLHGPFPTWFWKYKLGKHQFLAITISAILK

SEQ ID NO: 272959 - protein, 66 aa, Zea mays
  Clone ID: MRT4577_180524C.1.pep
VYCYCNTHTSWGLQYFSVSHAIPTIQGSHSINNSTLLSNHECVLQAHHIKTYQSYHFNYPTPTDSI

SEQ ID NO: 272960 - protein, 75 aa, Zea mays
  Clone ID: MRT4577_180525C.1.pep
GSVLSFRRVSTAIQGDKYYTLYWHGVVGLVCHCYPVMCPEWLPSCYVSVGYNLSVVVWFTTYIVRLYSPALLLGY

SEQ ID NO: 272961 - protein, 60 aa, Zea mays
  Clone ID: MRT4577_180526C.1.pep
PSACSNGHAGTQYLYWPRQEAAEQLYHIKGQFLWGVGLSLEMEMSTPPLSYSWETRSKAT

SEQ ID NO: 272962 - protein, 70 aa, Zea mays
  Clone ID: MRT4577_180527C.1.pep
ITGVLYQDYVYMLRSQMYFYRAISRAYKWVNSTHVLFTLDCNWSRVIDSKQAECIDVIQTLIRIYIFLMK

SEQ ID NO: 272963 - protein, 175 aa, Zea mays
  unsure (1)..(175): unsure at all Xaa locations
  Clone ID: MRT4577_180528C.1.pep
MPPPFPPSTLPPRLLAGGDHHPAPNSGSSSVHSLPLRECRTPVRSRCSRSIFVNRSTPSDAAITVCIDAGXLSGPTQXVIALKRPDIALVCMMTFPSADIDAXNSYTLLIYERGLDDVVKQCSCRNLFFITDDDKDDAEDDIIFSSENAPTKTSGLGTGKGADSTHWQRDVRMIA

SEQ ID NO: 272964 - protein, 115 aa, Zea mays
  unsure (1)..(115): unsure at all Xaa locations
  Clone ID: MRT4577_180529C.1.pep
MSSRDKGGKGLGKGGAKRHRKELRDNIQGITKPAIRKLARRGGEKRISEIIYDETRGGLKIFLEXVIGDAVTYTEHARRKXDTAMDDRYALKRQGRTLYGFGGYVACHRSPCYRA

SEQ ID NO: 272965 - protein, 43 aa, Zea mays
  unsure (1)..(43): unsure at all Xaa locations
  Clone ID: MRT4577_180530C.1.pep
LPWDKKKKXKKKKKKKKKKKKKKKKKKKKKKKKKGGRSRSRTS

SEQ ID NO: 272966 - protein, 127 aa, Zea mays
  Clone ID: MRT4577_180531C.1.pep
PLIYCASRFMAMCPRRVSHIQGQVHGTGHPSPMCPRALGQRWRRHEAGPDAAINTTSRSPARVLGEAAVMAARLDVAEGIPPGTCHGSMPGRPARRIGLGAWDSVPLHGCSSPQLRVLGVSCVCACA

SEQ ID NO: 272967 - protein, 72 aa, Zea mays
  Clone ID: MRT4577_180532C.1.pep
MCQAHWSKPPIQSFSPVMAHVRLRHHYSSGRLILFNKCGAWIATVWNSEYGARNCCVWFLVPKKNNTNRVTI

SEQ ID NO: 272968 - protein, 111 aa, Zea mays
  unsure (1)..(111): unsure at all Xaa locations
  Clone ID: MRT4577_180533C.1.pep
RDEYQPQMMLLNEGTYTSHGLAKVVSYINTCTAVVETVRTTAWPEWIDNLMHDXDKGGVTIVNDGNTMMPLLDIEHLGANILVDIELLPRLXVCNGTTTRALIADKFLMVA

SEQ ID NO: 272969 - protein, 76 aa, Zea mays
  Clone ID: MRT4577_180534C.1.pep
HLFVNWNQINKYIYIHTYIHTYLKNKTKQNRLQTLLLTRIYFLAPSRICWLQKAKTGSKGQFKKRKSHLLRLQSPT

SEQ ID NO: 272970 - protein, 69 aa, Zea mays
  Clone ID: MRT4577_180535C.1.pep
GASALRTGHPIAVRECPLIGVMTIVHSDSRLLHTGARAPKMCGEQPPRGGRHGWEKKPSNWSVPRTYSR

SEQ ID NO: 272971 - protein, 74 aa, Zea mays
  unsure (1)..(74): unsure at all Xaa locations
  Clone ID: MRT4577_180536C.1.pep
SSHGSLPXPRGVSVXTYCQNRKGLFEESEVLAASXALKDMXRGETVSRLTVQSRHLRASGCLTPSSARSCTKRA

SEQ ID NO: 272972 - protein, 40 aa, Zea mays
  Clone ID: MRT4577_180537C.1.pep
YLFKCDVPTPIPGRAHNDKGVLYSWDVIPHPIYRHGGVML

SEQ ID NO: 272973 - protein, 107 aa, Zea mays
  unsure (1)..(107): unsure at all Xaa locations
  Clone ID: MRT4577_180538C.1.pep
RFNCSSRAFSQSSAIMSTAFFDIEYGPAGNTQTGRVEFKLYDDVVPKTAKNFAELCKGFTDETGKVFDYQGSSFHRVIPQFMLQGGDFNRGNGTGGKXIYGEKFADE

SEQ ID NO: 272974 - protein, 167 aa, Zea mays
  Clone ID: MRT4577_180539C.1.pep
TRPDIEELKTELVGLKGRIEKKSVYLQELQDQYVGLQNLIQRNEQLYGSGNTPSGGVALPFILVQTRPHATVEVEISEDMQLVHFDFNSTPFELHDDSYVLKEMRFCGREQHDGTQESISNGGESSNVSNIYWQQAQHMEMPNNGTVRLSSSPPIPGILKGRVKHEH

SEQ ID NO: 272975 - protein, 82 aa, Zea mays
  Clone ID: MRT4577_18053C.1.pep
TAAHIFDFGYPLKKLISSKHAFIKFISLKGRPPFSFRESSYHFFLVLVLLSIVGLVFSSGNVTFYFWLATYIPLLDCLLNYI

SEQ ID NO: 272976 - protein, 83 aa, Zea mays
  Clone ID: MRT4577_180540C.1.pep
CRAASPTRGGWARCPPPSAAWARGVSIARPRTIVRPSAGGRCQKNDCAGASGLNRRTVFIMPYNSGVSTPYTHETYTGCSSGD

SEQ ID NO: 272977 - protein, 63 aa, Zea mays
  Clone ID: MRT4577_180541C.1.pep
GLGLRSMFSYLTDRPRLGYVTCRIVSTNQEKEIATKELGSCSMSTPRAHRFATTSFKQLVTST

SEQ ID NO: 272978 - protein, 120 aa, Zea mays
  unsure (1)..(120): unsure at all Xaa locations
  Clone ID: MRT4577_180542C.1.pep
MDRIAWIFGASGMGQXPTDSALLDSSEQGYMCYLVLLKMLKHXGRAXLPSERSSGLMLEELANYYTVRVGDEFGMPYSGTDGSXEADDHVFQTDLLDMLNQTGWPGLRGGQDHSHAALTC

SEQ ID NO: 272979 - protein, 53 aa, Zea mays
  Clone ID: MRT4577_180543C.1.pep
TKSLLYQEHDRVNMSLQSKLLVFTCICCYAIFIIEMYVFIPINMTNALISCRD

SEQ ID NO: 272980 - protein, 101 aa, Zea mays
  Clone ID: MRT4577_180544C.1.pep
LLLCPARACVRRCRRRWRPSPAPRSTSPPARSRGSRPRKRRRPRSTATRRPTASARRVATGRRRTTTTRRRRRRRRPPRPSTSAPWSASRSSSRRTRTTRA

SEQ ID NO: 272981 - protein, 42 aa, Zea mays
  Clone ID: MRT4577_180545C.1.pep
AFGTYNNKHMKFCFRCKTQKEYTTKQTSTERSRLQEYYGTKA

SEQ ID NO: 272982 - protein, 53 aa, Zea mays
  Clone ID: MRT4577_180547C.1.pep
MGCDDKCGCAVPCPGGKDCRCTSGSGGSGAHIACGDGGASLAPIARNKYVGAD

SEQ ID NO: 272983 - protein, 152 aa, Zea mays
  unsure (1)..(152): unsure at all Xaa locations
  Clone ID: MRT4577_180548C.1.pep
MAKPQLLLCFLLAASAPLIVATAKKSGDVSELQIGVKVLILMLCLGIXMQYKPESCSIQAHKGDKVKVHYRGKLTDGTVFDSSYERGDPIEFELGTGQVIKGWDQGLLGMCVGEKRKLKIPSKLGYGPQGSPPTIPGGATLIFDTELVAVNG

SEQ ID NO: 272984 - protein, 62 aa, Zea mays
  Clone ID: MRT4577_18054C.1.pep
AAKPETVLISTHYLGRSTPNVSAGAIQKGPPPVEALLKPCLTPATPQRFLIEKRAPLGKRFF

SEQ ID NO: 272985 - protein, 148 aa, Zea mays
  Clone ID: MRT4577_180550C.1.pep
MAKPQLLLCFLLAASAPLIVATAKKSGDVSELQIGVKYKPESCSIQAHKGDKVKVHYRGKLTDGTVFDSSYERGDPIEFELGTGQVIKGWDQGLLGMCVGEKRKLKIPSKLGYGPQGSPPTIPGGATLIFDTELVAVNGEPTNQSDEL

SEQ ID NO: 272986 - protein, 68 aa, Zea mays
  Clone ID: MRT4577_180551C.1.pep
IFFFFFFNKSNCTPQGFIIEKIKGMQTLDLYLGTKLALMWSTSPLLMRKALNDGVDSIYVKMNISHKR

SEQ ID NO: 272987 - protein, 185 aa, Zea mays
  unsure (1)..(185): unsure at all Xaa locations
  Clone ID: MRT4577_180552C.1.pep
MRERVSIHIGQAVIQISNACWKLYCLEDGIQADNXMPGDKTIGRGDDAFNTFFRETGAGEHVPRAGFVXDLEPTVICRVLTVTYPHVFHPGKIITGXEDAANNFARAHYTIGKDIVDLCLDHISKIADNCTGHQSFLVFPLKEDXTRSGLGYLLLQRLSDDYRKNPSLGXTEYPSPQTCTSAIEP

SEQ ID NO: 272988 - protein, 59 aa, Zea mays
  Clone ID: MRT4577_180553C.1.pep
QRIRRMYSRSARIDVERTSQELVQIIARRSRRPAGRSSLVSHRGRSVLHSGVVSHVSQR

SEQ ID NO: 272989 - protein, 58 aa, Zea mays
  unsure (1)..(58): unsure at all Xaa locations
  Clone ID: MRT4577_180554C.1.pep
SLGVSILELCLGHFPLLPEGQRQGWAALMCSICLAEARYPPTXCVEXFRDFVSRCLYN

SEQ ID NO: 272990 - protein, 92 aa, Zea mays
  Clone ID: MRT4577_180555C.1.pep
AYTIVWLVRYLLTLMYVCAYIHSGSIIFLPMRHSIASCILQPTRGMLELKLPRSFEWWYKSIAMLSAWCVQECVTSHQGAWWSVPPASSYGA

SEQ ID NO: 272991 - protein, 121 aa, Zea mays
  Clone ID: MRT4577_180556C.1.pep
PAGSLVWTRLPREHHPRVLARVDRLSPLLASCHGHRIALYITYIFCISKRFFRPRYTSPELGSDPWTKGKAVNKGKIAKEKLTGGDAHDEKLAYVMCGLDGFRLQTTDSHNLAEHVSSPGR

SEQ ID NO: 272992 - protein, 213 aa, Zea mays
  unsure (1)..(213): unsure at all Xaa locations
  Clone ID: MRT4577_180557C.1.pep
RATMAAAGTLVVYRAVFAALGCLMVGTLVYTCITDGSPFRTELLTPWMVTTLVDLYVNIAAISTWVVYKEGNWITSIFWVVLLICFGSATTCAYIVSKLFEITSSGLSQNPLDLLLLRQNNLPERKCSFVVIGRTIFSILGILMAALVTYTVITDGLPFRKDLLTPWMAATLIDFYXNVFAIXXVWVVHRESTWISAVIWICLLICFGSITTC

SEQ ID NO: 272993 - protein, 76 aa, Zea mays
  Clone ID: MRT4577_180558C.1.pep
KKKKKKKKKKKKKKKKKKKKKKKKKKKKKKKKKKNLPWWVGFVPIQGGRRRPKTLAQARSPGHFPLITKRARRTTR

SEQ ID NO: 272994 - protein, 52 aa, Zea mays
  Clone ID: MRT4577_180559C.1.pep
PICSFSRDCKHGNQIRATKQGSCLHKLFPKKLEPGLIFYHVQSVPKKLGSDL

SEQ ID NO: 272995 - protein, 333 aa, Zea mays
  unsure (1)..(333): unsure at all Xaa locations
  Clone ID: MRT4577_18055C.1.pep
GEGGGGRGGEEEDXKSTERRLPPAAQLVSHPLALLALVPNSAAIFAAGAAAGTVAKTVTAPLDRVKILMQTHSVRVAGESAKKGVGFLEAMADIGKKDGLKGYWKGNLPQVIRIIPYSAVQLFSYEVYKKIFRRKDGELSVFGRLAAGACAGMTSTLVTYPLDVLRLRLAVQSGHSTLSQVALNMLREEGLASFYGGLGPSLVAIAPYIAVNFCVFDLMKKSVPEKYKNRPETSLATALLSATFATLMCYPLDTVRRQMQMKGTPYNTVFDAIPGIVERDGLTGLYRGFVPNALKNLPNSSIKLTVFDTVKTLIATGQKEMDKLIQENEEKRS

SEQ ID NO: 272996 - protein, 181 aa, Zea mays
  unsure (1)..(181): unsure at all Xaa locations
  Clone ID: MRT4577_180560C.1.pep
WDLEPAGRSPALSSHFTIPFFPHFVLYRIPISHSSRTITTMRLSLSALAANVFLVASALGDGAYAAQGGKVRGYYPSFNSDGQRPAAIDWAGFTDVLYFMVEPQANFTLTYDPKFTYQQGEQLVTEFIAEARKHHVNPIIXRWWVGLALXAFSVLTRSDASRNRFARVLVEYAQKHGVRWY

SEQ ID NO: 272997 - protein, 69 aa, Zea mays
  Clone ID: MRT4577_180561C.1.pep
PLNGALFKNTQLPTTFYNHLFTFNIHNSKPLSTMLYITNLLLTISQTHDLLKPTNLITLTPYYKLTTTL

SEQ ID NO: 272998 - protein, 48 aa, Zea mays
  Clone ID: MRT4577_180562C.1.pep
NTKTPHLDPTPRANLTRPEKTYAHSKQTLKTKPYHPTPTKHHQHNPRY

SEQ ID NO: 272999 - protein, 44 aa, Zea mays
  Clone ID: MRT4577_180563C.1.pep
ARIPSASSETGGSLGRCLTTTRPPKIVMCQRTLWGARAENAREH

SEQ ID NO: 273000 - protein, 83 aa, Zea mays
  unsure (1)..(83): unsure at all Xaa locations
  Clone ID: MRT4577_180564C.1.pep
LWGFFFPPPGPKKVTRGYFEFFQSPGVGSPSQIFFIPDVFQKALVAKNAGFXVIISLRPGNAPLPDNYGFPPFKSFTQFWGIW

SEQ ID NO: 273001 - protein, 136 aa, Zea mays
  unsure (1)..(136): unsure at all Xaa locations
  Clone ID: MRT4577_180565C.1.pep
ATAPSNTYYLIYPSGDLSSARDEFVQCLVNYEWKGAAVNSAKADELVLGLTNHDLFLYFGHGSGTQCISSKEVEXIDNCAAALLMGCISGTLHCTRSYAPRGAPLSYLXAGSPAIIANLWDVSDNDIDTLSKAFLN

SEQ ID NO: 273002 - protein, 112 aa, Zea mays
  Clone ID: MRT4577_180566C.1.pep
TRYIEAGIRLAKWFKRYEVPSPSPNLHGATMLHYIMGSLDAHFHDMTSDALYAHDNLGIEISMCNTTHLNEGIQIMTHWWGNFRNDKGAKIIVKAFPHITCTVLGPPKIIAT

SEQ ID NO: 273003 - protein, 116 aa, Zea mays
  unsure (1)..(116): unsure at all Xaa locations
  Clone ID: MRT4577_180567C.1.pep
RKPLPLEPSLLLREANRRRAFRSAGPSPVLLVSSDGARVLAISEPPPSRSAANLMTRTMSGPATSETSLPVDRPMRLSEIHVAAEHALKQTISDPDXMTSLSSLEEFEKRYMELTK

SEQ ID NO: 273004 - protein, 88 aa, Zea mays
  Clone ID: MRT4577_180568C.1.pep
SKRQRGEGATGPGEEAQEATGGEKQKAQRGDAQHAATERDQRSSKQTSESRRRATARQTRTGQGAQEPEETPPQHHQKRGRKQAKNGG

SEQ ID NO: 273005 - protein, 90 aa, Zea mays
  Clone ID: MRT4577_180569C.1.pep
QQQQLFPFNQLGALNPAGFLQQQILLPFCQLGSANRGFFFTQQQLVPFFQQFWGNPATLFQLQQLLPFVPLGFSNPAASFQQHIIGGALF

SEQ ID NO: 273006 - protein, 196 aa, Zea mays
  unsure (1)..(196): unsure at all Xaa locations
  Clone ID: MRT4577_18056C.1.pep
GVGFLEAMADIGKKDGLKGYWKGNLPQVLDVPYHPWFILLCCADSYPSPINLSXIRIIPYSAVQLFSYEVYKKIFRRKDGELSVFGRLAAGACAGMTSTLGTYPLDVLRLRLAVQSGHSTLSQXMKKSVPEKYKNRPETSLATALLSATFATLMCYPLDTVRRQMQMKGTPYNTVFDAIPSIVERDGLTGLYRGFV

SEQ ID NO: 273007 - protein, 56 aa, Zea mays
  Clone ID: MRT4577_180570C.1.pep
VVCVELVHTLTPISQKKRKRRRDLSGDQACRCVLARKRCKAIHLLLPKLSQTCYAQ

SEQ ID NO: 273008 - protein, 86 aa, Zea mays
  Clone ID: MRT4577_180571C.1.pep
LFPFNQLGALNPAGYLQQQILLPFSQLGTANRGSFLTQQQLVPFFQQFGGNPATLFQIQQLLPFVQLGFAKPAASFQQHIIGGALF

SEQ ID NO: 273009 - protein, 42 aa, Zea mays
  Clone ID: MRT4577_180572C.1.pep
GYMAQYALYMRTKTANVQAHYTHSQQQTVRLTSASRNKPDSS

SEQ ID NO: 273010 - protein, 123 aa, Zea mays
  Clone ID: MRT4577_180573C.1.pep
QQFFPFNQLFSLNPAGYLQQQLFPFSQVGIAYFYQQQLFPFNQLAALNPAAYLQQQIFFPFSQLAAANRASFFTQQQLLPFFQQFGGNPATLFQIQQLLPFVQLGLANPAASFQQHIIGGALF

SEQ ID NO: 273011 - protein, 131 aa, Zea mays
  unsure (1)..(131): unsure at all Xaa locations
  Clone ID: MRT4577_180574C.1.pep
GPAVRWQQQSHEQQFHPLQHHPQKQEHXPPSHHHHHHQHQQQHGYMQPQKHXLQQEVHVQHQQQQPQHQQQQQLQHQQQHQCECQQQHHQQSQGHVQQHEQSHXQHQXQSHXQQHLQQYQGHDXHHQPQQP

SEQ ID NO: 273012 - protein, 124 aa, Zea mays
  Clone ID: MRT4577_180575C.1.pep
QQQFFPFNQLFTLNPGGYLQQQLFPFSQVGSAYFYQQQLFPFNQLAALNPAGYLQQQIFLPFSQLGAANRGSFLTQQQVVPFYQQFGANPATLFQIQQMVPFGQLGLANPAASFQQHIIGGALF

SEQ ID NO: 273013 - protein, 69 aa, Zea mays
  Clone ID: MRT4577_180576C.1.pep
TRSPVLEICKIKSSCLKICNELIQGMPVPGMVACSEYLLPAHWDKLWFVQGVFRAYGMILSYLFHQTSI

SEQ ID NO: 273014 - protein, 147 aa, Zea mays
  unsure (1)..(147): unsure at all Xaa locations
  Clone ID: MRT4577_180577C.1.pep
KYMAVKFLQRCYVSSISRMVTSKESAIFSAHVIFICQPVQIGNVXDPVMEYHKSRIKVKFPXQLVNIVWRSNKDLYSAPQFLKNGDYVFDKMIPFKLMLVDAFAKYPQVGRFEVSQMRLPFAVGVIKSVQNKDPSGPXVTKRSAKNK

SEQ ID NO: 273015 - protein, 94 aa, Zea mays
  Clone ID: MRT4577_180578C.1.pep
LHRWCSVCNQERHPHRACKVRRGRHAHMEWYQFRALSHGRQPLEDCLCMLGVLQHQQSRATTRTGFRSPTRPSKERSPSPALTLQYSPRLKIWL

SEQ ID NO: 273016 - protein, 89 aa, Zea mays
  unsure (1)..(89): unsure at all Xaa locations
  Clone ID: MRT4577_180579C.1.pep
QKREEKRSYRRKETASDLYEPWYXLXQKKREGSHESKITWQYVSGHTSTIHRDYQYLARIKGIWHGRIQVDGCNIYIFYIIVLSKKSFI

SEQ ID NO: 273017 - protein, 419 aa, Zea mays
  unsure (1)..(419): unsure at all Xaa locations
  Clone ID: MRT4577_18057C.1.pep
MSRHRVETCDSWRPPRKNHAGAPPLLRAGPRLLAFASLSVRDGGDSAAAVAKAVEEAVVVRSDEVKEAVAGEERKKTKSTERRLPPAAQLVSHPLALLALVPNSAAIFAAGAAAGTVAKTVTAPLDRVKILMQTHSVRVAGESAKKGVGFLEAMADIGKKDGLKGYWKGNLPQVIRIIPYSAVQLFSYEVYKKIFRRKDGELSVFGRLAAGACAGMTSTLVTYPLDVLRLRLAVQSGHSTLSQVXSCKCKFLYFFFLETGVAXDFVXALNMLREEGLASFYGGLGPSLVAIAPYIAVNFCVFDLMKKSVPEKYKNRPETSLATALLSATFATLMCYPLDTVRRQMQMKGTPYNTVFDAIPGIVERDGLTGLYRGFVPNALKNLPNSSIKLTVFDTVKTLIATGQKEMDKLIQENEEKRS

SEQ ID NO: 273018 - protein, 88 aa, Zea mays
  unsure (1)..(88): unsure at all Xaa locations
  Clone ID: MRT4577_180580C.1.pep
GFARFPCASYNVFTANKCLPCPSGSCPQMGHYADRYPGKTNDVGQKFYLDTGDASNFARWRXKVSVTLSGNKVTGHILVSLFENKGNS

SEQ ID NO: 273019 - protein, 182 aa, Zea mays
  unsure (1)..(182): unsure at all Xaa locations
  Clone ID: MRT4577_180581C.1.pep
MECTSSRRRRSRLSRCLLLVCAVASLLCHSPGPAAAAAAPRRLLQTCPGQDFDVPHAHLRARDNVKPLKYTEELSARAAQWAQQYRSDCEAAAPAPGINVFLGAAGATWLPSDAVAAWAEEEQHYDYGSNSCSTGKACGRYTQMVWRGSKEFGCAVVDCDSGKTLMACLYEPQGNVAXQRPF

SEQ ID NO: 273020 - protein, 78 aa, Zea mays
  Clone ID: MRT4577_180582C.1.pep
QLLGKPTRWRTAPMWSTYNADGIGRPLRTRGAACYQRDTVARTATNGWNNGSSRRAVTKEVAPTKAIWTSGSCSRCSK

SEQ ID NO: 273021 - protein, 110 aa, Zea mays
  unsure (1)..(110): unsure at all Xaa locations
  Clone ID: MRT4577_180583C.1.pep
AKRATICVGQYWLTGRETTSVWLEVGEPKGNDAVXIIKNTDTLAGSILTMNCSXIHIDLFTLANEDNDIINXWGDTTTIESICVAYTRHAHNVLHAHEFISQLADLMQTQ

SEQ ID NO: 273022 - protein, 149 aa, Zea mays
  Clone ID: MRT4577_180584C.1.pep
MAAVLTRPTPGTVQCFGRKKTAVAVAYCKPGRGLIKVNGAPIELIRPEMLRLKAFEPILLAGRSRFKDIDMRIRVRGGGKTSQIYSIRQAIAKSLVAYYQKYVDEAAKKEVKEIFGRYDRTLLVADPRRCEPKKFGGRGARARFQKSYR

SEQ ID NO: 273023 - protein, 61 aa, Zea mays
  Clone ID: MRT4577_180585C.1.pep
FRLHQRSLLLLQSGWAKSDFELTQTAHNVAGHPTACVSMITLNNGFLSGFCTIDMRDSMIS

SEQ ID NO: 273024 - protein, 89 aa, Zea mays
  Clone ID: MRT4577_180586C.1.pep
KKGPENMISNHRSKYKKTWLAHQGWKKKNAPFQTLGTPFSMGGGFSGGILGAIMLTLNPEKGGGGTSPPFTNWWGTGGTAGLPLSTSKW

SEQ ID NO: 273025 - protein, 70 aa, Zea mays
  Clone ID: MRT4577_180587C.1.pep
PLFRRRVSLLAKGATLLARGGNDLISFARDPVRTKGYTRLLQAGIERIFLRRSHHPLTDRLETNSPPGVP

SEQ ID NO: 273026 - protein, 85 aa, Zea mays
  Clone ID: MRT4577_180588C.1.pep
QHVSDILSQPQCHSKYIQLGRREREVVCRMRRHLLAGLYSGFQTIEPTNVLREYSMESWTGSMTLGSVLCRYQTNKESPPNRESK

SEQ ID NO: 273027 - protein, 200 aa, Zea mays
  unsure (1)..(200): unsure at all Xaa locations
  Clone ID: MRT4577_180589C.1.pep
MMMSKQMLILSLLLVLFELGSLPTTSCKKVVFNSWVRNQPSNANQDAGCAKKDDALSSADTIKVWNYIDPASALRPEDGGYTTINESIANIPEDNTKRYLLFLKPGVVFREKLLLGRSKPFITIISEDPMNPAVIVWNDTGTTMGKDGKPLGVDGSSTMDIESDXNNVVFKNDAPLPKLGEKKGRAPALRVMGTKATFYN

SEQ ID NO: 273028 - protein, 78 aa, Zea mays
  Clone ID: MRT4577_18058C.1.pep
ILVEALILLLIFFYFLLFLFMVEMIVVLSCGTENKKTGADTINAAPGWADPNPLDEAPDFLGVAPDPQSLCTPIFSRG

SEQ ID NO: 273029 - protein, 46 aa, Zea mays
  Clone ID: MRT4577_180590C.1.pep
DMHAELDIYSAPSSVHVRAYKLIRASVITCVLLHPYSIDLLIIVPQ

SEQ ID NO: 273030 - protein, 45 aa, Zea mays
  Clone ID: MRT4577_180591C.1.pep
APISWVGEESLTLLEWQISSAPRLEALQEMFLRITPALELHPRVR

SEQ ID NO: 273031 - protein, 54 aa, Zea mays
  unsure (1)..(54): unsure at all Xaa locations
  Clone ID: MRT4577_180592C.1.pep
MENRALDPGTRDSYGATSQLPNKGALAKVKNNFKDLMSKLTEXNYVLCRWTDGL

SEQ ID NO: 273032 - protein, 143 aa, Zea mays
  Clone ID: MRT4577_180593C.1.pep
KNSMGCCMAPPGSFKGGGIDPVCGPCAAGANAKYPPLGRFHVYLQALVVLGIISLAPICSYMWTGSGPFPLFLGAKFRGALVKWGVGMNFYPQGKLVHPFPFVGGVCPTCGANRPPGCFNPPPASGLLLRPKFVVEIDFFGGL

SEQ ID NO: 273033 - protein, 127 aa, Zea mays
  unsure (1)..(127): unsure at all Xaa locations
  Clone ID: MRT4577_180594C.1.pep
GAWRVTMLPATTTSLHRGRGXLNDFSQLMNSSSIPMPRNATAXDFMSDLSFRTHAVSTIGSTRRRPTEANLKGAINGFGRIXRHFLLRCHGRGDSTPLDVISINNTFCPKKASRLFNYYSTVAISDA

SEQ ID NO: 273034 - protein, 117 aa, Zea mays
  Clone ID: MRT4577_180595C.1.pep
TSRTHVLCDLQTALFRASVSASGAPPARRGAPGGDKASRPAAVSALRLAMTILVGGSAFFLLTATYVLARSRGRTGAIHGHGADKTWKGTLYQKLDFSVNKVVRPLTSANVIGTGSS

SEQ ID NO: 273035 - protein, 125 aa, Zea mays
  unsure (1)..(125): unsure at all Xaa locations
  Clone ID: MRT4577_180596C.1.pep
TRVRKRQTKQDFWGSVFFLAVVAVPFVLNFSCRLLPSVRVQIRQQTDPGPSTLAGPEAGPKAAEALVLGLGLGLGGANSRGDAFWGLGRSLRDPGGVLKSWNPRLVNPXTWFNVTWDGKNGVTGL

SEQ ID NO: 273036 - protein, 105 aa, Zea mays
  Clone ID: MRT4577_180597C.1.pep
VHAARPPQAQTESRKAQAYPEETNNPLQAHWGPKHGEEGRPSQARTEKSSGGHRESTAGPTGPHTNTAPGTGPNMTPQTRTRQTRASGRTVGNAGRGKPPKKGRA

SEQ ID NO: 273037 - protein, 36 aa, Zea mays
  Clone ID: MRT4577_180598C.1.pep
FNGSFHRIVHANGGFVANYDIFVGKGIGIHLIRSAA

SEQ ID NO: 273038 - protein, 94 aa, Zea mays
  Clone ID: MRT4577_180599C.1.pep
SFSRQLPSTGSSVEVPQDSSLVVPVVIVSCSAVGVPPNNVPALAFKGRAIFHCVFVVVYLFCDLSRASPMGFQKKKKKKKKKKKKKKKEKPRGG

SEQ ID NO: 273039 - protein, 106 aa, Zea mays
  Clone ID: MRT4577_18059C.1.pep
KVPHPHGGATSEILLLFRGNLVAIKLERNQKGANFSLFQIEMGGDPFKRAPSNFCPAKQLLKFRKPQLGPVFFPSPVKDILHVLKGAGPFCQLRGSKNVAALASGG

SEQ ID NO: 273040 - protein, 27 aa, Zea mays
  Clone ID: MRT4577_1805C.1.pep
AQSALQTSYSMMPTLRTKRQRPRVDYL

SEQ ID NO: 273041 - protein, 84 aa, Zea mays
  Clone ID: MRT4577_180600C.1.pep
GAEAVRGMACKAVVNESASSALEYSRLVWAHYSHQCCAARRHGVIQCPLFSYNNHTGYEAQGLLHSFRAPMRAPSVLRQHSRLN

SEQ ID NO: 273042 - protein, 89 aa, Zea mays
  unsure (1)..(89): unsure at all Xaa locations
  Clone ID: MRT4577_180601C.1.pep
KPCRHALALIPAQQSVDVALXDFVHEYYSVHRFXDAYKRIIEPLPDRSRWPHVDLPYMVGAPLVERGRGRCMXLWIKSCLQGGASKGMQ

SEQ ID NO: 273043 - protein, 185 aa, Zea mays
  unsure (1)..(185): unsure at all Xaa locations
  Clone ID: MRT4577_180602C.1.pep
MPINRIALWSPKRXYRPGALKXGFADFISTLIFALAGQGSGMLFSKLTDGSPTTPARLIAPIVGHAFALFVTFTXGGDPPGGEVNPDVTFGDFVEDNITLMREILYWVEDLLGSTAAXFLVRFSTGEEATGTXFGLTKATLCETLVLQIGMTLELVYTXVTXTAVDSNKGSLGTIAHIAIGFIVG

SEQ ID NO: 273044 - protein, 144 aa, Zea mays
  unsure (1)..(144): unsure at all Xaa locations
  Clone ID: MRT4577_180603C.1.pep
PRVRPRVRGYVGRMKRLAAKFDRFIEHVLREHGERRRREGGAFVPGDMVDLLLQLADDGDGGPGLEVPLDRDGVKASVLELVTGGTDTSSVTVEWAMSEVLREPRVLGKVTEELDRVVGRDRLVGEGDIPGLPXLDAVVKEVHA

SEQ ID NO: 273045 - protein, 157 aa, Zea mays
  unsure (1)..(157): unsure at all Xaa locations
  Clone ID: MRT4577_180604C.1.pep
FGAGFVCGISSSASLSSSSSEASESSPVCGGGGGFLVAEEGTTWLAFSSSSTSSSSISSSSSSSSSSDASGSWTFCGSSSSSSYSSSSEASGSWTFCGSGATLLGATGGGEWAVSKSSSSSSSSSEPEXGGLLGGGSRGRRRRRWSRALGGHLRRCT

SEQ ID NO: 273046 - protein, 107 aa, Zea mays
  Clone ID: MRT4577_180605C.1.pep
PVAAVVVELVVDPEHCPQHGWAPARANTLKNCEYVRGHGRDHKHTGSTYVARNAVIAHNLVKKKKKKKKKKKKKKKKKKKKKKKKKKKKKGKQKKKDQRFKKEKLKK

SEQ ID NO: 273047 - protein, 367 aa, Zea mays
  unsure (1)..(367): unsure at all Xaa locations
  Clone ID: MRT4577_180606C.1.pep
MVFIGRLGTSRPAGENPSLVPPHQLAKSLTLGAAAEMAPKRSAPPPPPPPPAASSEETASGSGSEEEEEEEEEEEEEDDLETAHSPPPVAPKSVAPLPXRSRNPKRPTRMSMTMKXEPQKVQEPEASDEDEDDEEEDIEEDEKANHVVPSSATKNPXAAAXARIPRLPTKKRXREADDEMPQTKPAPNQEVEAKGAKRPSAPFQRTWSIDDDFRILEALAAQRLEHGALPQTDVLADALAGKLDNSGCSLSDLKRKVRSLQSRYAKAVKKGAPPSKDQDRRLFDLCKNVWPSVSNAKPVTKAVTKASANGGAGREPDEMCELYPYLAEEVRALQRAHPGLFKREFGMIDYSKARPLYERINKFKGVH

SEQ ID NO: 273048 - protein, 49 aa, Zea mays
  Clone ID: MRT4577_180607C.1.pep
LFFLIIRFMRILRCYCRGFFFCSWSMTGTKLMHNKNNECLYERRVMTLL

SEQ ID NO: 273049 - protein, 69 aa, Zea mays
  unsure (1)..(69): unsure at all Xaa locations
  Clone ID: MRT4577_180608C.1.pep
DGSSCLATPQNQWGPIXEGRAKLPPNQSRGGDPNPNSPANPEPPRMFSETKGGAPPKVCEVVDQSWPPD

SEQ ID NO: 273050 - protein, 166 aa, Zea mays
  unsure (1)..(166): unsure at all Xaa locations
  Clone ID: MRT4577_180609C.1.pep
RRQGRRWRRQQRPRRALYLDAATVFHRRRPRRQQFWVRFXPDLEVARWPPPPNGRLAPALAGRDSRAASGADAGDDRRRAPLVAARDWSSGHGLLLRHPRGPNLWAGCRAANSCGGSRRLRRTTVVNPILAALFMDEAHVMLSVTLGGRTATSGGWSRRPPSRGCR

SEQ ID NO: 273051 - protein, 101 aa, Zea mays
  Clone ID: MRT4577_18060C.1.pep
PTCTWTGSHEVWNLQRVLKYTGLQGGITTSNTRCISPRRSNILRSIFWQPIQDVRPGGVGKPSLSVERYHVGSCTNLILSRYLEPRRRALSEHTQSGRLPQ

SEQ ID NO: 273052 - protein, 143 aa, Zea mays
  unsure (1)..(143): unsure at all Xaa locations
  Clone ID: MRT4577_180610C.1.pep
FSFFLFGPLAQLGQGPTTSAQAPQPHHHHAAARALPTPGREHPKTHRXKLRATNEVRAKSQSWXTYPRKTKXKVKKSNGQGLANNEIFERNPTTITNSRTWLRYHSRTGPHNLPTAARDTTXNGAEEHQHNEMAPHPRGRPPR

SEQ ID NO: 273053 - protein, 106 aa, Zea mays
  Clone ID: MRT4577_180611C.1.pep
TACSGFGRNVNNLKRRKPRPPIKMFFALKHPSLSSQGPLSSIRGGKNNKNEARPKNHRLPFDLFPPHSHFYFCIKGKGLGFQKLWVLQGFFSLIKRFWAPSGQVPR

SEQ ID NO: 273054 - protein, 51 aa, Zea mays
  Clone ID: MRT4577_180612C.1.pep
ILLSTCMVSRGCGSCFTSVLQVTSTVDKCNSYALRTHALECALLHFFTFNA

SEQ ID NO: 273055 - protein, 61 aa, Zea mays
  Clone ID: MRT4577_180613C.1.pep
KKKGPQSMRATVLHTPEEKGGTTPPNPLYNSLTNKDRHPSFDLPWSFYKQLGPCSVVESPA

SEQ ID NO: 273056 - protein, 94 aa, Zea mays
  Clone ID: MRT4577_180614C.1.pep
AGRHQVKMCRVRGCFMLSFMCISGLLYMALLNNTLKVARSKRTLRSPANFGWQLPQFHIYFSLHACPLLTGRRRHRTNGQYAITEPGRDTTLKF

SEQ ID NO: 273057 - protein, 38 aa, Zea mays
  Clone ID: MRT4577_180615C.1.pep
SYKPAHHQPPPFIFFPLLSSLCKLLLKGGPSPSPISSL

SEQ ID NO: 273058 - protein, 749 aa, Zea mays
  unsure (1)..(749): unsure at all Xaa locations
  Clone ID: MRT4577_180616C.1.pep
ISSVPLSSHLLLPVRACTALDVELASSGIFNALSDGLRDKHDKLRRFCMATLGELLFYISTQSDQDTKEINTQEYPLKDNRSATSWQVPSAVIALVSSILRKGEDDLAQLYALRTVDNICSQGTEWTSRFASQDAIGHLCYIYKATGKQESTRLIAGSCLARLSRFSPSCIHLILEKISFKDIACTLIKGNTREQQISLNILNSALVNSHTVTSMNRHILSLSDDKQLVPGLISLIEQGTDVLRGKTLLFVALLCKNSRRWLPHFFCNAKLISAVDRLGKEKEGFIHQCTEAFVQLVASLVPGILDTVSSDIQQVMVGKRHGPVTALAGRAHPKSTIHLFPVILHLLGSASFKHRVVTGHVLLQLANLIKILEAPFQARDDFQMTLLRVLEAATEEPSVILNEHSVFMSRIIPSLSVLYKGNKDGDARFLCLKILADVMIVIFSDSSLTSDEQTLTDLKSISQRHFLPLYPSFAEDEDPIPIFAQKLLVMLMEHGCIKVSDILHKATVSQCFDFLLGDLSNANVSNVKLCFALASAPEMNTHILSQLQVVRRIGNLLEFVAAKDMDDFLEPTLELCRAFIIRGTGSNRSGRXSKNPALLLDSAFSMSIAVDQQTCVMDICDFGGNMGIFLELVGNSDPQISDLASDCVVLLLKAAPREATVGLLTSLPKLSTVMDLLKHDSHLRLIRLLYGLAFSCRQYLAQGMILSISVPALMRVEALVSVFKGSNDSLLADAASYLSAELQRLPRCG

SEQ ID NO: 273059 - protein, 128 aa, Zea mays
  Clone ID: MRT4577_180617C.1.pep
CLEGTGELGRRACLRVATGRRRTASLRPPTSGSGSPPFWTSSPPSLSPGSDQPSSISAPRSPRAMQPAAAVVEELLPRARVAGLGMDLRPGGGPKWRAGDGAGGGPASGWRSGSIRTARYGPWDGFSP

SEQ ID NO: 273060 - protein, 97 aa, Zea mays
  unsure (1)..(97): unsure at all Xaa locations
  Clone ID: MRT4577_180618C.1.pep
MNEVTSRFGKRHNKTKTLGLRCARXSLHIPKNECSSXGYPSDKIGRHNCPRETRKIIKDTSCTGXRTRYLKDESRRLMNVYQIGTIWFARALTGKKD

SEQ ID NO: 273061 - protein, 106 aa, Zea mays
  Clone ID: MRT4577_180619C.1.pep
ECSKTNKAHNPHNTHRFPVFILSSLLAAFILEAATSSEAKPSRLENKTKSLEKLDNLRENALVPNDKSRSTDYEKVMPHSENFLIPHATDDVFLFFLNLPINPSIA

SEQ ID NO: 273062 - protein, 86 aa, Zea mays
  Clone ID: MRT4577_18061C.1.pep
FEQPRNHLLCSQTVHALSCVGCHLVHIGKRLNYGTETLYDWKAMQAHSFSSSIKRIKRALDSYHELRIDHLQLACALFRQYLLMQN

SEQ ID NO: 273063 - protein, 543 aa, Zea mays
  unsure (1)..(543): unsure at all Xaa locations
  Clone ID: MRT4577_180620C.1.pep
MAPNLSKKTPAGLLGDEVAPVEGLKPSRFTLKGKDLAVDGHPVLLDVPANIRLTPASTLVPAADVPAAGGGSFLGFDAAAAESRHVVPVGKLRDIRFMSIFRFKVWWTTHWVGDSGRDVENETQMMVLDRSAGEPDGGGRPYVLLLPIIEGSFRACLEAGKVEDYVDLCVESGSSAVRGAAFRSSLYLHAGDDPFELVADAVRVVRAHLGTFRTMEEKTPPPIVDKFGWCTWDAFYLKVHPEGVWEGVRRLAEGGCPPGLVLIDDGWQSICHDEDDPNSGEEGMNRTSAGEQMPCRLIKFQENHKFGEYKQGGMGAFVREMKAAFPTVEQVYVWHALCGYWGGLRPGAPGLPPAKVVAPKLSPGLQRTMEDLAVDKIVNNGVGLVDPKRAHELYDGLHSHLQASGIDGVKVDVIHLLEMLCEEYGGRVELAKAYFAGLTASVRRHFGGNGVIASMEHCNDFMLLGXTEAXVRXXRVGDDFWCTDPSGDPNGTFWLQGCHMVHCAYXSXLWMGNFIHPDWNMFQSTHPCAXXHAAXRAISGGPS

SEQ ID NO: 273064 - protein, 156 aa, Zea mays
  Clone ID: MRT4577_180621C.1.pep
MLHNIPPLFSSYYCLLALPDRRIDGRSMELEAAAAPATCRRDGRRLVRCPRLQLDTETATAIERSTGESVAAEGAMRVKIVLSKQQLKQVAAAVAAAGSGGAFAGLPPALEQLVSVLKRRQHARKQQAAAADAVAAAGRRRGRWSPALQCIPEECF

SEQ ID NO: 273065 - protein, 65 aa, Zea mays
  Clone ID: MRT4577_180622C.1.pep
SLNRDTRYLIIEDLMKAGLPVAEDLHITLNDAVNEENSEDRLVKLLLDYGASPLANGCKTLVDAA

SEQ ID NO: 273066 - protein, 467 aa, Zea mays
  Clone ID: MRT4577_180623C.1.pep
MAFSARRSLATSLSHHFSGRLYPSISHLVPSHHEHSDPAPSPSPVPQPRPQSSQQSAPPFPSALPRPSRSRALAPFPLPFALHLAAHRYSSAPAPDSEVLADSAAAAPVSELLSDGVASAAASVSTPPLPYPGEVAAAAAESFPPVAALQHLLDAVQSFTGLNWWATIALTTLMIRLATVPLLINQMKSMMKLNEMRPEIEAINEEMRNSTDPRSMEVGKQKLGELFLRHGVTPLTPLKGLFIQGPIFMSFFFAISNMVEKVPSMKGGGVYWFTDLTTPDNLLILPVLTSLTFLATVELNMQDGMEGNHMLKPMKKFSRFFGVLFVPFTIGFPKAIFFYWVTSNFFSLVYGAVLRNPAVRLFLNLPRLESQPTTAEVQPLNLSGGPEPSPGVDSPITDKETEQSSSVLSPGVDSPIADKECEQSSPAVSPEVNSPMVDKESEQSSSVLCDRIRDLEIRAKATGESRE

SEQ ID NO: 273067 - protein, 75 aa, Zea mays
  Clone ID: MRT4577_180624C.1.pep
FGSSSSPYGKRKAAYGRIQDRLIDDCKDPHEMATDGCYTPNGQRALIGSNKGSCPIDETSRIKDDTTRNKIDTAK

SEQ ID NO: 273068 - protein, 57 aa, Zea mays
  Clone ID: MRT4577_180625C.1.pep
GEAEYVHPMHRHAPTEHQCTYTLVKHIKEPIHLVWQLVRRLDQPQWYMPFAKNCVVR

SEQ ID NO: 273069 - protein, 60 aa, Zea mays
  Clone ID: MRT4577_180626C.1.pep
PAWKLLNNIRVALSRVPGTSHALRKTIYHKPCERVWLYSKGCIMFSIYLANCVKGHTPIH

SEQ ID NO: 273070 - protein, 83 aa, Zea mays
  Clone ID: MRT4577_180627C.1.pep
MEAFLAGLFRAPPRAVPAPRGTPLPSLPLFYGRRRRGPSSSVVCMAEPYLIAKLDSAEKAWKEMSVWLPLLCAPLVPCFLLCY

SEQ ID NO: 273071 - protein, 68 aa, Zea mays
  Clone ID: MRT4577_180628C.1.pep
TEHCLCALLAENPTFRAQTEPVAVHSVCSVQEPYLIAKLDSAEKAWKEMSVWLPLLCAPLGPCFPSWY

SEQ ID NO: 273072 - protein, 58 aa, Zea mays
  Clone ID: MRT4577_180629C.1.pep
RLSPYLFIYVGSRWCLPVSHLMEAIKTLVIMCHPPKKNKRIVNEKKPRKKMNNKKKKL

SEQ ID NO: 273073 - protein, 61 aa, Zea mays
  Clone ID: MRT4577_18062C.1.pep
LSLLFSIIKISTGGSASVGQSSLGYLFGSCEPPKPAVAPAVVAPPVEQPSAAKTDAAKQVA

SEQ ID NO: 273074 - protein, 225 aa, Zea mays
  Clone ID: MRT4577_180630C.1.pep
MAEGDAGKAEAGSCSAAAASGAGGCDAVKKRPEQSVAFHELFGFADPLDWLLMAAGSAGAVVHGAAMPVFFLLFGELVNGFGKNQHNLRRMTDEVSKYSLYFVYLGLVVCASSYLEIACWMYTGERQVGALRRRYLEAVLRQDVGFFDTDARTGDVVFSVSTDTLLVQDAIGEKVGNFIHYLATFLAGLVVGFVSAWRLALLNIAVIPGIAFDGGLYAYTLTGLT

SEQ ID NO: 273075 - protein, 30 aa, Zea mays
  Clone ID: MRT4577_180631C.1.pep
IDECVKVACYPANVVIQRFGCTYPEKPDFN

SEQ ID NO: 273076 - protein, 119 aa, Zea mays
  unsure (1)..(119): unsure at all Xaa locations
  Clone ID: MRT4577_180632C.1.pep
RWWLAAPGVPGAGLWXVFCXWCXVSRPFPSCXVGRRAAVLXXXXGGWSPAPWSXXAPPSDPAPLPRPXQVXXPFXQPLVHGTADAQGRKARAVMAMKQVKTPICLEAMPEARLDDERAS

SEQ ID NO: 273077 - protein, 68 aa, Zea mays
  Clone ID: MRT4577_180633C.1.pep
RLGEDRRRTRKSRDHALSCPQITSPPCIHGSRAHCTPLHAWSRIPARHDSFHTLPLRPSITWPLILDS

SEQ ID NO: 273078 - protein, 76 aa, Zea mays
  unsure (1)..(76): unsure at all Xaa locations
  Clone ID: MRT4577_180634C.1.pep
SVSKWRVPPPPKCFVGIGRPPEELGAINFVLRSFTKQXXEELEVTFQRSLQAVRIMGREGFNKSAQFVNTPQPPEC

SEQ ID NO: 273079 - protein, 101 aa, Zea mays
  unsure (1)..(101): unsure at all Xaa locations
  Clone ID: MRT4577_180635C.1.pep
CFSLFDHQRQNSNQSDPDRLTLAISTEDTRVGIPLQAQDRVFTPXKQADSSTSRNYRGTGIRLSIIKSLAQLMGGHIRFTSHTPVGSTFTFLATLKHTYKD

SEQ ID NO: 273080 - protein, 65 aa, Zea mays
  Clone ID: MRT4577_180636C.1.pep
EVPHVKKVVVGADLEENNLRGDRGPACRPAPATAECWRRRELDQLCGCSPLTHHCCLAGLSPHAK

SEQ ID NO: 273081 - protein, 61 aa, Zea mays
  Clone ID: MRT4577_180637C.1.pep
LERSYGNRTDKDLNSEYLCTLADGYICQVESPIMAIKYASYLIPVLFLDMCELSQFDLFGA

SEQ ID NO: 273082 - protein, 37 aa, Zea mays
  Clone ID: MRT4577_180638C.1.pep
LRVRCFEREYHFLVEDRVLGRLRHDMAGHIPDHRRQP

SEQ ID NO: 273083 - protein, 99 aa, Zea mays
  Clone ID: MRT4577_180639C.1.pep
DLLSLVYNKDQSNGEGAKTAAESSKETTKENDTGGKDAPYSVSSSSSLKRQRLDDSFNSMWCDKFDMLTSALKDDGPKLPSSAEVLVVLQEVEGLDEDT

SEQ ID NO: 273084 - protein, 73 aa, Zea mays
  unsure (1)..(73): unsure at all Xaa locations
  Clone ID: MRT4577_18063C.1.pep
XYLXXXSPPLXXXXNSXTIFFPQXISIKSGCPRAGSGSSXXSRRXSPWPWRRXGAXGGREGSTSATDWCRSRP

SEQ ID NO: 273085 - protein, 104 aa, Zea mays
  unsure (1)..(104): unsure at all Xaa locations
  Clone ID: MRT4577_180640C.1.pep
RGLQVHPNRTRKENKFLHLAFXQDPLXEYDYWINDVGMDGFFTDFPASLRGFQEWPAKNKKRLCLAPRSCWVAFLFQSFSWWLKTCFSKANSLVFLVLNSHIFS

SEQ ID NO: 273086 - protein, 61 aa, Zea mays
  Clone ID: MRT4577_180641C.1.pep
LDYLFIPQYFSGHSIKISCFFVFRPTFACLMLSCSMPGFFETIHLASAMCVKLKFRSGSSR

SEQ ID NO: 273087 - protein, 236 aa, Zea mays
  Clone ID: MRT4577_180642C.1.pep
MADPPSSSPADEARDPGSSEAAAHGSTTSQDTKEQEEMKGEAAVVTSEPVREELVQSAISFLSHPKVVASSDVQRRSFLENKGLTVDEIEEAFRRLLSPPSNSTNSNMCESQGSPDPETVTPVVPRHPKSYMEVMEMIQRGERPDDIQDINDEPPNPDQPISKPSMAPKPKPWEKQGQQSSGWDLKVLSSDPSELSSGVRTDSTSQATELNNSSGYGDLMLTAEPATGSKPPVDDV

SEQ ID NO: 273088 - protein, 226 aa, Zea mays
  unsure (1)..(226): unsure at all Xaa locations
  Clone ID: MRT4577_180643C.1.pep
WVPRGRPGIPYLNESGRSILECHRSLLPLYRLEALCASMIEAWGNKNLLHDIRKFYAWLLEMQPFSSLANEGSTPYIPESRLRNLYTAAKVSEDQXNAYARPFFDDLPHYLTHDVIHVKHXAGEDVDVPHKTEAQKEAEQXAAEDEKAKEAEAKLTDDNEKVTDNTGDGASYEKXLTTLLMPHPQEKXDLDAGTSGSVSAPKLLAMSNKMRVPQDXRQDILHPDFL

SEQ ID NO: 273089 - protein, 87 aa, Zea mays
  Clone ID: MRT4577_180644C.1.pep
AQNDPQHPHFHKIYEQVDCGGRPYSSHDTSLYHNYAQKKDQTVAIDVTHAKKHHLLGRLILPYNHPYKCATLSPARVISSARRFFLS

SEQ ID NO: 273090 - protein, 218 aa, Zea mays
  unsure (1)..(218): unsure at all Xaa locations
  Clone ID: MRT4577_180645C.1.pep
MADSGLIDVQKLLTDVVDKLTSLETKMTTVERELCTVKLDQRRLQDAVEXLGSRPRSPEYSXRLPEYDGTDDPAIWLHRFELFFSLQRTEDDDKVCLAAFHMTGAAQIWYSLLKHNRGVPTWPQLAESVRRRFGAPTSGYALRELLRLRHTGSVAEYRDEFLRLLDRCDGVTEPLQVAFFTAGLRDPLLTDVELRQPATLDDAMWLACALEASSTGKN

SEQ ID NO: 273091 - protein, 81 aa, Zea mays
  Clone ID: MRT4577_180646C.1.pep
GAPAAGRWRGGAQEDMAHPGRNHLRRGPQHCLLRGETSTRSNGCCYTAERTYSCHAGWCRTCLYCSAHCCGSLTSGGRPST

SEQ ID NO: 273092 - protein, 152 aa, Zea mays
  Clone ID: MRT4577_180647C.1.pep
TLGRTRTRLSSTMLGMTAVQRRRSRWHMRIRRNSVISKLHPDHPHSIFFFFFFFFFVAQEVLTTSCRPSPRDKNTTPIFYTQPSAVGFNGSHLIWLASGHHLTLHFLGRIDGRAYGYQADAQIHGTRERRSRTSSVHQIQQWRTDIQQVLPY

SEQ ID NO: 273093 - protein, 188 aa, Zea mays
  Clone ID: MRT4577_180648C.1.pep
FFVAMSTSVQLADKSPAWIAIIYREMIDSQVEITLCSRDGRSAEHKLPLFNDGRHDSGSAQAEPLAHEDPSQFRHLQAPSRSHALGSQYQKHGCRTRATNNSLCPSPRDRKNTTLIESIFYTQPSAVGFNGSHLIWLASGHHLTLPFLGRIDGRAYGYQADAQIHGTRERRSRTSSVHQIQQWRTDIQ

SEQ ID NO: 273094 - protein, 274 aa, Zea mays
  Clone ID: MRT4577_180649C.1.pep
PYYPAYRQQTSMFDGREYRWAGTTALWANSSRANSTDGTFIEFVTSPNNPDALLREPVLRGSAAAIVDHAYYWPHFTHIPAPADEDIMMFTVSKPSGHAGSRFGWALIRDDEVAKRALEYLRDSNMGASRDTQLRMLGIFKFMLANLRGKDDIFAFGHDVMRSRWLRLSAAVSRTRRITLQKIAPQYCTYFGRVREPSPAYAWVKCEMEEDEDCYEALLKANIITRSGVQYEASSRYTRISLLKSDDDFDVLMERLEDLVDADKYDDSNGSSSM

SEQ ID NO: 273095 - protein, 83 aa, Zea mays
  unsure (1)..(83): unsure at all Xaa locations
  Clone ID: MRT4577_18064C.1.pep
GAGTKKTRAGGGSRXRKHTKAHPQAARDXDATQTTRHAAAKXSAHNNXTGKDRTXXFFYKSRLAQADTGLTTGSIIPFWPLPW

SEQ ID NO: 273096 - protein, 59 aa, Zea mays
  Clone ID: MRT4577_180650C.1.pep
KSFFRDIVDAQDGACLDLGGNISGINGEVMPGQWEFQVGPSVDFSSGDQIWDDRYILYR

SEQ ID NO: 273097 - protein, 76 aa, Zea mays
  Clone ID: MRT4577_180651C.1.pep
PSKTITTLIEEHTTEDDRSTTIIKPPMCVDQGLVYNYDGVYTAPHLVVEGPQDDRILVCSDHLSATVTGWLTVVGL

SEQ ID NO: 273098 - protein, 70 aa, Zea mays
  Clone ID: MRT4577_180652C.1.pep
RPEGTTQHLTVSTDALGRSRSCMPSAAEHETLQEVLVDPKTQNTRMRTAVDVVRLPQCEEGTERGRVVRG

SEQ ID NO: 273099 - protein, 65 aa, Zea mays
  Clone ID: MRT4577_180653C.1.pep
GSACDIELPQLPSGVLMAQSMRLLRPTCMSLWGLVGAVTPSIRADTGNHVRLFREKRRCQFLWTL

SEQ ID NO: 273100 - protein, 78 aa, Zea mays
  unsure (1)..(78): unsure at all Xaa locations
  Clone ID: MRT4577_180654C.1.pep
NPLAXRXXFGNRATSMAVPEMAGSCGIXVPCPHLXGDRGVGEIGLSRRRXAXGGWIRXRRRSRLGXXWRRRREGGMGS

SEQ ID NO: 273101 - protein, 1060 aa, Zea mays
  Clone ID: MRT4577_180655C.1.pep
MGLGVCGSLCQGGDENDGFDYAYGTGKWYSFRLERQEIESVRSCSPVLPLEAPPAPPLSAPAAGVAAGEDPDDGGGDNISSHDTDLSEEQELEGGVARPITLDAARMSENRRRGGKRAQQERPAQQDEAPQQQQLPPPPPMTIEQMFLMQTQTVQAIDWLRTMERELHTAQCDDREKVLYGPPLLRGAAQSWWESYLATHANPDTITWEEFRNNFRQYHVPAGLMTVKKEEFLALKQGPMSINAKRQYRFLRGLVDPLQYHLMNHTFPTFQHLIDRAIMTEKQCKEMEDRKRKIGGPQSGSSNCPRFSCNPPQQFRQNQHPPQHQQQNRQNNQSGREIRGIAFPANLIVMGTQGIDVILGMNWLDKYQAVISCDKRTIKLMSPLGEEVVTKLVSPEPKKGSCYQMAVDSSEADSLEIIKVVSEFPDVFPEDLPGMSLERKVEFAIELLPGTAPISKRAYRVSGPELVELKMQIDELVFMDYLDKFVVVFIDDILIYSQSEEEHVNHLKMVLQRLREHQLYAKLSKCEFWINEVLFLGHIINKEGLAVDPKKVADIPNWKAPTDARGIKSFIGMAGYYQRFIEGFSKIVKPMTALLGNKVEFKWTQKCQEAFEALKEKLTTSPVLVLPDVHKPFLVYCDACYTGKANVVADALSRKSQVNLMVAHPMPYEFAKEFDRLSLGFLNNMQGVIVELEPTLEREIKEAQKNDEKISEIRQLILEGRGKDFREDVEVVDSLTKSAHFIPVKTNYSSAVLAELYISRIVCLHGVPKKIVSDRGTQFTSHLWQQLHEALGTHLNFSSAYHPQTDGQTKRTNQILEDILRACALQDQSGWDKRLPYTDFSYNNSYQASLKMSPFQVLYGRSCRTPLQWDQPGEKQVFGPDILLEAEENIKMVRENLKIAQSRQRSYADTRRRELSFEVGDFVYLKVSPIRGVRRFGVKGKLAPRYVGLYQILARRGEVAYQLSLPEGLSAVHDVFHVSQLKKCLRVPEEQLQVEGPEVQEDLTYIEKPAQILETADRVTRRKTIRMCKVRWSHHSEEEATWEREDDLMAKYPKLFAGQP

SEQ ID NO: 273102 - protein, 66 aa, Zea mays
  Clone ID: MRT4577_180656C.1.pep
SARGTTDTIVTAATSGGAGVGKRGAPDANLGRFREGTHSYMGTTPFTSPRGRLSRTGTQRRHKHRQ

SEQ ID NO: 273103 - protein, 459 aa, Zea mays
  Clone ID: MRT4577_180657C.1.pep
MQCLKKAAQQQSGPGAPAKQNMSQPGAGNRSQPRYNHGRLNHLEAEAVQETPSMTVGMFPVDSHIAEVLFDTGATHSFITASWVEACNLPITTMSTPIRIDSAGGRIRADSICLNVSVEIRGIAFPANLIVMGTQGIDVILGMNWLDKYQAVISCDKRTIRLMSPLGEEVVTKLVPPEPKKGRCYQMAIDSKEPDSLEIIKVVLEFPDVFPEDLSGMPQERKVEFAIELLPGTAPISKRAYKVSGPELVELKKQIDELSDKGYIRPSTSPWATHVLFMEKKDGTRRMCIDYRALNEVMIKNKYPLPRIEDLFDQLRGASVFSKIDLRSGYHQLRIRSSDIPKTAFITKYGLYEFTVMSFGLTNAPAFFMNLMNSVFMDYLDKFVVVFIDDILIYSQSQEEHVNHLKMVLQRLREHQLYAKLSKCEFWINEVLFLGHIIKKDGLSVVTPGFRGTKTQART

SEQ ID NO: 273104 - protein, 106 aa, Zea mays
  unsure (1)..(106): unsure at all Xaa locations
  Clone ID: MRT4577_180658C.1.pep
SLVVPRLRLEMHGESDPTMVSYTEFLEMFNDPDWGFGILSTLVKLEESDHIRHGSHTCYIXRNTIIASRFKETKHSFSLCNRCYSEGKVPSVFKLEEYRFKEYAMV

SEQ ID NO: 273105 - protein, 544 aa, Zea mays
  Clone ID: MRT4577_180659C.1.pep
MGTQGIDVILGMNWLDKYQAIIRCDKRTIKLMSPLGEEVVTELVPPEPRKGSCHQMAIDSKELDSLEIIKVVSEFPDVFPEDLPGMPPERKVEFAIELLPSTAPISKRAYRVSGPELVELKKQIDELSEKGYIRPSTSPWATPVLFMEKKDGTRRMCIDYRALNEVTIKNKYPLPRIEDLFDQLRGASVFSKIDLRSFYHQLRIRPSDILKTAFITKYGLYEFTVMSFGLTNAPAFFMNLMNSVFMDYLDKFVVKVADILNSKAPTDARRIKSFIGMAGYYRRFIEGFSKIAKPMTALLGNKVEFKWTQKCQEAFEALKEKLTTTPVLVLPDVHKPFLVYCDACYTGLGCVLMQEGRVVAYSSQQLKVHEKNYPIHDLELAALVHALKTWRHYLYGQKCDVYTDHKSLKYIFTQSELNMRQRRWLELIKDYELEIHYHPDKANIVADALSRKSQVNMMVAHPMPYELAKEFDRLSLGFLDNMRGVTVELEPTLEREIKEAQKNDEKISEIRQLILEGRGKDFREDAEGMMWFKDRLCVPNVQSI

SEQ ID NO: 273106 - protein, 54 aa, Zea mays
  Clone ID: MRT4577_18065C.1.pep
LSICRRTVRMNFCMGLKAPQVATAKVAASELDGALITTNCCISGIRFISYPSIL

SEQ ID NO: 273107 - protein, 91 aa, Zea mays
  Clone ID: MRT4577_180660C.1.pep
VNWESIEYILASLYGVDSDAETLIEDDLNLVIRHSRQHHDDKYGHGQWHRHRLRETQGQKNGARAGRNHRPRRPQQDQRRRDHNRANASDS

SEQ ID NO: 273108 - protein, 471 aa, Zea mays
  Clone ID: MRT4577_180661C.1.pep
MAGYYRRFIEGFLKIAKPMTALLGNKVEFKWTQKCQEAFEALKEKLTTAPVLVLPDVHKPFSVYCDTCYTGLGCKANIVADALSRKSQVNLMVAHLMPYELAKEFDRLSLGFLNNMRGVTVELEPTLEWEIKEAQKNDEKISEIRQLILEGRGKDFQEDAEGVIWFKDRLCVPNVQSIRELILKEAHESAYSVHPRSEKMYQDLKKKFWCSAYHPQTDGQTERTNQILEDMLRACALQDQSGWGKRLPYAEFSYNNSYQASLKMSPFQALYGRSCRTPLQWDQPGEKQVFGPDILLEVEENIKMVRENLKIAQSRQRSYADTRRELSFKVGDFVYLKVSPIRGVRRFGVKGKLAPRYVGLYQILARHGEVAYQLSLPEGLSAVHDVFYVSQLKKCLRVPEEQLPVEGLEVQEDLTYIEKPAHILETADRVTRRKTIRMCKVRWSHHFEEEATWEREDDLMAKYPELFVGQP

SEQ ID NO: 273109 - protein, 101 aa, Zea mays
  Clone ID: MRT4577_180662C.1.pep
LGNYKHYMKINVPTMSFKQECNRHFSQMCVIPEHSRHSRPPIYRNHHFFKSHKQILKGTQLCLGSNFYVATKKDTFPGCEGDSDSYLPTWGQQNQRYTLML

SEQ ID NO: 273110 - protein, 98 aa, Zea mays
  Clone ID: MRT4577_180663C.1.pep
PSGINSRVDELTSRRPPFFFFFDIKISWIINQASMFCLAIFYTNCLGFMCTKTSWLSVLNTSGPKIAHTHIIHCKFEHHISKCCLYIKVRSSFLRQQH

SEQ ID NO: 273111 - protein, 95 aa, Zea mays
  Clone ID: MRT4577_180664C.1.pep
RPGSRRAPCLCPLHPSPSAHSAASPSPPLSPRRRGPRRHAVALLRRRLLRHRRHLRLARRAPRVPLRIRRPGSTIVSLHWIKSMLFSPISPKETP

SEQ ID NO: 273112 - protein, 101 aa, Zea mays
  unsure (1)..(101): unsure at all Xaa locations
  Clone ID: MRT4577_180665C.1.pep
MVSIGKGTATWTTVPQSAPSTRKLITILNIYGGGISGLIPETIIAYLDANLQXLYGSDARIADYYDVIARTSTVVLIASMQAVPDENNQALFTAMGLITFY

SEQ ID NO: 273113 - protein, 50 aa, Zea mays
  Clone ID: MRT4577_180666C.1.pep
SPTVYDAGCWSVSAFFNKFYGLLVFFSLSLKRPFTYVTCMGKLSGSISAV

SEQ ID NO: 273114 - protein, 92 aa, Zea mays
  unsure (1)..(92): unsure at all Xaa locations
  Clone ID: MRT4577_180667C.1.pep
FLSSVWQLPXHTPEVRNVCFGAREHGMGGICNGGHSPGLRFMANDCYASSPSLQACKQTMRSIRLRSNHRYNYNLLWFFIKIIELVVKRFKY

SEQ ID NO: 273115 - protein, 97 aa, Zea mays
  Clone ID: MRT4577_180668C.1.pep
QPLGFLRSHPASSVSSPTGKSSKKAAAVAAEPAAVPKGKKREADEEIAKAVSAKKPKAAPPAKAVPTFKKDAKMLTLQPPHKKAESTSSYFEVDSQS

SEQ ID NO: 273116 - protein, 62 aa, Zea mays
  Clone ID: MRT4577_180669C.1.pep
RLPTSWGRFLIIRGCFPYLTAYHGAKLCAEIRPAPTCKAVDTSMGSETTAEILLAILLPPVG

SEQ ID NO: 273117 - protein, 113 aa, Zea mays
  Clone ID: MRT4577_18066C.1.pep
ARGGIPFPNINDVQVKLKRRYNDSYKSSKHLLSGSEWYCHQAFRALNQAAGRCIRHKSDYGGIILIDERYQDDRNVLYISKWLRNAIKKYDSFQETMAKLQKFFQNAEKKKKK

SEQ ID NO: 273118 - protein, 96 aa, Zea mays
  unsure (1)..(96): unsure at all Xaa locations
  Clone ID: MRT4577_180670C.1.pep
GMIFAPKAVSAGTAIAGEMGYGTIAVVASTAAVASAGACDAAVRGLGLVNGDVTAVELFAVHVVDSVEHGVLGVEGXXXPENAKNPLXARDDLGVE

SEQ ID NO: 273119 - protein, 127 aa, Zea mays
  Clone ID: MRT4577_180671C.1.pep
CPALRLCVMHAILRSFLRSHKDRYYWLMLCLSLTSTVLNARRSIYGRYKSSLYGLPITSQDGRRQRSRSSQGTECLLFGAGGGSGEGKQHEQGERTQEQHRWGVMRSGELGRKSIDQEDSASRLDEK

SEQ ID NO: 273120 - protein, 90 aa, Zea mays
  Clone ID: MRT4577_180672C.1.pep
SGPRLQDRYGPAMFPSALLYPSTSDTMGVSPGVSAKGIPFSISICVLSEMRSFGRPPCCLGFPVPFRGVWFSPARFCSNSQVPLSDVASL

SEQ ID NO: 273121 - protein, 40 aa, Zea mays
  Clone ID: MRT4577_180673C.1.pep
GAPCRSERLAKYNQLFRIEEELGDPAVYAGLKFRAPVEPY

SEQ ID NO: 273122 - protein, 57 aa, Zea mays
  Clone ID: MRT4577_180674C.1.pep
VFKIFNKNPNMKMTPIIYLFIIYIFYRVFFFLFYFQILLFKPNLSQNLSTIAPIQEF

SEQ ID NO: 273123 - protein, 145 aa, Zea mays
  unsure (1)..(145): unsure at all Xaa locations
  Clone ID: MRT4577_180675C.1.pep
CLLRRLMMIDHPRCHXRXPSLTRSHXCTCAXPLTSLVPSSXXDSAHARSRRRSDXXXRRCXYLSLIAAPPRSRPRLRPAPSVRPLPLMXAMPSIACSNASAXRPXYLXVXGVATPAGRRIHANAVLARAPXPXSPSQSPSRASHR

SEQ ID NO: 273124 - protein, 151 aa, Zea mays
  unsure (1)..(151): unsure at all Xaa locations
  Clone ID: MRT4577_180676C.1.pep
PPPGIPPKGPGPPRGSPPWGCPGALGPGGPPGARAPEEGWGPGPPKXGPVXPLGPAPGPNPPDMGDPPRDGVAPGEIRVFFGPKPGGXPPALGSSKGWSAGPRHPPLGPKXSGTQPVGPAPGPVVLVGGNGAPGPARKCFPSHQKPGARVV

SEQ ID NO: 273125 - protein, 95 aa, Zea mays
  Clone ID: MRT4577_180677C.1.pep
AVAVCPNRPILRGSPLPAQPYCDNSGRWEQTKTKTSEIAAPDSVARRAGGRIGLDTWTPARARRAIRTQIPAIPSPEAGMRGRKACLWWFLAQNE

SEQ ID NO: 273126 - protein, 111 aa, Zea mays
  Clone ID: MRT4577_180678C.1.pep
MGRRGLTVNRTLALLPPGPLGVSGLPLFQRRHGLGIHDVSQDAMATGLESEREGGSGFRLLPSGSIRHRSSSGSFPLDLLLLALGEPAGTSACTSRHIKYAKKELCKCNSY

SEQ ID NO: 273127 - protein, 640 aa, Zea mays
  unsure (1)..(640): unsure at all Xaa locations
  Clone ID: MRT4577_180679C.1.pep
MVHRRNPSVVESDSDDDQEIREETHPRSRSKRGRGSRNVMQGGEASGSHGARGRTDRNPSGRSRPAANPQAWEPTSDDDGGKDDEVDLPSANTPIFQGLVLHRAEARRSANEPVTDFTASGGSALLQDIRFQNPTLRIHDARIDGNRFWTLQHVDVYNSVILPKKHQPILHQRYINWEGCEAIGDPEMTQALRACEKKXMKNIMTFQYDWNDEVIAQFYSTLWIKLADEESPYNFPYLNFYIEGSWYKVSYRRFAHILGFSDGDISGDKIKIHDFRPPXDEASDLHISETDKYWESTNLHKFYRYINSLCRMTLIPKEGNQMNVLGESKVLLSFMKPNSSESINVFDMIWQEIIHAACFPLKGCLHAPFIMKMIEVVTQFRFDKGTRHLSYTPFWIDPNNPAGRLRKAPSSSRGPATAGPSRPSPGRGSPTPRGRGRGRGRGMGARLTHGIVAFFSMCRNISSDVHELARRQRETDDNLRRQASSMGMSFAPRSPDVPLHPSPPEINEWHQQTYGVPFMSAEDEEEDEEYFDDREQFVLPPPRGIRVNPLHILLPMILQEAILPQLSLGKKTLRLTWQLNSLVRLLLSGDLWLMVLSFLVLVAKKGEKDSHLGSAFNCCNEHLACNNFIRLTIVMHVVMA

SEQ ID NO: 273128 - protein, 296 aa, Zea mays
  Clone ID: MRT4577_18067C.1.pep
METRLPRRGWNKRFVLPLALLCLAVLLPGALLPPSASASSSSPAAGGGSRKRRWVGFDYYVLALQWPGTICRETSNCCDTNGCCRSQPLKWFTIHGLWPQYNYGGWPSCCRPTRFNINKILMLMPILEKYWPSLYCGSSSTCFGGRGPFWVHEWETHGTCAYPEIQDEYDYFSTALYLYSKYNVTKALRKARIRPTSGRKYAVGHIVAVIEYAFGAMPSLVCKNGSVQELRLCFHKDYQPRDCTLEAGSAPNGRSYCPRYVTFPSYKPSVVANTTEGINNQSNGEVPSYTRTSDSE

SEQ ID NO: 273129 - protein, 154 aa, Zea mays
  unsure (1)..(154): unsure at all Xaa locations
  Clone ID: MRT4577_180680C.1.pep
IKYSHEDESLEDQEETGWKXIHGDVFRFPQKKSLFAAIFGSGSQLLALAIFIFLLAIVGVFYPYNRGALFTALVVIYALTSGIAGYTATSFYLQLEGTNWVRNLILTGCLFCGPLFLTFSFLNTVAIAYSATAALPFGTIIVIILIWALVTSPL

SEQ ID NO: 273130 - protein, 72 aa, Zea mays
  Clone ID: MRT4577_180681C.1.pep
TICGRQGKPATNWDRGIEKKYICLKILQILFTLYLPSTHFTVSNKLNATTLSEAHNALFIDGSPKLHGKVNC

SEQ ID NO: 273131 - protein, 93 aa, Zea mays
  Clone ID: MRT4577_180682C.1.pep
STPPPDSIIQPSHAYAYLSLAYFFLFYVLISLAYSSYDNPKFRFGFRCISLYKSVAFLYIYMYAPDTALDQKKKKKKGRPVDRTKVYERAHRA

SEQ ID NO: 273132 - protein, 148 aa, Zea mays
  Clone ID: MRT4577_180683C.1.pep
MAAYMRVTHRDEEGKKVTEKMPVPETRRPDTAKHFERKLEEQGLHRFERHPANAPRGVGIGAPPPKSGRGGKYTWEGPGSVVEDQLDPAPPAIDPNDPNYEEGGAADEDDEAAREVVVGEVEVAKVAESRDGVARVDVAPGLLQDQKQ

SEQ ID NO: 273133 - protein, 83 aa, Zea mays
  Clone ID: MRT4577_180684C.1.pep
MRHEGGPAVGRGAQTCRRSTTHPSTMGGGNSQKAKKARERNWENNKEGQGEPATRTNRKATNIQGKGRWQQSCVPRLKGRCRG

SEQ ID NO: 273134 - protein, 30 aa, Zea mays
  Clone ID: MRT4577_180685C.1.pep
GAGKCKVYMWRKHHHPRGLNAATRGVPISI

SEQ ID NO: 273135 - protein, 78 aa, Zea mays
  unsure (1)..(78): unsure at all Xaa locations
  Clone ID: MRT4577_180686C.1.pep
QKKARKGKKTQTQKKNKEKKLKEETLRPWPEKGVXKGKKTTKKANKRKRKRGCVTTKTGSENFQKTNRVPFFIKTPQL

SEQ ID NO: 273136 - protein, 89 aa, Zea mays
  Clone ID: MRT4577_180687C.1.pep
MFLNIIVILYYPSAVETLFSINRDVTVGKKKKKKKKKKKKKKKKKKKKKKKKKKKKKKKIKKKNKNNKKKKKKKIIWGGSFIITNFFNA

SEQ ID NO: 273137 - protein, 219 aa, Zea mays
  unsure (1)..(219): unsure at all Xaa locations
  Clone ID: MRT4577_180688C.1.pep
MLHGTRRRTAPLAAAFFASKPQPQPPPQLPTPQIVEAAVARCPSDGIALSFFLWCARRPGYFHPPXSFDRLLPAASRLASRLGTANKLIRELQALGVHVKPQTFLLLLRLYWRGGLYPIVLDLFYQMRLWGFQPNAFACNVVLDVQLRTGHLDAARHTLQYYPAPNYLTYAIVLTHLCRAGGWSGAXSCFIEMLQXXFVPSAASLTAVFACCSKAGTMS

SEQ ID NO: 273138 - protein, 69 aa, Zea mays
  Clone ID: MRT4577_180689C.1.pep
MMLGVVLLYEVTDTMGICSKKKKKKKKKKKKKKKKKKKKKKKKKKKKKKKKKKNKTKIKKKYKFKIFFF

SEQ ID NO: 273139 - protein, 102 aa, Zea mays
  Clone ID: MRT4577_18068C.1.pep
RTQAPRGAHRAPADTRQWRRCTRPRCTPGSCRAGRRRHWASGRRTGSPTASGTRGPRWRLTRRVPTRRLEPRRRSASRARPGASHGGRRGVRAPGSPRPRRR

SEQ ID NO: 273140 - protein, 112 aa, Zea mays
  Clone ID: MRT4577_180690C.1.pep
GGLFTKHGDFSRTTCKAGLPQPQTKSKKGNNTDRPQKHGNQRGRRRSDSKQRGWTTGPRKKYRNALRPGGPATKALPPRTTPGPPKRTCPWGRRKGPRRGPQRQLPGSYHGA

SEQ ID NO: 273141 - protein, 55 aa, Zea mays
  unsure (1)..(55): unsure at all Xaa locations
  Clone ID: MRT4577_180691C.1.pep
LTERTGTNQHKTQQGVTAVGMGHRAIYTGPYHHFHPTHTLFSPRXLESAPDTFTR

SEQ ID NO: 273142 - protein, 407 aa, Zea mays
  Clone ID: MRT4577_180692C.1.pep
MGALCDFCGEHRSMVYCRSDAASLCLSCDRNVHSANALSRRHTRTLLCDRCASQPAMVRCLAENASLCQNCDWNGHIAGSSSAGHKRQTINCYSGCPSSAELSRIWSFVSDIPNVAPEPNCEQGISMMSISDSGVSNQDNAAGDSILLDIASATLVSDIGTCDKLLVGSSSGAGVNLLPLATGQTETAGSVDSTPDKVPYTPDKDMFSKDSIYEDFCVDDADLAFENYEELFGTSHIQTEQLFDDAGIDIYFEMKEAPAGNSTESKLKQPANSNAVSADSGMSNPGVKGDSSVCTPLRQARSSLSLSFAGLTGESSAGDHQDCVVSSLLLMGEPPWQPPGPEGSIAGGSRDSALTRYKEKKMRRKFDKKIRYASRKARADVRKRVKGRFVKAGEAYDYDPLCQTRSY

SEQ ID NO: 273143 - protein, 81 aa, Zea mays
  Clone ID: MRT4577_180693C.1.pep
FPRGTAKNYVQYSSLNRGGPLEPNVRKPIYRGYLGAPALKKTLGFVSSTQKEGLGRAFKKLQFLKGHFGALKGRVWASNFL

SEQ ID NO: 273144 - protein, 93 aa, Zea mays
  Clone ID: MRT4577_180694C.1.pep
LRRIMIHSNGNRISRLSALFMTASSEPRPTTIRISRTSSASDLIAMFVVLMVSSSGGWMIVVHAPQRQHVCPCAVGWIVQSNARGHVPTCCQM

SEQ ID NO: 273145 - protein, 49 aa, Zea mays
  Clone ID: MRT4577_180695C.1.pep
PVDGCHSCFSWRALIHRSTRATPCDPATIVQAISFSKWACGLCLSYFVS

SEQ ID NO: 273146 - protein, 69 aa, Zea mays
  unsure (1)..(69): unsure at all Xaa locations
  Clone ID: MRT4577_180696C.1.pep
NXXNKSIERPPTGGIMGGGGNSIHRRLILAAAVLLFVLGAGSASSGTSCVPGWAISDNPVPKLRWYLTN

SEQ ID NO: 273147 - protein, 111 aa, Zea mays
  Clone ID: MRT4577_180697C.1.pep
LDRDVKSCNGHGRMRVRAELATELNQSRLHVLRSRLLAVLSIRRMKPGRNVVPELGRTETSATASSRTSDSRREEARTRSPIPASPPISFSFVLCLLCRSGPGSFFPAASR

SEQ ID NO: 273148 - protein, 81 aa, Zea mays
  Clone ID: MRT4577_180698C.1.pep
MGGEAGMGLRVRASSLLLSLVLELAVALVSGNSSRSRRLGRSLLACMLYHCGFSLSLLARALLSAVIALFAANRCRVRLSQ

SEQ ID NO: 273149 - protein, 131 aa, Zea mays
  Clone ID: MRT4577_180699C.1.pep
SPISMYKFSKILSRSTRSRDQVSSPCGTYLLQGVADGLGEGDLAPAQVVEDMHILLLEVPKNGHPARLADHWAWAHNHAVLPAVLPCLGHIKLRMLVTILGCSTCFLRGRVGLAQLARLNFYWPHFYILID

SEQ ID NO: 273150 - protein, 56 aa, Zea mays
  unsure (1)..(56): unsure at all Xaa locations
  Clone ID: MRT4577_18069C.1.pep
FSADITAYTAARTQTRRCINTAAGTPHTHISLYPSGHQHTAEHSRSTAHTPXPEAT

SEQ ID NO: 273151 - protein, 107 aa, Zea mays
  Clone ID: MRT4577_1806C.1.pep
DRKNYIRIKVVNFGTTAVNLKFSLDGLEPNSLQLSGSTKTVLTSANVMDENSFSQPKKVVPIQSLLQNVGKDMNVTVPPRSFTSFDLVKQSSTLKMAGSDSSTRSSI

SEQ ID NO: 273152 - protein, 138 aa, Zea mays
  Clone ID: MRT4577_180700C.1.pep
MASAPADSYGCAACGAPLNLSAAHLYPADFYFEAGNKGTLSFSWVDESRLRFAPEDRIRPFFETRNYWGIQRKRTRISCDACGHLLGHVYDDGPPAMQGTGQFGMGPSQVIPRRPRYRFKIKAIAASSSAPAAAAYEK

SEQ ID NO: 273153 - protein, 98 aa, Zea mays
  Clone ID: MRT4577_180701C.1.pep
LAPRLPKPGGPLRVLFGPPPGLALVGFGVRAFFPRRRFLGPGSGPFSFYTFSPLAKLKKIPAAEKKKKKKKKKKKKKKEEERRGRRKGKKLEGGARVP

SEQ ID NO: 273154 - protein, 103 aa, Zea mays
  unsure (1)..(103): unsure at all Xaa locations
  Clone ID: MRT4577_180702C.1.pep
SSPHEVIRARLNWLPAACCGDMLMATLQKANLHLTKKGMPIVFTRRCKACFRRDGVYLYYKNQAGLIVKPTTEMSXSWITVPIPHECAXLCSRILREANGMVM

SEQ ID NO: 273155 - protein, 99 aa, Zea mays
  Clone ID: MRT4577_180703C.1.pep
NPMRLREKKLAAVKINPADVEIIAIGLELDKKIAERTLREHKGKPGAGVQFLGGKFRDLVASIKCSPSVPPKGGLCEAQGLLFGGLFWKFAIKTLLQKI

SEQ ID NO: 273156 - protein, 450 aa, Zea mays
  Clone ID: MRT4577_180704C.1.pep
MPETVGRIFALATVLSSVIIYHVSGRVKGQDVAFEPAKLLWLIQRDFLQGKSVQQMVNEALQRVPNDNGDKYIDEVNQIRDSLAVMGNNSTAFSLPQPHLQRTKLCDMEDKELEPLYVKRREQLKQLVSSIVKPKIVQGRTLNGKDFVSFLQQILEALNKGEIPSTGSLVEIFNKAILDRCLKVYREKMDGLGLPVPVDKLQKLHEMANGDARILFDKQHFGKHHAAQSALKLEDDIKKVAMYRNLLLANEYQSSKLCEARFSECEDKMDHLQVLKLPSMAKFNAGFTHCNQSFVKECVGPAKESYERRMSKMLAKSRALFIKEYNNKLFNWLVTFSLVMVVIGRFVIKFFLLEIAAWVMFIFLETYTRMFWSAESLYYNPAWHIIVSSWETIVYSPILDLDRWAVPIVIMLLFGVLYWRCFGGRRKRGRGSLLPLYKNSYNSSRRSRSD

SEQ ID NO: 273157 - protein, 94 aa, Zea mays
  unsure (1)..(94): unsure at all Xaa locations
  Clone ID: MRT4577_180705C.1.pep
DLQGDEDQAYRKIKLCAEDVQGRNVLTNLGGMNFSTDKLRSLVKKWQTLIEAHVDVKTTDNYMLRXFCIGXTMRRQTRQRTCKSGSRSSDRERW

SEQ ID NO: 273158 - protein, 92 aa, Zea mays
  Clone ID: MRT4577_180706C.1.pep
SPSIRALCIAFSRKRYFVFGMGFFYAYVQTQQVSIILSYRLFGHCHSSSGYLVMEMHPTAMTQAVFIWEMWNLSLCRLTGFSQKAYGGDKDL

SEQ ID NO: 273159 - protein, 83 aa, Zea mays
  Clone ID: MRT4577_180707C.1.pep
MLPCTRSLPIGRVFWHPADDTTPSRKLSILYKLFPISFVMNQAGGQSFTGKQRPLDVVPAKIDDRSPIFLGSYNDVEEIIALY

SEQ ID NO: 273160 - protein, 102 aa, Zea mays
  Clone ID: MRT4577_180708C.1.pep
TYFFFFFYFFFYFSLYAIPSPERRSNTNKPILKGGGGGENPGKVNTDRFYIFCPFFTPFFYSWGAPPCPPFLKEKKGFFTGSWVPRPPVAVWFSFLGGVGPT

SEQ ID NO: 273161 - protein, 437 aa, Zea mays
  unsure (1)..(437): unsure at all Xaa locations
  Clone ID: MRT4577_180709C.1.pep
MAPEERMKQTEGSHKVVTAAAAGGKMAVLHSPVGVRSIVTSLVAFFILASSVVFLLLDREAGLQEEPAIRAGGGGGRXECSWSRGRWVYDNVSRPLYDGLKCAFIFPEVACDKYGRKDVMYQHWRWQPHGHGCDLPRFDGIKLLEELRNKRLVFVGDSVNRNQWVSLVCMVEASIPDDRLKRRIFNGSLISFKALEYNATIDFYWSPLLVESNSDNPIIHRVEYRIIRADRIEKHASVWRDADVIVFNSYLWWRKQKDDMRMKVMYGSFEDGDAKLDEMEMADGFEIAIKKLTEWLAENIDKNKTRIFFAGSSPTHSWASNWGGQDKNKCLNETEPISYRPGGGYKAATTDYSLMAMARSYFRRTLEPRGIRVQILNITELSDYRKDGHPTVFRRQFVPLTKEQIADPASYADCTHWCLPGVPDVWNEFLYGYLVHV

SEQ ID NO: 273162 - protein, 44 aa, Zea mays
  unsure (1)..(44): unsure at all Xaa locations
  Clone ID: MRT4577_18070C.1.pep
XPHLXSIXLSSPTPRIYYPSEDXVIFSXXNKMLLHRVGNNTRLF

SEQ ID NO: 273163 - protein, 402 aa, Zea mays
  Clone ID: MRT4577_180710C.1.pep
QQQQQVAFFILASSVVFLLLDREAGLQEEPAIRAGGGGGDEECSWSRGRWVYDNVSRPLYDGLKCAFIFPEVACDKYGRKDVMYQHWRWQPHGHGCDLPRFDAMKLLEELRNKRLVFVGDSVNRNQWVSLVCMVEASIPDDRLKMRIFNGSLISFKALEYNATIDFYWSPLLVESNSDNPIIHRVEYRIIRADRIEKHASVWRDADVIVFNSYLWWRKQKDDMRMKVMYGSFEDGDAKLDEMEMADGFEIAIKKLTEWLAKNIDKNKTRIFFAGSSPTHSWASNWGGQDKNKCLNETEPISYRPGGGYKAATTDHCLMAMARSYFRRTLDPRGIRVQILNITELSDYRKDGHPTVFRRQFVPLTKEQIADPASYADCTHWCLPGVPDVWNEFLYGYLTQQSK

SEQ ID NO: 273164 - protein, 126 aa, Zea mays
  Clone ID: MRT4577_180711C.1.pep
RPPTLKKGWGPQVPRISPSGRNQLFQFPIFQVPLSPESTIKKILNYPPLVFFFCPQAAQKKIQASLQKIFFLPAKKVPPFFRPYWKKKAFVKLTPPYYAFYFAPKIGLLLVVPLASQFLWCGPVFF

SEQ ID NO: 273165 - protein, 194 aa, Zea mays
  Clone ID: MRT4577_180712C.1.pep
VIVFNSYLWWRKQKDDMRMKVMYGSFEDGDAKLDEMEMADGFEIAIKKLTEWLAENIDKNKTRIFFAGSSPTHSWASNWGGEDKNKCLNETEPIYRPGGYKAATTDYSLMAKARSYFRRTLEPRGIRVQILNITELSDYRKDGHPTVFRRQFVPLTKEQIADPASYADCTHWCLPGVPDVWNEFLYGYLVQQRK

SEQ ID NO: 273166 - protein, 452 aa, Zea mays
  Clone ID: MRT4577_180713C.1.pep
MKTEASHKAIAAGGGKMTVLHSPVGVRSIVTSLVAFFILASSIVFLLDRGQEEQVQVAVEHGRQEVQVKLESGLQEPAIRGTTQEGDASNEECNWSRGRWVYDNVSRPLYSGLKCSFIFPEVACDKYGRKDAMYQHWRWQPHGHGCDLPRFDAIKLLENLRNKRMVFVGDSVNRNQWVSLVCMVEASIPDDRLKIRTFNGSLISFKALEYNATIDFYWSPLLVESNSDNPIIHRVEYRIIRADRIEKHASVWRDADIIVFNSYLWWRKQKDDMRMKVMYGSFEDGDAKLDEMEMVDGFEIAIKKLTEWLAENIDKNKTRIFFAGSSPTHSWASNWGGQDKNKCLNETEPISYRPGGGYKAATTDYSLMAMARSYFRRTLEPRGIRVQILNITELSDYRKDGHPTVFRRQFVPLTKEQIADPASYADCTHWCLPGVPDVWNEFLYGYLTQQRK

SEQ ID NO: 273167 - protein, 70 aa, Zea mays
  Clone ID: MRT4577_180714C.1.pep
RTIALMLFVGCALVDVASSFSTVQSGTYSHGSVAGLAGGYVADNMLGLAGCQVLSSRSWPSSSRPSALNR

SEQ ID NO: 273168 - protein, 57 aa, Zea mays
  Clone ID: MRT4577_180715C.1.pep
GFQVFAFGLACWEEVWKCDRFTQAPRYAPYVPSSAQLSLYTGIKEPEIWRPQVRFFF

SEQ ID NO: 273169 - protein, 58 aa, Zea mays
  Clone ID: MRT4577_180716C.1.pep
PRAVLAITRLIAKHTTRPDLAIFIADNLKTIAYTLAQSDDYKTHFLLPRGISDLSDAP

SEQ ID NO: 273170 - protein, 58 aa, Zea mays
  Clone ID: MRT4577_180717C.1.pep
FWVEKIENYPVRPRTDAKVRRAISLSVEYIIHIKRVLLIPPLKTYAMLYYCYIYIYIF

SEQ ID NO: 273171 - protein, 80 aa, Zea mays
  Clone ID: MRT4577_180718C.1.pep
DSKGTPLNTKDQRIISIRDMVMQTCTSLSHRQRSFRFQLVRIQCNDATNTIHSGSTHHNSQATTLATMEEQFPCEPENIQ

SEQ ID NO: 273172 - protein, 331 aa, Zea mays
  Clone ID: MRT4577_180719C.1.pep
MMRLKQHMGLVSSPTPAIVVRLGNNTPHRRRATRSRIVSSSASDAAPFEKPRAVVKKVLAQSQPEGQGATVRRSIGRHELRNLDPFLQLDEFTVSKPAGFPDHPHRGFETVTHMFEGAIIHQDFAGHKGTIRTGDVQWMTAGRGIVHSEMPAGDGVSEGLQLWINLSSKDKMIEPRYQELERKDISRAETEDGVEARVIAGEAFGVASPVYTRTPIMYVDFTMRPGSRLHQPVPEGWNAFVYVVDGEGVFGRETATAHHCLVLGSGDGVSVWNRSARPLRFVLAAGQPLGEPVVQHGPFVMNSHAEIQQAMEDYSYGKNGFERAGQWSSSA

SEQ ID NO: 273173 - protein, 103 aa, Zea mays
  Clone ID: MRT4577_18071C.1.pep
QGQTSQPGEILFSSLHPQPCQAKPHSRPMLKRHPMGMGGVLWVVAPPPGGQDLPPVEHPLRPEGTQINPGPPLKRWGAGETQVVEKLGPRVCCPGRPKRGSHP

SEQ ID NO: 273174 - protein, 175 aa, Zea mays
  unsure (1)..(175): unsure at all Xaa locations
  Clone ID: MRT4577_180720C.1.pep
RPVRRLPSLITKASRPPVLVYPPSAARLLQVNNLTCSAYTFVCRNNAXDRTVKQHSVLHLMLPAATPYELQRRLVAVVSAIDSGYGGHPSFSMGTRNSNVLQWICCAGCGRTMMPYIGGRPRDAAASGGAAAKDPYEENKEQEKEEIDDHVGFSLLDYSGVCHLYLKNVGPHLLP

SEQ ID NO: 273175 - protein, 295 aa, Zea mays
  Clone ID: MRT4577_180721C.1.pep
MSSSASDAAPFEKPRAVVKKVLAESQPEGQGATVRRSIGRHELRNLDPFLLLDEFTVYKPAGFPDHPHRGFETVTYMLEGAFTHQDFAGHKGTIKTGDVQWMTAGRGIVHSEMPAGDGVHKGLQLWINLSSKDKMIEPRYQELESKDISRGESEDGGVEARVIAGEALGAASPVYTRTPTMYVDFTMRPGSRLHQPVPEGWNAFVYVVDGEGVFGRETATAHYCLVLGPGDGVSVWNRSTRPLRFVLVAGQPLGEPVVQHGPFVMNSRAQIQKAMEDYYYGKNGFERAGQWSSSA

SEQ ID NO: 273176 - protein, 41 aa, Zea mays
  unsure (1)..(41): unsure at all Xaa locations
  Clone ID: MRT4577_180722C.1.pep
HSMVVGGRPCYLLXPVTLLIDEPLEFRQAIVHELPLTDNIE

SEQ ID NO: 273177 - protein, 337 aa, Zea mays
  unsure (1)..(337): unsure at all Xaa locations
  Clone ID: MRT4577_180723C.1.pep
RPGKFAFNSFSGTIELSSFFKMPNIARLNLXNNKLSVVDGEYNASWASIADFDTLCLASCNISKLPEALRHMDSFAVLDLSNNHIHGTLPQWAWDNWINSLILMNISHNQFSGGIGYGXSFLPICLFFDISYNLFEGPIPIPGPQNQLFDCSNNQFSSMPFNFGSHLTGISLLMASGNNLSGEIPQSICEATSLMLLDLSNNNLLGSIPSCLMEDMSNLNVLNLKGNQLHGRLPNSLKQDCAFEALDFSDNQIEGQLPRSLVACKDLEVFDIGKNLINDAFPCWMSMLPKLQVLVLKSNMFTGDVGPSISEDQNSCELGKLRIIXLALNNFSGLLRN

SEQ ID NO: 273178 - protein, 206 aa, Zea mays
  unsure (1)..(206): unsure at all Xaa locations
  Clone ID: MRT4577_180724C.1.pep
FPGANSRYYTLSYGVEEGAGKETKRFHQXTLVGNALPTPXDKHPKIYPMKLWATNQGRANNKFXYLLGEGKKLIKSLXHVLAMNXLLXRNPTTIKNYRIWLPYQTITRYHIMNKEYRHTTLNGAVXQMYNEMSSLHRMRALCIQIIKTVTVHFKLCNEDNTKHLHNSEIKFLLVYRKDMPPTRKLKTTFKASRPNLFMRFSCGQRM

SEQ ID NO: 273179 - protein, 154 aa, Zea mays
  Clone ID: MRT4577_180725C.1.pep
MAEKESNGVQVCVTGGAGFIGSWLVRKLLEKGYTVHATPFGLDSAGSQYKSTAEAVVDAVHAILRQCEESRTVKRVIHTASVAAASPLLEEEVPASGVGYRDFIDESCWTSLNVDYPLRSAHFDKYILSKLQSEQKLLSYHNGREFRRSKALTP

SEQ ID NO: 273180 - protein, 60 aa, Zea mays
  Clone ID: MRT4577_180726C.1.pep
FYGARFGLGAEGGINPGGKHARGPVGVKGFLTTRWFIQGSGQMVNGANNFAYPHKNLPLP

SEQ ID NO: 273181 - protein, 226 aa, Zea mays
  unsure (1)..(226): unsure at all Xaa locations
  Clone ID: MRT4577_180727C.1.pep
MPEQTHRSSPNPIPVAIRISGAAMAEKESNGVRVCVTGGAGFIGSWLVRKLLEXSYTVHATLRNTGAXWRLLSSIRASRKAKHAKGESRKEWVGSRVWLPDDSGILAGWGCWWVCRXEAKAGLLRRLVPGAAERLRLFQADLFDAATFAPAIAGCQFVFLVATPFGLDSAGSQVKLAVAFAPFTVLLVNEWSGGDAPCCLFLILSCGKLLSLQRKNLIRLSMSKDQ

SEQ ID NO: 273182 - protein, 362 aa, Zea mays
  unsure (1)..(362): unsure at all Xaa locations
  Clone ID: MRT4577_180728C.1.pep
MAEKESNGVRVCVTGGAGFIGSWLVRKLLEKGYTVHATLRNTGDEAKAGXLLRRLVPGAAERLRLFQADLFDAATFAPAIAGCQFVFLVATPFGLDSAGSQYKSTAEAVVDAVRAILRQCEESRTVKRVIHTASVAAASPLLEEEVPASGVGYRDFIDESCWTSLNVDYPLRSAHFDKYILSKLQSEQELLSYNNGESPAFEVVTLPLGLVAGDTVLGRAPETVESAVAPVSRSEPYFGLLRILQQLLGSLPLVHVDDVCDALVFCMERRPSVAGRFLCAAAYPTIHDVVAHYASKFPHLDILKETTEAVATVRPARDRLGELGFKYKYGMEEILDSSVACAARLGSLDGSKLNVPDTVSSK

SEQ ID NO: 273183 - protein, 128 aa, Zea mays
  unsure (1)..(128): unsure at all Xaa locations
  Clone ID: MRT4577_180729C.1.pep
MAKPQEVRSVDSFSQLPFIRPAPAPRDATIRLFGREFPSDHNQQQQDAASDSPDAANNGSTVTCESNGAAKSGAAAERKFECHYCCRNFPTSQALGGHQNAHKRERQHAKRAHXQAFLAMHRFLPGHM

SEQ ID NO: 273184 - protein, 46 aa, Zea mays
  Clone ID: MRT4577_18072C.1.pep
SFASNIFLQPPCTRHCHDCDKCVLQFDHHCIWLGTCIGKKNHCRFW

SEQ ID NO: 273185 - protein, 52 aa, Zea mays
  Clone ID: MRT4577_180730C.1.pep
RFLLGAFKRAPSFLGTLGSQGRAIKKVFGVSQRSEIMPEFVAPKAFFGSLGF

SEQ ID NO: 273186 - protein, 287 aa, Zea mays
  Clone ID: MRT4577_180731C.1.pep
SKWSPRLTSRSLSNTPAMYRTGLTPTTQLHVQSGLPQGLEALLLPMSRLLSLLIMSPPLAPPLLHVRWTIVGEVEVRARDRVKAGDCLFVWPRVLLVPSPCAAIGQSRSPCTGAGLRRCMRTFIVMPPPRVILCLLGLLRLRPPPTLKTLMSGTNRNMVCHSLLLRMRPRSLMTPTIPRLLLLPIRVRDPFPVNPGHPAPVTFPLLPTQARDPFLVTRGFLALVTTTILLLQEGIDSCALSLLVFGPCYQKGGENLKSKVSQVIFLFLFLFLVYFCFWPLWWLVYFY

SEQ ID NO: 273187 - protein, 63 aa, Zea mays
  Clone ID: MRT4577_180732C.1.pep
AFAPGTPNPVPFQSPRKAAKGSKKKGNLWRRPAARTAALARARASSTCATTWDTRVSYGHYFL

SEQ ID NO: 273188 - protein, 78 aa, Zea mays
  Clone ID: MRT4577_180733C.1.pep
QKVEVPLLEKPCEFFHAFFCTARTRIQKRTTSQFQVCRGPLKKHLTRKNMLMSLFAFIYLQKLTFSSFFYKKKSGYLH

SEQ ID NO: 273189 - protein, 81 aa, Zea mays
  Clone ID: MRT4577_180734C.1.pep
LGYLLVHEPDLLGELLSPVPEVLVIDSQHASIWYLSRQFCNDYIHLVLHVGARNTVQRCLMLLRAVVCALLSTSLASCLLL

SEQ ID NO: 273190 - protein, 398 aa, Zea mays
  Clone ID: MRT4577_180735C.1.pep
MKQWRDDVDRLLGMAHSGSTRSRPRSSWRQHEATTSVRSPSVRGAQTDDLRAELNRRRAGEDARVSLERAREHRQNFEGREDARVSLKRARERWLNIEGRNLDQDFAAVYVTTITAAGGDTAVMATYFHVALSGPARTWLMNLTPGSIYSWEELCARFAANFASAYQWHGVEAHLHAVRQEPGETLWTFISRFTRVRGTIPRIFDASIITDFRQGVRDEKMLEKLATHDVETVTTLFALADKCVRAVEGRAWHSAPQTRVAQMGGSGAVTQDGKKKKKKNRGSERPPSAAPIVVAVTRGRNERNKRPWLHRGNNDPCPVHPNSRHSAAECREIIELAKRVSERREQTTMDGSPPRHWPGKERVDSGEVAAGEPDLGYQSPEAVLKDVFTGDSDSGDDN

SEQ ID NO: 273191 - protein, 92 aa, Zea mays
  Clone ID: MRT4577_180736C.1.pep
GVGFFLKQGKRLIFCPKDGLPPLAFFKEKIFLYQKNHCHSLATLATKKKATFPNLKLVFKPPFFYRIWFEGGLNKGKPKGFANPLPLIEQTC

SEQ ID NO: 273192 - protein, 103 aa, Zea mays
  Clone ID: MRT4577_180737C.1.pep
GFSGALGLKKGGPLFGFPKSNKLFLGGMAHLGVAFSFMGEFFPGKGALAQLNIKRGGPPPKIKPLVFFNVLFFFFPPLNPGNGGFFFGKKKKKASGFFFGPRP

SEQ ID NO: 273193 - protein, 71 aa, Zea mays
  Clone ID: MRT4577_180738C.1.pep
PTKVPQPPAAAAAAPPEKEPMPAPKVRPVIGLTTAPAPSVINVTPHLPLPVASHRVEELGFHTPKTPLVRG

SEQ ID NO: 273194 - protein, 122 aa, Zea mays
  Clone ID: MRT4577_180739C.1.pep
MAARLAQLRAQAVQAAEFASKHGGSYYKELMEKNKQYVVQPPTIEKCQELSKQLFYTRLASLPGRYESFWKELDGVKQVWKNRKDLKVEDLGIATLFGVELYAWFCVGEIVGRGFTLTGYKV

SEQ ID NO: 273195 - protein, 64 aa, Zea mays
  Clone ID: MRT4577_18073C.1.pep
LPTRLVELVRYSSRARRGVRGHQMAAAAVIGGFAVARVVGGDSHAGCSPIPGGGGGHLILMRAV

SEQ ID NO: 273196 - protein, 83 aa, Zea mays
  Clone ID: MRT4577_180740C.1.pep
SLNSFLKYSTLLLLTEGALIYLFPYFSNISLLYILVTHNTSITLILQYSYSNLTFYLLSIFYSKFFIFTFYLLTLNSFLSTLI

SEQ ID NO: 273197 - protein, 85 aa, Zea mays
  Clone ID: MRT4577_180741C.1.pep
RGFFSTNNTHISFATFKLHPLIDQRALPRRQPLPPPLLLVTTFCSGAYLGDPKTWAKPTCSLTNNFFLFVYPPNKVGHRVPIIIP

SEQ ID NO: 273198 - protein, 98 aa, Zea mays
  unsure (1)..(98): unsure at all Xaa locations
  Clone ID: MRT4577_180742C.1.pep
RRRNGPHWXLAFESAVGASLHGSLLLHSSRGAKNRVARTWVLSVHRWAWQGATHRCCSRPAHCWTRGYMSLPYAGATVKAEVLSLAAALRLCGRGSKD

SEQ ID NO: 273199 - protein, 78 aa, Zea mays
  Clone ID: MRT4577_180743C.1.pep
GLVTRENAIIHRGKWGAGDSLDHENQFHQMYAKGEGGTLDGNWWPPKGIRWGISGGEKEDCIFFFLFPRGKNEKFRAP

SEQ ID NO: 273200 - protein, 42 aa, Zea mays
  unsure (1)..(42): unsure at all Xaa locations
  Clone ID: MRT4577_180744C.1.pep
QHFSFEDRHCRHLINPIYMWVAIFPYYVDSLHTVKSDWITNX

SEQ ID NO: 273201 - protein, 61 aa, Zea mays
  Clone ID: MRT4577_180745C.1.pep
SSAPTFLFHKTLLSHRLPFLKADGPFFSTYIPPTIIIDILHHYLFMFLYPHPNLSYQIISP

SEQ ID NO: 273202 - protein, 90 aa, Zea mays
  Clone ID: MRT4577_180746C.1.pep
TGVFCPGWDAAADRAPDGSISWSSQRRSRVTSLLVASNDRRTRGVGSGLKRLTCTWTHRRRLMGKCMTQPTHRCVGRDPTGRCTDYLEEH

SEQ ID NO: 273203 - protein, 69 aa, Zea mays
  Clone ID: MRT4577_180747C.1.pep
SHIKHPTPNRQHRRRPINRTRTKRLMQQRREQTLLLLLILHQHKTVHTNRKLRLGEWAKQAHKQAHKQA

SEQ ID NO: 273204 - protein, 71 aa, Zea mays
  Clone ID: MRT4577_180748C.1.pep
HTDYGAAWAIAETELSELALVRTPTSLPTVPTHVVRRAPKGNGVDLAATFRKSDLGDTIYVKEVAGTYGAF

SEQ ID NO: 273205 - protein, 102 aa, Zea mays
  Clone ID: MRT4577_180749C.1.pep
VEQVFSREFLFDENRVAGRGTPLFGHFVIPGGGAGAGNPFCFAQEDGFWGKKRAAAAAASKFFLSAVRFSCPGDGQTALAARDLSLFSGEWVFSAPPHPPVN

SEQ ID NO: 273206 - protein, 216 aa, Zea mays
  Clone ID: MRT4577_18074C.1.pep
VTHIYARVPESMQSAFRGRKHYPTQNVLAAVDFDLKFTYVLAGWEGSAHDATILADALERQDGLKVPEGKFYLVDAGYACRPGFLPPYRSTRYHLKEYGGRNHPTNAKELFNLRHSSLRVTVERAFGALKNRFRIIDNKPFHPFKTQVKLVLACCILHNWILSHGVDEVIPLESTWQPNNHGNNGHGVAMEDNNAWASIRDVWANQMWENRGQYHI

SEQ ID NO: 273207 - protein, 51 aa, Zea mays
  Clone ID: MRT4577_180750C.1.pep
YTGRNFEMKKRKKKGAHNSFYFLCLKSNRKQTSTLLYTNGLQNTSFVQEKT

SEQ ID NO: 273208 - protein, 59 aa, Zea mays
  Clone ID: MRT4577_180751C.1.pep
STMYTQRQRIALASTSPQVGCTCHAERTFHSKSVVTNLTGAVTAFGTQKFTFTPQPVAV

SEQ ID NO: 273209 - protein, 63 aa, Zea mays
  unsure (1)..(63): unsure at all Xaa locations
  Clone ID: MRT4577_180752C.1.pep
DSWFHKSHXISPHPLLLDHLFRLQTRAAVXXNPTSHRLHSLIAHTNIINQLLXRIXQKYXHNP

SEQ ID NO: 273210 - protein, 162 aa, Zea mays
  Clone ID: MRT4577_180753C.1.pep
INRAAAPPPVFFPSRRSSFLAFSSSLIRAGARELPWLPPWRPLHPARRSFQGAVARLYSSLRRRLSNRLPCLPLFRAPLVFVCKLAGSHLPQVLAYGSHVPSVQKMQSSSTPLYSHPWCPKSPAGAPKAASLVHLASSRDPFPLPWRASRELPHVRSLPQAQ

SEQ ID NO: 273211 - protein, 68 aa, Zea mays
  Clone ID: MRT4577_180754C.1.pep
LHHETVTWPWAGAVPHWTQLSPCSQASRAAPLSPPWAFAFTGLISLEPAGNVTSEASCLRDHVTILFP

SEQ ID NO: 273212 - protein, 81 aa, Zea mays
  Clone ID: MRT4577_180755C.1.pep
MGRRNPLNLTRELVVLPARTPPPPPRGPPPAPASPPAPPGPPPPPGPTPPPGCAPDIPLGRLPAPFRPPSPLVPPCRHRSR

SEQ ID NO: 273213 - protein, 422 aa, Zea mays
  unsure (1)..(422): unsure at all Xaa locations
  Clone ID: MRT4577_180756C.1.pep
MMREGDARVTLLRSKLHGLVERNRDLEEENKQLRHQVSQLKGQISSLEGQETNKRMLWKKLENSATGISYSKEKQFVQSNDGAKEAVDLNSSLSHSRQQFSRVNQVRSRAPRVPNQPPNPTSTQPKATVRKEGCMAPPPPPPLPSKLQRSTKAIQRVPEVVELYRSLVRREGKNNAKSGSVGIPAATNSREMIGEIENRSAYVLAIKSDVENQGNFVNFLASEVQNAAYKKIADVEEFVKWLDGELSYLVDERAVLKQFPNWPEKKADALREAAFNYRDLKNLESEASSFHDDRRVATPMALKRMQALQDKIEQGIHNTERVRDSASGRYKDLKIPWEWMLDSGVISQXDPKLLLKKASLKLAKEYMNRIVNTLKSDPFANDEELLLQGVRFAFRIHQLAGGFDEGCRKAFQELKTYASKSE

SEQ ID NO: 273214 - protein, 97 aa, Zea mays
  unsure (1)..(97): unsure at all Xaa locations
  Clone ID: MRT4577_180757C.1.pep
TGSGCRKLLSYGGGSPVAGAKEDHRGKDLVDGVERLRLRRRHGSIRRNRFDSGGRRWCFGQRGARKGCSRSTNKTPPLVGFPNSCIKPKSSSXIPRL

SEQ ID NO: 273215 - protein, 88 aa, Zea mays
  Clone ID: MRT4577_180758C.1.pep
MGSLANNIMVVGAALAPLVDGGSSGPHEVPTAPNITTNYNATWLTARATCYGQTNRAGAPDNRGACGINNVNLPPYRGMTACGNAPIF

SEQ ID NO: 273216 - protein, 62 aa, Zea mays
  Clone ID: MRT4577_180759C.1.pep
ERPPGQVLPSSTCSTTKPLLQMSPSRRQHDSDSSDSDDETLILVNLLTLNMEARRQHRRRSR

SEQ ID NO: 273217 - protein, 59 aa, Zea mays
  Clone ID: MRT4577_18075C.1.pep
DVAWFECPVLMGNILCLRREFSLGWLRLNVCWACVHRSFLGMNVIWVSVVVRFGLNVIG

SEQ ID NO: 273218 - protein, 58 aa, Zea mays
  unsure (1)..(58): unsure at all Xaa locations
  Clone ID: MRT4577_180760C.1.pep
EFSPPKKGPGDXPPTNPGVYFFFYSRCKKGQNFNSKCIFFSGQPVENRFVIVNLGATP

SEQ ID NO: 273219 - protein, 54 aa, Zea mays
  Clone ID: MRT4577_180761C.1.pep
LLVTTNGQCVAGAGMAGAIDFYKPVELGTLDMRNESLSLSDTSGRTCPTLLSGP

SEQ ID NO: 273220 - protein, 85 aa, Zea mays
  Clone ID: MRT4577_180762C.1.pep
SNPRRPKSIIRVRPKSGTTAPPLILWALANGHPGSMTSCPTGGLSPTPGTMRAAGAAHPLYVSTSPWPSLSLRESEAHRLNNNLR

SEQ ID NO: 273221 - protein, 216 aa, Zea mays
  Clone ID: MRT4577_180763C.1.pep
TPAVSVRNSRVDPRVRKDLPALEEKPRNVVFVDMGHSAYQVSVCAFNKGKLKVLATAFDTTLGGRKFDEVLVNHFCEEFGKKYKLDIKSKIRALLRLSQECEKLKKLMSANASDLPLSIECFMNDIDVSGTMNRGKFLEMCDDLLARVEPPLRSVLEQSKLKKEDIYAVEIVGGATRIPAVKEKISKFFGKELSTTLNADEAVTRGCALQCAILSP

SEQ ID NO: 273222 - protein, 69 aa, Zea mays
  Clone ID: MRT4577_180764C.1.pep
PALRVLIINGVGSASRQWLEVGIFCSNQYKSCAYRAHRPKPETHTTNVFVGARFETPILLFIFFLHRAR

SEQ ID NO: 273223 - protein, 43 aa, Zea mays
  Clone ID: MRT4577_180765C.1.pep
RMPGRESIMHKKKKHSKRFWKPRRSKIMQSNTENSCHQNKTFL

SEQ ID NO: 273224 - protein, 64 aa, Zea mays
  unsure (1)..(64): unsure at all Xaa locations
  Clone ID: MRT4577_180766C.1.pep
IPTKSNFLFFSTHIQFISNXNNQTTPYXHFXLLXKTTPRNHYIPSXXYKXKIXTXKKLFIFLPX

SEQ ID NO: 273225 - protein, 59 aa, Zea mays
  Clone ID: MRT4577_180767C.1.pep
QNLRSISTSEMDWAWAANRLIEKDEAETSDDTSLHYLPRKRLILTTQLIQQLLPSIPAT

SEQ ID NO: 273226 - protein, 56 aa, Zea mays
  Clone ID: MRT4577_180768C.1.pep
KKKKKKKKKKKKKKKKKKKKKIKKKKKKKKKKKKKKKKKKKKKFFPLGRNHLRGNF

SEQ ID NO: 273227 - protein, 418 aa, Zea mays
  Clone ID: MRT4577_180769C.1.pep
MRQWVLAVAILAAASAAALLLGAEAQQQGHQTERISGSAGDVLEDNPVGRLKVYVYDLPSKYNKKLLKKDPRCLNHMFAAEIFMHRFLLSSAVRTFNPEEADWFYTPVYTTCDLTPSGLPLPFKSPRMMRSAIELVATNWPYWNRSEGADHFFVTPHDFGACFHYQEEKAIGRGILPLLQRATLVQTFGQKNHVCLKDGSITIPPFAPPQKMQAHLIPADTPRSIFVYFRGLFYDTSNDPEGGYYARGARASVWENFKDNPLFDISTDHPATYYEDMQRSIFCLCPLGWAPWSPRLVEAVVFGCIPVIVADDIVLPFADAIPWEDIGVFVAEEDVPSLDTILTSIPTDVVLRKQRLLANPSMKQAMLFPQPAQAGDAFHQILNGLARKLPHGDGVFLKPGDERVLNWTAGPPGDLKPW

SEQ ID NO: 273228 - protein, 68 aa, Zea mays
  Clone ID: MRT4577_18076C.1.pep
KLPELILPNVQIHDIVGRSSKINKRGLIKEDPRYVMPAYGKHERGVKDGAGGANEAGELAVVELLEGI

SEQ ID NO: 273229 - protein, 117 aa, Zea mays
  unsure (1)..(117): unsure at all Xaa locations
  Clone ID: MRT4577_180770C.1.pep
CNLAYISSLLHLTXQTIELQLQQQQQFLPSLNHHTAYNPVTYLQQQLFASNQLALLNVAAYHQQQQLQQFMPXLSQLAMANPAIYLQLLYLPLAVCNAPTYLQQQLLQQIVPALTHL

SEQ ID NO: 273230 - protein, 137 aa, Zea mays
  unsure (1)..(137): unsure at all Xaa locations
  Clone ID: MRT4577_180771C.1.pep
MRQWVLAVAILAAASAAALLLGAEAQQQGHQTERISGSAGDVLEDNPVGRLKVYVYDLPSKYNKKLLKKDPRCLSHMFAAEIFMHRFLLSSAVRTFNPEXEGDWFYTPVYTTCDLTPFGLXAPFKSPRMMRSAIELV

SEQ ID NO: 273231 - protein, 182 aa, Zea mays
  unsure (1)..(182): unsure at all Xaa locations
  Clone ID: MRT4577_180772C.1.pep
MPWLVDGHACRGARASVWENFKDNPLFDISTEHPSTYYEDMQRAIFCXCPLGWAPWSPRLVEAVVFGCIPVIIADDIVLPFADAIPWEDIGVFVAERDVPRLDTILTSIPTDVVLRKQRLLANPSMKQAMLFPQPAQAGDAFHQILNGLARKLPHGDGVFLKPGDERVLNWTAGPPGDLKPW

SEQ ID NO: 273232 - protein, 99 aa, Zea mays
  Clone ID: MRT4577_180773C.1.pep
HWVPRGRPGFASHPAAHSPPSPLGFCHHSRCRCIEAPLPSRLLVIPLRDPPPQCCPGAVAAGAPSHPRDGLLPWLLARWHGGDGYVSTCPGFPSAPRAS

SEQ ID NO: 273233 - protein, 242 aa, Zea mays
  unsure (1)..(242): unsure at all Xaa locations
  Clone ID: MRT4577_180774C.1.pep
ASPHRLQAHLVDXGTPRSIFVYFRGLFYDMGNDPEGXGYYARQVGSGAFQFPTTTWCDGGGVADGSCIAMHXGARASVWENFKDNPLFXISTEHPATYYEDMQRAIFCLCPLGWAPWSPRLVEAVVFGCIPVIIADDIVLPFADAIPWXTMSVFVAERDVPRLDSILTSIPLPDILLRQRLLARDSVKRALLFHQPARPGDAFHQVLNGLARKLPHGEDVFLQPGEKALDWDAGLESDLKPW

SEQ ID NO: 273234 - protein, 104 aa, Zea mays
  Clone ID: MRT4577_180775C.1.pep
MRPTQMLRSGAADPKNGHYIGNWGHFGGEKQRGIITYGLSANRQNPWAGSFNDAIFNTFRRTKGQIFFWLPPMVAGYWMMSWAIERSEYLNSKAGRAEFGDEEE

SEQ ID NO: 273235 - protein, 412 aa, Zea mays
  Clone ID: MRT4577_180776C.1.pep
MRPLVAAVLLVTICVVAAAPLQRHHKPGRTSGNAVGVLDDDPVGKLKVFVYEMPRKYNKMLVDKDSRCLQHMFAAEIFMHQFLLSSAVRTLDPEAADWFYTPVYTTCDLTPQGFPLPFRAPRMMRSAIRYVAATWPFWNRTDGADHFFLTPHDFGACFHYQEERAVERGILPLLRRATLVQTFGQRNHVCLQDGSITVPPYASPHRLQAHLVGPGTPRSIFVYFRGLFYDMGNDPEGGYYARGARASVWENFKDNPLFDISTEHPATYYEDMQRAIFCLCPLGWAPWSPRLVEAVVFGCIPVIIADDIVLPFADAIPWEDMSVFVAERDVPRLDSILTSIPLPDILRRQRLLARDSVKRALLFHQPARPGDAFHQVLNGLARKLPHGEGVFLQPGEKALDWDAGLESDLKPW

SEQ ID NO: 273236 - protein, 57 aa, Zea mays
  unsure (1)..(57): unsure at all Xaa locations
  Clone ID: MRT4577_180777C.1.pep
EFQKAVELQPGYVTAWNNLGDAYEQQXVLTSALKAFEEVLXFDPXNKVARXRVDDLR

SEQ ID NO: 273237 - protein, 418 aa, Zea mays
  unsure (1)..(418): unsure at all Xaa locations
  Clone ID: MRT4577_180778C.1.pep
MGGTGSATAAQALALAALLLACSGVAVVTAQDIERIQGSAGDVLEDDPVGRLKVYVYELPPKYNKNVVAKDSRCLSHMFATEIFMHRFLLASAVRTLNPDEADWFYTPVYTTCDLTPWGHPLTVKSPRMMRSAIQYVSKRWPYWNRTEGADHFFVTPHDFGACFYFQEEKAIQRGVLPVLRRATLVQTFGQKNHVCLREGSITIPPYAPPHKIRAHIVPPETPRSIFVYFRGLFYDTANDXEGGYYARGARASVWENFKDNPLFDISTEHPSTYYEDMQRAIFCLCPLGWAPWSPRLVETVVFGCIPVIIADDIVLPFADAIPWEDISVFVAERDVPRLDSILTSIPLPDILRRQRLLARDSVKQALLFHQPARPGDAFHQVLNGLARKLPHGEGVFLQPGEKALDWDAGLQSDLKPW

SEQ ID NO: 273238 - protein, 111 aa, Zea mays
  Clone ID: MRT4577_180779C.1.pep
MRRWVLAVAILAAASAAALLLGAEAQQQGHQTERISGSAGDVLEDNPVGRLKVYVYDLPSKYNKKLLKKDPRCLNHMFAAEIFMHRFLLSSAARTFNPEEADWFYTPVYTT

SEQ ID NO: 273239 - protein, 129 aa, Zea mays
  unsure (1)..(129): unsure at all Xaa locations
  Clone ID: MRT4577_18077C.1.pep
MSGRDKCSKCLGKVGGKSPCKVFRYNIQGMSXPAIRRLARRGGXVKCISWFIYKXPTCVLKIFLXNVILNPVTYKEHARSKAVSPMDVVYALKRQGVLPLRIRRLRGATPVGVRGKSLGSRSRNREYSG

SEQ ID NO: 273240 - protein, 70 aa, Zea mays
  Clone ID: MRT4577_180780C.1.pep
PPPQNFPAPASGRFKNPLQSRLCCVSPIYGGPPKTGIWLKKKKKKKKKKKKKKKKKKKKKKKKKKKKKKT

SEQ ID NO: 273241 - protein, 58 aa, Zea mays
  Clone ID: MRT4577_180781C.1.pep
FYLVLNHYIIDRFMFIYSFLYSFIVFFFILISFFSFIVFLIFFYFLTYYCYLFFSFLF

SEQ ID NO: 273242 - protein, 54 aa, Zea mays
  Clone ID: MRT4577_180782C.1.pep
RKPPPERRVYESVGGRWTSPTAPPRCCSPASSTDPRATVSLPQETPQRFQARPR

SEQ ID NO: 273243 - protein, 42 aa, Zea mays
  Clone ID: MRT4577_180783C.1.pep
FPDGLHPQHGGSLGLRGPPPQGDHRNASGTHHGRSPGRTAPD

SEQ ID NO: 273244 - protein, 59 aa, Zea mays
  Clone ID: MRT4577_180784C.1.pep
FSFFFFFFFFFFFFFFFFFPSGDRAHNWNTVLANKYHWGWVLRLCLITTIAIRCWEGGG

SEQ ID NO: 273245 - protein, 152 aa, Zea mays
  unsure (1)..(152): unsure at all Xaa locations
  Clone ID: MRT4577_180785C.1.pep
ASTVRPRDLPAXALYGDGEYYFFSPRDRKYPNGIRPNRAAGSGYWKATGTDKPIHDAATGEGVGVKKALVFYKGRPPRGSKTNWIMHEYRLAAVAGSTSPLAAYRPPSKFRNASMRVSRSTSIIPESYPLHDLYICSSHYLSYPWCHVELSW

SEQ ID NO: 273246 - protein, 92 aa, Zea mays
  Clone ID: MRT4577_180786C.1.pep
LRLKIRPPTWSLPCPLWVPPRFLPGVMSCRGRFWGSPGNPPPKTGALFIGGFSSLIAPPGAFRIFCKPIFSGGFGFFVRVFFLGCVALPFCV

SEQ ID NO: 273247 - protein, 146 aa, Zea mays
  Clone ID: MRT4577_180787C.1.pep
KGNRKGAKGLENEGGNRGGSPKTKGIKGKEQGGGPWQMERAHCGKAPQGGPLMGRPKGGKRAIQEGAKKWGRAPGFSPLRHWKNRGKGIVNQPQKGGKGPRKTRSKGRQRGRQLTEKPPKRGPPGPPKCMFYLAVSCYGYFQNFAL

SEQ ID NO: 273248 - protein, 34 aa, Zea mays
  Clone ID: MRT4577_180788C.1.pep
LGVLTHTAWTPCQHINVGYLIDTLGSTFVKQPPA

SEQ ID NO: 273249 - protein, 91 aa, Zea mays
  Clone ID: MRT4577_18078C.1.pep
KNKTISKGNKGCKKKTVHPLSNKDWYDINAPSVFSVRYIWKTLVSSTQGTSIASVGLKHTFFEVCLSDLKSDEDQAYTKITLPAEYVQGKN

SEQ ID NO: 273250 - protein, 101 aa, Zea mays
  unsure (1)..(101): unsure at all Xaa locations
  Clone ID: MRT4577_180790C.1.pep
IADNHWQQXKELAGSADEGNRSRRGEELQSFXTGXKXGMKHXAQFMFSMGGATXHAGLPLVREVXQHRGXAFVEFLMXLQAVKTELRFSRCRLGPLSTREY

SEQ ID NO: 273251 - protein, 152 aa, Zea mays
  unsure (1)..(152): unsure at all Xaa locations
  Clone ID: MRT4577_180791C.1.pep
GTRKNXKRLKELDASGAEPYKIDSTRASIRALLTRINISIRSAKVISRRIHILRDDELHPHLVALIQGFVRMWKFILECHRKQFHTILETKSHILIPKNGPERSSSKVTLELEMELLNWCSCFRNWILSQKAYIEALNGXLVKASPKGDSGR

SEQ ID NO: 273252 - protein, 70 aa, Zea mays
  Clone ID: MRT4577_180792C.1.pep
MSSTGGDDGAKKSWPEVVGLSLEEAKRVILCDKPDADIVVLPVGTPVTMDFRPNRVRIFVDTVAEAPHIG

SEQ ID NO: 273253 - protein, 105 aa, Zea mays
  unsure (1)..(105): unsure at all Xaa locations
  Clone ID: MRT4577_180793C.1.pep
MRVLLVALAVLALAASATCTHTSGGCGCQPPPPVHLPPPVHLPPTAHLPPTAHLPPPVHLPTPVHLSPPIHVXTPVHLPPXPCHYHTXRPGLRXYTQSHACPCQQ

SEQ ID NO: 273254 - protein, 70 aa, Zea mays; identical to SEQ ID NO: 273252
  Clone ID: MRT4577_180794C.1.pep

SEQ ID NO: 273255 - protein, 71 aa, Zea mays
  Clone ID: MRT4577_180795C.1.pep
MSSTGGGDDGAKKSWPEVVGLSLEEAKRVILCDKPDADIVVLPVGTPVTMDFRPNRVRIFVDTVAEAPHIG

SEQ ID NO: 273256 - protein, 35 aa, Zea mays
  Clone ID: MRT4577_180796C.1.pep
LTTAAIAAIQPTCFDKAIGILPTTHHWWCPLLDML

SEQ ID NO: 273257 - protein, 71 aa, Zea mays; identical to SEQ ID NO: 273255
  Clone ID: MRT4577_180797C.1.pep

SEQ ID NO: 273258 - protein, 79 aa, Zea mays
  Clone ID: MRT4577_180798C.1.pep
GSHFPRGGEHGEEWSKAASLATKLNRLADLAACTKSRSSTGDTRIRGSCIEGGPTGGDLDAGRSHQRADPFRPAIIGIG

SEQ ID NO: 273259 - protein, 440 aa, Zea mays
  Clone ID: MRT4577_180799C.1.pep
MEAEAAAKRAREGGEDATAPVAGAEAAVAGAGEQAGISAVIPGWFSEISPMWPGEAHSLKVEKVLFQGKSDYQNVMVFQGPPPWRANPRRQKANAAASAAPLSHSPAAASPHTPPSRAQGFGMEAEAAAKRTRDSGEDAAAAGISAVIPGWFSEISPMWPGEAHSLKVDKVLFQGKSDYQSVMVFQSSTYGKVLVLDGVIQVTERDECAYQEMITHLPLCSIKDPKKVLVIGGGDGGVLREVSRHSSVEQIDICEIDKMVVDVSKQFFPHLAVGFEDPRVSLHIGDGVAFLKNAPEGTYDAVIVDSSDPIGPAQELFEKPFFQLVARALRPGGVVCTQAESIWLHMHIIEDIVVNCRQVFKGSVNYAWTTVPTYPSGVIGFMLCSTEGPAVDFQHPVFNIEEDEHPMKSKGPLKFYNSEIHTASFCLPSFAKRVIESKAN

SEQ ID NO: 273260 - protein, 95 aa, Zea mays
  Clone ID: MRT4577_18079C.1.pep
APPPFPFFFWVRFFFWFGTGYHFPLGTGFFFDFANLGLGPGSVTTAPQWVCIGLSPGPPGPGKKKKKKKKKKKKKKKKKKKTKKKKKKKKKKLVL

SEQ ID NO: 273261 - protein, 135 aa, Zea mays
  Clone ID: MRT4577_1807C.1.pep
MEREVQLMEGRQAWPLHMMGMAAAGTTATCFDNYSSSGSGGGGGDCFVLGWEQLAPAPFGCFGLLTADVHDLFPLFATGMEPALPALPPSAHDVAAAIPGELDDLLLSFWDASCHDGDVGEPLKAQQQAAFNSSC

SEQ ID NO: 273262 - protein, 123 aa, Zea mays
  unsure (1)..(123): unsure at all Xaa locations
  Clone ID: MRT4577_180800C.1.pep
PHPRVPGGATSRRRSGSTSARPRRSRPPRRARPRSRPTVPAPARLGARWPQPVGVAFLLGVPLAPYLPPASPXLAXFQKPRNLPFPPPYIIHSSYIIYPQLAQSIINYLLFASFSPHCKQTII

SEQ ID NO: 273263 - protein, 70 aa, Zea mays; identical to SEQ ID NO: 273252
  Clone ID: MRT4577_180801C.1.pep

SEQ ID NO: 273264 - protein, 136 aa, Zea mays
  unsure (1)..(136): unsure at all Xaa locations
  Clone ID: MRT4577_180802C.1.pep
RQPDVHVSLHHVLSLSPCDALPIVVSSHTTTAMPPLFLFQSCRAGTSQNLTQHHCVYTRWXLIAAPXGCYDTRTTYHQVSDLLQDKRLTLHDVPYHTMNIPRFMMDSCDPQLYDNVAESFSGDPLTVYYYETFAND

SEQ ID NO: 273265 - protein, 71 aa, Zea mays; identical to SEQ ID NO: 273255
  Clone ID: MRT4577_180803C.1.pep

SEQ ID NO: 273266 - protein, 153 aa, Zea mays
  Clone ID: MRT4577_180804C.1.pep
MGEKPRDVLPPNYHKVLAVQLRGFPPKGPLVKVKASFKLPPPKERKPSPAPKAKKKGSAGMAKPKKAPAPAKKKPAAASLGPLKEARKVRPKPTRKVGPGPAQPKAKPARAPAFGAGKKVNKASALLTAAVLVPPRGPPCFLLTGSNSRSCKY

SEQ ID NO: 273267 - protein, 112 aa, Zea mays
  Clone ID: MRT4577_180805C.1.pep
PAIVIAKFIAAGISGSSAMLSEGVHSLVDTLNELLLLYGLRRAGKAPDSLHPFGYGRELYFWSFIVALLVFAAGAGVSAYEGIQHIRRPEPATNHALSYSVLGISILFEGAS

SEQ ID NO: 273268 - protein, 213 aa, Zea mays
  unsure (1)..(213): unsure at all Xaa locations
  Clone ID: MRT4577_180806C.1.pep
MAAESQTETGNCSAWAAKDPSGILSPHSFNRRTVRHDDVSLRITHCGVCYADVIWTKNRHNDSVYPLVPGHEIAGVVTEVGSDVKGFKLGDHVAVGTYVNSCRDCDNCNSFLENHCSKFVFTFNGVDTDGAVTKGGYSTHIVVHERYCYKIPDGYPLEKAAPLVCAGITVYTPMTRHNMNQPGKSLGVIGLXGGLGHMAVKFGKXFGLKVTVL

SEQ ID NO: 273269 - protein, 150 aa, Zea mays
  unsure (1)..(150): unsure at all Xaa locations
  Clone ID: MRT4577_180807C.1.pep
KSLMEKAKAKGVSLLLPADVVIADKFAPDANSKIVPATAILDGWMGLDIGPDSIKTFSEALDTTKAIIWNGPMGVFEFDKFAAGTEAVAKQLAELIGKGVTPIIGGGDSVAAVEKVGLADKMSHISTGGGASLEIXKGKPLPGVLAFDEA

SEQ ID NO: 273270 - protein, 44 aa, Zea mays
  Clone ID: MRT4577_180808C.1.pep
QNWFQNVNVFLIFCPRCAPPVNLVFPCTNPVTLVHKYKKTLGSP

SEQ ID NO: 273271 - protein, 114 aa, Zea mays
  Clone ID: MRT4577_180809C.1.pep
LAGLPNTITSSVALAHMLGPHIACSDLFLSTGAITTVCPGYTLFLSSSKSPLSLSLSLSLSLKSVWQPACEFFVCDQLTLPATRTPLRLERCEDRLTGHSSVSDRAPAGRAPDH

SEQ ID NO: 273272 - protein, 691 aa, Zea mays
  unsure (1)..(691): unsure at all Xaa locations
  Clone ID: MRT4577_18080C.1.pep
PRVREMGPIRCSRCKAYINPFMKFVGQGRHFIGNVCGFRNDTPTVDLGASGPVRGRRPAPAGPVLSRGTVEFVATKEFLVRDPMPAAHAIPVEPTVAARLAPDPPPALYFFLIDVSMNAIQTGATAAACSXAISQSISDLPEGPRTMVGIATFDSAIHFYSLKRAQQQPLMLIVXDVQDVYXPLLILLXECRENLEQLLESIPNMFENNRVADSAFGAAMKAGFLAMKSTGGKLLVFQSVLPSLGIGSLSAREAEGRANITTGDKEAHKLLQPVDNTLKTMALEFAEYQVCVDVFLTTQSYVDIASISVVPQTTGGRVYYYYPFSALSDPAKLFNDLRWNISRPQGFEAVMRVRCSQGLQVQDYYGNFCKRVPTDIDLPAIDSDKTVMVTFKHDDKLPENVECGFQCALLYTTVYGQRRIRVINLSLSCTNLLANLFRYADLETQFACFLKQAANGIPTSSLPRIRDEATNTCINILQSYRKHCASVTSSGQLILPEALKLLPLYTLALVKSVGLRTDGRLDDRSYWISLVSSVSVVLAVPLVFPRLIPIHDLTSRDDDDSLVPSPLMLKSENVQEDGVYLLENGEDGLVYVGNMVNPATLEQIFGVSSLAALPAQLALEQFDNELSRKVNEVVNEIRRQRCSYLRLRQCRRGEPSGDFFRSFLVEDKAPGVFSYVEFLVHVHRQIQSKMT

SEQ ID NO: 273273 - protein, 104 aa, Zea mays
  Clone ID: MRT4577_180810C.1.pep
MAENASLRHAILTGSCLACGGATTAAAPAELPPESRRLVAENARLRGEYARATALLNQILLSVSAPAPPGPAAAAVVVFSSSVARPVADRAVRFRGHAEAAMDL

SEQ ID NO: 273274 - protein, 160 aa, Zea mays
  Clone ID: MRT4577_180811C.1.pep
MMLATPPSITHRHLHSGIIPPPGPGHRRRLVSTARAAVKRDGATTEVAGDEGASSSSSSPPPPESSRVTKAAATATPAAFSLPKDYSHTLFHSEFLEVLGLIDLESLRKRPRLTVGVTVKASLPLPVLVVLAALYLADVTSGLVDWTHHHLEGDADDVGD

SEQ ID NO: 273275 - protein, 90 aa, Zea mays
  Clone ID: MRT4577_180812C.1.pep
GCRDGDPAAFSLPKDYSHTLFHSEFLEVLGLIDLESLRKRPRLTVGVTVKASLPLPVLVVLAALYLADVTSGVVDWTHHHLEGDADDVGD

SEQ ID NO: 273276 - protein, 59 aa, Zea mays
  Clone ID: MRT4577_180813C.1.pep
LDPPVPPQGGFCRFFPCERWPPCFKNHSWANLLVWLARPNKNKDRQIVNTRYKKKKTQL

SEQ ID NO: 273277 - protein, 67 aa, Zea mays
  Clone ID: MRT4577_180814C.1.pep
IVGRPYAHEQVAIVGRAGFQRQLNGGPGTGLLIWYPRVTIMSGHAGVPKDLAWINLQTNLVDGHNLT

SEQ ID NO: 273278 - protein, 84 aa, Zea mays
  unsure (1)..(84): unsure at all Xaa locations
  Clone ID: MRT4577_180815C.1.pep
LWRQGTRGKLSHLRPRGGKGNGGRMDGQWLMEAMPYDNLHRLLDCTTLTVETHIFPKTNGRLPTDTWHHADMDKPXYFNLADLC

SEQ ID NO: 273279 - protein, 87 aa, Zea mays
  Clone ID: MRT4577_180816C.1.pep
LSIRHLNTLRVMQLRTMALPITVQVQLLMLYMISRGYNSSLCTCPNIAMDFGLKNKEGAVRAAVQVQGLCACYPPGTDPGCSTNTTQ

SEQ ID NO: 273280 - protein, 129 aa, Zea mays
  Clone ID: MRT4577_180817C.1.pep
ASISSQERKKETPIAQSVSVAINGTSATPPVHRWRKARQYEQSGAASANTPWILLSTFSILARQRLHSRSTETMMVGICTAQRRAAEKKQSGAVRSVEHTPPRTIKQTHQQGDKRFGQRSNRQHVIFKQ

SEQ ID NO: 273281 - protein, 177 aa, Zea mays
  Clone ID: MRT4577_180818C.1.pep
MSSDYSSSWARALVHISPYTFSAIGIAVSIGVSVLGAAWGIFITGSSLIGAAIKAPRITSKNLISVIFCEAVAIYGVIVAIILQTKLESVPTSRMHDPESMRAGYAIFASGLIVGFANLVCGVCVGIIGSSCALSDAQNSTLFVKILVIEIFGSALGLFGVIVGIIMSAQATWPTKV

SEQ ID NO: 273282 - protein, 60 aa, Zea mays
  Clone ID: MRT4577_180819C.1.pep
RSRQTSLAKRSDGAENKGTGGVAQHFPSSLSLSHSLVFPRLASPRCSSRILTDAAVRTAE

SEQ ID NO: 273283 - protein, 275 aa, Zea mays
  Clone ID: MRT4577_18081C.1.pep
TGRIRVINLSLSCTNLLANLFRYADLETQFACFLKQAANGIPTSSLPRIRDEATNTCINILQSYRKHCASVTSSGQLILPEALKLLPLYTLALVKSVGLRTDGRLDDRSYWISLVSSVSVVLAVPLVFPRLIPIHDLTSRDDDDSLVPSPLMLKSENVQEDGVYLLENGEDGLVYVGNMVNPATLEQIFGVSSLAALPAQLALEQFDNELSRKINEVVNEIRRQRCSYLRLRLCRRGEPSGDFFRSFLIEDKAPGVFSYEEFLVHVHRQIQSKMT

SEQ ID NO: 273284 - protein, 24 aa, Zea mays
  Clone ID: MRT4577_180820C.1.pep
KGHFIKEYIVKLRKHGNYAKLIWC

SEQ ID NO: 273285 - protein, 50 aa, Zea mays
  Clone ID: MRT4577_180821C.1.pep
PNLRRQNRTNKVGGGRLSGIQVYKPLGGALSVVLGDAKLISVAEISTRVD

SEQ ID NO: 273286 - protein, 979 aa, Zea mays
  Clone ID: MRT4577_180822C.1.pep
MTMVERRYGPCTSHGSFLLRLLLLLPFFFLCFIDVPPAGAAATTQSPPLDNTQKAIMNDVASLVNSGSANTRWNTAESNPCNWEGITCTSNTSSSAVTRIALSNYGLANSSIFAPLCRLGTLRYLDLSRNFLADLSAPFFASSSSSCSMKEGLQSLNLSTNRLASPLGELAGFPQLQVLDLSFNSFASRNLSAELGYFPKLRSFNTSSNDLNGDVPTSMVGSLEELVLSSNNLSGPIPLRLFEYENLTLLDLSQNNLTGAIPDNFTSLSKLETLLLSGNKLIGEIPSSLSNVTTLSRFAANQNGLTGPIHSWITKHIGMLDLSYNKLNGTIPSDFLSHQGLQSVDLTSNLLNGAIPATLSQSLYRLRLGGNQLGENIPGSVCDTMGLTYLELDDNQLTGVIPSELSKCKNLTLLNLASNRLHGLVPSITGELDKLVVLKLQNNTLTGQVPSTFSELKSLITLNLSKNSLSGAIPSGIFELPKLSNLYLQGNQFSGFIPFSISSSKDLIELNLGDNALTGNIPTMPTTVTTSLLNLSHNLLDGSIPSNINSLGELEILDLSHNALSGAVPSSLWSLQSLTLLDLSYNNLSGSIPRFGPSQTVDIVGNPGLVIVNGTGNNNDTPTTGKKKRHYLVVIIFTIAGTLVGLCVLALIIVMSLSKRVYRVEDEGLPAGESVPQIISGRLITMNSIHTSAVDFVKAIEAVSNHQNIFLKTRFCTYYKAVMPNGSTYSVKKLNSSDKIFQIGSQEKFSHEIEVLGKLTNSNVMVPLAYILTADCAYLIYEHAYNGTVSDLLHGGKSEVIDWPSRYSVALGVAQGLTFLHGCTQPVLLLDLSTRTIHLKSKNEPQIGDIELYKIIDPSRSTGSFSTIAGTVGYIPPEYAYTMRLTMAGNVYSFGVILLELLTGKKSVSNGTELAKWALSLSGRPDEREQILDTRVSGTSIAVHSQMLSVLNIALSCVAFSPDARPKMRNVLRMLFNAK

SEQ ID NO: 273287 - protein, 48 aa, Zea mays
  Clone ID: MRT4577_180823C.1.pep
HFFTITLVGIIFIYYFFHMFSLIQHYLNSQIDLNRKLTRIKTSYTFII

SEQ ID NO: 273288 - protein, 81 aa, Zea mays
  unsure (1)..(81): unsure at all Xaa locations
  Clone ID: MRT4577_180824C.1.pep
AFPLFXTVLTGFTRGSAPPLFXSGNRAKIHPPTQPPRPTLGKSGGGRPLGFSPQPRLKNPPPGWMGFLPFLSGLARGAGPF

SEQ ID NO: 273289 - protein, 73 aa, Zea mays
  unsure (1)..(73): unsure at all Xaa locations
  Clone ID: MRT4577_180825C.1.pep
DNPGITHINHLALHTPFASWGNIELVRXDRPSXQNRRLNGEWDPPCNGTLNEEDVLATRRLTDTLVKNLTPCS

SEQ ID NO: 273290 - protein, 58 aa, Zea mays
  Clone ID: MRT4577_180826C.1.pep
HCVDILVCSVSSSHDYSGLIQVFFGTLSAAGILVHLSPVFSCCCSHHLSLQMCLMRSL

SEQ ID NO: 273291 - protein, 82 aa, Zea mays
  Clone ID: MRT4577_180827C.1.pep
SMLYGKKILTDIMDLTLERDCLQNVAQESFQFSNDKIGLHSKHNFKNISRTIRLDYIRNTTSRILTTNRHPRQQGEEASSLA

SEQ ID NO: 273292 - protein, 46 aa, Zea mays
  Clone ID: MRT4577_180828C.1.pep
SIELSRYLVCDSEYTDTMFLFLMLYFDGFYHEIDVPFYELKKEQRG

SEQ ID NO: 273293 - protein, 49 aa, Zea mays
  Clone ID: MRT4577_180829C.1.pep
GEVGGSRQNAPPPVSWGPGVEPRDGLSEGIGTLWKLQMRDQQCISCTCS

SEQ ID NO: 273294 - protein, 404 aa, Zea mays
  unsure (1)..(404): unsure at all Xaa locations
  Clone ID: MRT4577_18082C.1.pep
VPPVQPGLVVQPFSLPHPSEEPIQLVDFGEMGPIRCSRCKAYINPFMKFVDQGRHFVCNLCGFRNDTPREYMCNLGPDGRRRDADDRPELSRGTVEFVATKEFLVRDPMPAVYFFLIDVSMNAIQTGATAAACSAISQSISDLXPEGPRTMVGIATFDSAIHFYSLKRAQQQPLMLIVPDVQDVYTPLQTDLILPVSECRDNLEQLLKSIPSMFENNRVADSAFGAAMKAGFLAMKSTGGKLLVFQSVLPSXGIGSLSAREAEGRANITTGDKEAHKLLQPVDNTLKTMALKFAEYQVCVDVFLTTQSYVDIASISVVPQTTGGRVYYYYPFSALSDPAKLFNDLRWNISRPQGFEAVMRVRCSQGLPSQDYYGIFCKRVPTXDIDSSAIDSEKXVMVTFXHDD

SEQ ID NO: 273295 - protein, 83 aa, Zea mays
  Clone ID: MRT4577_180830C.1.pep
KPPKKRGVFKPPFRGLGGASKNTPKDFSGGFYLGNPHPKGLFPSLGFLWLWFFGRNNFPRPPRKGFFKRGGQNTGGKRALFFF

SEQ ID NO: 273296 - protein, 534 aa, Zea mays
  Clone ID: MRT4577_180831C.1.pep
MATPYAKWTTILNICSAVGAIGTVFGEMGALQPTHGVEYAFGAHNYSISGVLEVEPGSDLDPLQVREFMEIRSLNYNGDTFCLVFARYGLQKLFGLDCLALTSDQSPLYPDLPSNMVDTKRSTTILSGIQLDFLGCLSTMSTFDAEVYTMRRSGQIARTLIYAASTFMLPFLLAQLSSCILQINTQSVQDMHIDADPSHVPVVLIEKHVMVVPQHSSSKDLASNASEQKDTIVLPKLQGEPLVPKSSAGKKSGRILRAVIFVHGFQGHHLDLRLVRNQWLLLDPGADCLMSEANEDKTSGDFKEMGSRLAGEVIAFLKKKMDKLSRYGGCKELKLSFVGHSIGNVIIRSALAEPALQPYLKNLYTYMSISGPHLGYWYSSNSLFNSGLWLLKKLKNAQCIHQLTFSDDQDPHNTYFYKLCKLKTLENFKNIILLSSPQDGYVPYHSARMELCPAASSDTSKKGQVFTEMLNNCLDQIRAPSSDTRTFMRCDVNFDQSNHGRSLNTMIGRAAHIEFLETDIYAKFIMWSFPDLFR

SEQ ID NO: 273297 - protein, 85 aa, Zea mays
  unsure (1)..(85): unsure at all Xaa locations
  Clone ID: MRT4577_180832C.1.pep
PAHAAWILMSGTRRPFFFFXFFFLTGRGEATGIPPQRYYSSTKHGARLQTGMWDAWSIPGVGPKISDRAHTAFHSCLQMGRTEAW

SEQ ID NO: 273298 - protein, 109 aa, Zea mays
  Clone ID: MRT4577_180833C.1.pep
MTCEQCTCLSFFKDGYVPYHSARMELCPAASSDTSKKGQVFTEMLNNCLDQIRAPSSDTRTFMRCDVNFDQSNHGRSLNTMIGRAAHIEFLETDIYAKFIMWSFPDLFR

SEQ ID NO: 273299 - protein, 216 aa, Zea mays
  Clone ID: MRT4577_180834C.1.pep
KKMDKLSRYGGCKELKLSFVGHSIGNIIIRSALAEPALQPYLKNLYTYMSISGPHLGYWYSSNSLFNSGLWLLKKLKNAQCIHQLTFSDDQDPHNTYFYKLCKLKTLENFKNIILLSSPQDGYVPYHSARMELCPAASSDTSKKGQVFTEMLNNCLDQIRAPSSDTRTFMRCDVNFDQSNQGRSLNTMIGRAAHIEFLETDLYAKFIMWSFPDLFR

SEQ ID NO: 273300 - protein, 155 aa, Zea mays
  Clone ID: MRT4577_180835C.1.pep
PASGNTLEDLANVVSNACIWLQDNNVPYNVLISDCGKRVFLFPQCYAEKQALGEVSQELLDTQVNPAVWEISGHIVLKRRSDYEEASETSAWKLLAEVSLSEERFEEVKAYIFSAAGLVLSDEEEEEASEGKGTTTFAPVPVSPMPVAEGCLVHQ

SEQ ID NO: 273301 - protein, 100 aa, Zea mays
  Clone ID: MRT4577_180836C.1.pep
PACTGPAITRPPFFPCSFDSGVFCLWKPQSFDPTVPIGLCRWRLPLGALALPGCWALAQGFPLARWLARSIWGRRLRVLVLGAPWLASSEHHWGSFHSSN

SEQ ID NO: 273302 - protein, 127 aa, Zea mays
  Clone ID: MRT4577_180837C.1.pep
GYELIECDKIFVPVHKDVHWCLAIINVKENFFQYLDSLGGMDHFPGKVLARYISEEVKDKSNRVINTSLWHEELVDIPLQRNGWDCGMFMLKYIDFHSRGLPLSFSQEHMEYFRKRTAKEILRLRAD

SEQ ID NO: 273303 - protein, 64 aa, Zea mays
  Clone ID: MRT4577_180838C.1.pep
EGRQNGAVHRQPGFPETEGRRLPLLRAQTVAVGLAVVLLARGMLCLGLYLSDLERRGYARLFYY

SEQ ID NO: 273304 - protein, 277 aa, Zea mays
  unsure (1)..(277): unsure at all Xaa locations
  Clone ID: MRT4577_180839C.1.pep
MGSLPLDASLRPLDPEAFAGDSRAIVDFLAEYYRDVDKYPVRAADLEPGRLRKLLPEAAPEHGEPMEDILEDVRRDILPGLTHWQSPSFFAYFPMNGSAAGFAGEMLSAGLNVAPFLWVASPAAAELESVVVDWMGTLLGLPQRLLFSGGGGGVLQGSTCEAVVCTLAAARDRALARLGHESIVKLVVYASDQTHATFQKGARLVGIPPSNFRVIRTTSASGYGLTADDVRAAVDRDVARGLVPXLYLCATVGTTGLGAVDPXRELGEEARRHGMWL

SEQ ID NO: 273305 - protein, 234 aa, Zea mays
  Clone ID: MRT4577_18083C.1.pep
MRSSMALLAAAAALLLLVSLAAAADMSIVSYGERSEEEVRRMYAEWMSEHRRTYNAIGEEERRFEVFRDNLRYIDQHNAAADAGLHSFRLGLNRFADLTNEEYRSTYLGARTKPDRERKLSARYQADDNEELPETVDWRKKGAVAAIKDQGGCGSCWAFSAIAAVEGINQIVTGDMIPLSEQELVDCDTSYNEGCNGGLMDYAFEFIINNGGIDSEEDYPYKERDNRCDANRKM

SEQ ID NO: 273306 - protein, 71 aa, Zea mays
  unsure (1)..(71): unsure at all Xaa locations
  Clone ID: MRT4577_180840C.1.pep
PRVRXGFSGTIPQYFHALASMSYPGEAVKAYRLQQVLASTVLQQRHCPLPTTILGTSNHTHHENATASTTS

SEQ ID NO: 273307 - protein, 69 aa, Zea mays
  Clone ID: MRT4577_180841C.1.pep
MARAVLDTLLRVAVVLLLLPALVAAAFTPADDYLVLCGTAANATVDGRTFLGDDGLPAVAVLAPRGSEA

SEQ ID NO: 273308 - protein, 99 aa, Zea mays
  Clone ID: MRT4577_180842C.1.pep
LSLPSYGRCPSLLRALQRRRALPGTPTFRLSFLLCKTERQDPNLLFVFGSDLISSVYACIMPSNFDCFANTIGCSCLHRCPLLDLQLVSISDCTVYRDG

SEQ ID NO: 273309 - protein, 110 aa, Zea mays
  Clone ID: MRT4577_180843C.1.pep
NIIPRCHKVDWKAPPRLARTFRSTPHLEPPILLLHEAPGQQFPLAEHLGPRSLARRWLRRVAPCPRQCEDPRQCGTPVSNWWPMSRQSHPKLSWLASHRSRTGLRSEFRH

SEQ ID NO: 273310 - protein, 99 aa, Zea mays
  Clone ID: MRT4577_180844C.1.pep
RDLFFFFFCTSIIVLSKVACDIYIHLTQSNQPICSSFRALNHCTTTIIITPLFFGACFSEGVGGEAEARLRIGRPAVTVSPSVIRAGGREGGSEPRPGR

SEQ ID NO: 273311 - protein, 104 aa, Zea mays
  Clone ID: MRT4577_180845C.1.pep
NRFGAQGVELGPPKKRHPPPGVPGKTPALRKTPQVPRQPQKQRPSGVPPPSLGSLAGPGLMGPPCPPWKGVPFLTAFVSGSNSRGGCGLFCQSQSKKTWVVVPP

SEQ ID NO: 273312 - protein, 41 aa, Zea mays
  Clone ID: MRT4577_180846C.1.pep
ISAFTYGNRLQITGTLIPTHLVDTSARGGNLQGSPTGADIF

SEQ ID NO: 273313 - protein, 328 aa, Zea mays
  Clone ID: MRT4577_180847C.1.pep
WVPRGRPGYGIAVVFVMFITTLLVTLVMVMIWKTSLLWIALFLVIIGGAELVYLSSAFYKFTQGGYLPLAFAGILMFIMATWHYVHVHRYNYELQNKVSSNYVAELSARRNLARLPGIGFLYSELVQGIPPILPHLIERVPSIHSVLVIISIKYLPISKIETSERFLFRYVEPRDYRLFRCVVRYGYNDKVEDPREFEGLVIEHLKQFIHQESFYSQGDNSTEEVEDANEPSVRVQGATLSDSSSDRSTAAPSNGCIYEIQTIQREMEDGVVHMLGEANVVAEPNADFFKKIIVDYAYNFMRKNFRQPEKITCVPHNRLLRVGMTYEI

SEQ ID NO: 273314 - protein, 70 aa, Zea mays
  Clone ID: MRT4577_180848C.1.pep
SNRQSQLASFIYHPCTSSYRRVLFHCGTRCLYWTTCHGTSKATICAIRPMCLLLAPPVYPVLPGRGTVLR

SEQ ID NO: 273315 - protein, 71 aa, Zea mays
  Clone ID: MRT4577_180849C.1.pep
LVRGTLRQFRVISCEWQIARAMSRAILADMLWVVMSCLVNREHESVVRCIVLVAVLVNRHYTGPVVCLASP

SEQ ID NO: 273316 - protein, 68 aa, Zea mays
  unsure (1)..(68): unsure at all Xaa locations
  Clone ID: MRT4577_18084C.1.pep
REPGIGIAAXNLKTLSLSMLLEKTVDHLASDVRAYISTSTIYRTLIACLARSPDGLLHAIPXVLLYGP

SEQ ID NO: 273317 - protein, 85 aa, Zea mays
  unsure (1)..(85): unsure at all Xaa locations
  Clone ID: MRT4577_180850C.1.pep
TGRPTRTAERVRAGAPVYLAAVLEXIADGVLELDNNAVRDNKKTRIDPRLIQIADRIDKQMFRLLGTVTITSGGVMPNIHNLSLP

SEQ ID NO: 273318 - protein, 131 aa, Zea mays
  unsure (1)..(131): unsure at all Xaa locations
  Clone ID: MRT4577_180851C.1.pep
YNISHTNTIIINITLNGQNYHERSFCVETALRGHGLAFHLIDDLPVPTANNINASEIKTXTINDGNVMADIVNSVKPSMIMSLSSFKTAKAMWFYLQKRYVQDSGALLHTLMXEIHLIEQHDLSIDNYYSA

SEQ ID NO: 273319 - protein, 430 aa, Zea mays
  unsure (1)..(430): unsure at all Xaa locations
  Clone ID: MRT4577_180852C.1.pep
MQSGGDMRPVHNSVDTVNAAAVAIVTAESRTQPPAEQRRKWADRLSVYFCFGSQKNGRRMRVNHAALVPEPXTSKDRCACSRNSKPPTAXVFPFVAPPSSPASFLQSEPTSIVQSPRAGAPAFSPLSPNSQSPTGPPSIFAIGPYAHETQLVSPPVFSAFTTEPSTAPFTPPPESVHLTTPSSPEVPYAKLLTSINNSKNGEAGGDLQSYPNYPDSPIGRLISPSSGCSGTSSPFPDPEMQASSRSALRLFPVREPPKILDGEGVATQKLIPRHMRNGGSLLDGQISAAVPVVDFSARLQPNEHAMDHRVSFELTVEDVARCLEKKTAISGDSGTASFHLAPTGSGDHHRESNEARAGLYVDESYHDLPEKARRSLSLRLAKEFNFNNVDVGSVEPSVGSDWWANEKVAGMTTEPKKNWSFHPVVQPGVS

SEQ ID NO: 273320 - protein, 99 aa, Zea mays
  unsure (1)..(99): unsure at all Xaa locations
  Clone ID: MRT4577_180853C.1.pep
VQHECITDAIIGMDVIXQAKYGMGNTAGYALPTLHQIDPVGAQVTALEVGHTRELAYQIGHAFDRRSKYLPELRGAALYAGXHIKNHKDLLMNACPHIV

SEQ ID NO: 273321 - protein, 119 aa, Zea mays
  unsure (1)..(119): unsure at all Xaa locations
  Clone ID: MRT4577_180854C.1.pep
MTTRFKKNRKKRGHVSAGHGRIGKHRKHPGGRGNAGXMYHXRILFYLYPPRYFLHFVLCFFVRLLVAFCCVLLPLLFSPFSPFFSFFLLFSPFFFPFFSFLFFSSSCSSFFFFSFFFFP

SEQ ID NO: 273322 - protein, 154 aa, Zea mays
  Clone ID: MRT4577_180855C.1.pep
PRVRPRVRPRVRPRVRTAPFTPPPESVHLTTPSSPEVPYAKLLTSINNSKNGEAGGDLQSYPNYPDSPIGRLISPSSGCSGTSSPFPDPEMQASSRSALRLFPVREPPKILDGEGVATQKLIPRHMRNGGSLLDGQISAAVPVVDFSGRLQPNE

SEQ ID NO: 273323 - protein, 173 aa, Zea mays
  unsure (1)..(173): unsure at all Xaa locations
  Clone ID: MRT4577_180856C.1.pep
MQSGGDMRPVHNSVDTVNAAAVAIVTAESRTQPPAEQRRKWADRLSVYFCFGSQKNGRRMRVNHAALVPEPAPQRTDAPAAEIPNHPPPPVFPFVAPPSSPASFLQSEPTSIVQSPRAGXPAFSPLSPNSQSPTGPPSIFAIGPYAHETQLVSPPVFSAFTTEPSXTAPFTPP

SEQ ID NO: 273324 - protein, 55 aa, Zea mays
  Clone ID: MRT4577_180857C.1.pep
CTGGVKGYLGTYSSSVKFQKFFFGSTLYHSSWIILGPCFFVRPLGLGNPHALKLH

SEQ ID NO: 273325 - protein, 62 aa, Zea mays
  Clone ID: MRT4577_180858C.1.pep
MRVKEAMEHKGAGWQAPGGPILCINNCVFSGKARTMNMCSKCHKEMIAKQSQAKLAGCCIDS

SEQ ID NO: 273326 - protein, 77 aa, Zea mays
  Clone ID: MRT4577_180859C.1.pep
IWSEKRFGSSGSEHELPVVHSDKLPVLFGFHTPHRERERDRASSPTMYVVVRHRRAEEGNQKKVAPTYIIVRRLFAT

SEQ ID NO: 273327 - protein, 183 aa, Zea mays
  Clone ID: MRT4577_18085C.1.pep
GMGQPGNLAPGPFLGDAPRGRFFRSFLGPLKKALGPGADVGGFFAWSFLGNFEWLAGFLSQFGLVFVGFNPLEPPPKGLAFWFRGLLSKPLDFPNPALARKGPFCSAFPSVWDGPMVSIRVRGWVPKWGPRAASPVHCDVVGLWGCFFWSFSCGFFFVVGGRVLKKKKKKKKKKKKKKKTRGG

SEQ ID NO: 273328 - protein, 92 aa, Zea mays
  Clone ID: MRT4577_180860C.1.pep
TYRRSMKGRHPACDESRRWVGPRIPRKSAPEAQPQVKRCGTHKGGEEVTTSTGGVKNSTHVHARDSGAGLDSHLPNMHGSNDPQAALPIPCT

SEQ ID NO: 273329 - protein, 39 aa, Zea mays
  Clone ID: MRT4577_180861C.1.pep
MSELDDQIPTAFDPFADANADDSSAGSKEYVHIRVQQRN

SEQ ID NO: 273330 - protein, 128 aa, Zea mays
  Clone ID: MRT4577_180862C.1.pep
MTIFGPLGPSLAGQIRASKGLHAWLKPVATWYCNVAGYRKMGLKYDDLLCEENESVQRALTRLTPIESYDRSFRFKRASQASVLHKPLPKDQWTPVENDVRYLKPHVQNVEAELHEREVWDTMEVVRK

SEQ ID NO: 273331 - protein, 105 aa, Zea mays
  unsure (1)..(105): unsure at all Xaa locations
  Clone ID: MRT4577_180863C.1.pep
RQPLRKRIHRHGVSSRCGGGLLLPPLLSVPPHQLQPLIXXRRXXPCPGSPDKXRXPMXXLXEXVAPLXVXXXNSXXXXXXRQXLVMVRATFVLSQALSMWGVTFL

SEQ ID NO: 273332 - protein, 91 aa, Zea mays
  unsure (1)..(91): unsure at all Xaa locations
  Clone ID: MRT4577_180864C.1.pep
KVLTETGRLTPGXTGSLVHIKQTMSSSSNLKENLVPNMELVELEKSTQDARQPLATISSNNQDNMNTVKSQNLVPTTKQLLSPEQHCVKRE

SEQ ID NO: 273333 - protein, 156 aa, Zea mays
  unsure (1)..(156): unsure at all Xaa locations
  Clone ID: MRT4577_180865C.1.pep
MAGRLVPSTKKAMEHREEKPKVPSSDPGPDPDLVQLVAGQQPQLQREQQPPNISEMKPLTREAYGGGMYAAEEEGDRDSWLVFYLDGAHSSXSMEMCAXWFAHATNSDGIQPGSSEQSHTDRDSRKFLLFNCMTVIDPERLLLLFLDSCAQNVTHV

SEQ ID NO: 273334 - protein, 73 aa, Zea mays
  Clone ID: MRT4577_180866C.1.pep
MAGRLVPSTKKAMEHREEKPKVPSSDPGSDLDLVQLVAGQQPPNISEMKPLTREAYGGGMYAAEEEGGRRRGP

SEQ ID NO: 273335 - protein, 70 aa, Zea mays
  Clone ID: MRT4577_180867C.1.pep
APGAYERMALVQCRPISSPERRSRTSRGSFQPLCVVAVKTTYQTDGFPAGGPETLSHLPFQQEIINLGCL

SEQ ID NO: 273336 - protein, 69 aa, Zea mays
  unsure (1)..(69): unsure at all Xaa locations
  Clone ID: MRT4577_180868C.1.pep
TDGRRLPRKGRRLRRQEGRQPGRSKDARVPPRGKATERATPRGKNQPXQRGEYRLFKLETLGQLNXLVV

SEQ ID NO: 273337 - protein, 79 aa, Zea mays
  Clone ID: MRT4577_180869C.1.pep
TKIKKAKNTLNFKLQNKIKYTKTQTDGPTSPIEHSSGSCQQTSVYIDIFSSSLLPGNSKLLSHKPCTKTLYYLIRFDPI

SEQ ID NO: 273338 - protein, 103 aa, Zea mays
  Clone ID: MRT4577_18086C.1.pep
PNHSSFSYSKSQKDFAYSSRLVILRNSKLHVHCISIVSKAKDELPQAVRAWEWCRAHFSSPYGGNTLLHAVHDQLRATSTLLTEVGCGAEAHRGQAAAVLAGC

SEQ ID NO: 273339 - protein, 216 aa, Zea mays
  Clone ID: MRT4577_180870C.1.pep
MPHASAESMKMDSVCLRYTRIFWNLIIAPWKFLFAFVPPYHIAHGWIAFICSLVFISGIAYGVTKLTDQISCVTGVSPYVIAFTALAAGTSWPDLVASKIAAERQVTADSAIANITCSNSVNIYVGIGVPWLIDTVYNFFVYREPLYIDNAAGLSFSLLVFFATSFGCITVLVMRRIILGAELGGPRLWAWVTSVYFMILWVVFVVFSPLRGSGVI

SEQ ID NO: 273340 - protein, 45 aa, Zea mays
  Clone ID: MRT4577_180871C.1.pep
HTTRHIGETNRTNKGPINYPLEPSTLKPDEQPHQTTTTPPQDPNT

SEQ ID NO: 273341 - protein, 63 aa, Zea mays
  Clone ID: MRT4577_180872C.1.pep
AKEKKIKFILIYHYWIDLFQIAALPISTFSLKMNLILEEQQSEIDQYNNDPLLSSKEGNYFDI

SEQ ID NO: 273342 - protein, 207 aa, Zea mays
  unsure (1)..(207): unsure at all Xaa locations
  Clone ID: MRT4577_180873C.1.pep
SRPAGTHLSRHHYSRSYTTADKLAMETCFTEWMLPSPLVVXDRLLSSNLVLPXKRSLSPLFVGRVATRRTRNICXSKNALQYPLTPNKKNCNSLMMTCETTMLQQFWETCLATRRMIXPLIDELVNYYACXISCCWEICDDSTHATTTYRIRRIPTGLIFKGTDIQQSVLTAVQKSTVTTLICKYLNYVMNMLCHAMPRPVNTYVYL

SEQ ID NO: 273343 - protein, 112 aa, Zea mays
  unsure (1)..(112): unsure at all Xaa locations
  Clone ID: MRT4577_180874C.1.pep
PRPLSXGXXGRRVXXFFLFYFLFFLFLFFFLFFFFFFFFFPNKKSPNIFCPKKKSPPIKRVNSGHGGGGPPGGGGTLRNPGPVRGKTSGRGTQPGGPFPSNNGTPGGPRRWG

SEQ ID NO: 273344 - protein, 37 aa, Zea mays
  Clone ID: MRT4577_180875C.1.pep
LINERFNPNACGWAYGMNFFDIDAWRTKKCTEQYKIR

SEQ ID NO: 273345 - protein, 53 aa, Zea mays
  Clone ID: MRT4577_180876C.1.pep
LNPNSIQRLRLGDFWFMEHIFSWNSKLIIYLTRSCFYLKRWHFYIRILREKTL

SEQ ID NO: 273346 - protein, 52 aa, Zea mays
  Clone ID: MRT4577_180877C.1.pep
KIPRSSKAHKRLPESKTVKPQNVGLVLTPLVKLKMYLILGNSKISQFRWNIC

SEQ ID NO: 273347 - protein, 431 aa, Zea mays
  Clone ID: MRT4577_180878C.1.pep
MTTVSRALGSAFAGFTRAPAVAQTATTLPSPYGSSALHQHWRWSRACRTRRFSSGRAARISMSLRAGIVGLPNVGKSTLFNAIVENGKAQAANFPFCTISPNVGVVAIPDPRLQVLSKLSKSQQTVPTSIELVDIAGLVKGASKGEGLGNQFLSNIREVDSILQVVRCFEDDDIVHVNGKVDPRSDIDVINLELIFSDLEQIEKRLDKLNKSKTKDTQVKVKEQAEKSGLEKIQQALMEGKPARSVDLAEHEKEAIKHLYLLTMKPVIYVANVTESDLAEPDSNSHVKEVAKAASDLQSGMVTISAQVEAELAELPLDERAEYLKSLGVAESGLGNLVKATHKFGSRRTYFTTGDKETKAWTILSGMTAPQAAGVIHSDFQKGFIRAETVSYDDFVAAGSLGVAREKGLLRLEGKDYVVQEGDVMLFRFNV

SEQ ID NO: 273348 - protein, 143 aa, Zea mays
  unsure (1)..(143): unsure at all Xaa locations
  Clone ID: MRT4577_180879C.1.pep
RVIHIIQEDWGAYQQANTLFAKAITEIVRDGDLVWVQDYHLMLLPRLLREEVHNQRESDQPVKNIKIGFFLHTPFPSSEVYRILPVRKEILLGVLNSDLIGFHTYDYARHFLSSCTRILGLSTMPNGXTFNGSLCPSSAPFPI

SEQ ID NO: 273349 - protein, 240 aa, Zea mays
  unsure (1)..(240): unsure at all Xaa locations
  Clone ID: MRT4577_180880C.1.pep
MSLRASIIGLPNVGKSNLFNAIVVRCFEDDDIVHVNGRVEPGSDIDVINLELIFSDLXQEQAEKSGLEKIQXALMEGKPARSVDLAEHEKEVIKHLYLLTMKPVISVANVIESDLAEPDINPRVKEVAKAASYLQYGMVTILAQVXVYIEVQEPLKKFLLNNFIFFYVAYPYVSTYANKIMECIKXETELAELPLEERVEYLKSLGVAESGLGNLVKATYNLLGLRTYFTTGDKVHHLCC

SEQ ID NO: 273350 - protein, 75 aa, Zea mays
  Clone ID: MRT4577_180881C.1.pep
CFRVPKGRPPPSARLPPVPCCQGAQMSVAGDSLLFKVPGKPRGTDGVLCLTFRNPDKVPLTAYVIGPPPQMNLLV

SEQ ID NO: 273351 - protein, 180 aa, Zea mays
  unsure (1)..(180): unsure at all Xaa locations
  Clone ID: MRT4577_180882C.1.pep
IEKRLDKLSKSKTKDTQVKVKEQAEKSRLEKIQQALMEGKXPARSIYLAEHEKQAIKHLYLLTMKPVIYVANVTESYLAEPDINPHVKEVSKPTSDLQSGXTKAWTIFSGMTAPQAAGVIHSDFQKGFIRVETVSYDDFVAAGSLGVAWEKGKHFENIRSRSSGSTFISSLLQCLHSRQN

SEQ ID NO: 273352 - protein, 346 aa, Zea mays
  unsure (1)..(346): unsure at all Xaa locations
  Clone ID: MRT4577_180883C.1.pep
MTIWRSSLWADPSGHLLAALAMEPGLPRLVVLVRPRPPISMSLRASIIGLPNVGKSNLFNAIVVRCFEDDDIVHVNGRVEPGSDIDVINLELIFSDLXGNLVNGFHFVLLSRISKEXLCYLCNNXIEKRLDKLNKSDTQVKVKVRHTNSFVLMTFLFYVLIDCXXEQAEKSGLEKIQXALMEGKPARSVDLAEHEKEVIKHLYLLTMKPVISVANVIESDLAEPDINPRVKEVAKAASYLQYGMVTILAQVXVYIEVQEPLKKFLLNNFIFFMLPTHMCPPMLTKSWNVXKIETELAELPLEERVEYLKSLGVAESGLGNLVKATYNLLGLRTYFTTGDKVHHLCC

SEQ ID NO: 273353 - protein, 255 aa, Zea mays
  unsure (1)..(255): unsure at all Xaa locations
  Clone ID: MRT4577_180884C.1.pep
FNVSSVLNIFQVENGKAQAANFPFCTIXXNVGVVAIPDPRLQVLSKLSKSQQTVPTSIELVDIAGLVKGASKGEGLGNQFLSNXXREVXDSVFRVVRCFEDDDIVHVNGKVDPRSDIDVINLELIFSDLEQIEKRLDKLSKSKTKDTQVKVKEQAEKSRLEKIQQALMEGKXPARSIYLAEHEKQAIKHLYLLTMKPVIYVANVTESYLAEPDINPHVKEVSKPTSDLQSGMVTIPARVYCIHRSTRTFEEISDK

SEQ ID NO: 273354 - protein, 261 aa, Zea mays
  unsure (1)..(261): unsure at all Xaa locations
  Clone ID: MRT4577_180885C.1.pep
LDACRFRSGIPGSTHASGGSDRGGSMEGESTLGVLSGFVLGALTFHHLNTDSDTEGFLLGEMKGEAKNSITDSQMDNVKVVYTIDIQKYIPCYRLFSFYNSLGEVNEHALKKVLSNVRKTVVGWYKFRRHSDQIMTFREQLLHRNLQTHLSSPELVFLLLTPSITTESCSTHCLEHALYKPQXRGLFHRVPXLVVTNLGMSDQLGYKTEPASCTSTVFSRAVRTHSSQFFNEDGSLKEVHKINEMYAAVQERVKSICQKVE

SEQ ID NO: 273355 - protein, 69 aa, Zea mays
  unsure (1)..(69): unsure at all Xaa locations
  Clone ID: MRT4577_180886C.1.pep
GGVAPRAIIXKFXPTLLXFGVEGXXXAXXLQLVLAXSALQQPIAQLQQQSLAHXNXQTMXTEQQQHXXK

SEQ ID NO: 273356 - protein, 44 aa, Zea mays
  Clone ID: MRT4577_180887C.1.pep
LKSTAKSVEAKPTQDTIIRLAPPLTLNAEELEETSKALRYVPEH

SEQ ID NO: 273357 - protein, 517 aa, Zea mays
  unsure (1)..(517): unsure at all Xaa locations
  Clone ID: MRT4577_180888C.1.pep
ATDAWFGAAVAGIFTALVDRAAXSNATRKYFATAEMDFDPKLYGLAQCAPDLTPAQCQGCLGDLQSRVTAQFLSGRPLGNNAFMVWCSLRYSVSPFYAGRAMLQLPAPPAPPPTSTPTLHSSGRKVNAAGISAGIASVVVLMLILSVFFFIRFRLRIKVKKNDHSLKKIGRAQCTIFDLLTLEEATEHFAEKNKLGEGGFGIVYKGILSDGQEIAVKKLLGRAGSGLDQLQNEVQVLAELQHKNLVGLQGFCSHHNDTLLVYEYIKNGSLDTILFDDREGNALNWEQQYNIIFGIAKGILYLHEDSSMRIIHRDLKANNILLDDNMEPKIADFGLARLLGEGHTHTQTGRVVGTFGYMAPEYASHGSVSPKIDIFSFGVLILEIVTRRSNCSSDDHSTVNLLSDVWDHWKKGTMPQMLHRSLDEFARSQALRCIHIGLLCVQPEPDDRPDISAVVFMLTRDSIELQPPGQPAFFFGRESPSALRLDGQSSYVYHRDGFKLGQGVSVNGVTLSELYPR

SEQ ID NO: 273358 - protein, 79 aa, Zea mays
  unsure (1)..(79): unsure at all Xaa locations
  Clone ID: MRT4577_180889C.1.pep
XKKKKKKKKKKKKKKKKKKKKKKKKKKKKNKKKKKKKKKKKKKKKKKKKGGRPFLRGNQDFHFPRLWQVFTFFFRAPLN

SEQ ID NO: 273359 - protein, 79 aa, Zea mays
  Clone ID: MRT4577_18088C.1.pep
TWISFKPAALFFFFFNSKTCILFLRGDYNQTAMCAITNTNTCREQTSSQNSPPRLALSWEYPYRPTLLFSFHYLPLQPP

SEQ ID NO: 273360 - protein, 149 aa, Zea mays
  Clone ID: MRT4577_180890C.1.pep
GRDVSLTIWSVVMLPRMFSSTTESLHDLFGLSEVSEVMSSDALPMGRQCLPPTTIMSAAALRMHPAATTASPSTASNGGEIERARSMRSPESCHNFTALLAQARLNLNHSHVIAIYNAASTKRATQHAPEPIHAPGSFNEERHTAERAT

SEQ ID NO: 273361 - protein, 86 aa, Zea mays
  Clone ID: MRT4577_180891C.1.pep
SLLKVVGKEVKQGGAKRGDDGRESSKGGVSERGSGGLGDKDYGGGDDGGKYSAGDVVHVPRDLMWSAGDKGRVVGIETRTKGTQGY

SEQ ID NO: 273362 - protein, 94 aa, Zea mays
  unsure (1)..(94): unsure at all Xaa locations
  Clone ID: MRT4577_180892C.1.pep
MVLTANEDVRGKLIVLMQRVNIMMIAMDLTDISDVYVVVQYGSDNAKTSEQKKISNSLWNEVLQLXTTHHTARVYLGDFVEKRFTRYDALIVAY

SEQ ID NO: 273363 - protein, 53 aa, Zea mays
  Clone ID: MRT4577_180893C.1.pep
TRQSPTRLTSTSKPIFDATPYLLLNLMHSSRSLQHITLLFPMPPSISTHFLTS

SEQ ID NO: 273364 - protein, 92 aa, Zea mays
  unsure (1)..(92): unsure at all Xaa locations
  Clone ID: MRT4577_180894C.1.pep
HGVXSXARGXRYRGQYRQGQXHGYGVYRFHSGDXXAGXWXGGQXHGIGAQTCSDGSTYAGEFKCGVKHGLGCYHFRNGDRYAGXYFXDKIHG

SEQ ID NO: 273365 - protein, 268 aa, Zea mays
  unsure (1)..(268): unsure at all Xaa locations
  Clone ID: MRT4577_180895C.1.pep
PPINPLFLCSRRRKREEDEGGLELLLSMDLDEEETRPEQQAPPRVPDKLKAVSQELGHEIRIFTSTTFELMTSKLAKADQEEDDDFYELQPSDYYKLISNRLAEQSKVLNTRKIREAELAAQRARLTKAVARVRFPDGYILEAEFHPSEMVHSLVDLLMKVIARPDLPFYLYTVPPRKRIMDTSQDFYTIGFVPGANVFFSYDLPEGSELNTDAVKSGPYLREEIEXLDGLSLQSEPSDQPDDSKXNSDSAHQSYAFQSDSAPQQQQI

SEQ ID NO: 273366 - protein, 42 aa, Zea mays
  Clone ID: MRT4577_180896C.1.pep
MWGGSLFFFLSSFFPYFLRASRGKITGLKTNIVNRSKSFLFF

SEQ ID NO: 273367 - protein, 74 aa, Zea mays
  Clone ID: MRT4577_180897C.1.pep
SQSLFSILIRNTRHIRGLKAPLHITCNLKYSTCHLQLLVGASNKQELSERTEWMALLDDGVEQRLPLCQRLIEL

SEQ ID NO: 273368 - protein, 103 aa, Zea mays
  Clone ID: MRT4577_180898C.1.pep
LSLSSVQVVVAANTDSVKTVPGVIVLLGKRHGPPSRGLHQLPSCSSDHRRSRSWGTGTRAAVTASGVRLVLDLVIASHRPLSAISSQQRTQACAAQQKKGAKS

SEQ ID NO: 273369 - protein, 75 aa, Zea mays
  Clone ID: MRT4577_180899C.1.pep
PQPGFVLLISAMGYVFSAGVFQGDMIKVVSWGVRGLSAFSVMASFFLLGGSRGVGPYQVWVWAFVMAVIACWCPP

SEQ ID NO: 273370 - protein, 264 aa, Zea mays
  unsure (1)..(264): unsure at all Xaa locations
  Clone ID: MRT4577_18089C.1.pep
MASTSSAGDVGDSGSKGAVADKTLTASANTSSSHQESHDVDAKSRVEDIWKKMNSGFPNKMPKPAMTKLSTTEKQKKNKPTNNWMXILGLSPSKAHSVDQGSKNGLQQTQHEMSEDAKKLAAKALAAAKNAAAVASGRGKVEITEVRDFAGKDIEIKKLVDANSKEAIEKARAGGAAPSAVDNILEQIRKKQKLSVLDKTKKEWGEYKEENRGLGEELDAYKKSSNQYLDKQSFLQRTDYREFERERDARLSMMAKRRTDTRED

SEQ ID NO: 273371 - protein, 849 aa, Zea mays
  unsure (1)..(849): unsure at all Xaa locations
  Clone ID: MRT4577_1808C.1.pep
MSVVGFDLGNESCIVAVARQRGIDVVLNDESKRETPAIVCFGDKQRFIGTAGAASSTMNPKNSISQIKRLLGRKFSDPELQSDLASFPFRVTEGPDGFPLVHVRFLGEERTFTPTQLLAMVLSNLKGIAEGNLKTAVVDCCIGIPVYFSDLQRRAVLDAATIAGLTPLQLFHETTATALAYGIYKTDLPEHDQLNVAFVDVGHASLQVSIVGYKKGQLKMLSHAYDRSLGGRDFDEALFKHFAAKFKEEYKIDVYQNARACLRLRVACEKLKKMLSANPEAPLNIECLMDEKDVRGFIKREEFEHISAPVLVRVKGPLEKALAEAGLTTENVHFVEVVGSGSRVPAIIKIITDFFGKEPRRTMNASECVARGCALQCAILSPTFKVREFQVNDGFPFSIALSWKQDSQNSAPQQTLVFPKGNVIPSIKALTFYKSSTFEVDVLYVDTCDSQIPXKISTYTIGPFQPSKGERAKLKVKVRLNIQGIVTVDAGVITASEGAAKEPRAEQMETDKPEGATDPSAXFASDQTCWGYASVLXTAEIVATAENGTLNHEDKSVSMEADANVEPXKRKVEKTSVPFHKLIYGALAAADLQEAVEKEYEMALQDRVMEETKEKKNAVEAYVYDMRNKLYDKYNDFVTPEEKEGLIGKLQEVEDWLYEDGEDETKGVYISKLEDLKKIGDPIEARYKESTERGSSVDQLVYCINSFREAALSSDQKFGHIDISEKQKVINECSEVENWLRERKQQQDALPKHTDPVLLVSDLKKKAEALDRFCKPIMTKPKPAPKPQTPPPHTPPPQPEAQASDPQTPEQQQSGTGAAGEPGSEGGVQQASGEQMDMDRPDDSADVAA

SEQ ID NO: 273372 - protein, 67 aa, Zea mays
  Clone ID: MRT4577_180900C.1.pep
LKSNQPFRKILEGSHFNFLVIHVHLNIYRSLSKQFQLNKAHLKIISIIQTVYKRLEHTIMSKKDFYY

SEQ ID NO: 273373 - protein, 78 aa, Zea mays
  Clone ID: MRT4577_180901C.1.pep
PDYVQKRIKKKGGTTPSYFHSQKAINHEPKPGKRQSGLTLNFFKRNKFLKPKRGNLFSKPKRALFAVAKTAGARESRA

SEQ ID NO: 273374 - protein, 48 aa, Zea mays
  Clone ID: MRT4577_180902C.1.pep
DKKHIGILVQEQAYYFIQYLKFMDILLIRFVYVWTSDQFQKLRSMRTI

SEQ ID NO: 273375 - protein, 106 aa, Zea mays
  unsure (1)..(106): unsure at all Xaa locations
  Clone ID: MRT4577_180903C.1.pep
VVPKDVNAAVATIKTKRTIQVVDWWPTCFKXGLNYKLPRVVPGGDLAKVQRAVCMISNSTSVWEVFSRMDHKLDLMYAKRAFAHXLVXEDIEEGDFSGSRGDVCAL

SEQ ID NO: 273376 - protein, 56 aa, Zea mays
  unsure (1)..(56): unsure at all Xaa locations
  Clone ID: MRT4577_180904C.1.pep
RNPEGRDPENNRDREPGGTNQGGPQKKRSIQETRAQKQRKKRGIXRRRKRPIAGQQ

SEQ ID NO: 273377 - protein, 111 aa, Zea mays
  Clone ID: MRT4577_180905C.1.pep
ELSSLGGASSSTPYSKDRMRRQGQYGEADINSMVVAQLHHYQAQQRVQKHPENSYTGRDPAQASTEHQYTPPKARQSQWDRGGPNVPSQVPSYVYITKVMAPPLHQLLQRL

SEQ ID NO: 273378 - protein, 77 aa, Zea mays
  Clone ID: MRT4577_180906C.1.pep
VPPSLPTTGIRHTAFSSLGALCVIKFATLACQLFFAGVCVFIPPVGYQVFLWLSLNFRGEGRTCLLFFKKNGGIGWG

SEQ ID NO: 273379 - protein, 99 aa, Zea mays
  unsure (1)..(99): unsure at all Xaa locations
  Clone ID: MRT4577_180907C.1.pep
HKKGWRQHHVRGGEPQQIRHKHVAQPQEQSLRLLAVPPQKPETKQWSTVIGEGFTSFGAAEHDEHPPPNTNXPSKHETMVLNAAPLRFFLKHWTNRTTI

SEQ ID NO: 273380 - protein, 35 aa, Zea mays
  Clone ID: MRT4577_180908C.1.pep
GGLTSPYRHKLSQEEKREIFWSAGVEHLLPGFFFN

SEQ ID NO: 273381 - protein, 72 aa, Zea mays
  Clone ID: MRT4577_180909C.1.pep
WFVPGRAAESSAFASSLRIKGRCKLDVEISHETWFLRVCRHGADQAADVLLVCSELSLYSRRRAALAVGGEG

SEQ ID NO: 273382 - protein, 161 aa, Zea mays
  unsure (1)..(161): unsure at all Xaa locations
  Clone ID: MRT4577_18090C.1.pep
MASTSSAGDVGDSGSKGAVADKTLTASANTSSSHQESHDVDXKSRVEDIWKKMNSGFPNKMPKPAMTKLSTTEKQKKNKPTNNWMTVLGLSPSKAHSVDQGSKNGLQQTQHEMSEDAKKLAAKALAAAKNAAAVASGRGKVEITEVRDFCWKDIEIKKLVD

SEQ ID NO: 273383 - protein, 75 aa, Zea mays
  unsure (1)..(75): unsure at all Xaa locations
  Clone ID: MRT4577_180910C.1.pep
SVVWXFLQVKNSHHECYQYQEGLKSCYCYKVIPKDESIVASRFMHDRYSVSDSPEAPLVVATPMKVTSFSISSRH

SEQ ID NO: 273384 - protein, 45 aa, Zea mays
  Clone ID: MRT4577_180911C.1.pep
ICCFKKKKKKKKKKKKKKKKKKKKKKIKKKKKKKKKERKNRCFLS

SEQ ID NO: 273385 - protein, 82 aa, Zea mays
  unsure (1)..(82): unsure at all Xaa locations
  Clone ID: MRT4577_180912C.1.pep
GPPKSKEKQQKGXHQNRQGEPRHRDQGTKGGDQQSHQQQQPQGEPAAQKAAQGAQQLTAMCGLKPQQPGPRPSKAAAGGVXN

SEQ ID NO: 273386 - protein, 108 aa, Zea mays
  unsure (1)..(108): unsure at all Xaa locations
  Clone ID: MRT4577_180913C.1.pep
MAAAPAAAGGLMQLRPPLCVSPRASASCAPSIXGGACPSXRRRRALALAASSVAAAEAEAYTEPELVLLEALLGIQGRGRAVAPRQLQARDPRFTRFLPSAPRARADM

SEQ ID NO: 273387 - protein, 51 aa, Zea mays
  Clone ID: MRT4577_180914C.1.pep
GAHWLDILVYILVSARQSMLKQSELRSISVSMVLAGVLNFPLMFFSFPWSD

SEQ ID NO: 273388 - protein, 95 aa, Zea mays
  Clone ID: MRT4577_180915C.1.pep
PALTQEWPPPYTARTASWCDSGPTCSEHELYYLTSMAFTCTVQIHITTSIRQLRRSATPGRTSDPAMPLGLGKLPIRIPRILLPHTCIVFDSCNY

SEQ ID NO: 273389 - protein, 258 aa, Zea mays
  Clone ID: MRT4577_180916C.1.pep
MPLIRAAQTEIETPKVSEHETHMQETGPLVVAMDSAEEGIPALHQNVQANGEVESSKVSELEAHVNETGLLLAMDIAEEGFPALHENVQVNGEGESSKVSEHEAHMQETGLLVAMDITDEEGIPALHENVQANGEAESSTVELSSCTSGQQESETTAAPCEESSPSQIKVSPSLPLGVAKMEVDPLEVIDHEAETSKVSEHEAYMLETGQLVAMDIAEEGIAALNQNVQANGDISSSTVELSSGTSGQQRSETTAGTL

SEQ ID NO: 273390 - protein, 53 aa, Zea mays
  Clone ID: MRT4577_180917C.1.pep
GGGFFFFFFFFFFFFFFFFFFFFFFFFFFWAPPLTQFYFFFFPSGGPPPFSGG

SEQ ID NO: 273391 - protein, 194 aa, Zea mays
  unsure (1)..(194): unsure at all Xaa locations
  Clone ID: MRT4577_180918C.1.pep
MAAQASSPIEFLLRRPLPRQRRRLPLAGAFFAPTGLSGAPLLRALASLAADLLVTPPPPSQRRNLDALMRRLAVLSALLDSHXVHPRRRRRGRLXSDAANLCFRELYVVLFRADLLVSYVASAARAWALLRAPQLAASFRASXAELAVVLDVLPAASLRLSLDAAQXLDLLRARCRRRAPAHYHDPAEAGLGDL

SEQ ID NO: 273392 - protein, 199 aa, Zea mays
  Clone ID: MRT4577_180919C.1.pep
FGTRPSLTRFLFLLLASSASFPSGRFFPSGAGPGPGPTPSRCQRATGRRQWVHPRERDHFRAVAARLLPNLTRPHPIDRLSASPRLVSSGGGGVGQRNGGRDSVPSSSQPPRSGPRRSSGPVLFAMAAPASSPVEFLLHRPLPRQRRRPPLAGAFFAPTGLSGAPLLRALASLAADLLGTPPLPSQRRNIDALMRRLAL

SEQ ID NO: 273393 - protein, 52 aa, Zea mays
  Clone ID: MRT4577_18091C.1.pep
NAVQYIRSVRLKLARKYYANYLVACDSHLSLGLWPHDISNEALWMTYSHTNP

SEQ ID NO: 273394 - protein, 137 aa, Zea mays
  Clone ID: MRT4577_180920C.1.pep
MVKFLKPGKAVILLQGRFAGRKAVIVRVFEEGTRDRPYGHCLVAGLAKYPKKVIRKDSAKKTAKKSRVKCFIKLVNFTHLMPTRYTLDVDFKDVASGGPDALSTRDKKVEACKAAKARLEERFKTGKNRWFFTKLRF

SEQ ID NO: 273395 - protein, 167 aa, Zea mays
  Clone ID: MRT4577_180921C.1.pep
MLVSLALSAPISSTSQTLPAAQQHHNHRPKMVKFLKPGKAVILLQGRFAGRKAVIVRVFEEGTRDRPYGHCLVAGLAKYPKKVIRKDSAKKTAKKSRVKCFIKLVNFTHLMPTRYTLDVDFKDVASGGPDALSTRDKKVEACKAAKARLEERFKTGKNRWFFTKLRF

SEQ ID NO: 273396 - protein, 105 aa, Zea mays
  unsure (1)..(105): unsure at all Xaa locations
  Clone ID: MRT4577_180922C.1.pep
MPVLCSLGPALFFLAVLWFFPNHPGFVLCGGALLWPRALFFLWERPLGFGFGPFFFPFFFFGGRVFALKKKKKKKRKKKKKRKKKKKKKQKRKKQRKKXXKNRAG

SEQ ID NO: 273397 - protein, 137 aa, Zea mays; identical to SEQ ID NO: 273394
  Clone ID: MRT4577_180923C.1.pep

SEQ ID NO: 273398 - protein, 91 aa, Zea mays
  unsure (1)..(91): unsure at all Xaa locations
  Clone ID: MRT4577_180925C.1.pep
EAIIVVILVRIVVQHVYGIMNEVEEVSIKAVREPLLNVVCLRGASAGNVISLWKRIRGGRIRVCEWSSNCTRGSSRSDXVRAWIRRYSGVE

SEQ ID NO: 273399 - protein, 47 aa, Zea mays
  Clone ID: MRT4577_180926C.1.pep
MFGRAPDKSDNTGVYEILSLPQYAFQDDLKEDYRKADMMNHLDKGGD

SEQ ID NO: 273400 - protein, 84 aa, Zea mays
  Clone ID: MRT4577_180927C.1.pep
PPEDGLKFFFDGQGFMSLQVARSQTKFPFFNVHGKALFSFPRLSLMEKGPPLQASGFINEELTRGESPSSPGKLRSIYPVPAAV

SEQ ID NO: 273401 - protein, 160 aa, Zea mays
  unsure (1)..(160): unsure at all Xaa locations
  Clone ID: MRT4577_180928C.1.pep
MSDSEEHHFESKAEAAASITYPQNAGTVRNNDFIYIYNRPCKGVQVSTSPTGKHXHAKYLFVAIHIFDGKKLEDIVPSSXDCDIPYVNRTDYQLIDISEDAFVSLLTSDDSTKDDLILPTDETLVVHIKDRFXSDKDLAVTVLSAMKNEQICALKDVHPE

SEQ ID NO: 273402 - protein, 127 aa, Zea mays
  unsure (1)..(127): unsure at all Xaa locations
  Clone ID: MRT4577_180929C.1.pep
GILQSLYSVGFVGIRDKNTSSYSFCHDGRTPDKGFESNEKLLIHPCYWLGLNLNRNALAPEEAEEINDEYDINIISDNSAIRNKTIGQITTHLDQIPIGNEGATEFEXWXLDAXRIVFAXXLQTSSP

SEQ ID NO: 273403 - protein, 127 aa, Zea mays
  unsure (1)..(127): unsure at all Xaa locations
  Clone ID: MRT4577_18092C.1.pep
MARTTNRGARKKQEAQDAAGKSTTPHTKHXGKGTKPGHQNHTPNDATTPDEENKEHGGEDRNTTXKEGPTGTRTQDTKAPHKNPQSNHXADKTGGKRNEDNENPAENKAGTTKKTTLSIEIANDDEL

SEQ ID NO: 273404 - protein, 181 aa, Zea mays
  unsure (1)..(181): unsure at all Xaa locations
  Clone ID: MRT4577_180930C.1.pep
MNIIKLQKMYPQFDQGEIFGLQDAFRKLDVDDNGYLDESTVIKAAQQSEHQPYDVVRQALKEVELDSSRRVELDDYVDLISKLRVSSPAQQRMSTGPTRPRAGTATSVNSPSNPGHASKGSLXGGRIQVQGSSANVTHTINEDERTGVTRHINAVLAXDPDIGEXLPFPTDTXEMFDALKD

SEQ ID NO: 273405 - protein, 148 aa, Zea mays
  unsure (1)..(148): unsure at all Xaa locations
  Clone ID: MRT4577_180931C.1.pep
KLAHQSISAXKVLFDHLYAPRLSGAGLHRLLADDVVFAALKDSAAMGYLAPEYATTGRSTDKQGDVYAFGVVVLQVLAGRRAVSPPHLQQGGGGGGRLDDLVDPRLRGRFSRAEAAKLAGVALLCTAEAPAQRPTMTAVLQQLGTSSQ

SEQ ID NO: 273406 - protein, 70 aa, Zea mays
  unsure (1)..(70): unsure at all Xaa locations
  Clone ID: MRT4577_180932C.1.pep
LPXXKKKKQNPPPKKKKKKKKKKKKKKKKKKKKKKKKKKKKKKKKKKKKKKIKKKKKKKKKKYSALLPLL

SEQ ID NO: 273407 - protein, 100 aa, Zea mays
  Clone ID: MRT4577_180933C.1.pep
ISEVEKARKAGTQGQQLLPLPSQDPRGGSKPQGSREELRHKSLGLDLLTGSGRGIGRRKSRDPNARFRDSETGRYVLVQNRGGYRELLEEEGGGGGRRGR

SEQ ID NO: 273408 - protein, 269 aa, Zea mays
  unsure (1)..(269): unsure at all Xaa locations
  Clone ID: MRT4577_180934C.1.pep
PHECASQCSSPPRAPPLPRLSGALRWPRIGASRVSSSLSPFPVLTMAVAPASPAGIWSVPRAPMAPGSARAQLQLDPFLRALCSSGAVASSSPRSVAMPELPQARRAPAFHGRRSPSPDLVPVRRPPLLLAPARRSCPSARPPSILLGRSQASSPSGGFSLPSTILAARALVRARPYRAPSASLPCPCLSVVARSRPARPLLCPRCCAHARQCPQLARSEFSWRALXRLVVDPRRCHRIVDPFLSHVGSSMSXCRRSSSRHSSSSSLAI

SEQ ID NO: 273409 - protein, 60 aa, Zea mays
  Clone ID: MRT4577_180935C.1.pep
TSFFFIFFFFFFFFFFFFNMKHTMNVCLQLESTSGKFRNSSTIQIKQTSYRQNCRTLVDR

SEQ ID NO: 273410 - protein, 45 aa, Zea mays
  Clone ID: MRT4577_180936C.1.pep
FQTFFILSFERYMFIILSKIILKRILEAYLDLFHRNCEESKEFKK

SEQ ID NO: 273411 - protein, 72 aa, Zea mays
  Clone ID: MRT4577_180937C.1.pep
FPFFKPRGTLKGGGGFLFPGSLGPSKPFGLHGGGFFLRPGLVFPPPCPPVFNFPTRVGSFWGFWVFKTGGGI

SEQ ID NO: 273412 - protein, 49 aa, Zea mays
  Clone ID: MRT4577_180938C.1.pep
LTFFFLSNSLHFTLYYSFYLYKSSFNNSFFIYSHPFNFTFTYYYFTFLH

SEQ ID NO: 273413 - protein, 184 aa, Zea mays
  Clone ID: MRT4577_180939C.1.pep
DEQSAARRREGREASAEQGAPASWRTEAAECLGLREKKGLRAAPEREDLGTPAGKLHDAGAGARPASQELRGWMLLPASRERVSPASSEGRRAEGAPAKKKQGRCRGEAPRARGAREGRSRLASTRPGISELRLSLGVREKLVVRRQYHDRTPSEQRRERNREVRRASAGRDEQRPWQKRETEE

SEQ ID NO: 273414 - protein, 38 aa, Zea mays
  Clone ID: MRT4577_18093C.1.pep
IRLGSNTTRVGNQCTIRTFLSKGTNVRAQSLMPKIKKQ

SEQ ID NO: 273415 - protein, 73 aa, Zea mays
  Clone ID: MRT4577_180940C.1.pep
PCGSLGSFMPQGPAQGGASLLGVRSVPVMGSFFPPRRFLWYTCVGGGDYPFFFLSPGILRGGSFFYIELPFRI

SEQ ID NO: 273416 - protein, 209 aa, Zea mays
  unsure (1)..(209): unsure at all Xaa locations
  Clone ID: MRT4577_180941C.1.pep
GNGKAEIRAARRLDWGGKSELEEQGAGDWNRAQAIKRCPQQAGKSTASREPAGVGAGEGLSKRRRDFWNSATRRASARETESERXRAGMSEQNRQPRLRESGSIVCGTGRAGNCAHGAENQARLCAASEMSSQRLGAGKEEKQAPXQGAPASWRTEAAECLGLREKKGLRAAREREDLGKPAGKLHDAGAGARPASRLAMEEQPTRWRS

SEQ ID NO: 273417 - protein, 138 aa, Zea mays
  Clone ID: MRT4577_180942C.1.pep
KDGKREEGNGPKGLATIALTIGVGTLPVCTTPAEQDAPPQGIIAMSHTLGYPNVGRVNRCRPHLYKGHMYKQGKLLSRQLKVCSSPSFFPVPLFIKFYFSDIYIRCSSILHAIFFLFFVYLILFSPFFFFSFFFFFFS

SEQ ID NO: 273418 - protein, 111 aa, Zea mays
  unsure (1)..(111): unsure at all Xaa locations
  Clone ID: MRT4577_180943C.1.pep
MGDGRGGGSNRPAWLQQYELVGKIGEGTYGLVFLARLKPTHPQAAGRRGSPIAIKKFKQSKEGDGVSSTAIREIMLLREINHHNVXKLVNVHIDHADMSLYLAFDYCRRRP

SEQ ID NO: 273419 - protein, 139 aa, Zea mays
  unsure (1)..(139): unsure at all Xaa locations
  Clone ID: MRT4577_180944C.1.pep
ILLTRNHXKGXRGILRKRTPAYPPQEERDRWTTANQPNSKEATADAKQAKAEPLDPHKAAPDKEPKTDETKKEAPKPKATEKAAEEETAPKPKPKNPDEGAHPSKTTPEEGQKRHDNTKTNNREAGTKEPKGTHDPRGA

SEQ ID NO: 273420 - protein, 114 aa, Zea mays
  Clone ID: MRT4577_180945C.1.pep
PLFRGRTSKRSRRGRGPRLAKRTRRGPKGSPRSSARRADKRGHPPMHGRLPPPKGYGPLCPGWVCPEVEGAVHSNWGAQLRLIMPAGFPGGAPHGPRGAAHSILMGAQGIFPRG

SEQ ID NO: 273421 - protein, 67 aa, Zea mays
  Clone ID: MRT4577_180946C.1.pep
PPPPPPRTIKGRSILALVTLPSKKNPSKTTSTYPYDSAHRGGRCSGRAGVRSRRPRRPMLGPGPWAS

SEQ ID NO: 273422 - protein, 114 aa, Zea mays
  Clone ID: MRT4577_180947C.1.pep
VLTATAKELAAQPDVNGFLLGVVSFKPEFIEYHQILPRVRSAQNVPSFLPRSGVELRSGLGYFFVYPPMAYVWYCLSKEFVWFFSSPELFVGSWTSCVLLAKNVCPSTYALIHE

SEQ ID NO: 273423 - protein, 126 aa, Zea mays
  Clone ID: MRT4577_180948C.1.pep
PQRHQGGNGAPQGRQVWSPPHVGWRGGGPPGPQRAGPETHGQDPPEGEAPPGGRPVGPKPVIWRTPRPQCHPHGGRRGGFGPVGGAPKGVGPGQRAPSCLNKGQCALSRGKKGINKRGRGQQGVPR

SEQ ID NO: 273424 - protein, 122 aa, Zea mays
  unsure (1)..(122): unsure at all Xaa locations
  Clone ID: MRT4577_180949C.1.pep
KKRAKRGHQFSDEWKRRPATNPSTSPAASPRTMVFPNELKDLMYAPPQEGEKAQLDSATEGITDYAQYQLGDLVDVHLPEVGISESQENTFXSVESVNAATDIYSPGTAEVVQANHKLSDLP

SEQ ID NO: 273425 - protein, 134 aa, Zea mays
  unsure (1)..(134): unsure at all Xaa locations
  Clone ID: MRT4577_18094C.1.pep
SVLLTYYWWMMMPFTXRSRALENKNAVDFDGEKNNVVHXDIPFEQEKVNTVDGANXFSLLCIELARRHXLHLVVTGIIWLLLHIFLYSRIVFQTDIFRSINWISWGNTMRTLDEAYRISRGQTLIALCGTVSGS

SEQ ID NO: 273426 - protein, 61 aa, Zea mays
  Clone ID: MRT4577_180950C.1.pep
FCHCLIDIFAIQSERIYPKVSLSNLPTPSILPFLGYSESYYNTLDTLSSIRISFAMILSSP

SEQ ID NO: 273427 - protein, 62 aa, Zea mays
  Clone ID: MRT4577_180951C.1.pep
IYLFFFFFFLYSNKRLACHRHKFIFACVYSYIYTLAKLAKTDRGMAGNKINKLKNGQTLFWK

SEQ ID NO: 273428 - protein, 44 aa, Zea mays
  Clone ID: MRT4577_180952C.1.pep
KKKKKKKKKKKKKNKKKQKKRKNKRKKKKKKKKKNKKKIKKQKK

SEQ ID NO: 273429 - protein, 43 aa, Zea mays
  Clone ID: MRT4577_180953C.1.pep
QSAQGIRFYINRSSRPNLAYVRINGHCVIQILGLCDVVMEREQ

SEQ ID NO: 273430 - protein, 94 aa, Zea mays
  Clone ID: MRT4577_180954C.1.pep
SGKISLTSHHLPSASPHLWSGSVSGSGGGNLNPWECSPKCGSRCSKTQYRKACLTLCNKCCAKCLCVPPGFYGNKGACPCYNNWKTKEGGPKCP

SEQ ID NO: 273431 - protein, 114 aa, Zea mays
  Clone ID: MRT4577_180955C.1.pep
MVTKVICFLVLASLLLAVAFPVSALRQQVKKGGGGEGGGGGSVSGSGGGNLNPWECSPKCGSRCSKTQYRKACLTLCNKCCAKCLCVPPGFYGNKGACPCYNNWKTKEGGPKCP

SEQ ID NO: 273432 - protein, 100 aa, Zea mays
  Clone ID: MRT4577_180956C.1.pep
SDDLLLDQSALRQQVKKGGGGEGGGGGSVSGSGGGNLNPWECSPKCGSRCSKTQYRKACLTLCNKCCAKCLCVPPGFYGNKGACPCYNNWKTKEGGPKCP

SEQ ID NO: 273433 - protein, 148 aa, Zea mays
  unsure (1)..(148): unsure at all Xaa locations
  Clone ID: MRT4577_180957C.1.pep
LGAGCPSLLPLSSPRLGSLSLRFPVAAGSVGAAALALPRVAGSALPSLPPWVRAPPGLSRALACCPAAVLVAPSPAVRCAAVSCPGCVPGACVVPLLLLGFVSVLLLRGPAAAAWSPCRRRXFPWLSGPCARGGAGRRRLLWXSCWRR

SEQ ID NO: 273434 - protein, 117 aa, Zea mays
  Clone ID: MRT4577_180958C.1.pep
NTTTGYDLKKRCPPPGKARGPGAVPLPKKRKGGATHPPTHTGRKIQPKINNEKRWTARERDKPGDRFYFFFQGGPPLPPVSLGVLHLTVRGRGLAPQSLRPWRMGPKSLPWLMPINT

SEQ ID NO: 273435 - protein, 88 aa, Zea mays
  Clone ID: MRT4577_180959C.1.pep
DNANHLRVLMRCLFPAGNDHLCVWRLIRLFGVGLVCSLTDNSMLVATNSFGGRLFWSPPAIFRLPPLYEFLMSCLLRHKLVFFIGAYS

SEQ ID NO: 273436 - protein, 102 aa, Zea mays
  Clone ID: MRT4577_18095C.1.pep
EVQVSILLSLRPDHTRVADDAATGAFVLWRCEKLMWQYLVVGPIFFLASLRTSSTFHDYHRVRTRFIGAMVYHTQHLLSSTLLSLYAVCLLGDSLRPTLYAI

SEQ ID NO: 273437 - protein, 42 aa, Zea mays
  unsure (1)..(42): unsure at all Xaa locations
  Clone ID: MRT4577_180960C.1.pep
YIARVGLWELYDFRQLGTTFIDCCLLLWSVNRFFSNIIRLXS

SEQ ID NO: 273438 - protein, 131 aa, Zea mays
  Clone ID: MRT4577_180961C.1.pep
SLRAARVQASANGAPGTSAASRRRATPGRMSPAVARGAVMDLVLAAGTGMDLGGGGGGGTDGSSRRVTGEGPPRRWRRARMSAAACWQSSNKAGRGSARRGRASPRHAHKQKRRQQASPADRRSYSNPRVR

SEQ ID NO: 273439 - protein, 50 aa, Zea mays
  Clone ID: MRT4577_180962C.1.pep
SVRTRSTPYPHLSLPTRVYDRRSASKKLIELLMRRLNCFCSGLLYWDYVI

SEQ ID NO: 273440 - protein, 60 aa, Zea mays
  unsure (1)..(60): unsure at all Xaa locations
  Clone ID: MRT4577_180963C.1.pep
XKKKKKKKKKNKKKXKKKKKKKKKKKKKKKKKKKGGGRFKEPKFTSPAFQVKIFFMGPPK

SEQ ID NO: 273441 - protein, 184 aa, Zea mays
  unsure (1)..(184): unsure at all Xaa locations
  Clone ID: MRT4577_180964C.1.pep
KXWXSVYNAXRPMKQRYHYNVADARLHQHIEXGTGFTSQVYELSPIFLHKDWIMEQWXENNYYISAIAGAMNGSSLVVMSKGTPYTQQSYKVSESFPYKWINKKWKEGFHVTSMTTAGSRWGVVMSRNSGYSEQVVELDFLYPSEGIHRRWENGYRITSTAATGDQAAFILSIPKRKLMDETQE

SEQ ID NO: 273442 - protein, 52 aa, Zea mays
  Clone ID: MRT4577_180965C.1.pep
RISKEQRIHVHCIHRQYVALRYQLTILTYDLTSDAYTSAFVQQSLNQDLRVG

SEQ ID NO: 273443 - protein, 150 aa, Zea mays
  unsure (1)..(150): unsure at all Xaa locations
  Clone ID: MRT4577_180966C.1.pep
WXCRLGVXXXASXXXPFLXFCXWWXLFXWXXPXXXXVVXXXVAPXPXAXLXSLAXCFCXLVRSRXWFAXXVVPGSSVXPXLXGXPSLAXWXPCXCCSPPPFFXXXFLVXLLXGLXXLPWXXSXXFXCXXVXFXLCPPRGGAFFFFXPPPP

SEQ ID NO: 273444 - protein, 136 aa, Zea mays
  unsure (1)..(136): unsure at all Xaa locations
  Clone ID: MRT4577_180967C.1.pep
SYHLRTCRRHGCYGPGPARAILLLLLTEPAAANAAAAPGDMSINTYNEEHRARRLERTEPDVRAMYNSXWLXEHGRAYNSLGNGEGNRDRHFLVCWDNLRLVDTHNERTGSRGFRLCMNQFADLTNDXFRAAYLSA

SEQ ID NO: 273445 - protein, 473 aa, Zea mays
  unsure (1)..(473): unsure at all Xaa locations
  Clone ID: MRT4577_180968C.1.pep
SGWDDSNXFGQWMTPNMVACIAVEAISILEKLHAKGFVHGDVKPENFLLGQPGSPDEKKLFLIDLGLASRWKESGSSGQHVEYDQKPDIFRGTIRYASVHAHLGRTGSRRDDLESLAYTLIFLLRGRLPWQGYQGENKSFLVCKKKMATSPDLLCCFCPTPFKLFLETVTNMKFDEEPNYSKLISLFDELIEPQHLRPIRIDGALKAGQKRGRLHVNPEEDEQPKKKVRLGSPANQWISVYNARRPMKQRYHYNVADARLHQHIEKGNEDGLFISSVASSANLWALIMDAGTGFTSQVYELSPIFLHKDWIMEQWENNYYISAIAGAMNGSSLVVMSKGTPYTQQSYKVSESFPYKWINKKWKEGFHVTSMTTAGSRWGVVMSRNSGYSEQVVELDFLYPSEGIHRRWENGYRITSTAATGDQAAFILSIPKRKLMDETQETLRTSAFPSNHVKEKWAKNLYIASICYGRTVS

SEQ ID NO: 273446 - protein, 70 aa, Zea mays
  Clone ID: MRT4577_180969C.1.pep
VVRRASTGSSSFILSFFETASGHKQHRTIAGCQRCNTHECTSHGATYGSDATARCVSHSKSSAQPRWMCL

SEQ ID NO: 273447 - protein, 132 aa, Zea mays
  unsure (1)..(132): unsure at all Xaa locations
  Clone ID: MRT4577_18096C.1.pep
LYWERRSSILAVSGAGGKANKALWRARPTGPTNNXVSRSCRAGLQFPVSRVRAVPQKGRYAHGVRTAAPVYLCFELEYLQVEAFXLPATRXRNIKKTRIIPRHVLISIRNEQELKKLLTGVTMLHSGLLSNI

SEQ ID NO: 273448 - protein, 65 aa, Zea mays
  Clone ID: MRT4577_180970C.1.pep
SLPLIVLCLCVGKANERAGGCLAGADQAATADHAACASRCTLTWMKKTAGALKASAAASFPGFPL

SEQ ID NO: 273449 - protein, 68 aa, Zea mays
  Clone ID: MRT4577_180971C.1.pep
GAKILKNTSRVCKKILNRIQGGGFSKKTLKGSSPPLFKKKCYMGNRDQNFFHFNNSFKGISFFKRFQN

SEQ ID NO: 273450 - protein, 89 aa, Zea mays
  Clone ID: MRT4577_180972C.1.pep
KSNRERNESQFTLGCFSTRNFFTSDKQGPGGTTLPSAWPSTSYHHQHQAKAKASSFLQLQSSPQNMIVMGKDVSQFSCVEKKVFSPSCA

SEQ ID NO: 273451 - protein, 86 aa, Zea mays
  Clone ID: MRT4577_180973C.1.pep
AVRLMLGYSRHLKLDISVCWLNIGVSLGLFCAVRRYILCSKIGDQVLVSKFTCGSLAWYYINLEVNGVLTSSVRHVQCRPASVTVT

SEQ ID NO: 273452 - protein, 73 aa, Zea mays
  unsure (1)..(73): unsure at all Xaa locations
  Clone ID: MRT4577_180974C.1.pep
VAGFAANCNTLXTPHLHAKGSSWLSPGTCLLWANFLLPVVRFFACLEPVDSNREPQTRTDTYSSLGLCPPTVR

SEQ ID NO: 273453 - protein, 26 aa, Zea mays
  Clone ID: MRT4577_180975C.1.pep
RSMTNLTICNECCPGSTPLIYMDPWL

SEQ ID NO: 273454 - protein, 150 aa, Zea mays
  unsure (1)..(150): unsure at all Xaa locations
  Clone ID: MRT4577_180976C.1.pep
RTSSAGRQKLLTTARRRSPPASASLEEGGKGPPRKEKKRRLCHTTXRRGTFPADSXDAAYDQLEKLPDQRKDPXLNELPDAEDLPGLVQYYCLHXDRYFPRESLKDDHYRSKRHKRRAKAMPGPAPDTQVDAEPAAGWESLTNGXKLMSM

SEQ ID NO: 273455 - protein, 640 aa, Zea mays
  Clone ID: MRT4577_180977C.1.pep
TCEGLQCGSRLRKTIKQAVEMRNSVCHSATICSNAIMHAGTTVDTFLRENLEWLGRATNWAKFSATAGLGVIHRGHLQQGRALMAPYLPQNGAGGSGSPYSEGGALYALGLIHANHGEGIKEFLRESLRNTTSEVVQHGACLGLGLAALGTSDEEICEDIKNILYTDSAVAGEAAGIGLGLLMVGTASEKATEMLAYAHDTQHEKIIRGLSLGIALTVYGREEEADTLIEQMTRDQDPILRYGGMYALALAYRGTANNKAIHQLLHFAVSDVSDDVRRTAVLALGFVLYNEPEQTPRIVSLLSESYNPHVRYGAALAVGISCAGTGLSEAISLLEPLTSDVVDFVRQGALIAMAMVMIQTNESYDPRVGAFRRQLEKIILDKHEDAMSKMGAILASGILDAGGRNVTIKLKSRSKHDRLTAVVGLAVFTQFWYWYPLTYFISLAFSPTALIGLNSDLKVPKFEFLSNAKPSLFDYPKPVTQQTAAASVKVPAAILSTYAKSKARAKKDAESKAKEKADDSSNASTSMQVDGASAAGAAAEKAPEPEPTFQILTNPARVVPAQEKFIKFLEDSRYKPVKAAPSGFVLLQDLEPTEAEELALTDAPSTAAATTNALASSASEPAAMAVDDEPQPPPAFEYTS

SEQ ID NO: 273456 - protein, 97 aa, Zea mays
  Clone ID: MRT4577_180978C.1.pep
TDNSTCNMQGFEGSLRGRGRKISRKMMSGKRVKGQVPATEMHNWRTIKTILRVPNRSKTPGGFTRQCAEPDYTSRSDLFSRGADQAWGHSPHLSRGP

SEQ ID NO: 273457 - protein, 125 aa, Zea mays
  Clone ID: MRT4577_180979C.1.pep
ASCPGNSTMLELDNTQFLTYPPEITTEQFFVGITACRLNCLSGGSCVASTALSSGFRAWVVAVVVLGVVSALVLCEWALWWFLCRHSPKYGPASAQYALLEYASGAPVQFSYRELQRSTKGFKEK

SEQ ID NO: 273458 - protein, 141 aa, Zea mays
  Clone ID: MRT4577_18097C.1.pep
SLNYYIWNSGFHPYLPPETYLTCRFFSARKHGLVDAAVRSSSTDRTAVVALPGGVGTLDELFEILALIQLERIGSALPVPVLLLNYDSYYSKLLEFLNDCQEWGTVAPGEVASLWKVCDGNHEALEYLAEFYGVPHNEREY

SEQ ID NO: 273459 - protein, 57 aa, Zea mays
  Clone ID: MRT4577_180980C.1.pep
MYTARKKSQRDKGLEPFEFEDSVAHAFFDLENGNQELKSDLKDLYINCAIHLDVAWS

SEQ ID NO: 273460 - protein, 94 aa, Zea mays
  Clone ID: MRT4577_180981C.1.pep
KEFVAKLDLKPGQKVLDVGCGIGAGDFYMAKEFGVYVVGIDLSINMISFALERANGLDCSVEFEVADCTTKTYPDNSFDVIYSNDTILHIKASL

SEQ ID NO: 273461 - protein, 54 aa, Zea mays
  Clone ID: MRT4577_180982C.1.pep
GNKVLVVQPAHTMRGYLQVATISCHLRKQKHSACVHLFPLKVWDKYVYYHFFLI

SEQ ID NO: 273462 - protein, 49 aa, Zea mays
  Clone ID: MRT4577_180983C.1.pep
KARGVPGNQHNALWTQFPVCDKPPATVCSPVMATTQPYSQIHSNAGRVG

SEQ ID NO: 273463 - protein, 164 aa, Zea mays
  Clone ID: MRT4577_180984C.1.pep
FGTSNTKKPASSAALKKTRSPWTCLLLFSSCSSSLQQAAAPRGRCSAARSSTWPTRPAACAPSPGPTRRNRCSCTATAPRHPTRYRRTTTSTSTATSTSTSTSIATSTSTSTATNTSASASTRTAGGTASGTAAATPTTPPAAAASWASTTPASARPCPSSPSS

SEQ ID NO: 273464 - protein, 86 aa, Zea mays
  Clone ID: MRT4577_180985C.1.pep
SSSYHPWASLEHSIFKIPRRPGPPAASSVPRLNCAARVASQEISQPYPRTFHRMRRRRRPIFYSTEEIGYGGLDFLSSRPTRWRWR

SEQ ID NO: 273465 - protein, 104 aa, Zea mays
  Clone ID: MRT4577_180986C.1.pep
KSSDNDSLHNIEEQVQRASYVDSSCFTFHKPHSYNKDFNKIEQACQSQNTPFFWQIHPTASSSLHVMYPCLVRVICMRPPFRARVLNVCARVMRVSPWFTCILS

SEQ ID NO: 273466 - protein, 27 aa, Zea mays
  Clone ID: MRT4577_180987C.1.pep
CTCSDNPSMVVKVRDRQHDVLDGKGQR

SEQ ID NO: 273467 - protein, 83 aa, Zea mays
  Clone ID: MRT4577_180988C.1.pep
SGPVCPFGSEFQKVCWEILVAGSEQGMEAGQVGPRLVTKGEKMTTVAKEWHNGASSNADGKWQPVTVTLDADLSEATSLNDGV

SEQ ID NO: 273468 - protein, 53 aa, Zea mays
  Clone ID: MRT4577_180989C.1.pep
FKINPLLGARRSVFIGMKKYQQDFPRWCGECKPQNRERQSQCVKAVKMAFLRG

SEQ ID NO: 273469 - protein, 41 aa, Zea mays
  unsure (1)..(41): unsure at all Xaa locations
  Clone ID: MRT4577_18098C.1.pep
VQVLQTDATRVSAQLRMLXRDSVGLGTQNNELKIVLQAWSK

SEQ ID NO: 273470 - protein, 187 aa, Zea mays
  Clone ID: MRT4577_180990C.1.pep
SYEMLFEFFNCLESSTRLLRMKGSKATFPNICSSIQNLTERRFTHSHLAQLKYIMPEAIVINKILLRDDTTCCMYPDLQVNLLVGAVENVLKQIGETAYLALRRTFRQTLVEFYREHPEGDDIPEHELPHPFNRARSSLPQDEQRTAPESSSPLKPSDVNGQQQTAAVMSHMSQSFKRRFSQRSPIG

SEQ ID NO: 273471 - protein, 154 aa, Zea mays
  Clone ID: MRT4577_180991C.1.pep
MARPQQRYRGVRQRHWGSWVSEIRHPLLKARIWLGTFETAEDAARAYDEAARIMCGPRARTNFPADANGPPPSFLSAALVDKLHRFNLASVQAAQRQREAAAAAAAAAATSAPATPPTPPATQWGGGGRSLEEQHVEQMIEELLDSDFSMEICC

SEQ ID NO: 273472 - protein, 145 aa, Zea mays
  Clone ID: MRT4577_180992C.1.pep
PLPHLDVARSTQQANRDCRKARIWLGTFETAEDAARAYDEAARIMCGPRARTNFPADANGPPPSFLSAALVDKLHRFNLASVQAAQRQKEAAAAAAAAAATSAPATPPTPPATQWGGGGRSLEEQHVEQMIEELLDSDFSMEICC

SEQ ID NO: 273473 - protein, 630 aa, Zea mays
  Clone ID: MRT4577_180993C.1.pep
FVSNHKEGDLVYVSGKIKKVLANGHYELKEYTIDAIEGEGEHSTMLDRKPHPIYPSKAGLKPSLLGLSISRALKILSPDVDPVPPDVLVEFNLPNLFDAYMGIHKPKDRSEADFARRRLIFDDFFYLQLGRLFQMLEAVGTRVEKEELLYKCKSHELNTVGVDDWSPLTKKLLRALPYWLTPSQLDAVQEIIWDLRRPVPMNRLLQGDVGCGKTIVAFLACMEVVNSGFQAAFMVPTEVLAVQHYEHLTSLLEKFDGDEKPNIALLTGSTSTRESRIIRDGLKTGEIGMVIGTHCLIADKIEFSALRISVIDEQQRFGVVQRGRFNSKLYTSSSKLSGENTSSDEASDSETFMAPHVLAMSATPIPRTLALALYGDMSLTQITDLPPGRQPIKTLALEGNDVGFEAVFQMMRDELIDGGKVYLVYPIIDESEHLPQLRAATAGFDSIKQKFEGYPCGLLHGRMRSDEKEETLNSFRSGETRILLSTQVIEIGVDVPDASMMVVMNAERFGISQLHQLRGRVGRGERKSRCIFLASTSSTLPRLKVLEKSSDGFYLANADLLLRGPGNLLGKKQSGHLPEFPIARLEVDGGILQEAHLAALKVLVASNDLALYPRLKVELSMRQPLCILGD

SEQ ID NO: 273474 - protein, 85 aa, Zea mays
  unsure (1)..(85): unsure at all Xaa locations
  Clone ID: MRT4577_180994C.1.pep
RVHNDDRSGASVLDPALXSSHVXREAPVIAEVIRACMQSDPSQRPSTRXVAPSLRESVGISPVAGCPSLSLLGWAYLQILSARAL

SEQ ID NO: 273475 - protein, 74 aa, Zea mays
  Clone ID: MRT4577_180995C.1.pep
MFPCWSKLPLWFVGALGNEPSPFSNLCFLPKGFLGPNNKKKKKKKKKKKKKKKKKKKKNQKKKKKKVLCVVTTA

SEQ ID NO: 273476 - protein, 205 aa, Zea mays
  unsure (1)..(205): unsure at all Xaa locations
  Clone ID: MRT4577_180996C.1.pep
YLRSIHILLQGLKTGEIGMVIGTHCLIADKTEFSALRISVIDEQQRFGVVQRGRFNSKLYTSSSKLSGENTSSDEASDSETFMAPHVLAMSATPIPRTLALALYGDMSLTQITDLPPGRQPIKTLALEGNDVGFEAVFQMMRDELIDXGKVYLVYPIIDESEHLPQLRAATAGFDSIKQKFEGYPCGLLHGRMRSDEKEETLNSF

SEQ ID NO: 273477 - protein, 71 aa, Zea mays
  unsure (1)..(71): unsure at all Xaa locations
  Clone ID: MRT4577_180997C.1.pep
PLLLAPKAQASPRPDPGRKDYCQGGGVVGGGGHIRVIKXNAGVSLRMSSSENRKSRCGTKGRPRVRGRVGA

SEQ ID NO: 273478 - protein, 49 aa, Zea mays
  Clone ID: MRT4577_180998C.1.pep
TGALNLSELNAVKSSDKSRTIHLSVLIYNDLDSYKYCTSLVYDVGTKTQ

SEQ ID NO: 273479 - protein, 116 aa, Zea mays
  Clone ID: MRT4577_180999C.1.pep
GEVRRAGPRLHARCQLQARPGRVQGAPIGGHAYRQAQGTVWRWLLNKNIGPPDIQTDAGFGLCNVCVYFVPRDGSSPCLSGDSLGARAPGGVAKQVASFDGISCTPPLFGPRQYGP

SEQ ID NO: 273480 - protein, 94 aa, Zea mays
  Clone ID: MRT4577_18099C.1.pep
LLGGRRERKIGGGAAKASFSLVRLVLVVNWSRCSVVRGVVHTAHSPSRVRLDGGWWWQLPRMAGFSLRGGGGGRGGDRGGDHPIGADSLFLYAR

SEQ ID NO: 273481 - protein, 172 aa, Zea mays
  Clone ID: MRT4577_1809C.1.pep
KIGDPIEARYKESTERGSSVDQLVYCINSFREAALSSDQKFGHIDISEKQKVINECSEVENWLRERKQQQDALPKHTDPVLLVSDLKKKAEALDRSCKPIMTKPKPAPKPQTPPPHTPPPQPEAQASDPQTPEQQQSGTGAAGEPGSEGGVQQASGEQMDMDRPDDSADVAA

SEQ ID NO: 273482 - protein, 54 aa, Zea mays
  unsure (1)..(54): unsure at all Xaa locations
  Clone ID: MRT4577_180C.1.pep
NKMGGIYPVISNRSWFLMCSVQAVGLKPSSTGLGFPPKKTKKTPIKKKKKKKLX

SEQ ID NO: 273483 - protein, 70 aa, Zea mays
  Clone ID: MRT4577_181000C.1.pep
VQPKGGKSDVVHLTGAPRMCTASATGAHKWGARRQMMGRKLWAHLHPIGTLDKTREACWQAVNELSHRMG

SEQ ID NO: 273484 - protein, 78 aa, Zea mays
  unsure (1)..(78): unsure at all Xaa locations
  Clone ID: MRT4577_181001C.1.pep
LWGVYFQKKGWGKPFPGYPVKNLKGLSTGCLGKEIFGPFGFPKGREXFLGGVPFLGXXFFXXNLGWPPPPGGFSGLSF

SEQ ID NO: 273485 - protein, 351 aa, Zea mays
  Clone ID: MRT4577_181002C.1.pep
MYVVKRDGRQETVHFDKITARLKKLSYGLSQDHCDPVLVAQKVCAGVYKGVTTSQLDELAAETAAAMTASHPDYASLAARIAVSNLHKNTKKSFSETIKDMYMHFNKRSGLMAPLVAEDVYEIIMKNAARLDSEIIYDRDFDYDYFGFKTLERSYLLKLDGKVVERPQHMLMRVSLGIHKEDIESAIRTYHLMSQRWFTHASPTLFNAGTPRPQLSSCFLICMKDDSIEGIYETLKECAVISKSAGGIGVSVHNIRATGSYIRGTNGSSNGIVPMLRVFNDTARYVDQGGGKRKGAFAVYLEPWHADIFEFLDLRTDHGTEENRARDMTRSRRASRSSATVSNSTTATGCS

SEQ ID NO: 273486 - protein, 268 aa, Zea mays
  unsure (1)..(268): unsure at all Xaa locations
  Clone ID: MRT4577_181003C.1.pep
RRTRDPRKYHYSGAACPDFRKGGCKRGDGCDMAHGVFECWLHPARYRTQPCKDGTACRRRVCFFAHTADQLRVLPPTPQQQSSPRGAACSSPLAESSRASPGTSRAFESYLTKSIMCSSPTSTLLSPPKSPPSESPXLSPDFRRGCWPGAGSPVNDVLASLRQLRLSRANSSPSGGWCGYPASAVAYGSPTGGALYGLSSTPRSTAGSGYMANLDPLDVTFGGDEEPVERVESGRALRAKVFERLSREGAVSGDAGGPDVGWVSDLIN

SEQ ID NO: 273487 - protein, 75 aa, Zea mays
  unsure (1)..(75): unsure at all Xaa locations
  Clone ID: MRT4577_181004C.1.pep
TPTALATATASXYMPNLEPLDVSFGGDEEPVERVESGRALRAKVFERLSREGAGSCYPAAGTGGPDVGWVSDLIN

SEQ ID NO: 273488 - protein, 384 aa, Zea mays
  Clone ID: MRT4577_181005C.1.pep
MMMMGEGVSVPPWSHHVPVSGVDAGVGGDEMTPYLLAALRQYLPCNDAGAAEADDEEAAAMAAGVDGYGCDEFRMYEFKVRRCARARSHDWTECPFAHPGEKARRRDPRRYHYSGAACPDFRKGGCRRGDACDFAHGVFECWLHPARYRTQPCKDGTACRRRVCFFAHTPDQLRVLPPTPQQSSASPRGAGALPESYDGSPLRRQAFESYLTKSIVSSSPTSTLLSPPKTPPSESPPLSPDGAAAAFRRGSWPGAGSPVNDVLASLRQLRLGTASSSPSGGWGGYPASAAAYGSPTAGGLYSLPSTPRATPTALATATASGYMPNLEPLDVSFGGDEEPVERVESGRALRAKVFERLSREGAVSCYPAAGTGGPDVGWVSDLIN

SEQ ID NO: 273489 - protein, 48 aa, Zea mays
  Clone ID: MRT4577_181006C.1.pep
NPTSASTICMFNNNCHHLVKNGTFHHPNYNQLLRIEGELGSEGVRTRG

SEQ ID NO: 273490 - protein, 369 aa, Zea mays
  Clone ID: MRT4577_181007C.1.pep
MMMMSEGVGMPPWSHHVPVSGVDEGDEMTPYLLAALRQYLPCNDAGAEAEAEEDEAAAAMAAGVDGYGCDEFRMYEFKVRRCARARSHDWTECPFAHPGEKARRRDPRKYHYSGAACPDFRKGGCKRGDGCDMAHGVFECWLHPARYRTQPCKDGTACRRRVCFFAHTADQLRVLPPTPQQQSSPRGAACSSPLAESYDGSPLRRQAFESYLTKSIMCSSPTSTLLSPPKSPPSESPPLSPDFRRGCWPGAGSPVNDVLASLRQLRLSRANSSPSGGWCGYPASAVAYGSPTGGALYGLSSTPRATAASGYMANLDPLDVSFGGDEEPVERVESGRALRAKVFERLSREGAVSGDAGGPDVGWVSDIIN

SEQ ID NO: 273491 - protein, 61 aa, Zea mays
  unsure (1)..(61): unsure at all Xaa locations
  Clone ID: MRT4577_181008C.1.pep
FHSAWILDLAVTVGDYLCLSIWVVGYPFGFPERLGHHRIPVVVFXNNDKGSCVYLSDASSA

SEQ ID NO: 273492 - protein, 54 aa, Zea mays
  Clone ID: MRT4577_181009C.1.pep
GPASAQEPAATRPPWSHFLRTGQKRQTQSDQLPASTSITQPGLERTIACPRVLT

SEQ ID NO: 273493 - protein, 66 aa, Zea mays
  Clone ID: MRT4577_18100C.1.pep
MGASLSCFGGSGGGYYADEPGYEQPRRSSRKVRPSDEDGLWYVGERDVDMKASAFIARFHATASSS

SEQ ID NO: 273494 - protein, 119 aa, Zea mays
  Clone ID: MRT4577_181010C.1.pep
AGSPVNDVLASLRQLRLRRANSSPSGGWCGYPASAVAYGSPTGGALYGLSSTPRATAASCYMANLDPLDVSFGGDDEPVERVESGRALRAKVFERLIREGAVSGDAGGPDVGWVSDLIN

SEQ ID NO: 273495 - protein, 44 aa, Zea mays
  Clone ID: MRT4577_181011C.1.pep
TSIYSLLYIRLIKCSFGEYVDIVPSLKTCINGMLYPYLGYKVQV

SEQ ID NO: 273496 - protein, 133 aa, Zea mays
  unsure (1)..(133): unsure at all Xaa locations
  Clone ID: MRT4577_181012C.1.pep
KLSPDFRRGCWPGAGSPVNDVLASLRQLRLSRANSSPSGGWCSYPASAVAYGSPTGGALYGLSSTPRATAGSGYMANLDPLDVTFGGDEEPVERVESGRALRAKVFERLSREGAVSGDARXGPDVGWVSDLIN

SEQ ID NO: 273497 - protein, 308 aa, Zea mays
  Clone ID: MRT4577_181013C.1.pep
MMMMGEGVSVPPWSHHVPVSGVDAGVGGDEMTPYLLAALRQYLPCNDAGAAEADDEEAAAMAAGVDGYGCDEFRMYEFKVRRCARARSHDWTECFFAHTPDQLRVLPPTPQQSSASPRGAGALPESYDGSPLRRQAFETYLTKSIVSSSPTSTLLSPPKTPPSESPPLSPDGAAAAFRRGSWPGAGSPVNDVLASLRQLRLGTASSSPSGGWGGYPASAAAYGSPTAGGLYSLPSTPTALATASGYMPNLEPLDVSFGGDEEPVERVESGRALRAKVFERLSREGAVSCYPAAGTGGPDVGWVSDLIN

SEQ ID NO: 273498 - protein, 44 aa, Zea mays
  Clone ID: MRT4577_181014C.1.pep
EEKKETTSTFVCAKKREQTSLVLDNKFSPLKSTFFFTFVCLYIN

SEQ ID NO: 273499 - protein, 151 aa, Zea mays
  unsure (1)..(151): unsure at all Xaa locations
  Clone ID: MRT4577_181015C.1.pep
MGTALEALLKPDRPLMGGLTTPEGRKAGHALMDVNAHXGPEXLILTTNVWAALLFKLSFNGMLAQTFYFDNDISVIWQAIRSTVSEVVNDAFNVTRIDPQLLNASVDLIGSCLLNDILNLVYIWKCNGXLDKVVMYWKPVINITTTTKIAS

SEQ ID NO: 273500 - protein, 79 aa, Zea mays
  Clone ID: MRT4577_181016C.1.pep
QHMLRFLSVGGAPTGLINVDGFLSYPSPAPAFGFDEDDRARSSGKAVVGWLKIKAAMRWGIFVRRKAAERRAQLVELED

SEQ ID NO: 273501 - protein, 88 aa, Zea mays
  Clone ID: MRT4577_181017C.1.pep
IAYFYYFFYFFLFFFFFFFFFFFFFFFFFFLKTKLPPINLPLQFLFPNKPGLTLPPQTRSRSGTIKGTANQNQKTRPGTKKGSRSRTR

SEQ ID NO: 273502 - protein, 181 aa, Zea mays
  Clone ID: MRT4577_181018C.1.pep
MGGLLLPHHRTFPNSLQASIPGPLSLHKGDRKNLHYFAPDVHLFCSLRQGFPRSSWSAVIRSEASGNAVASPGTVIKRSKEELITFFRDIQTSIAECSRKASKRTRKQPPDLFQEVRRREEQSHGGGDSGTDDVSEGPRKVKSLEDMNVAGLRELARARRMRGYSKLKKGELIDRLRGATT

SEQ ID NO: 273503 - protein, 126 aa, Zea mays
  Clone ID: MRT4577_181019C.1.pep
HASGSWEFGSRGDGTTFVTPSTTARCAGEPGWATYNGTWDTKYSCLSRARILAGGGGQGGAVAAERGGGGRGGPGAPQRGVLRVLTHEPKPPWTDPQRPTHAGGGAVHAAMEQPAVRVRRRLTADR

SEQ ID NO: 273504 - protein, 67 aa, Zea mays
  Clone ID: MRT4577_18101C.1.pep
FNNTTFKQIILNINSTPFIISTTLQLTFPLNKPYISISLFKPLISTFDTNTKKTTNFIIYNHNPSKF

SEQ ID NO: 273505 - protein, 133 aa, Zea mays
  unsure (1)..(133): unsure at all Xaa locations
  Clone ID: MRT4577_181020C.1.pep
KDYVHVSIQQFNARNSLTTVQGIKKEFSXYILFLKDLKKEFCFNGTVVQDPXLDQVIQLXGDQGXNVATFLVHXGFLNKEDIXLHGFLETCKSLYPILCAYHILGSFKHRQFLVTAYIYSFISSIGYCQVCLP

SEQ ID NO: 273506 - protein, 56 aa, Zea mays
  Clone ID: MRT4577_181021C.1.pep
MGNPWIYLYPEGLKDILMIMKNKYGNPPIYITENGKYDGSDGHVAPYFMHCYGFYI

SEQ ID NO: 273507 - protein, 59 aa, Zea mays
  unsure (1)..(59): unsure at all Xaa locations
  Clone ID: MRT4577_181022C.1.pep
MFFFYKGAPPFVFSLGEKKIWPFFKKKKKKKKKKKKKKKKKKKKKKKKKKXKKKXKKXK

SEQ ID NO: 273508 - protein, 48 aa, Zea mays
  Clone ID: MRT4577_181023C.1.pep
FLCSLFFFFFFFFFLPSRIYNYCYCYILFGDQLEHGCCCIILIGSEAS

SEQ ID NO: 273509 - protein, 138 aa, Zea mays
  unsure (1)..(138): unsure at all Xaa locations
  Clone ID: MRT4577_181024C.1.pep
RGSGSQTNGGGGPVLVGALSPGPGGPPPPCRGPFPLAAPAPPPXLAPPGATSGGRDPPPAGLLIPPGXLAAPRRPLPGWCPIXPPHRGLLPSKPPAPAVGPGXIRXGLPSAPTPLCPPPILPETWVLSAPPSLAPPRG

SEQ ID NO: 273510 - protein, 168 aa, Zea mays
  Clone ID: MRT4577_181025C.1.pep
MVDLDEPLDAAVTAEKGKAALQRLLEADPALFLSPSADLAAAARAASQHIYSSLVPLYPAQPPPLPTLLTDPAFDAEQIWSQIELLARPLLPQLGRQLRRIVQQPSSQQPPLKMPAVAEGEQLEEDGESSDSKELKNAEELEGTEDGEELEGTDDEEEMGDKEEEERN

SEQ ID NO: 273511 - protein, 93 aa, Zea mays
  Clone ID: MRT4577_181026C.1.pep
STGMSRSHPTLKRPFPFPLDSGPKDRAPPDLRHLRGPKAFTAGRSKENGTLSRPVTGKKDIDERRGNFGGKREEDPLTEVTETDQYMAKDYRG

SEQ ID NO: 273512 - protein, 145 aa, Zea mays
  Clone ID: MRT4577_181027C.1.pep
LEAGRAFSLLSPDARPKLPRSSRRAAPARSRPRPGAKHPTRAQAPCSPCPCRDQAHRPDALSRAVATPTTRPSTTQRSRAHRATTPPPTEAISAPLKPVERPPRDPARRLHDPMSTEPRSRIDDRDRSSVLMGLMEFYATVTSLH

SEQ ID NO: 273513 - protein, 179 aa, Zea mays
  Clone ID: MRT4577_181028C.1.pep
MGLTLKKPEGVAGSTAPAIIVGLFVAFGGILFGYDTGTIGGILGMKHWREVFSTGYVNPKDNLPDVTADQTSLIGSILSAGTFFGALTAAPTGDFLGRRLGLVASNIGFCLGGILQTGATDIPLFGAGRFFAGYRVGMISGTIPLYQSETGPKWIRGTIVGCYQLAITIGLLVAGIGDN

SEQ ID NO: 273514 - protein, 90 aa, Zea mays
  Clone ID: MRT4577_181029C.1.pep
RFSESIASKRWERTQALNDPKIHHYLHVPFERHARSKPEKKTDIISPTANQSDCSKGEAGRLGVDPPSRIWPPVKAAPSGALIEEQPTRG

SEQ ID NO: 273515 - protein, 42 aa, Zea mays
  Clone ID: MRT4577_18102C.1.pep
HTYDSSLCTAQEWRMRQDVMLLKRNYTPFLRENNTLQRLKQR

SEQ ID NO: 273516 - protein, 51 aa, Zea mays
  Clone ID: MRT4577_181030C.1.pep
TLDASAWLQFYLGVSLQTTQSNRHIIASMVILHSQLYRYWNKHASLENSII

SEQ ID NO: 273517 - protein, 39 aa, Zea mays
  Clone ID: MRT4577_181031C.1.pep
RGDPNRPQNARLTASQHWMGLRTLSTGIGWHPRETYSNV

SEQ ID NO: 273518 - protein, 76 aa, Zea mays
  Clone ID: MRT4577_181032C.1.pep
KDIFGRAIKRYIQKPDKKQLLLCLLDWMIGQGYSVDSSSRNLLLKNAQLFGEKQVIAEILSKQQIASRTIGLRHKK

SEQ ID NO: 273519 - protein, 58 aa, Zea mays
  Clone ID: MRT4577_181033C.1.pep
CACNKDEKLTVNYLLDHSHEIDEQHQSTFGGWRKPLQMLNNKCRSYPMLLTIYDFHIY

SEQ ID NO: 273520 - protein, 187 aa, Zea mays
  Clone ID: MRT4577_181034C.1.pep
MHAKGHQLNEELCSHVMVQLGKAGFPSEAFSVYNMLRYSKRTVHKSLHEKVLGILVPAELLKAAYIVVKDNADLISPSSLEKFAKSFMVSGNINLINDVMKALNRSGWRISQRLFGRAIKRYIQKPDKKQLLLCLLDWMIGQGYSVDSSSRNLLLKNAQLFGEKQVIAEILSKQQIASRTIGLRHKK

SEQ ID NO: 273521 - protein, 174 aa, Zea mays
  Clone ID: MRT4577_181035C.1.pep
REVSIRSTAPEPFSFVIPPKCTVRHDVPAVVFSTGGCGTNFFHAMTDLIVPLYITAREHNGHVQLLVADYQPEWVAKFRPILTALSIYPVIDFDADTAVRCFPSAHVGLESHRILGINPALSRNSYTMMGFRDFLRDVFSLRRPWATPVSRSSGQKPRLVFVLRRHSREVTNEV

SEQ ID NO: 273522 - protein, 104 aa, Zea mays
  unsure (1)..(104): unsure at all Xaa locations
  Clone ID: MRT4577_181036C.1.pep
GCMGLDNQTLYDICFRTVKVTTASCGDLNHLSSVSRSGVTCWLRIAGEMNSQLKMLDAIXLNPFPRLHWFMVGFVAVTCGGSXEYRGLRERECHAXMWDDKNMM

SEQ ID NO: 273523 - protein, 83 aa, Zea mays
  Clone ID: MRT4577_181037C.1.pep
IRRSQGTITCKYNPPWGRVPSCQCPSSPGWWPPDRDLSCLTASSTWLQVKPVRVPSMYNNCVSKLRHSIALGSAKLQLYRCVY

SEQ ID NO: 273524 - protein, 83 aa, Zea mays
  Clone ID: MRT4577_181038C.1.pep
HCVSRQRGGGRGVTRWSCMQSTAFYVRLDPGSGCLPGDICSIGASVIIELVWSGATTTSTIQPVSWREPCSLSNTRTGRAVLP

SEQ ID NO: 273525 - protein, 401 aa, Zea mays
  unsure (1)..(401): unsure at all Xaa locations
  Clone ID: MRT4577_181039C.1.pep
MEEQLGPVAVTHLLQHTLRSLCTGDAPQWVYAVFWRILPRNYPPPKWDLPGAAYDRTRGNRRNWILAWEDGFCNFAAASSSAAASACGQXGSGSCGGCICRGXEAAVQDAVKHQHQQAQGLQPELFFKMSHDIYNYGEGLIGKVAADHSHKWVFKEPQEHETSSLISSWSNPADSHPRTWEAQFQCGIQTIALIAVREGVVQLGSMKKVTEDLSYVVMLRRKFGYLESIPGVLLPHPSSAGVXGRWVRGAPAGHRRGVVVGPXHRRPPAPGRRWSSTTPTAPARWPPGQAPPPPLXSMHIMPSMSSLEALLSKLPSVVPPAPQPAGSVPGAAPPSKDDDYDDVQQCHGMDDVAASNGAAGFVESASPSPSPSPSGAASAPMSSSSYFVNVGSSINPGDHGF

SEQ ID NO: 273526 - protein, 44 aa, Zea mays
  Clone ID: MRT4577_18103C.1.pep
VLDQSVVEKTVKPCLVELSEDPDVDVRYYANQALQACDQMMVSS

SEQ ID NO: 273527 - protein, 299 aa, Zea mays
  unsure (1)..(299): unsure at all Xaa locations
  Clone ID: MRT4577_181040C.1.pep
MQMSTDPNHYGVFPHSFCNQHVVSFQTSSVTSVSGAIPVCLDTSSGMNGNMAMLNTTTSTIVSTGSPNMSAESSCPNLKYTAPLAVEWSYPELQLLNDGLNKYANEPGIMKYIKIAATLPDKTVRDVAMRCQWMAARKEATRRRKPEEHYLGKKIKDRKDKMAEPSSWGTNPPVQTEMRSSSSMPPNAKHNGFLSADSQIDHGMLNVLEENAKLLNQIEVNIXITDNTFQAHNNIELFHHARRNINGLLQSMSQIPGIMSKMPPLPISVDERLASYILPRAPTAQVLGSSHLKEERRVW

SEQ ID NO: 273528 - protein, 319 aa, Zea mays
  unsure (1)..(319): unsure at all Xaa locations
  Clone ID: MRT4577_181041C.1.pep
MEEQLGPVAVTHLLQHTLRSLCTGDAPQWVYAVFWRILPRNYPPPKWDLPGAAYDRTRGNRRNWYALLTAHTARSHIPSSFLCGSVHVFGGVPCECPRCVLARLAXILAWEDGFCNFAAASSSAAASACGQXGSGSCGGCICRGXEAAVQDAVKHQHQQAQGLQPELFFKMSHDIYNYGEGXWLTSPHAHHDXEPVNLPLLLMMAPGPSSSSSCSWCGFLSCCSLIGKVAADHSHKWVFKEPQEHETSNLISSWSNPADSVRSSSISVYLLHKLNCTVVYLKPLISCVSHAHMACVLSQHPRTWEAQFQCGIQVHTFRP

SEQ ID NO: 273529 - protein, 294 aa, Zea mays
  unsure (1)..(294): unsure at all Xaa locations
  Clone ID: MRT4577_181042C.1.pep
MQMSTDPNHYGVFPHSFCNQHVVISKTSSVTSGSGAIPVCLDTSSGMNGDMAMLNTTSSTIVSTGSPNMVADSSCQNLKYSAPLAVEWSYPELQLLNDGLNKYANEPGIMKYIKIAATLPDKTVRDVAMRCQWMAARKEATRRRKPEERYLGKKIKDRKDKMAQPSSWGTNPPVQAEMRSSSFMPRNAKXMDFSXDSQIDHEMLNILEENARLLNQIEVNILTSQAHNNINLFHHIRRNINGLLQSMCQIPGIMSKMPPLPVSVDERLASYILPRAHTAQVLGSSHLKEEPRVW

SEQ ID NO: 273530 - protein, 218 aa, Zea mays
  Clone ID: MRT4577_181043C.1.pep
MAFTPATACCKASLALAPRASPRGPAACAQAALLCTPSTSVFRGLRAPASAAPAPRRRRSAASTGIVCGKVAKGSVPPNFTLKDQNGKPVSLNKFKGKPVVVYFYPADETPGCTKQACAFRDSYEKFKKAGAEVIGISGDDAASHKAFAQKYRLPFTLLSDEGNRVRKEWGVPSDLFGTLPGRQTYVLDKQGVVQYVYNNQFQPEKHIGETLKILQTL

SEQ ID NO: 273531 - protein, 74 aa, Zea mays
  unsure (1)..(74): unsure at all Xaa locations
  Clone ID: MRT4577_181044C.1.pep
GLVGFVDPAVHEPARVASYHHFQHVAQDPVLRVELXHVTAPHLGGLHLLLLFFVLPVRATRRWPQRPGPRERVG

SEQ ID NO: 273532 - protein, 63 aa, Zea mays
  Clone ID: MRT4577_181045C.1.pep
VSHMLIAWDRARVPQGRVGLYQDSHFMCSSCSDHNAAPGWVCSPPVLGTSRRCNSQHKAFWAE

SEQ ID NO: 273533 - protein, 116 aa, Zea mays
  Clone ID: MRT4577_181046C.1.pep
PILVSPIFGLGAPKNPPLGFPPPPPPGVFGDIQAGAPNVQNLGGLLNPTPNSPFFPRFFQNPPFFPPPGFGGFKITQKPPVLLFVGGVFPRFFFGFIGAPGLNPSFFFNPGGGLPP

SEQ ID NO: 273534 - protein, 181 aa, Zea mays
  Clone ID: MRT4577_181047C.1.pep
MTGAAPALLHHHGVSSRGTLPVYHGNCRFVPGSCFLSKSTILGPLTVSLVCGASPNNHRPRNPDISQQQKRGSSSRGKSKPFQERDDSENNDEFDSDTVSSKNGPPMSLTSNSRPHATSAPGEREKEIVELFKRVQAQLRARGKGREDKKPEPAKSQGEKGSVDSLLNLLRRHSVDQKRKS

SEQ ID NO: 273535 - protein, 104 aa, Zea mays
  unsure (1)..(104): unsure at all Xaa locations
  Clone ID: MRT4577_181048C.1.pep
MAAAEAIARGALSRSRVVARGLVHAAQVVGLAVFLRAFAEFPWTAAAAPPILRAAASFLAPPRLYFLAANVIVVALATLFRRDAASSSPPGSSGGDAQXPFLLF

SEQ ID NO: 273536 - protein, 76 aa, Zea mays
  Clone ID: MRT4577_181049C.1.pep
GEGWCLIDRTPGVAAQPAGCAKRGRRVTEGPPPPPGGGGSTTPTALCKGKGNMAEDKANLALKKQARAAAKGEGNA

SEQ ID NO: 273537 - protein, 39 aa, Zea mays
  Clone ID: MRT4577_18104C.1.pep
LQSMCYYSARKTMLKLSSLVDVDSELLKTFDSPRHRAHR

SEQ ID NO: 273538 - protein, 186 aa, Zea mays
  unsure (1)..(186): unsure at all Xaa locations
  Clone ID: MRT4577_181050C.1.pep
MAAVPELLEQQEEDRSKLRSVSVDLNVDPSLQIDIPDALSERDKVKFTVHTKTTLSTFQSPEFSVTRQHEDFVWLHDTLTETTDYAGLIIPPAPTKPDFDGPREKMQKLGEGEGSMTKEEFAKMKQELEAEYLAVFKKTVSTHEVFLQRXSSHPVLSRDRNFHVFLEYDQDLSVRRTDTKEMFGGF

SEQ ID NO: 273539 - protein, 83 aa, Zea mays
  unsure (1)..(83): unsure at all Xaa locations
  Clone ID: MRT4577_181051C.1.pep
DIILKLDXDKIHMIYAVDHKGNTAGVITLRDILSQLVHEPHHYLGDLSVGEVPLLCTQHRMTHLKSPITLMYMRKCTSRAILL

SEQ ID NO: 273540 - protein, 59 aa, Zea mays
  Clone ID: MRT4577_181052C.1.pep
SAACGAAIAGQNQLLIVVPTLTMLGAMKAPLVSATRWHALLKKKSYSLTGQLRAFIKKI

SEQ ID NO: 273541 - protein, 87 aa, Zea mays
  Clone ID: MRT4577_181053C.1.pep
GTLGAAGIAGCSLPVMSHPPMPVRRSVVMTTTGARALAALLLVTVTADVAVVDDGSTLADIEKCFRSAGYILYERVLVRLLCLGRCS

SEQ ID NO: 273542 - protein, 115 aa, Zea mays
  Clone ID: MRT4577_181054C.1.pep
MLYSVWDANSRMCDNMVMKRSYGQRLRQKVKLSIVLKEQMDYLDHWAALQTEHSSSLSSATEIIKVSTLRLPVSGGAKADVLTVNNADSSAVDIIAGGGGTAFAICYHSYRVHFL

SEQ ID NO: 273543 - protein, 194 aa, Zea mays
  unsure (1)..(194): unsure at all Xaa locations
  Clone ID: MRT4577_181055C.1.pep
PPQFPGGGPPRGSFPRAAVLPRRGRGPFHFQGGAKSTQTGDQKGXDLVHPPDLVVXDPVVSPKRAFWVWEXALAXKPWFCKVVPGPRPPWRAETGGGGVSGSGALPQGRDGAKGSGGGENPAPVGRGGGHKGFLDKRGGGYGGNLGWYSPQPFLKKAGWPPPPPRWTRLKFGGGRGPHRICYFYAQKADGPRFF

SEQ ID NO: 273544 - protein, 48 aa, Zea mays
  Clone ID: MRT4577_181056C.1.pep
FGEGCTPGRTRPDFPGRTMPSATQSPEIEQDDAATGVQPTCNLLRWSL

SEQ ID NO: 273545 - protein, 72 aa, Zea mays
  Clone ID: MRT4577_181057C.1.pep
KENKHDISLYKRTLLYHRPCSFMHCIAYAHCACLPTKFRHTHPILYGLVIVSTPSRHPSMLAIIFVFHIIYK

SEQ ID NO: 273546 - protein, 53 aa, Zea mays
  unsure (1)..(53): unsure at all Xaa locations
  Clone ID: MRT4577_181058C.1.pep
IKHIVGTCVHAKNMVSSRWMIYRYMLVXEPPPPPPCSMYLIGLCLLLTPIRMQ

SEQ ID NO: 273547 - protein, 84 aa, Zea mays
  Clone ID: MRT4577_181059C.1.pep
PAGPESERREGIRSIQAKPRQRRRRRGGRRSIGSMSLYLRLFICLMPTCAVCSCLNSVVFCYRTHPMHHLSPRRNNHSNNKFRD

SEQ ID NO: 273548 - protein, 84 aa, Zea mays
  unsure (1)..(84): unsure at all Xaa locations
  Clone ID: MRT4577_18105C.1.pep
VPNTLDELVRPCVHNILVSIEPLAIDEDYYARVEXTXIISNLNRAPGLATIIAAMRLHIDHIDEDGINNNVYGSQCGSLCFGYP

SEQ ID NO: 273549 - protein, 73 aa, Zea mays
  unsure (1)..(73): unsure at all Xaa locations
  Clone ID: MRT4577_181060C.1.pep
HRRFLVNTNKKKGKSLKCTSRPSCQAYSPKEQPCIPDGIELKCSVWESDIVAFSTRCSLHVGNSVLYLIPNQX

SEQ ID NO: 273550 - protein, 76 aa, Zea mays
  Clone ID: MRT4577_181061C.1.pep
ASHPWSGRRAASSLGTITVQLYVDLLSHKVHHQSHSAEASNLSEVAVSEAEEAVAAPLIAKLEENVSAAVTDTAIY

SEQ ID NO: 273551 - protein, 58 aa, Zea mays
  Clone ID: MRT4577_181062C.1.pep
MSEGTANCVDILIAIILPPLGVFLKYGCGHEFWICLLLTFLGYIPGIIYAIYAITKNT

SEQ ID NO: 273552 - protein, 71 aa, Zea mays
  Clone ID: MRT4577_181063C.1.pep
MSSTECGGGGGGAKTSWPEVVGLSVEDAKKVILKDKPDADIVVLPVGSVVTADYRPNRVRIFVDIVARRPH

SEQ ID NO: 273553 - protein, 88 aa, Zea mays
  unsure (1)..(88): unsure at all Xaa locations
  Clone ID: MRT4577_181064C.1.pep
SLLLSWSFXFPXCILIFGLILLLMIDLTSDQKXRPWFYFISSTSLVISITALLFRWREEPIISFSGXNFQTNNFNXXIFQFLIFIMVQ

SEQ ID NO: 273554 - protein, 58 aa, Zea mays; identical to SEQ ID NO: 223871
  Clone ID: MRT4577_181065C.1.pep

SEQ ID NO: 273555 - protein, 73 aa, Zea mays
  Clone ID: MRT4577_181066C.1.pep
RNRVLLVAQCWNGGGGAGGEGDGIATATIMVLGDTCTRGCRFCAVKTSNKPPPPDPLEPLNTALAVASWGYDL

SEQ ID NO: 273556 - protein, 49 aa, Zea mays
  Clone ID: MRT4577_181068C.1.pep
SHLVFFFIYTEKYLGIIKYLLESSTARWSIPGKSISFNEGAEQEAGKGL

SEQ ID NO: 273557 - protein, 51 aa, Zea mays
  unsure (1)..(51): unsure at all Xaa locations
  Clone ID: MRT4577_181069C.1.pep
GFRFSHAVANGPGAAQFMTAVGELARAAGQGLALAVPSVQPQWGRETVKDX

SEQ ID NO: 273558 - protein, 69 aa, Zea mays
  Clone ID: MRT4577_18106C.1.pep
DISSIFGAYPTDQAKIPTHPTPNGACNLPPRQRNRTGLPGHNHGQGTRHYGVGYRASLKDLPKNRPHLT

SEQ ID NO: 273559 - protein, 54 aa, Zea mays
  Clone ID: MRT4577_181070C.1.pep
KKKKKKKKKKKKKFKFKKKKKKKRRTSESKQPETPHPQQHKGKEPRRPPNNGPH

SEQ ID NO: 273560 - protein, 51 aa, Zea mays
  Clone ID: MRT4577_181071C.1.pep
ALTTFFHKGTTFVDEVNKGSYNIRLRKTASTQAFVDAFVNLKRLHAKTFIY

SEQ ID NO: 273561 - protein, 76 aa, Zea mays
  Clone ID: MRT4577_181073C.1.pep
PKESTHQGPERDPLWETIKKPTPAEKNKTGVWLGPQKQASSAPPRPELRQPKKGGGLFHPAGPQGVLGVLLFLEGP

SEQ ID NO: 273562 - protein, 69 aa, Zea mays
  Clone ID: MRT4577_181074C.1.pep
RHPHALGRRKKKGGWETLKTHLNGPFGPKFARLSLNYMFFCLYLLNYRKLKRNIFHAIIDIRIIRYLYI

SEQ ID NO: 273563 - protein, 265 aa, Zea mays
  unsure (1)..(265): unsure at all Xaa locations
  Clone ID: MRT4577_181075C.1.pep
PAGKKTQGYQRDVVVNFGSAASGISGASIRVMQMDSSFPFGTCINTNVIQNPGFVDFFAKHFDWAVFENELKWYHTEAQQGQLNYSDSDALLDFCDRYGKPVRGHCIFWAVANTVQQWVKNLDDDQLASAVRARLQSLLTRYAGRFPHYDVNNEMLHGSYYQDRLGDDINAFMFREAARLDPGATLFVNDYNVEGGSDPNATPEKYIEQISALQQKGXAAVGGIGLQGHVTNPVGEIICDALDKLATTDLPVWLTETVCEXTDVD

SEQ ID NO: 273564 - protein, 801 aa, Zea mays
  Clone ID: MRT4577_181076C.1.pep
MNVIKMLLMGNVDVNEADSEGNTALHWCLSGASCTKEPRIVWLLLKNGARVFQGNKLGLTPVHSAAAKGNYKALQSLLLHAQDCVDIPTKTKETPLFFAVKNGSVDCAKLLLRFGADTKARNLRKQRPIDVATSQDMRFILSSANVLLFSGNHNSPQKNRVMRKEIYKELGDEFDDFDKDSCDESYTGLKTSVGQRDFCSSNLSAQGPKSKSQYVPKQAQGSKFVPRNNHWPKHDYTRKIFVGGLPPSVDSEYLIEFFNAEFGPVEEAVVIGIPIGNRVQSRGFGFVKFEREEDMISAKEAHHVYMLGKRVEVKDAVARAYLPLEDQRYTSLRQFIKERPKIHRVLDGELTEEHNIQKRRPLPEKCLPSWFAGFRKWLPGFLEDETARLRGERYPLSSLKGDFRATCRMELDHTALGYPKLSDFIRSLPGICRMCVVPVGSGPATHMVLLPPLSRPKYVPLLEPCSFDHDELAESVSDQHSPRSPLNTNIADDSPRNTDSQQGDDACSETNVQIQQVDDACSETCVQSQHDYGKSQQDGSSSDNGSLLDDIPASTTKLDLIESVTSVKPALIEPVLPRKPDLIDSVPPSKPDLVECVPPRPKLIESGFLPQKNESGPVQKPNLLGFGPSRNLELIESRPSACFIDSPFERTAVTPSSCEGEMRFSFFQSQWDKYLAPYPRSDSCIICRSCEAGMQLVPCFHKICVACMMRCNVRACMVCGTSVSGVKSSPAVDATYRYMGLTERVLDLRCQLMVVCRGAEAIVRCSPCMHTIACRGCFLASVTLLKSCTTCGCMVEHFKIV

SEQ ID NO: 273565 - protein, 104 aa, Zea mays
  Clone ID: MRT4577_181077C.1.pep
PGTLLLITTSSLLHSRREREDGVTEALVGGPAPPGGGGRAGAGARGPDARQLREEQEGDGAEPVQGRCPAVGCAIQGRCSVHQVPSGDCRNVQEMKIIYCNPHV

SEQ ID NO: 273566 - protein, 55 aa, Zea mays
  Clone ID: MRT4577_181078C.1.pep
SPTLLLEVTTSSSPLQGRCPAVGCAIQGRCSVHQVPSGDCRNVQEMKIIYCNPHV

SEQ ID NO: 273567 - protein, 60 aa, Zea mays
  Clone ID: MRT4577_181079C.1.pep
ARAADVINRVVELIFRRPPSFFFFFKKGPRTTCLFTLNEGSNQTMGHDATRTGAQTRRYS

SEQ ID NO: 273568 - protein, 57 aa, Zea mays
  Clone ID: MRT4577_18107C.1.pep
TFQFSSTACGLVLKLFDVVKVMTLLNYGKNYCLELNVKIIEGRWVTCIRRLMDTGGY

SEQ ID NO: 273569 - protein, 99 aa, Zea mays
  Clone ID: MRT4577_181080C.1.pep
ASWLSTTLVFQSTATTVHTLVNARGKAESEIRSALSLTLCMPANRADPVRTMTYFISCNIHGRISHARSDHKVRGYIHGDVDGPGCNRLSVLLTTRYQL

SEQ ID NO: 273570 - protein, 68 aa, Zea mays
  Clone ID: MRT4577_181081C.1.pep
PGINSTLVFVRRRSLDDHPLSWHSSDYPSSGLFISITTRSSPHLGSTWLVFRITRLSIVPHEMHNAHV

SEQ ID NO: 273571 - protein, 217 aa, Zea mays
  Clone ID: MRT4577_181082C.1.pep
MHLARARATVINNHTPSRAEPNQAVTLITHSTTRSYYQQLASTVEESEPRMASPKPSSAALLLLAAAAVLALARADLTHDNCVKNKKVTVQNLCSHDVTLTLEPLANSPPLFAGTYTLHPRSHAEFPVCWWTGRLRAPDAAQVEFHVGVDGGSFYLAPNAQPGQRVPVSVTPHGSPLQGRCPAVGCAIQGRCSVHQVPSGDCRNVQEMKIIYCNPHV

SEQ ID NO: 273572 - protein, 40 aa, Zea mays
  Clone ID: MRT4577_181083C.1.pep
LFAQAWTCSEGAFYLHEWPIISRGLWLEPDMTGAARGHDG

SEQ ID NO: 273573 - protein, 115 aa, Zea mays
  Clone ID: MRT4577_181084C.1.pep
CRVSYPAYSMKHSKPIDCRRKAYVLSYEAASVTCVSLLDLQLYIRHPPVSSSSPSNLILLCSTSSNPESRTLGKNKRGPCASLIKCSVEDFNRRSSSFRASSKNPKSRVKTELAE

SEQ ID NO: 273574 - protein, 152 aa, Zea mays
  unsure (1)..(152): unsure at all Xaa locations
  Clone ID: MRT4577_181085C.1.pep
MCPHLCCAICRHKVFILLIESSSSTWSSTRRSRCLTSELLTPSKPTTFKLEVSASVQLFLLTXTMSLACHLNSTYFVYSDNSVLHRHLLISRYVQCNLSKWPSLLVPHTLMHSWGPSIYTSSIDNTSVCIVHLSTTSCRVWQPQHTVHPWRL

SEQ ID NO: 273575 - protein, 52 aa, Zea mays
  unsure (1)..(52): unsure at all Xaa locations
  Clone ID: MRT4577_181086C.1.pep
PTRPTTRPSKRPRKPVGLTGFRCRCGELFCGAHRNSDRPGCSYKYMXAARDA

SEQ ID NO: 273576 - protein, 224 aa, Zea mays
  unsure (1)..(224): unsure at all Xaa locations
  Clone ID: MRT4577_181087C.1.pep
MAYATQHRRRAILVLAAIALLLVSPIAAAAAVAAGCEGDKLPAGRIYAHCAALPSLGARLHWTYDAKTGSLSVAFVAKPAGAGGAGWVSWAINPAGEGMKGAQALLALKSPAAPSSSYVVNTYNVTGYTALGAASTPIAYRAAELAADESGGXEVRIYGKLQLAPGLEKVSHIWQVGSTVANGAPVKHAFDTANXQAKGTLLSGALPVEAAPAPARWALVVPRP

SEQ ID NO: 273577 - protein, 39 aa, Zea mays
  Clone ID: MRT4577_181088C.1.pep
MYDKLKCYLRYVFGVYNPPLQLGINYLHKNNRYMLIFGF

SEQ ID NO: 273578 - protein, 140 aa, Zea mays
  unsure (1)..(140): unsure at all Xaa locations
  Clone ID: MRT4577_181089C.1.pep
ERRLHCRTETHHRCVXHHKMDQEQPDGEYGYCETDGVTDTVEGECQRHKKEDMEHRXTEHVPSAVGSSAIWRLATFALYERHEATKDPWHAHRHKITVEVAVAACAGAGGYGXHEHHQKKKDLQDAEEDSGDMKHHHLLG

SEQ ID NO: 273579 - protein, 58 aa, Zea mays
  Clone ID: MRT4577_18108C.1.pep
INEASMTLIWDLGIPLYHISIIIALHTQNKHDSANPTLPITASSTISQHLIIKCMSIY

SEQ ID NO: 273580 - protein, 229 aa, Zea mays
  Clone ID: MRT4577_181090C.1.pep
LFGLSADTANTVKALRDITETGVEPLSLMSQLATIITDILAGTYTFAQERIRRKFFKRPTLSKEDMEKLRQALKTLSEAEKQLRVSNDKMTWLTAALLQLAPDKQYVLPSSSTSTSFNQGLPTYPDGDIARNSGPHGLSRACDQENLQYRNANLGICSSHVTANNYHGGRRLREHTPDGHMLSTSATRMNEGSKCSKTDNEMIWQAVLENVQSDSLRKMMAKEGTGDLC

SEQ ID NO: 273581 - protein, 57 aa, Zea mays
  unsure (1)..(57): unsure at all Xaa locations
  Clone ID: MRT4577_181091C.1.pep
VRRRFHLQKSTCSSCGXHAPRIRKYNCSLXAIRCKTTGTGSMRYMHHVPVRFKSSFR

SEQ ID NO: 273582 - protein, 126 aa, Zea mays
  Clone ID: MRT4577_181092C.1.pep
ERSSDQARADHGGWLEGQRALLPEQRERCRDLLMHTPPTSSHTMERSSSCCSYSTRASTTILLTKDTVSATVGGTPMTCKRTGTLTVTDEDWHGDRHCHHHCGYCDLRSRMSHARLHGHRTEEQHC

SEQ ID NO: 273583 - protein, 93 aa, Zea mays
  Clone ID: MRT4577_181093C.1.pep
AVLHSHLHLVHHVPQLRRLFHRLARCRLLGLQRATEDPIFEACVRCRTRLRPSTRTNTASLVGTLKHPAALAPHRLVGRRVPFSSAQIINLSQ

SEQ ID NO: 273584 - protein, 70 aa, Zea mays
  Clone ID: MRT4577_181094C.1.pep
LDPAVNGTLFVLGSCMKAASKIVDVACSMATTAYNTRPRTPEVTLYLTWVADPTFCATNKLSNIMIENPS

SEQ ID NO: 273585 - protein, 71 aa, Zea mays
  Clone ID: MRT4577_181095C.1.pep
RIISNFYSRMCKRTAHLYIKGVFAYTLSLLFSGITLLCLHLYIFYLFHLFPYVFPIFYIFLTIFFIIVIYF

SEQ ID NO: 273586 - protein, 51 aa, Zea mays
  unsure (1)..(51): unsure at all Xaa locations
  Clone ID: MRT4577_181096C.1.pep
RGXGREIPSQRLVEATRRRLPLHXLRASLQXTQIGDLAREXQIEXXKSXDN

SEQ ID NO: 273587 - protein, 73 aa, Zea mays
  Clone ID: MRT4577_181097C.1.pep
ERYQEIDPTFSGTREYKLLADLAASMDEGDVAKFTDAIKEFDSMTRLDPWKTTLLLRAKNELKKKEDDEDALT

SEQ ID NO: 273588 - protein, 156 aa, Zea mays
  Clone ID: MRT4577_181098C.1.pep
KTIEVNNTDAEGRLTLADALVYACNQGVEKIIDLATLTGACVIALGPSIAGVFTPSDELAKEVTAASEVSGEKFWRLPLEESYWESMKSGVADMVNTGGRQGGSITAALFLKQFVDEKVQWMHIDMAGPVWNDKKRAATGFGVSTLVEWVLKNSSS

SEQ ID NO: 273589 - protein, 289 aa, Zea mays
  Clone ID: MRT4577_181099C.1.pep
MGDHEARGDDFEKKAEKKLSGWGLFGSKYEDAADLFDKAANSFKLAKNWSRAASVYIKIANCHLKGDSKHEAASAYVEAANCYKKFSPQEAAQALNQSVNLFLEIGRLNMAARYSKDIGEIYQQEQDLEKATDYLERAADLFDSEGQSSQSNTIKQKVAEIAAQLEQYPKATEIFEAIARQSINNNLLKYSVRGILLNAGICQLCRGDPIAITNSLERYQEIDPTFSGTREYKLLADLAASMDEGDVAKFTDAIKEFDSMTRLDPWKTTLLLRAKNELKKKEDDEDDLT

SEQ ID NO: 273590 - protein, 95 aa, Zea mays
  unsure (1)..(95): unsure at all Xaa locations
  Clone ID: MRT4577_18109C.1.pep
ILLHLIAVALSNNCVAFLLSGLGGEYSTDSATGVLSTLFDLGGLVVGILTGHIYDHVDARALTAVSFTFXAIPALFFYRVYGNLLLAWNIDLMLI

SEQ ID NO: 273591 - protein, 40 aa, Zea mays
  Clone ID: MRT4577_1810C.1.pep
MVTFLFFGGPPKFYLKGIKLTLNKKIGFGPILASTLLLIN

SEQ ID NO: 273592 - protein, 149 aa, Zea mays
  unsure (1)..(149): unsure at all Xaa locations
  Clone ID: MRT4577_181100C.1.pep
DVELMTFGQPRLGNPAFVXYALAXVPRTIHVTHKNDIVPQLPPYYYYLSKWTYHHFAREVXLHESIDGNVVARNEIVCDDSGEDPTYSRSGSXGMSVADNLEYYSVTLHVDSRGTCQFVIGTANQVYNYIREVDGSIILLRYICKNHEL

SEQ ID NO: 273593 - protein, 176 aa, Zea mays
  unsure (1)..(176): unsure at all Xaa locations
  Clone ID: MRT4577_181101C.1.pep
LYPLITFQLVLVXVAKGNNDXXVWFFDQXNXLLNIVGVSYKRHGMLRDARLENLMKSLECGELETGRGLNQEMGLPRPGETRWGSYYKTICNIITMYPIIRDVLMXLGEDTTIRSDWTRIHSMLGAXFESFDFVFDAHLMFVIFGYTNDLSVCLQRRKQDIINAISLVSVAKRRML

SEQ ID NO: 273594 - protein, 58 aa, Zea mays
  Clone ID: MRT4577_181102C.1.pep
PPTTTYYHKTALYRGGKIRIFLNDKLSPPITYSIWNQAWTALGMALLLPEVKVQKLLR

SEQ ID NO: 273595 - protein, 40 aa, Zea mays
  Clone ID: MRT4577_181103C.1.pep
IDQLEGTDGIHQGNMQNTMDADLWGQRDILKMVLITNTPG

SEQ ID NO: 273596 - protein, 33 aa, Zea mays
  Clone ID: MRT4577_181104C.1.pep
STTAIHLPLSPICPTLPLSHRDNGLNHSRQQRT

SEQ ID NO: 273597 - protein, 146 aa, Zea mays
  Clone ID: MRT4577_181105C.1.pep
TWPSPSFKSPLLLLSALRKVRKRKNKKKKKSPLRSSQSDHQRGRGCQGHPRRRGGGASPASASAVTPPHAARAGRRGWVGMAREAEQASGPPMISPRAEGARGMEEEGNGWEHEVGRFTVCSIPPSPCAWSFALLHRHKRTGRLGT

SEQ ID NO: 273598 - protein, 73 aa, Zea mays
  Clone ID: MRT4577_181106C.1.pep
GARFGSKKKKKKKKKKKKKKKKKKKKKKKKKKKKKKKRGGGGKTFFYLKKTPGGQGKRVSAPSRELQAWGALE

SEQ ID NO: 273599 - protein, 56 aa, Zea mays
  Clone ID: MRT4577_181107C.1.pep
PLRVHSAATAPASGILAATIQAKARVTTQVIGHTACLVLRPDLGPGPRALVVPQAS

SEQ ID NO: 273600 - protein, 136 aa, Zea mays
  Clone ID: MRT4577_181108C.1.pep
RHLDRRPGVRAVARAVGMEKCSSKIRSIVWLRQTLRRWRSRAAPQASRFRSSAASPPTRPSGERAALLAGASHHPCACLVPIRARAPAISPSSPPFFVGYYFPTSSRWAPPFPAERGGDRQLDEQDESGPDGRRRR

SEQ ID NO: 273601 - protein, 304 aa, Zea mays
  Clone ID: MRT4577_181109C.1.pep
MATTITRLLHHLALLLLVVQFADAVFVPKTKNYAVLKPQSWGTTYIVHANFLAKPPHFGSLKEWYRSMVTTHASSTRAASSSSILYTYDTVMHGFAVQLTGDEARLMSSAPGVIGVYEDRVLYPQTTRSPGFMGLEPGNGAWKQTDFGDGVIIGFIDGGIWPESASFNDSGLGPVRSGWRGKCVDAHGFDANLCNNKLVGAKAFSAAADAVAGRKSRGVPSPRDKDGHGTHVASTAAGAEVRNASLYAFSQGTARGMAPKARIAMYKACSENGCMHADIVAAVDAAVKDGVDIIYISLGRSFSI

SEQ ID NO: 273602 - protein, 119 aa, Zea mays
  Clone ID: MRT4577_18110C.1.pep
PDLYQFEETPQKPAHGEGAIILGTEAHTTTLPKYRTGPAAQAKPKRELGNSCSHAQQTKQARQPTSRTRRHDRHNELAHGVEPQHTKGGADPQEDYRAEGNKQTDQANPPHISRETEGT

SEQ ID NO: 273603 - protein, 42 aa, Zea mays
  Clone ID: MRT4577_181110C.1.pep
QDQVGMTAMDLIMLPAQMAKKRTIPMKRNMQSLSPVEDLCFS

SEQ ID NO: 273604 - protein, 834 aa, Zea mays
  unsure (1)..(834): unsure at all Xaa locations
  Clone ID: MRT4577_181111C.1.pep
VVELNLFEDGDEPAKKIKTVSVVGFGGLGKTTLVKAVYDKVKKEFDCSAFVSIGQKCDLKKVFKDVLYDLDKQNHENIIASEMDEKQLIDKLQEFLADKRYLVVIDDIWDISTWKLIRCALVESNPGSRIIITTRICEVAKKVGGVYNKKPLSLDDSKTLFYTRVFAGESMSLDNISGEVCNKILRKCGGVPLSIITIASLLVGKQREDWSKVYDYIGFGHEDNEVIGNMRKILAFSYYNLPPYLKTCLLHLSIFPEDHKIEKNSLIWRWIAEGFVIGREELGLFEVGESYFNELINRSMIRWIELSSRSKIRDGCGIHDMVLDLIRTLSGEVNLVTVSDVEQQCTTSSSYSPVRSISARRLAFHKKRSIEHNPGTEIGQVRSFNAFNCSGSRMPRLLSFRVLRVLALENCNFSAGNCCLGNIGKLHQLRYLGLVETSIRDDLLPGETGRLKFLQTLDVRRSGIKILPASVGELRKLMCLRATEGTRMMAEIGKLASLEELEVHSVDKSPNFATGLGQLTKVRVLEIHFDEMDESTEKALMESLRNLRKIQSLQIWSKXGEDNXLGGLLEDWTPTPSDLRQLMLCGIHLPRRPSWIDPSCVPLLSYLSLTVQAVQVQDLEILGRLPLLSYLYIWSEGINCLSYTATSRDEFQNLRHLDTNLEIMCGQQGALPMVEKLTCRASMGKYVAFARSSMPFDDGSVVNPATVAEAELPVILPLDIGWPVNMPCLRGITYLLDYQDCSAKEWAHVETLLLHVRKIHPNCPPFRIKKNCRDKKITLIDAFSYLEAVKDVFKGNPSKYSEFFDLMIDYKRDRSLLLHALLSYLGIACIACQA

SEQ ID NO: 273605 - protein, 49 aa, Zea mays
  Clone ID: MRT4577_181112C.1.pep
HSSSFMCSLHAYRACNPHHGCIPALTFNGQCCAFRTQLALSLNNINLFR

SEQ ID NO: 273606 - protein, 383 aa, Zea mays
  Clone ID: MRT4577_181113C.1.pep
MESWVRAVVEAIHSSRSQTVIYLAGGASQALGWLLSVPGASGTVLEVVVPYSRASMAQLLGKMPLQFTSKQAAEDMALAAYNRALKLSGPGLQVMGVGFTGSLASSRPKHGDHRFYVSTWTHNCLRTSHVTLSKGLRSREEEDKVSSYFLLKAIADTCRVSATIQSDIHKSEIPEEIMEQFDEDQELQQVINGQVCMKVYNFAAPAESNLNRKIILPGSFNPLHDGHLRLLEAAVSMCDDGLPFFEISAINADKPPLSIAEIKRRVEQFRKAGKNVIISNQPYFYKKAELFPGSAFIIGADTAARLVNPKYYGGDYNRMLEILLECKSIGTTFLVGGRKIEGDFKVLENLDIPEELREMFISIPEEKFRIDISSTEIRKSQGL

SEQ ID NO: 273607 - protein, 126 aa, Zea mays
  unsure (1)..(126): unsure at all Xaa locations
  Clone ID: MRT4577_181114C.1.pep
YPXGSARGADCESNHCVTLDIKMTTHQDSAKDVPKEHHVHRTGSWLPADHRHVRDWISEIIEHVDKNPKDLHPVIKELRELIENNTRIYLLVNAMFEEITTKKPYANDPEGHKQVRDYQHTLELFE

SEQ ID NO: 273608 - protein, 98 aa, Zea mays
  Clone ID: MRT4577_181115C.1.pep
AVAQVAADLRHGLPVHHAAISAYVAFLRHVDQSHNPLTVANVLVAAFDYKPQLFPRRWSPLMNLFVVGQPPTIERAMSFIAYDLVIMCEASPWDVVPV

SEQ ID NO: 273609 - protein, 76 aa, Zea mays
  Clone ID: MRT4577_181116C.1.pep
PGEISFPWGLPSLRFFIDDVEDPVPNAPFRLLPKKIFQPSTIKRKRTHGFFPRKSPKGGPKVIARKIPKGRPRISV

SEQ ID NO: 273610 - protein, 294 aa, Zea mays
  unsure (1)..(294): unsure at all Xaa locations
  Clone ID: MRT4577_181117C.1.pep
MKSPAVPAKRRHGGNGSGSGPGFALGCGCKDAKSVSVSVSASASPSQSATTGTSTVTRRTSAGGLNPWASTTTDTLTSASASSLWEDAVEGLGYKDGGCRMVPESTATAPSFSGLLRELGELERSVASWGGARKGHRRDREGKLSPPALRHEQQRRAAKGEPRDSEENRFVDAGAGLQGSVAVVKQSDDPLRDFRRSXADDRGERDRGGRGPARDAPALPHPQRAAPPRRHPARLRRDLGXDVFVAAAASLDDCASPVGRASSVSGREPAAAGRPPAPRTTARHHRRSPPAWRV

SEQ ID NO: 273611 - protein, 73 aa, Zea mays
  Clone ID: MRT4577_181118C.1.pep
PLVRFSIACISPGLVFFLSSILASSDSLTHLRSSVSPTPSSSPRRTRPDSMPTTIANALLSPRLCTIFFIPFS

SEQ ID NO: 273612 - protein, 79 aa, Zea mays
  unsure (1)..(79): unsure at all Xaa locations
  Clone ID: MRT4577_181119C.1.pep
MSCCGGNCGCGSACKCGNGCGGCKMYPDLSYTXSTTTDTLVMGVAPVKAQFESAEMGVPAENDCCKCGANCTCNPCTCK

SEQ ID NO: 273613 - protein, 117 aa, Zea mays
  unsure (1)..(117): unsure at all Xaa locations
  Clone ID: MRT4577_18111C.1.pep
YLSDYCRALVTFEALAGTASFARTWLPFCRKHGVEPSCPEAYFCQKRDLLMNKVRVDFVRERRKVKPEYDXFKVRVNSLPEAIRRRSDAYNAVEELRARRRQQEEAMVVGTILGALP

SEQ ID NO: 273614 - protein, 98 aa, Zea mays
  unsure (1)..(98): unsure at all Xaa locations
  Clone ID: MRT4577_181120C.1.pep
WELFILNNHNPPTPQYLLNSNKLLYHYPFPQYHSSNKTSICKNPSLQPYHQQQAIAQNNIPLIPFFHQSLSLSIXNHLNTTIFHININXLLLPCINQI

SEQ ID NO: 273615 - protein, 89 aa, Zea mays
  unsure (1)..(89): unsure at all Xaa locations
  Clone ID: MRT4577_181121C.1.pep
GDAVASGRRSALADYRRKMLSCRELASLVGTVGESLSNAQRDVTRTEDHSRSRGSVRLRIGXETLRPLCXERFIXKAVGGPGCEGGLPG

SEQ ID NO: 273616 - protein, 232 aa, Zea mays
  Clone ID: MRT4577_181122C.1.pep
VRLQVPVRNSRVDPRVRYDLSHSLQYNLTVLRMPLEMLKSETSKACQESFDIFEDEGLITQGGSGVFGISSEPYMKYVWNGELLDIIKNTVHRDWLLYIIHGFCGQSKLLIYGRPVYVTLIARRSSRFAGTRFLKRGANCEGDVANEVETEQILCDASVMSFTAGSYSSYVQVRGSVPLFWSQDISTMMPKPPITLDQADPFAHVAALHFDQMLQRFGSPIIILNLMKEREK

SEQ ID NO: 273617 - protein, 91 aa, Zea mays
  Clone ID: MRT4577_181123C.1.pep
RGRPGWAPLLPPPSRSPPPPRSKDRDEEEQDGLKRKRGSRRCSTPISCRFSWGNPRWLHSISCLVHFSSSMKVLVAHPGKWEVAAHPPSLS

SEQ ID NO: 273618 - protein, 33 aa, Zea mays
  Clone ID: MRT4577_181124C.1.pep
VQLVKKKLKIYKGWSLEGIQKYPNLLADVFTLL

SEQ ID NO: 273619 - protein, 71 aa, Zea mays
  Clone ID: MRT4577_181125C.1.pep
PPRVSQRNSAEEMGKNISLILSSPSIQCAPPLLDPCCAGGDLEGGGSRGEGLPWEERTASPREKERGAAKC

SEQ ID NO: 273620 - protein, 80 aa, Zea mays
  Clone ID: MRT4577_181126C.1.pep
RQSTYTLHSYAYIEVIFASFVDARKCYRTYCVFSRNEMVLVILGLLSSISTSISDLNCDSFKMLINSICGLNISSKQFAC

SEQ ID NO: 273621 - protein, 156 aa, Zea mays
  Clone ID: MRT4577_181127C.1.pep
HSGCLRILGCYMYNGTDEDDFLYCLRPDNKEIFVCREMARNIGFLKLEVGLSAMSKDDLADSLAYNSLKGLILSNTLRAQKNVEDESCQIALGNLRSEVIKLSNEAIEKDKILLSLVDRVKAREANVAPGDPPREIEKLKKKLVEKNVDFEEAKEN

SEQ ID NO: 273622 - protein, 122 aa, Zea mays
  Clone ID: MRT4577_181128C.1.pep
IRPFERPPGQVHTWPPLPPFPLGWPSSPPMAAPLHGFLLPLDLPPRSKDREEEEHVELKGKRGSRRCSSPSLLAEFLGETLGACCSSREVGSSSTSTFTLIITLLRRSHDLIRSFLSKDVCF

SEQ ID NO: 273623 - protein, 78 aa, Zea mays
  Clone ID: MRT4577_181129C.1.pep
MASRDFSGGLGAVGGTLGCLATGGGGVTSMASVCGRANDSRGSGDTYRRERRMNQAPNRRLSLVIENPNDSRDSGDTY

SEQ ID NO: 273624 - protein, 118 aa, Zea mays
  unsure (1)..(118): unsure at all Xaa locations
  Clone ID: MRT4577_18112C.1.pep
GHHGPNPTHTPGGGDGKRAKLHPGDAVEVLLRLTGREGGPAXDLARKSGPVQLYPKKSVQDIGQETGKDWKGLRVTVKLTVQNRQAKDYVVRSAERLEINALKEPERDRKKVKNIKHS

SEQ ID NO: 273625 - protein, 97 aa, Zea mays
  Clone ID: MRT4577_181130C.1.pep
VLIKSWLRLGSVIVRVKVDVLLLPSFPACIKYLYREFGQIPKYDPEVHHQFDFSGLDLGKKFSASTPRPGVEAARSLFVLFRASVLISGETNHNDMS

SEQ ID NO: 273626 - protein, 105 aa, Zea mays
  Clone ID: MRT4577_181131C.1.pep
SFSLGLAVLSSMAAPLDDFLLPLDLPTRSKDREEEEHIELKGKRGSRRCFSPSLLAEFLGKTLGACCSSREVGSSSTSTFTLIITLLRRSHDLIRNFLSKDVVSN

SEQ ID NO: 273627 - protein, 118 aa, Zea mays
  unsure (1)..(118): unsure at all Xaa locations
  Clone ID: MRT4577_181132C.1.pep
PFPPGPSHXLKAPGKKRPGAPPPPQXKEKVSGDGGLWSRRLSLPRAPRKKKGPQGPPGGRRRKKTPLFWLFYPPELSSXPFSTRGCVKXIQPPPFFARVRLFAPFLCPNKRGFLLHRK

SEQ ID NO: 273628 - protein, 129 aa, Zea mays
  Clone ID: MRT4577_181133C.1.pep
DSPLGCSRPLPLLLSSPLQPPPTLSWLPPPSRSPPRSKDREEEGHVELKRKRGSMRCSSPSLLEDFLGENPRVLHSRSCLVHFFFFVEGACCSSREVGSSSTSTFTLIITLLRRSHDLIRSFLTKDVCF

SEQ ID NO: 273629 - protein, 130 aa, Zea mays
  Clone ID: MRT4577_181134C.1.pep
LRLSSVIIRVKVDLLLLPTSLDEQQAPSSKKKKCTRHDLECSHLGFPQEILQEEMGKNISLILSSPSIQRAPPLLDPCCAGRDLEGGGSHGEGRGRLPTGRRAREGGGGCNPIGESFFFFFFFFFCKPGR

SEQ ID NO: 273630 - protein, 37 aa, Zea mays
  Clone ID: MRT4577_181135C.1.pep
GTGSFKQVRAERTAAILLYYLHRMSLEIWTATGDVER

SEQ ID NO: 273631 - protein, 83 aa, Zea mays
  unsure (1)..(83): unsure at all Xaa locations
  Clone ID: MRT4577_181136C.1.pep
MPGKPVLHNFDGRGRMEPIRWLLAAAGVDFEEQFLKTRDDMARLRNARSLMXQQVPMVEIDGMKLVQTRAILNYIANRYNLYG

SEQ ID NO: 273632 - protein, 83 aa, Zea mays
  Clone ID: MRT4577_181137C.1.pep
KREKGGSQSVFTKFKKKFSIITQKKLPPFWEAPTYPPAKNTRSTGASAKKYKSGAPPEKIEKIVLPKISSFEVEKKHSYAREK

SEQ ID NO: 273633 - protein, 62 aa, Zea mays
  Clone ID: MRT4577_181138C.1.pep
TSGPGLRHAVGCRGCVCAYLEILCMCCSRRQLMWFILWRGICEPVLRKKNFCWHYQRVWIYT

SEQ ID NO: 273634 - protein, 73 aa, Zea mays
  Clone ID: MRT4577_181139C.1.pep
VTNGRLAAKPISKPSGMTLLWSLLFFLLSSLSHGNVCHHVKPSSRQLRLQSSPLGRKRSEGNVTPEFPCFLLP

SEQ ID NO: 273635 - protein, 101 aa, Zea mays
  Clone ID: MRT4577_18113C.1.pep
MGLLDKLWDDTVAGPRPDTGLGRLRKQPVRPAAVKISDPAGDAAAFVPPSPASGSEETPVKVTRSIMIKHPRTCFCSFTSIIYGRQGGPEKKDIKRGTGMI

SEQ ID NO: 273636 - protein, 70 aa, Zea mays
  Clone ID: MRT4577_181140C.1.pep
SADGTLNLYCQNKEARYVLLLRSMDGHLLRQMGARTNLALRVPIKHDLHLGTHNTLSEEERVSQLSQMFL

SEQ ID NO: 273637 - protein, 270 aa, Zea mays
  unsure (1)..(270): unsure at all Xaa locations
  Clone ID: MRT4577_181141C.1.pep
DEDPCIRLLSYCKKHRQPSAAERPSLESDPPXTHSGSSXTDMASSSGCARTEPYNLHRRRGQKQPQVVATASLKRLYVENRPHIVSGYCQNRVGNTCGESIQPFGLSDAVQQEAIGNVSSMVEKYTIVKATFRKRLTFGKSKIHGYGVFAKVAHKAGDMMVEYIGEIVRPPISDTRERRIYNSLVGAGTYMFRIDDERVIDATRVGSIARLINHSCEPNCYSRAITILGDEHIIIFAKRDIDPWEELTYDYRLHHIGWDMTCLCDMLASA

SEQ ID NO: 273638 - protein, 163 aa, Zea mays
  Clone ID: MRT4577_181142C.1.pep
LTFGKSKIHGYGVFAKVAHKAGDMMVEYIGEIVRPPISDTRERRIYNSLVGAGTYMFRIDDERVIDATRVGSIARLINHSCEPNCYSRAITILGDEHIIIFAKRDIDPWEELTYDYRFFSSDQRLPCFCGFPKCRGVVNDVEAEEQSAKIRVKRSELFEKSEK

SEQ ID NO: 273639 - protein, 397 aa, Zea mays
  unsure (1)..(397): unsure at all Xaa locations
  Clone ID: MRT4577_181143C.1.pep
CLKDVKRMEPIDGLSRINKDRWKLVCSICGVSYGVCIQCSHPTCRVAYHPLCARAADLCIELENDDKIHHMYLDEDEDPCIRLLSYCKKHRQPSAAERPSLESDPPEPIQVVQTDMASSSGCARTEPYNLHRRRGQKQPQVVATASLKRLYVENRPHIVSGYCQNRVGNTCGESIQPFGLSDAVQQEAIGNVSSMVEKYTIVKATFRKRLTFGKSKIHGYGVFAKVAHKAGDMMVEYIGEIVRPPISDTRERRIYNSLVGAGTYMFRIDDERVIDATRVGSIARLINHSCEPNCYSRAITILGDEHIIIFAKRDIDPWEELTYDYRXKVKILLFDLLNIIVLYKMLSMLSXFFSSDQRLPCFCGFPKCRGVVNDVEAEEQSAKIRVKRSELFEKSEK

SEQ ID NO: 273640 - protein, 40 aa, Zea mays
  Clone ID: MRT4577_181144C.1.pep
SLHHMSELIVRLLPRGTTHQPAQHVIIHFSSQMTVTVQSR

SEQ ID NO: 273641 - protein, 63 aa, Zea mays
  Clone ID: MRT4577_181145C.1.pep
LDKLLAPNPRVTPYTWLCASVVSVVVALLFANMVEAQMAKAKFAEELWAQAEVLVAVERSRGT

SEQ ID NO: 273642 - protein, 157 aa, Zea mays
  unsure (1)..(157): unsure at all Xaa locations
  Clone ID: MRT4577_181146C.1.pep
RTRGRTRTDAQTVFDKMPRRNTITWTSMISGYAQSGCGEEAVLLFRKMKMRRVFVNHLTIVSLLSACGSMQSIYHGKELHAQIIKNCMEENLQIGSTLVWFYNRRGEHTYATRILEAMPDRDAVAWTAIISGLNNLGHNVEALKSLDEMLXDGVVPN

SEQ ID NO: 273643 - protein, 41 aa, Zea mays
  unsure (1)..(41): unsure at all Xaa locations
  Clone ID: MRT4577_181147C.1.pep
RHEPLNQGAPLQXXPXMDPPGPXAHGGFXLXXQQXXXRXXR

SEQ ID NO: 273644 - protein, 815 aa, Zea mays
  Clone ID: MRT4577_181148C.1.pep
MEGFKEAVQTAWLKPLRSSFTPMKRLHIKLVRATKAIKLWRKTKVGDMRLHLEISKELILRFETAQEEHMLTQEELDLLKALKARALGLAVIEKSRIRQRARLTRIRLGDANTKFFHLSASSRARTLQISPRDNPGERDHPQLPALALAQHDLSSLEAPFSLEEIKETIFSMPSDKAPGPDDFTGLFFKVCWDIIKEDVLEAFHQLHSMNGADFRLLNSANIVLIPKKPDALTVGDYRPISLIHNIAKIFSKLLANRLAPLLNTLISKSQSAFIHKRCIQDNFLYVHNVVRRLHKQKKPALFLKLDIQKAFDTVNWGYLLEVLQTMGFGPRWREWISILFGSASSRALLNGRQGANIQHRRGVRQGDPLSPMLFILAIDPLQRILDLAARNRILSPIPLTTTKLRTSLYADDAAIFINPSREDLLAVKDILHAFDCASGLVTNLEKSSIHPIRCDNIDLDHVLQPFQGTRGTFPCRYLGLQLHTRALQKIHVQPLIDKIQNRLAGWKGSMLNRDGRLTLMSSVLSAMPTYHLSVFPLATWARKRIDRIRRSLLWREKAESNGGHCLVAWPLVSKPKTLGGLGILNLDKFSCALRLRWLWKSWTTDDHPWKGFDVPCNLADRLLFSASTIVTVGDGKTAKFWHDSWLDGMAPRNLAPHLFELVTRKNKSVAIEINDGNWIRSLRVKITSTVQIEEFVSLWFRLHDLHLQPQVPDSIAWKWNPDGVFTILVWEGLSLLAQADPTHFSSIKDWWEATSSPLPKNQKRDFNGLMIYTLWNIWKERNRRIFENSALTPIQLALKIKEDVCTFKRAMFLQY

SEQ ID NO: 273645 - protein, 165 aa, Zea mays
  unsure (1)..(165): unsure at all Xaa locations
  Clone ID: MRT4577_181149C.1.pep
GEMSGYRFMTISLAPGPTISGRPPPAAYMAVGHVFIPAEGAGPFTIGTIVRSSFAPKEIFLMEDHPXAVNSSFXHALAYLPATDXLKTARCGIKNAAIXDGSERNNLWKLRRIPTDALAWDYSSGLHIITDIYSQTVMYDTSPALRDAPDVTDESTVLILADPHC

SEQ ID NO: 273646 - protein, 116 aa, Zea mays
  unsure (1)..(116): unsure at all Xaa locations
  Clone ID: MRT4577_181150C.1.pep
RLASKAGAGHDRGXTXTVTGKHFHAASYEALTETRDHALRNYDGADECHGKLRHHPPMGPALHGPMEHSAXVGAEXKTDLEASYGIIHGGILGAFHEHEKKARQDDLTRVYAGIWH

SEQ ID NO: 273647 - protein, 147 aa, Zea mays
  Clone ID: MRT4577_181151C.1.pep
AVQHVFSCHASFYLAVRRRGRHVLRLHFYPFSRALASARFHVGGGGFLLLHNFTASSPVVKDFLLPVDADVLVLTFVPEAGSAAFVNAIELFSAPDELVGDIATLASAGGVNRADGLSSQVFETLYRVNVAGRKVTPFNDKVWWTWV

SEQ ID NO: 273648 - protein, 114 aa, Zea mays
  Clone ID: MRT4577_181152C.1.pep
MPPPREHHQPQDEEDDDTAGVVKLISAEGFEFVVDRKAAMVSNTLRNMLTSPGGFSETRQGEVRFPEIPTNILEKICQYFYWSLHYSSGKETAEFPIEPEITLELMMAANYLDT

SEQ ID NO: 273649 - protein, 158 aa, Zea mays
  unsure (1)..(158): unsure at all Xaa locations
  Clone ID: MRT4577_181153C.1.pep
MRLLVAPSQYPPLLRFVTTAWRVTELRQHYAWTASPSTSTTFASNPINDRSRVHSLEHXGISPDDQMPEENINGRGHDGINSFVRESDRGKDAPHDVFGDLEATVIYEETTGDXNHLCYPXXMIIAKEDATKDLPRVDYTIEWEIVDIRVDCIGKIAD

SEQ ID NO: 273650 - protein, 114 aa, Zea mays; identical to SEQ ID NO: 273648
  Clone ID: MRT4577_181154C.1.pep

SEQ ID NO: 273651 - protein, 104 aa, Zea mays
  unsure (1)..(104): unsure at all Xaa locations
  Clone ID: MRT4577_181155C.1.pep
IDTKELVPAVRSEFGRHTTGPGGRVADRGGPWVLLSQLSGKDITEIIAAAREKFASVPCGGGGVAVAAGAPAAGGXAPAAEAKKEEKVEEEGRSDDDMGFKLFD

SEQ ID NO: 273652 - protein, 327 aa, Zea mays
  Clone ID: MRT4577_181156C.1.pep
IGGRETRRPTRPSFSFSLSPSWTILSISFLSLHILRRAEAARDTIGKLLQQEIKLSPTQDQKKLCMEQEEVGLALGLSLGSGHHHQELKPQHPSHPCAALLEPSLSLSGPATKDDGPTAPVRRFAAVKRELQTMEGNDDEATGRVLVYSVASSAVVTADDDEGCNSSRKKLRLSKEQSALLEDHFKEHSTLNPKQKAALARQLNLSPRQVEVWFQNRRARTKLKQTEVDCEILKRCCETLTEENRRLHRELQQLRALSHPHPHPAAFFMPTAAAAALSICPSCQRLVATGASAAAATTAGADNKPKAGGPGGRAPHVFSPFTNSAAC

SEQ ID NO: 273653 - protein, 111 aa, Zea mays
  Clone ID: MRT4577_181157C.1.pep
GFDPPRPPAHMPGQVTPCVAVPMPAARFPAPPVRGALPCPPPMYRPLVPPTLDTQFQLQTQPSSESIDAAIGDVLTKPWLPLPLGLKPPSVDSVMGELQRQGVANVPPACG

SEQ ID NO: 273654 - protein, 314 aa, Zea mays
  unsure (1)..(314): unsure at all Xaa locations
  Clone ID: MRT4577_181158C.1.pep
PRGRPGPSSPLASPSLSFLDILSLSSLSTILRRAEAARDTIGKLLQQEIKLSPTQDQKKLCMEQEEVGLALGLSLGSGHHHQELKPQHPSHPCAALLEPSLSLGSPATKDDGPTAPVRRFAAVKRELQTMEGNDDEATGRVLVYSVASSAVVTADDDEGCNSSRKKLRLSKEQSALLEDHFKEHSTLNPKQKAALARQLNLSPRQVXEVWFQNRRARTKLKQTEVDCEILKRCCETLTEENRRLHRELQQLRAFFMPTAAAAALSIWSXXQRLVATGASAAAGATAGAENKPKAGGPGGRAPHVFSPFTNSAAC

SEQ ID NO: 273655 - protein, 131 aa, Zea mays
  unsure (1)..(131): unsure at all Xaa locations
  Clone ID: MRT4577_181159C.1.pep
PGVDFTSGGRTLXGPVDRSHXLTKCYYYGXSRTTQVSGEDRDSMLYRDAIMKDPSRRGSSILGMGERYTPRGEPISTNKRHNARRDLQHDVKTPXEPGNGIEQDHTLLQKDTNWPVVWTMGGSAGPHGAYY

SEQ ID NO: 273656 - protein, 113 aa, Zea mays
  unsure (1)..(113): unsure at all Xaa locations
  Clone ID: MRT4577_18115C.1.pep
MAIGVRVLRRLPLHLYPSVASSFCAGSPAAASAAPVSAKVADRIVRVLAIDLEGARREVGRLSRQTLLRALANAEIIEPVSHRLEDINAXRQEVXVHIPQEWLYKLPAPVLPE

SEQ ID NO: 273657 - protein, 43 aa, Zea mays
  Clone ID: MRT4577_181160C.1.pep
TLPKACCLLVGMSLESAPLVIETVMTACSYGQLYSFDLITSLM

SEQ ID NO: 273658 - protein, 75 aa, Zea mays
  Clone ID: MRT4577_181161C.1.pep
PRSSVSSLQDGCTLLPEPPPTQVLARELCWPKVLRAPSYGSLLKDTCQEYSLARKPSCSPPCWDVDPRGWSQGDQ

SEQ ID NO: 273659 - protein, 34 aa, Zea mays
  Clone ID: MRT4577_181162C.1.pep
QAIIFWNQSQSINQAYMISSISCCRYIGFIIRNN

SEQ ID NO: 273660 - protein, 49 aa, Zea mays
  Clone ID: MRT4577_181163C.1.pep
PDNGALKGVHALRVSILRPSLPARLATVWRIELTRPYRVEPAIAASMQQ

SEQ ID NO: 273661 - protein, 90 aa, Zea mays
  Clone ID: MRT4577_181164C.1.pep
FEGFVLAVADESLSGAQGSQLDSCTRGLTLESKMHASSSQIPRISLRGVLSFTTALVAHFRTAAGELTAFIIENDEKVKAVFLSKVPFEF

SEQ ID NO: 273662 - protein, 199 aa, Zea mays
  unsure (1)..(199): unsure at all Xaa locations
  Clone ID: MRT4577_181165C.1.pep
STTLGSLLLSARCLTRLPRPQQHGAHGRGQVRRRIRXHPPPRQTPYQPMQRWTSLPLRPVHRRHRKTPSSPRRPSPSPPHRRRRQPHKPPARVRMQLPPSWSRPHPQRCPPRAAPAARHAGGTAASWSRAAARASSGWRARTRAPTARSSPGSPRACSYAAPRPAEPRWRGRRRLVPPPVPWLAAGSRVSPPPPGARPA

SEQ ID NO: 273663 - protein, 75 aa, Zea mays
  Clone ID: MRT4577_181166C.1.pep
VSCGFVRALDNRFSSAFVTAVLEHLDTSGRHAYLIAQFTRALRCCCFNCVDLCPRTILHDQAISRPSAVCEMSRW

SEQ ID NO: 273664 - protein, 55 aa, Zea mays
  Clone ID: MRT4577_181167C.1.pep
QPFVKNIPARPDSLHYTRRLDFYHKNSRWLADRRVSVMPSDNYVRSESQHKPSFL

SEQ ID NO: 273665 - protein, 69 aa, Zea mays
  Clone ID: MRT4577_181168C.1.pep
MAAPASAAAGRGGAMSSDNAKGLVLAVSSSAFIGASFIVKKMGLRRAADSGVRAGYGGFSYLVEPLWWI

SEQ ID NO: 273666 - protein, 189 aa, Zea mays
  unsure (1)..(189): unsure at all Xaa locations
  Clone ID: MRT4577_18116C.1.pep
MGLLDKLWDDTVAGPRPDTGLGRLRKQPVRPAAVKISDPAGDAAAFVPPSPASGSEETPVKVTRSIMIXAPISPFAGAGGRFRRKSSSDAYERATPPGTTSHPPPSDVWADRTLALVFAPSQASSTVDREDRRRHQEGNGDDLVAGCLTSTVIYYIAAISVWYRALPQLGSRRGPCRVFPLLCFYVCHH

SEQ ID NO: 273667 - protein, 99 aa, Zea mays
  Clone ID: MRT4577_181170C.1.pep
KKRTWGGFFAPQEQAGPSGTRTTSMLPLVVGAVAAAVLLTDRIYSLPSALAVSSFCYSSRWQLLCLQYVFLVFSAGGPWEFQQTLHVSSSSFFDDSFRL

SEQ ID NO: 273668 - protein, 155 aa, Zea mays
  unsure (1)..(155): unsure at all Xaa locations
  Clone ID: MRT4577_181172C.1.pep
MRRMPDIWYLQIKNKTYPKFNYCRGVPDPKIRIYDVGMNIKGVDXFPYCVLLVSCXKENASTEALEGARIACNKYMTKSAGHDAFHLRIRCHPFHVLHINKMLSCAADDMLQTEMKSAFGXPLGTCAMTDIAQDLLSDRCNAXNAAHASESLHHA

SEQ ID NO: 273669 - protein, 122 aa, Zea mays
  Clone ID: MRT4577_181173C.1.pep
KKKKKKKKINWAAPFKDPRLGSPSFQLITPLLFQPNSIQLPAFYNLLTWKTPAFPKLIRFQQNPLFATCLITKKAPPIRLSNHFPTLIANWNPPFTAHLTPRVLLFTPRLTVQFASPLRPVL

SEQ ID NO: 273670 - protein, 243 aa, Zea mays
  unsure (1)..(243): unsure at all Xaa locations
  Clone ID: MRT4577_181174C.1.pep
MAATSPTPTLAKPAAAAHARAPSAGPRRVSLTSCRCHRRRSTPSRWRSLPRCSRRGGKPVVTEVIDEAAPDKGPETGSKGEEEKEAVAGRGAPGWLRLDGVAADILAIAAPAVLALAADPITALVDTAFVGHIGSAQLAAVGASTSIFNLVSKLFNVPLLNVTTSFVAEQQAXMAIRTLEGKEMNXTPLEKARQPKKVLPAVSTSLALAAGIGLLEMVALIVASGTLMNIIGIPVDSPMRAPA

SEQ ID NO: 273671 - protein, 152 aa, Zea mays
  Clone ID: MRT4577_181175C.1.pep
LQEIRDLLDQVNACDPYRVAVTVESALFERIGRSTGTHKVKYRSILFNLKADNNPDFRRRVLLGEVRPGSLVDMPADEMASDARKLENQQIKEKALFDCERASAPKASTDQFKCGRCGQRKTTYYQLQTRSADEPMTTFVTCVNCNNHWKFC

SEQ ID NO: 273672 - protein, 123 aa, Zea mays
  Clone ID: MRT4577_181176C.1.pep
MAPRNGYTGEGGSSVISTDLSHGSVESGESLQPVQPTADVPPEEIPDPEFFSIDTSSPHRCHHEMRLARKVAFVYAATGRRFLGCPLSGPDRCSWFMWIDEAWGPVLSRSLIQLWDQALLDSG

SEQ ID NO: 273673 - protein, 66 aa, Zea mays
  Clone ID: MRT4577_181177C.1.pep
MTAEPLNPMAGLMEELKKEDIQRRLNSIRRLTTIARSLGEERTRKELLPFLSENNDDEAEALFALA

SEQ ID NO: 273674 - protein, 57 aa, Zea mays
  Clone ID: MRT4577_181178C.1.pep
NTAHGVKRESPLTMKQRYNRPEQQGNYGKPKGNCKQILSFTESQTSRNSVNTRSQML

SEQ ID NO: 273675 - protein, 294 aa, Zea mays
  Clone ID: MRT4577_181179C.1.pep
MAKSYTLLFVALVVLALLVSPIACSRKLAKPNKPKPTHKPAARVTPGSNHTGIPAVSAAYGSGGWLSAGATYYGAPNGDGSDGGACGYQTAVGQRPFSSMIAAGSPSLFKGGKGCGACYEVKCDSNPACSGQPATVVITDECPGGVCLAEAAHFDMSGTSMGAMAKPGMADRLRAAGILKIQYKRVPCKYSGVNIAFRVDQGSNPFYLEVLIEFEDGDGDLSAVQLMEAGCGLWPYNSNNGKALKASFSLTRNSVKAPVPVALTSDSGRVLVANNVIPAGWNPGATYRSLVNYS

SEQ ID NO: 273676 - protein, 132 aa, Zea mays
  Clone ID: MRT4577_18117C.1.pep
MGLLDKLWDDTVAGPRPDTGLGRLRKQPVRPAAVKISDPAGDAAAFVPPSPASGSEETPVKVTRSIMIKRPAGYPSSPRSAASTPPASPLGTTPPISPFAGAGGRFRRKSSSDAYERATPPGTTSHPPPFDV

SEQ ID NO: 273677 - protein, 80 aa, Zea mays
  Clone ID: MRT4577_181180C.1.pep
GRGFWPPAPHGEVRQCRGWRPTAPVSSRGERHQVVVLGAASRRTDDHSALKTHPATDLALRPRPQVRSYYPLSLSIYING

SEQ ID NO: 273678 - protein, 295 aa, Zea mays
  Clone ID: MRT4577_181181C.1.pep
MAKSCTLLFGTVLVVLLLLVSPIACSRKLAKPTNKHRPRHKPAAVRARSNHTATPSVSDAYGSGGWLSAGATYYGAPDGDGSDGGACGYQTAVGQRPFSSMIAAGSPSLFKEGKGCGACYEVKCDSNAACSGKPATVVITDECPGGVCLAEAAHFDMSGTSMGAMAKPGMADRLRASGILKIQYKRVPCKYSGVNIAFRVDQGSNPFYLEVLIEFEDGDGDLSAVHLMEAGCGTWTPMVQNWGALWRYNSNTGKALKAPFSLRLTSDSGRVLVANNVIPAGWNPGATYRSLVNYS

SEQ ID NO: 273679 - protein, 120 aa, Zea mays
  unsure (1)..(120): unsure at all Xaa locations
  Clone ID: MRT4577_181182C.1.pep
FGPASCLSXRSSVSGSLAFRFFXFVGPFPRFVVVLLFXWWCAGGFPGFLCPFACWSSLXVLFLXPLLSVAGFFSAWFGCLWFFXXVGLGFFXVCCCHPGPPSVLVXXKXKKXGXGAGLSG

SEQ ID NO: 273680 - protein, 53 aa, Zea mays
  Clone ID: MRT4577_181183C.1.pep
HMAWWHQCEASHNLEDYVIIVIQEHYSNMSGDPSQGCLTLMHRRIRRHQRNAP

SEQ ID NO: 273681 - protein, 854 aa, Zea mays
  unsure (1)..(854): unsure at all Xaa locations
  Clone ID: MRT4577_181184C.1.pep
SLXGSRGLTILEVAXEKIQKSGLRDLTTSKTPEASVSAALSRDTKLFERTAPSTYCVKTPYRKDPDDSEAVLSAAREKIRVFQNTLSECEEVEKDVDEAMRDEDSECDDATDDADGDDVNIEGKDAKSPLVGAQYDTQITVVGDVKKESNSVMNISVPPSIQIKSSASVPLHTLDSKASSSTDPQVGDDDKDTEIDESNQGESWVQGLAEGDYCDLSVDERLNAFVALIGVATEGNSIRAILEERLEAASALKKQMWAEAQLDKRRSRDDFTSKVQYDSYVGMKVDTDQKNNAAESTLTPVHDPIKNNNGNANLMNNGLLVDKQNQLITGDVFHQWNGVSRESSTNAESLSVQQYASSEKTRSQLKSFIGHKAEQLYVYRSLPLGQDRRRNRYWQFSASSSSYDPGSGRVFFESRDGYWRVIDSSEAFEALVSSLDTRGIRESHLHSMLQSIEPTFREAVERKKCVSLEHTTGWTDNGSNESPNCNNEFGSPCSTLSGVASDNLMAYSDTFKIEIGHNEAEKSSISKRASVFLKWMWRECYCHQSTYTMKYGKKRCPELIQSCDHCYQIYLAEEQHCSSCHKSFKPIHNFLEHLSQCEDNQRTNPSWKTQIVGLSVPVGLRLLRLLLATIEASVPAEAXTFLDGFVXKSWGVKLYSASSAEEVLQMLSVLESAIKRDYLSSNFETTTELLNSNTQDATQNSVGGSGSATILPWVPDTTAAVALRLLDLDTSISYKLHSKLVSNKEQEAGDFMKLPLRYPSINKNKQEIEQFIPIGFDQQDGTLLTNSNGRRGRGRGGRGGRGSRGGSRGGSSRGGGGRVPRGIGSSSRIQFRDDNSVPYGRAARKNVRGGRTRG

SEQ ID NO: 273682 - protein, 438 aa, Zea mays
  Clone ID: MRT4577_181185C.1.pep
MAMPTTSSASPCQAPSPAGLPISPGARATILSFSRRLRRPHGAIISAPTGCLFLGLPKSCCSITAFGDVAAVSDDYVESSPSSSGYLNSTMDASSHEDNQSERVAKMNQNSRANNKMIKICDKLIGVFLVDKPTPTDWRKLLAFSREWDNIRPHFFKRCQEKADTELNPEMKHNLLRLGRKLKEIDEDVQRHNELLEVVKSTPSDKLGSIVAKRRKDFTVEFFNHLYYVAESCHDEPEKQTELAKLGNDCVDALQAHDDTTGSLEALNAAELKLKDILNSPSVDAACRKIDDLAEKKELDSALVLMLSKAWSAAKGTDITKSEAKDIMFHLYMTAVANLQRQMPKDIRILKHLIMIEDPEERSSALNDAFTPGPELQGDNVDTLYTSPEALHTWARAIVDAYYNSREGTLIGQARDMMNPKIIKRVEEIVKIIKDKYL

SEQ ID NO: 273683 - protein, 139 aa, Zea mays
  Clone ID: MRT4577_181186C.1.pep
MASVSAIGVLKVPPASTSNSTGKATEAVPTRTLSFSSSVTSSDDKISLKSTVSRLCKSVVRRNPIIVSPKAVSDSQNSQTCLDPDASSSVLGIILGGGAGTRLYPLTKKRAKPAVPLGANYRLIDIPVSNCLNSNISQI

SEQ ID NO: 273684 - protein, 58 aa, Zea mays
  Clone ID: MRT4577_181188C.1.pep
SYGCSSSLSLRFLTQCGHDRTGTYSPACLHSTSYVQLKPGIDQNIFTPAIDSESPTVA

SEQ ID NO: 273685 - protein, 61 aa, Zea mays
  Clone ID: MRT4577_181189C.1.pep
PLFLIFFFFFCTHGDPLHCSYYNTSRGIFNSTHTMQAQKKIKKMNHQNHSLLVDYCNRQAF

SEQ ID NO: 273686 - protein, 132 aa, Zea mays; identical to SEQ ID NO: 273676
  Clone ID: MRT4577_18118C.1.pep

SEQ ID NO: 273687 - protein, 270 aa, Zea mays
  Clone ID: MRT4577_181190C.1.pep
MSGPPPKPWERSGTEGTSGPAPFKPPSGGSTSDVVEASGTAKPSENVTAMEGNAAPNVNSTISRPMPQRPWQQTGYGNTYGGYGGSNMYSSYGGFGNTYGTGGLGNSMYSSYGGGYGGGMYGGGMYGGGMYGGMGGYGGYGMGGMGGMGMGPYGNQDPNSMGPPASPPGFWVSFLRVMHGVVNFFGRISFLVEQNTQASYFFMTAMLQLFDRSGMLYGELARFVLRLLGVRRKPKKGGSIQGPEALAFEGPSRQSIEAPKTNNWDNVWGN

SEQ ID NO: 273688 - protein, 71 aa, Zea mays
  unsure (1)..(71): unsure at all Xaa locations
  Clone ID: MRT4577_181191C.1.pep
VALLCTQGSPLTVPKMSKVXRMLQGIGLQERWARCHKVEVVRQDAESAPLRNDWIVDATDSLGAEQLSGTR

SEQ ID NO: 273689 - protein, 109 aa, Zea mays
  Clone ID: MRT4577_181192C.1.pep
MTLSGHCLCGAVTYSIAVDKPLITGYDHCDDCQRQTGSAYSLVAVVPKAALTLNGPTKSWAGTGSSGKAVHRIFCSECGSPIAHDPDAAPEIIAIKAGTLDSEIKKTLK

SEQ ID NO: 273690 - protein, 94 aa, Zea mays
  Clone ID: MRT4577_181193C.1.pep
FWSGPEWTGKRDRICLVLQLPAPCALNACHVKISVPDRKPPQIHTVFCVDPPALGRRRPVAPAAGRSGQRRRSPSDSLGRTGPGIGPKRVLPAG

SEQ ID NO: 273691 - protein, 60 aa, Zea mays
  unsure (1)..(60): unsure at all Xaa locations
  Clone ID: MRT4577_181194C.1.pep
EGKXAKHQNHLHRPPATKALKTGQMPDTYPRLCTMSPSSLHWPTKSTNGRTRGDRECGPD

SEQ ID NO: 273692 - protein, 111 aa, Zea mays
  Clone ID: MRT4577_181195C.1.pep
PRVRFKGAVPGLTHIEPNKRRLCLELVQSAVMVATRDDGGAHGDAGGGGSDGGSFPRGGDAADDSLVSLTMNSTLMYQGQEMAAALAGDARKGSGGGRGSPSSLYFPNGFA

SEQ ID NO: 273693 - protein, 76 aa, Zea mays
  unsure (1)..(76): unsure at all Xaa locations
  Clone ID: MRT4577_181196C.1.pep
MAIVLRSPRSPAWXWGSXSLRAAPAHTAVGLTATNVTIMGRTAGVRPKLGKQGTYNVKLITPEGELQLQLPDDMDI

SEQ ID NO: 273694 - protein, 53 aa, Zea mays
  Clone ID: MRT4577_181197C.1.pep
SHLTFLCPFFSSSVRFQLVPITWPRRPPCGSLPKRPRTVQKPLSGRPPLILRR

SEQ ID NO: 273695 - protein, 125 aa, Zea mays
  Clone ID: MRT4577_181198C.1.pep
TSSLVWCRCVGSIVFEDIIHVFFILVAAEVIFRCAREHIIVCGTFGCNISISAVCLGNSVRSSVCVGRAVATLSSKVASSCSSNSIIPSCTPVAVVATIVAASVSTSATSSAIVTVAVCRGVRQH

SEQ ID NO: 273696 - protein, 133 aa, Zea mays
  unsure (1)..(133): unsure at all Xaa locations
  Clone ID: MRT4577_181199C.1.pep
PLLLFPPLLFLCLALAWVXRFPSLLSLCLFPGFAFALLAGRPWXCGXAXGWRPXXPRXAFXXLVRWXXXAPRLVAAXVXGXCXXXSXXRPAVXXPXVGGGCAGVRXGVXPPRPSCPLRGEAXQXPPFFFPAAR

SEQ ID NO: 273697 - protein, 132 aa, Zea mays; identical to SEQ ID NO: 273676
  Clone ID: MRT4577_18119C.1.pep

SEQ ID NO: 273698 - protein, 52 aa, Zea mays
  Clone ID: MRT4577_1811C.1.pep
LARSMARIGQPLTTEELTRMMRDADADGDGVISFNEFAAVMAKSALDFLGVA

SEQ ID NO: 273699 - protein, 54 aa, Zea mays
  Clone ID: MRT4577_181200C.1.pep
YISWGASKDNHSSLSPVITIRPTTAAIEKWRETYHMSLMRPKKKKGTNSFFNIK

SEQ ID NO: 273700 - protein, 364 aa, Zea mays
  Clone ID: MRT4577_181201C.1.pep
MAAQLAVAFLALLSSSAFLAVSGQKFNAIFSFGDSMSDTGNLCVNGPPAGLTLTQPPYGETFFGRATCRCSDGRLVVDFLAEKFGLPLLKPSKQGGSDFKQGANMAIIGATTMDSGFFQSLGIADKIWNNGPLNTQIQWFQQLMPSICGSTQACKSYLSKSLFVLGEFGGNDYNAQIFGGYTPEQASGQSATIVDAIGKGVEQLISLGAMYVVVPGVLPVGCFPIYLTLYQTSSAGDYDQYGCLKRFNALSAQHNSLLQAKVSSLQSKYPGARVMYADFYSHVYDMVKSPGSYGFSTNLRACCGAGGGKYNYQNGARCGMPGAYACSDPASSLSWDGIHLTEAAYRKIADGWVSGAYCHPAISA

SEQ ID NO: 273701 - protein, 113 aa, Zea mays
  Clone ID: MRT4577_181202C.1.pep
HQYQSLAVAGTPAEWARVRKLSFLEERGAEEAGNLEDDGLWGQISKVVPDEVCPNGVFLDIVERGRGRHVLKSRFVSVLSMMAIWRACTRRSLVEGSEASNQTLKAPGPLLNQ

SEQ ID NO: 273702 - protein, 88 aa, Zea mays
  Clone ID: MRT4577_181203C.1.pep
VAPKMNSAAASDAPEGTELGPNSSRSVQTPFSTEPAEGETNSTNEESKSQQKVGQFGTQSFKDNNKEADGTVRSNISRSTEELQEPPS

SEQ ID NO: 273703 - protein, 80 aa, Zea mays
  Clone ID: MRT4577_181205C.1.pep
NVRFVLSLYDMFPFFEASRSHSTWPVVLTICNLPTWLMQGCKYLLLPFPVYVPTLAGVDMGVSPSPLMLDNEVMSPKKNQ

SEQ ID NO: 273704 - protein, 64 aa, Zea mays
  unsure (1)..(64): unsure at all Xaa locations
  Clone ID: MRT4577_181206C.1.pep
KGSKKWVWKSQGTVIIKGPFFKKSGGQNERKFPRFVFFPPKPGRXVGKLPRFAGPPKCIVGHPC

SEQ ID NO: 273705 - protein, 102 aa, Zea mays
  Clone ID: MRT4577_181207C.1.pep
GDLGSVTIGGGSAGSTKKPRLSALTPVAGLPGRVTGDQGGVVPVVAGRSRALVSYVTEGGDNRIGDSPRAISDGEPGGLGNSVSLITVHDLSSRGIPSLRRR

SEQ ID NO: 273706 - protein, 41 aa, Zea mays
  unsure (1)..(41): unsure at all Xaa locations
  Clone ID: MRT4577_181208C.1.pep
GKGMEEGEFSKAREDLAALXKDYEEVGAEFYQGEDGDKGDE

SEQ ID NO: 273707 - protein, 48 aa, Zea mays
  Clone ID: MRT4577_181209C.1.pep
HTNYYYDGWLVSCTITNCCWAGDALKPISTSDARPIVQSVWLQTMILF

SEQ ID NO: 273708 - protein, 119 aa, Zea mays
  Clone ID: MRT4577_18120C.1.pep
MRVAACQLPLPTTTPARRRRRASAPPTAAPRPPPRALAAILRSRVIACLRAQDSETALQAAHAAVHGGITVLEVVMTTPGVLEVIEDLCRSYPSLTFGVGTVLNAADARKAICAGAQFL

SEQ ID NO: 273709 - protein, 107 aa, Zea mays
  Clone ID: MRT4577_181210C.1.pep
FGEKGGGPRGGGGNVSKGGPDPQKGGLRFCGDKATPSHKRGPGGGGAHGVFFLIRKKGAGVGREIGERPPRGDFPFRNPGGKGGTTPGGENYKVKGKPGGYPFLGKK

SEQ ID NO: 273710 - protein, 169 aa, Zea mays
  unsure (1)..(169): unsure at all Xaa locations
  Clone ID: MRT4577_181211C.1.pep
MTKKTAKKRGKQFKRPHXALATSDPKPSRRRPKAIDCRARRKAKGCTLMPNNGHGSDKPTRHYRPQQXKKGGAHNVHELDLLMTHNRTYRAEIGHNATTKKRKETAERAAQLDIEATNKLARLRKQEDEQSGPLEQRRTGSCHTLAEGTTKHSVSVALNTRGTPDLVAI

SEQ ID NO: 273711 - protein, 188 aa, Zea mays
  unsure (1)..(188): unsure at all Xaa locations
  Clone ID: MRT4577_181212C.1.pep
PTNSKCVLRLLDHFKHAGPNGQHXCXVTEFLGDSLLRLIRYNRNKGIGLSRVKDICRSVMVGLDYLHSELGIIHTDLKPENVLLESTINPAKDPVRSGFTPILDRPVGNQYGGTVISFSEKMLKMRARRAVAKISQRRVSLGGGVGAEPEKERCLDGISLKCKIVDFGNACWADQQHAGEIQTRQYRA

SEQ ID NO: 273712 - protein, 100 aa, Zea mays
  unsure (1)..(100): unsure at all Xaa locations
  Clone ID: MRT4577_181213C.1.pep
MMRARGVNDGLKPMDSAEKIGKRQVMIGTSSKVIMKFLTAMQSHGYIGEIQYTDDHRSXKMVDEINGTLIYRRLIRPRDDIFFFRHPTHGPQGCSCPGTS

SEQ ID NO: 273713 - protein, 96 aa, Zea mays
  unsure (1)..(96): unsure at all Xaa locations
  Clone ID: MRT4577_181214C.1.pep
LIYSRRRRTRRHHEGVLVALALLXLAASATSTHTSGGCGCQPPPPGHIPTPVHVPPAVHRPPSGHLPPPVHLAPADHXPPPVHVPTPVNVTSTPCQ

SEQ ID NO: 273714 - protein, 259 aa, Zea mays
  Clone ID: MRT4577_181215C.1.pep
TRTCRLYDAVNVLLSLQNPNGGYGTWELARTYPWIEIFNMTEIYADIMVEHQYVECTSSVMQALVLFREKYPWHRKDEIDQCIRGATEFIEKLQNDDGSWFGSWGICFTYGTRFAIEGLSAVGQSYGNSTCIQKACKFLLAKQLKNGGWGESHLSSTTKAYTNLDKEKSHIVNTAWAMLALMKAGQFQAERDPTPLHKAARLIMSMQLSNGDFPQEEMIGSFLKNGPLCYMAYRNIFPIWALGEYQKLVLQCDLQWPTF

SEQ ID NO: 273715 - protein, 62 aa, Zea mays
  Clone ID: MRT4577_181216C.1.pep
MWNQGGKPNPLKAPKVAKRESAESVFFFLRKKKDGEKALKELKPKPQRGPIGGWVFKKSGKK

SEQ ID NO: 273716 - protein, 77 aa, Zea mays
  unsure (1)..(77): unsure at all Xaa locations
  Clone ID: MRT4577_181217C.1.pep
EGKARPGKHKRQKEGGNPKKPQEGQQNKRTTGGAWDQQAQNYQKQRSGGGPQLIFKGKRKXDKXGGGIYGRGARKPP

SEQ ID NO: 273717 - protein, 88 aa, Zea mays
  unsure (1)..(88): unsure at all Xaa locations
  Clone ID: MRT4577_181218C.1.pep
LXXXSVASDGAPERPVASWLPSATRCXXRSDDPKPAGQPRMGGALAXXRRRVXXSSPFSDXGSXPPXXHSVERASEREPTPGXXDPFP

SEQ ID NO: 273718 - protein, 73 aa, Zea mays
  Clone ID: MRT4577_181219C.1.pep
AMLTQVLNGGGANDNLHGVSTVNQQAVNDQVNNEFFMGTNEAHNAESDDLDDFLAYLVNQDFINNGDSFIDRD

SEQ ID NO: 273719 - protein, 84 aa, Zea mays
  Clone ID: MRT4577_18121C.1.pep
QHRSLYSSPIPGGLLGQTWMERFVSMFHLEQSDKMLNRPPITCQSFCTITALMVKMRISLGFIPGLPIASPPIGQFFQMGYFMK

SEQ ID NO: 273720 - protein, 76 aa, Zea mays
  Clone ID: MRT4577_181220C.1.pep
NLLRRLNIHVRLFMPCAHSHTHKSGIRLPQTQSTTHRLYAGEKTHLLTYMYTCTAGSLIRASTQQTQADALAELPL

SEQ ID NO: 273721 - protein, 502 aa, Zea mays
  Clone ID: MRT4577_181221C.1.pep
MATANGSSKGSFEVPKVEVRFTKLFIDGKFVDAVSGKTFETRDPRTGEVIASIAEGGKADVDLAVKAAREAFDNGPWPRMTGYERGRILHRFADLIDEHVEELAALDTVDAGKLFAVGKARDIPGAAHLLRYYAGAADKVHGATLKMAQRMHGYTLKEPVGVVGHIVPWNYPTTMFFFKVGPALAAGCAVVVKPAEQTPLSALFYAHLAREAGVPAGVLNVVPGFGPTAGAAVAAHMDVDKVSFTGSTEVGRLVMRAAAESNLKPVSLELGGKSPVIVFDDADLDMAVNLVNFATYTNKGEICVAGTRIYVQEGIYDEFVKKAAELASKSVVGDPFNPSVSQGPQVDKDQYEKVLRYIDIGKREGATLVTGGKPCGDKGYYIEPTIFTDVKDDMTIAQDEIFGPVMALMKFKTVEEVIQKANNTRYGLAAGIVTKNIDVANTVSRSIRAGAIWINCYFAFDPDAPFGGYKMSGFGKDMGMDALDKYLQTKTVVTPLYNTPWL

SEQ ID NO: 273722 - protein, 48 aa, Zea mays
  Clone ID: MRT4577_181222C.1.pep
VFMVSKSGPSYRAELCPPLYLAPLSWPSKAAIPHCRSLPIVRILLAFS

SEQ ID NO: 273723 - protein, 131 aa, Zea mays
  Clone ID: MRT4577_181223C.1.pep
GKPCGDKGYYIEPTIFTDVKDDMTIAQDEIFGPVMALMKFKTVEEVIQKANNTRYGLAAGIVTKNIDVANTVSRSIRAGAIWINCYFAFDPDAPFGGYKMSGFGKDMGMDALDKYLQTKTVVTPLYNTPWL

SEQ ID NO: 273724 - protein, 199 aa, Zea mays
  unsure (1)..(199): unsure at all Xaa locations
  Clone ID: MRT4577_181224C.1.pep
MATANGSSKGPFEVPKVEVRFTKLFIDGKFVDAVSGKTFETRDPRTGEVIASIAEGGKADVDLAVKAAREAFDNGPWPRMTGYERGRILHRFADLIDEHVEELAALDTVDAGKLFAVGKARDIPGXAAHLLRYYAGAADKVHGATLKMAQRMHGYTLKEPRGGVXGHHXVPWNYPTTMFFFKVGPAARRKAAAVVVKPA

SEQ ID NO: 273725 - protein, 278 aa, Zea mays
  unsure (1)..(278): unsure at all Xaa locations
  Clone ID: MRT4577_181225C.1.pep
SDLVNFATYTNXGEICVAGTRIYVQEGIYDEFVKKAAELASKSVVGDPFNPSVSQGPQVYDYDMSNVRDPARCGDQLNTAVKSQCTXDKDQYEKVLRYIDIGKREGATLVTGGKPCGDKGYYIEPTIFTDVKVKCFADSSFFSMDMHGCNKFFSKQNTNPNIFNYMQDDMTIAQDEIFGPVMALMKFKTVEEVIQKANNTRYGLAAGIVTKNIDVANTVSRSIRAGAIWINCYFAFDPDAPFGGYKMSGFGKDMGMDALDKYLQTKTVVTPLYNTPWL

SEQ ID NO: 273726 - protein, 67 aa, Zea mays
  Clone ID: MRT4577_181226C.1.pep
GIIVKRVSTEDVLTSPIPDYQILQSIVAFKVLVVGEEIFIRFRSDLESIQWTSTYLPSWFAARWMPP

SEQ ID NO: 273727 - protein, 86 aa, Zea mays
  Clone ID: MRT4577_181227C.1.pep
LARTRRDSTGRAREGHKDGHAPPEEEHKVEGAVGKEVAASKRAPDVKLMPTPPPRRCWSGGQDPARSLDASTLTIVKWCHTTPPEG

SEQ ID NO: 273728 - protein, 138 aa, Zea mays
  Clone ID: MRT4577_181228C.1.pep
LQAFYKPQNLLQVGYANYQQLSTPIQLVTRLLSQLSPVVSHAPNANAIKEISTDLLISFSCDRAEARTWAEAGGDRTVGRRSRSWAREPLAASGKSVPAERGGATGGTTLAKPRRSRGDEPVREGRKRTTFWAEPPAG

SEQ ID NO: 273729 - protein, 98 aa, Zea mays
  Clone ID: MRT4577_181229C.1.pep
LSTSPIIDPPLLPCWSPRTLPQLWITALSRRIVCCLTDFCNLNLSCSCSDVDFNLVSSQYSIDLRTMASSLPILPNPFKGMFSRTHNPPHIPMFPERA

SEQ ID NO: 273730 - protein, 266 aa, Zea mays
  Clone ID: MRT4577_18122C.1.pep
RTRGRTRGRTRGNQHLADESQKAQAFDDLLGVLAHVQMDRDAVEALLQPTDTIDRHVHEIQQLVKEVEDLEYALDSSGRGVKSLEEIQLELNFLQRTRDTLIVEVDDLRDQHRMLNEDMSSAQVRWHNAREEKVKASSILERFQKSEEELVLLAEEKEQLIVEKKLLEESLDPLSKEKESLLQEYNALKQKLDEEYHQLAERKREFQQELDALGRLSMKIKGYLDSKKNEKLKELQGRHVLCHSQLQSCMAKQQRISAELNKSKEL

SEQ ID NO: 273731 - protein, 77 aa, Zea mays
  Clone ID: MRT4577_181230C.1.pep
QNNRYISLVIFIKKKGPFFFFFFQHPWKKRPQIFPLRKNLKKGGEHWAFFFCPKKKKTQYKKKKKKKKKQKKGRDRC

SEQ ID NO: 273732 - protein, 69 aa, Zea mays
  Clone ID: MRT4577_181231C.1.pep
GQKKYRWVNYKILGRVLPLLCILKGIEQPLNGTPREGVLPAQQPTMCLGQPGDSTIYILRMQIRLSILT

SEQ ID NO: 273733 - protein, 83 aa, Zea mays
  unsure (1)..(83): unsure at all Xaa locations
  Clone ID: MRT4577_181232C.1.pep
LLMLXTLSAXNPNATIFTQCSQAPIASLLTPYLPSMIATVCENPALQPYMLQQAIAASNIPLSPLLQQSPALSLVHTFLLTIN

SEQ ID NO: 273734 - protein, 61 aa, Zea mays
  Clone ID: MRT4577_181233C.1.pep
GAANNPWISKRPFHQTSLVPILCINNCRFFSSSATINMCSKCHKDIFTSMIRPSCLPPLST

SEQ ID NO: 273735 - protein, 61 aa, Zea mays
  unsure (1)..(61): unsure at all Xaa locations
  Clone ID: MRT4577_181234C.1.pep
PTRXXXYTLFSTNPXPSAGELLFWVGTTPXLPPTQATNHLYSHITGNNLQDPNNKNIIIYD

SEQ ID NO: 273736 - protein, 120 aa, Zea mays
  unsure (1)..(120): unsure at all Xaa locations
  Clone ID: MRT4577_181235C.1.pep
LLSVASVTARAPVAALRPSAASLKSSSAFLGHSSRLGRTESPTRRNLKAEAKGEWLPGLPCPSYLDGILACDNGLDLLLLAEDPXNLLRFVQAELANGRRSMLGVLSMLNPDVLTKGGLI

SEQ ID NO: 273737 - protein, 109 aa, Zea mays
  unsure (1)..(109): unsure at all Xaa locations
  Clone ID: MRT4577_181236C.1.pep
ALTAGWAAGGEGIEPGGGDVLLYATKVLDKIXSTAHXDQTMGVKIIMNTMKDPLMTICANADIDGAIIIWKLIKQKDLSWGYDATKGEYVDMINGGIMYPLKVIRSVLQ

SEQ ID NO: 273738 - protein, 63 aa, Zea mays
  Clone ID: MRT4577_181237C.1.pep
SLGSKNNNNKRFHRLELRMVPKKKKKKKNKKKKKKKKKKKKKKKKGKKKKKKKKKKAFGLLPL

SEQ ID NO: 273739 - protein, 67 aa, Zea mays
  Clone ID: MRT4577_181238C.1.pep
MTRGDQRERDRQRAQARRPAAKGRDDGLTPEQRRERDAKALQEKAARKAAQAAGGACAKGGKNTGKK

SEQ ID NO: 273740 - protein, 100 aa, Zea mays
  Clone ID: MRT4577_181239C.1.pep
RRCCFSGCGTPSAATSPSRTSWTSSRQPGPFRARRTVYSGSRRTDCTIWPRRNRIFTAHSWAQRACTCTTQGATSTGTAATSCRAWSRSGSCKLNYSHAG

SEQ ID NO: 273741 - protein, 329 aa, Zea mays
  Clone ID: MRT4577_18123C.1.pep
TRPAVEASEMAEHAQRLISGNPSLGHRITVIKDKVEEVLLPEKADILISEPMGTLLVNERMLESYVIARDRLLAPDGKMFPTTGRIHMAPFSDEYLYVEIANKALFWQQHNFFGVDLTPLHGSAFQGYFSQPVVDAFDPRLLISPPIYHTLDFTSMKEEELYEINIPLSFVASVGTRVHGLACWFDVLFNGSTVQRWLTTAPGSPTTHWYQLRCVLSQPLYVMAGQEITGRLRLVAHSAQSYTIYLTMSAKMWGVGAEQGGILQTSTGKLELKEPYYRLSQPQSYMLPQDQQQQQQLSSLQPHGSEQQMQEGLSPGITIDQVDKDYGLN

SEQ ID NO: 273742 - protein, 77 aa, Zea mays
  Clone ID: MRT4577_181240C.1.pep
WFRFVLDLGWAARGDQRERDRQRAQARRPAAKGRDDGLTPEQRRERDAKALQEKAARKAAQAAGGACAKGGKNTGKK

SEQ ID NO: 273743 - protein, 152 aa, Zea mays
  unsure (1)..(152): unsure at all Xaa locations
  Clone ID: MRT4577_181241C.1.pep
IVWNVAAGPMAFKHAGXRXSWRGTAPPPTPRLHAATPVTEPLLDELLDAFEDVFAAPFGLPPARGHAHHITLKLGSVPVAVRPYRYPAAHKDELERQCAAMMEQGIVRRSDSAFSXPVLLVKKPDGSWRFCVDYRALNAITMKDAYDSNGIR

SEQ ID NO: 273744 - protein, 295 aa, Zea mays
  unsure (1)..(295): unsure at all Xaa locations
  Clone ID: MRT4577_181242C.1.pep
PPYTPGPSPFXDRVVQELLLLLLEPVYEARFSPKSFAFRPGRSPHAAIRTIRRSFAPYLWYIKGDLSPLLHSPDPALVVGALIRDVRDKKVVDLIRSALLTPVVTASDDAAVKKKKTKRKYQKKKVLPEGEPKPDPYWLQTFFGFAPEEAQTQPDWGHCGVLSPLLANVCLDEFDKWMEERIKEFYKPSKSDVVGGGXDGIEQGNTSWPEFVPTTGPDKTRKVDYIRYGGHFLIGVRGPRADAAVLRKQLVEFCDQRFRIKLVNESLPIGHIXKGVMFLEHVLCRWFGGPTLRYT

SEQ ID NO: 273745 - protein, 80 aa, Zea mays
  unsure (1)..(80): unsure at all Xaa locations
  Clone ID: MRT4577_181243C.1.pep
MAPLLAAAMNHAAGHAGLRRRLLGPNNERVSRNHLPSSSPHNSKGRCNLSFTTRXARVVSQNGVQMSSPPRLPXREWIPP

SEQ ID NO: 273746 - protein, 63 aa, Zea mays
  unsure (1)..(63): unsure at all Xaa locations
  Clone ID: MRT4577_181244C.1.pep
ARNSARVELPEDLCLREAHAIGECLQIKNEVLREAEQAFVHLDLEXDHKPEHSILNKLSSSQT

SEQ ID NO: 273747 - protein, 129 aa, Zea mays
  Clone ID: MRT4577_181245C.1.pep
LNKLSDEDRKGQLKLHGGQAVKEKDYAGALKLYTEAIMLDPADATLYSNRSFCHLKIGAARDALVDANACIGLQPDWPKAYYRKGACLMSLKEYKEARDAFMGGLKLDPSNLDIQNAYREAEEAMIKNH

SEQ ID NO: 273748 - protein, 96 aa, Zea mays
  Clone ID: MRT4577_181246C.1.pep
AYPEAKGNEIGIALGIPIPHFQDITMHKRSYMNRNYRISDHAYPETKGNVIRIPRRISIPHVQYIQNAKCTYMNCKYVFYYHAYPEAKGNEIGISG

SEQ ID NO: 273749 - protein, 86 aa, Zea mays
  Clone ID: MRT4577_181247C.1.pep
KTMGSLKSPKPTGVFEKVKKPPPKFNEGFKNPSPAESAEFKKAYQKPRETSRKLKSPPQGGAAKNSVQVFLKGNGASPPYFIHPML

SEQ ID NO: 273750 - protein, 104 aa, Zea mays
  Clone ID: MRT4577_181248C.1.pep
LFVLFLLRGSGSGYAESPAKNLAGKDHSLVLIILYIRQCQSVSRIQVVIFPRFIQHRSSQFSKRRADQAHWSGGRIPWKSSRRVTLTEREELVGIFWKKTPARL

SEQ ID NO: 273751 - protein, 85 aa, Zea mays
  unsure (1)..(85): unsure at all Xaa locations
  Clone ID: MRT4577_181249C.1.pep
NHQPXQWPYKLFCSRIKNRCKEQLSTTPPHTFQAQTTIYIHDQPSANIQTELPWSSSSTTAPYSSHGPPQQSTPTHTQHYNLRST

SEQ ID NO: 273752 - protein, 245 aa, Zea mays
  unsure (1)..(245): unsure at all Xaa locations
  Clone ID: MRT4577_18124C.1.pep
MYFHYYGQLLHQQXNMLQDFXVRTGTYYAAVMENRSDFEGRVVVDVGAGSGILSLFAAQAGARHVYAVEASEMAENAQRLMSGNPSLGQRITVIRGKVEEVELPEKADILISEPMGTLLVNERMLESYVIARDRFLAPDGKMFPTTGRIHMAPFSDEYLYVEIANKALFWQQHNFFGVDLTPLHGSAFQGYFSQPVVDAFDPRLLISPPIYHTLDFTSMKEEELYEIDIPLSFVASVGTRVHGLA

SEQ ID NO: 273753 - protein, 85 aa, Zea mays
  Clone ID: MRT4577_181250C.1.pep
RKNNGLLIQDLELHRVEGSLYRLHRSSSCQNIIRANTLPRRVAAHLGLRSHLARPYNAPRISVPILLGPAGGRRQAATIYPLLLQ

SEQ ID NO: 273754 - protein, 66 aa, Zea mays
  Clone ID: MRT4577_181251C.1.pep
SWGGRLHEFGLSLQWRVAMKVHMEHYLKLVVLFSLQHWSSSFLDICWFDKPQILPRPPRLAPGSKV

SEQ ID NO: 273755 - protein, 106 aa, Zea mays
  Clone ID: MRT4577_181252C.1.pep
EGDLAGGCAGALQLLVAAAAVGTAATWRSCRRPSATPGLGSPPREAVGHGHQRRPGLRRQAELAFADAVDVDEHRLDGDRALGVARRWTQILPLPGAGTRHVPQEG

SEQ ID NO: 273756 - protein, 80 aa, Zea mays
  Clone ID: MRT4577_181253C.1.pep
PPPPSEIKNILATETMGIPQGVTVTVAGKLLTVEGPRGKLTLNFKHLNLDFHTSNAVRKLIVYAWCGTRRTMYVIRTAIY

SEQ ID NO: 273757 - protein, 63 aa, Zea mays
  Clone ID: MRT4577_181254C.1.pep
MEVAEAPAPAPDEDGLDERGVALHLDLPRLLAGVVSGALTGLFALAGALTGAVTGAVAGRASD

SEQ ID NO: 273758 - protein, 118 aa, Zea mays
  Clone ID: MRT4577_181255C.1.pep
TNGRCFAPRFFSPTNDCGPLTQKMAQWCFSFFAQTRVFPFFQKFWGGPPPPFGIAHFFPLVTLFFSSRGRPLPSPKFGGAPFHFLCSVEHLKKLFGRSFSAPPKVIGASPLVLTEGPR

SEQ ID NO: 273759 - protein, 52 aa, Zea mays
  unsure (1)..(52): unsure at all Xaa locations
  Clone ID: MRT4577_181256C.1.pep
VHCTTIRSRRHVFKLLDGXFYRPIWXLPFPPXXYSALXYPLLKGXXFLQXYP

SEQ ID NO: 273760 - protein, 58 aa, Zea mays
  Clone ID: MRT4577_181257C.1.pep
KINRVVFVGNFLRVNTLSMKLLAYALDYWSKGQLKALFLGHEGYFGADGALLGLQNFS

SEQ ID NO: 273761 - protein, 248 aa, Zea mays
  unsure (1)..(248): unsure at all Xaa locations
  Clone ID: MRT4577_181258C.1.pep
MKATTWRGAPGTLPAASAKEKRRKQKTPAPRGLMCGCGSTRSVSVDISAAVTTAARTRRRVSTAGEPASAAKTTTTTGCGRGADEASAEGTPSVDSLLRQLRELERGVRALGLGVREREEGGXRHQGRRRPRKRRQGPAGTRGXRERRGXRLDYGSVAVVTESADPLRDFRRSMAQMIVENGITGGAELRELLRRFLALNAACHHHLILRAFGDVWEEIFAAAAAGRDGGRASKRPRGRAGAGADTLS

SEQ ID NO: 273762 - protein, 86 aa, Zea mays
  Clone ID: MRT4577_181259C.1.pep
MVAPICSLGFQLHGLAPSSCASSFPSQLTEADLGSAPIAVELSRSSPAPRPLQLTSTPCSSVSRDLALVPMALGRASPRCSESTAA

SEQ ID NO: 273763 - protein, 110 aa, Zea mays
  Clone ID: MRT4577_18125C.1.pep
SSWLKLGSDLNLPGVRSVGKQQESYTRESRAGRSARSRSASNGAAGNGISRPSQPACFHQLWKRFPCVPCRLVVAKKLSSTGSIDLSTVVPKSVDRTCRQIFCWLTLKQK

SEQ ID NO: 273764 - protein, 245 aa, Zea mays
  unsure (1)..(245): unsure at all Xaa locations
  Clone ID: MRT4577_181260C.1.pep
RLTRQIEQLHNDHCAHVEELVYLKWVNACLRHELRDHDGQPTAEQQGPSAGSRDLSALELSKSMSFRSSERAKQLMLRYGSPGLDRFDPALFSPLHESVDGDGYGYERSPAHSYEPERSPCAXRRTATASSSPAAAPGKKAGPRRLKLLGNIKKLLPAVGKRSHSNHGHGHAGHDGRKAPAPAPARRDEYLDKAMQWLSAHDVLDGDHSYVSTPLSSCERTPLSSATTSTTGDSRARYGDGGGGR

SEQ ID NO: 273765 - protein, 62 aa, Zea mays
  unsure (1)..(62): unsure at all Xaa locations
  Clone ID: MRT4577_181261C.1.pep
PPPKNTPRRGGPPPPPQGKDSPPGPQRGXPKYVKNEDGLWPFXTDSFANFSNLPLFWGLGIN

SEQ ID NO: 273766 - protein, 137 aa, Zea mays
  Clone ID: MRT4577_181262C.1.pep
MTQAKSTPGRREMGRARSPEPLDFFIWTVEDVGLWLEEINLGGYRQVFQENSVNGEYLESLSMFTTEQILRFIRRCHMKWGDFITLCKELRRIKVACLKGEQEVRRPWWAPACLSVVFVRAAKQNRKSRVVSLKLEP

SEQ ID NO: 273767 - protein, 87 aa, Zea mays
  Clone ID: MRT4577_181263C.1.pep
LLSAAPAWRQQWQSLGQTHRWLVPLQQRPVEPSLWDAVELVGSLERRPLQAVGLLLALARWLHSRRPSVCRGGSPRQEGERGELCDA

SEQ ID NO: 273768 - protein, 116 aa, Zea mays
  Clone ID: MRT4577_181264C.1.pep
LDFFIWTVEDVGLWLEEINLGGYRQVFQENSVNGEYLESLSMFTTEQILRFIRRCHMKWGDFITLCKELRRIKVACLKGEQEVRRPWWAPACLSVVFVRAAKQNRKSRVVSLKLEP

SEQ ID NO: 273769 - protein, 42 aa, Zea mays
  unsure (1)..(42): unsure at all Xaa locations
  Clone ID: MRT4577_181265C.1.pep
MQAEHGTQSRTRDMFARXFRKKGYITLTTYLRTYKIGDYVDV

SEQ ID NO: 273770 - protein, 137 aa, Zea mays; identical to SEQ ID NO: 273766
  Clone ID: MRT4577_181266C.1.pep

SEQ ID NO: 273771 - protein, 137 aa, Zea mays
  Clone ID: MRT4577_181267C.1.pep
MTQAKSAPGRKEMGRGRSPEPLDFFIWTVEDVGLWLEEINLGGYRQVFEENGVNGEYLESLSMFTTEQILRFIRRCHMKWGDFITLCKELRRIKVACLKGEQEVRRPWWAPACLSIVFVRAAKQNRKSRVVSLKLEP

SEQ ID NO: 273772 - protein, 228 aa, Zea mays
  unsure (1)..(228): unsure at all Xaa locations
  Clone ID: MRT4577_181268C.1.pep
PFGRPIVYQLILSLINTSANTQPFPYHQVLYPNQSRCVDSLLLLFSPLPLRPPTTALTASPSTALATAPARRPPXERPXSPPLLRSPATRSLHPLSPRPPSPPTLRRPPPCLPASLSPPALRFPATELLPASPLRSPLSPPRAPTCPKPPRSLPPAPHPXETSAPAGYPTGPAPVPSSVVPSAPAGTGSYGVPVPSVPAAPYPSAPASSVVAPYPSGSXSPPAPPGGT

SEQ ID NO: 273773 - protein, 155 aa, Zea mays
  Clone ID: MRT4577_181269C.1.pep
LSTRRRRPQHGWRVDPSRSPRRISTRLALSESSGAEIREREDWSLLGLDVGLWLEEINLGGYRQVFEENGVNGEYLESLSMFTTEQILRFIRRCHMKWGDFITLCKELRRIKVACLKGEQEVRRPWWAPACLSIVFVRAAKQNRKSRVVSLKLEP

SEQ ID NO: 273774 - protein, 269 aa, Zea mays
  Clone ID: MRT4577_18126C.1.pep
ADVDEEETARKAGHTVKSARESAQHTASEIGKKAGYAKETAGDAAAGASNKAGQAKDQAKDTVKGAAGEASSKAEYGKQKTKEAAEAASERGAEAHERSKKGKAKVEEKAREKAGQGYESAKDAAGKAQETLSQTTDAAAEKAAAAKDAAWETTAAAKEKAEAAKDAAWEKADKAGKKAQESKEAAKGKATEKTASAKDAAWETVEAAKEKAGEGYERVKEKARETADTAKERLEEVKERVAGPDVTAVDGKGKHRRADADKYRSEDEL

SEQ ID NO: 273775 - protein, 137 aa, Zea mays
  Clone ID: MRT4577_181270C.1.pep
MTQAKSTPGRREMGRARSPEPLDFFIWTVEDVGLWLEEINLGGYKQVFQENSVNGEYLESLSMFTTEQILRFIRRCHMKWGDFITLCKELRRIKVACLKGEQEARRPWWAPACLSVVFVRAAKQNRKSRVVSLKLEP

SEQ ID NO: 273776 - protein, 116 aa, Zea mays
  Clone ID: MRT4577_181271C.1.pep
GEDWSQLGSDVGLWLEEINLGGYRQVFQENSVNGEYLESLSMFTTEQILRFIRRCHMKWGDFITLCKELRRIKVACLKGEQEVRRPWWASACLSVVFVRAAKQNRKSRVVSLKLEP

SEQ ID NO: 273777 - protein, 211 aa, Zea mays
  unsure (1)..(211): unsure at all Xaa locations
  Clone ID: MRT4577_181272C.1.pep
NPALPTRLLGVLDNLGRVGQQHGSXTKGANEVLLVIEAYKTLRDRAPYPASFMLAQLTGSYAFVLFAXGGDSLLVASDPEGKVPLFWGITADGCVAFSDDIDMLKGSCGKSLAPFPQGCFYSNALGGLKCYENPKHKVTAVPADEEEICGAXSRWKGLQXTALHFXRRFXRVEAWXSAMQCRTVVHAWWXWCNIVASHVHATESICVMHLS

SEQ ID NO: 273778 - protein, 134 aa, Zea mays
  unsure (1)..(134): unsure at all Xaa locations
  Clone ID: MRT4577_181273C.1.pep
LLLNYYNLLQQTPYVVHQFYSESSTMVRVDDLTGTTASVNNMMDIHSLIMSLNFTQIEIKTANFVNSWGDGVLVXXXXFFXTNVFSHXXKFIHMFFLAPQEKGYFDLNNYFHFFYQKHVHSAPLIALYDFYYNL

SEQ ID NO: 273779 - protein, 56 aa, Zea mays
  Clone ID: MRT4577_181274C.1.pep
FKIPCSSFLYFRKSNFKSRENSYYKTFLLVFVGEFFKPTIIGILGVTISMPMSHVV

SEQ ID NO: 273780 - protein, 60 aa, Zea mays
  Clone ID: MRT4577_181275C.1.pep
IFQIRPMNGWGIAAYVQSFSAPPPAITCVLDYSKTRPLRYFSPSLFPHCFFSIPELYFFL

SEQ ID NO: 273781 - protein, 103 aa, Zea mays
  unsure (1)..(103): unsure at all Xaa locations
  Clone ID: MRT4577_181276C.1.pep
DPMWCPXARGPRXLDRTPGADYSFXPLERGRHAESLHSDLDSLDQNLTQSLXGEIIGTPFEDADDKATPVEPYAEXHELQRFRECELIHGHXAMLXSLGALTV

SEQ ID NO: 273782 - protein, 53 aa, Zea mays
  Clone ID: MRT4577_181277C.1.pep
TEFSTQKPSIPPEGGSFIMSEHHTYSASPSYTVLSLTTSIPTYLTHQSDSSHP

SEQ ID NO: 273783 - protein, 114 aa, Zea mays
  Clone ID: MRT4577_181278C.1.pep
PVTFALAIATVTARLPERPAAAMSSAASALRPGSVESRSSSEQLRSPRACAVAGPNKARPSPLRVPSPHAPIRLLRCVSSVHHTGHSQLHARLPRTRAPASKPLHCDRLGKEVL

SEQ ID NO: 273784 - protein, 71 aa, Zea mays
  Clone ID: MRT4577_181279C.1.pep
MSGSFVNVGCRRAPALAVGWWSRRRVLAGSEDLHPSLAVLALELARKAGAGAGATGLRADLTCGAGPCLPT

SEQ ID NO: 273785 - protein, 77 aa, Zea mays
  unsure (1)..(77): unsure at all Xaa locations
  Clone ID: MRT4577_18127C.1.pep
MAATAAAGIAPMFXSSINSVKCLRSSKNCSIIDPLITTVPSNRGMFGSHLVEPLSINSHKLWGPIISAAVAQEEAVV

SEQ ID NO: 273786 - protein, 144 aa, Zea mays
  Clone ID: MRT4577_181280C.1.pep
GEHCAYVVYILVTHLVAQMLSHDTGQIARAHHHDDGDGVHVRILCYEVVVTNARVFEVHLLQDSSWQATASPAPSKSGDPMYRVSVCTPRFLITVDSRRDDPLPSSSRTINTSIRSENIAGAICPTYGIIRSSGGGSERSRNGR

SEQ ID NO: 273787 - protein, 113 aa, Zea mays
  unsure (1)..(113): unsure at all Xaa locations
  Clone ID: MRT4577_181281C.1.pep
VCAMEVRLSVMCCYQSQVSIFQAGRITRFNGRRFCVLNLVGMSTLLVDVHRSAIMXPLCNFDARSAMSGSSDSGRVRVASXDSGSAVYGYVLVPGLKLMVPQCYVVAADEQGE

SEQ ID NO: 273788 - protein, 120 aa, Zea mays
  Clone ID: MRT4577_181282C.1.pep
MIMGLPEVKQKKKKRLVHSTRGEDRHGHHHQDGSEAWVLGLSGAGIAALPLHQLKPVRVEVKAGRRRHAAATEDGEEEEEPVTPRGEGWRIPAEAVACPPAPKKPRTAVFIVRDNAAAGG

SEQ ID NO: 273789 - protein, 115 aa, Zea mays
  Clone ID: MRT4577_181283C.1.pep
VGERPLQDLSSSSTPTIFPPFNLLGAIRWQNLVLLLFQGPRQDSKCRKEGGEFRYPGAMYHRGVIHASGAIMLSGSFGPPKHLPNRPFVGERMPFWGLLLWRAQNCLEGIHGLLS

SEQ ID NO: 273790 - protein, 63 aa, Zea mays
  Clone ID: MRT4577_181284C.1.pep
FSHLYYSNRFTDWNLKAGFLSCGLIRVYLTKISICVLHNVGPLCSIFGSLCAKQSDVSCSSEQ

SEQ ID NO: 273791 - protein, 353 aa, Zea mays
  unsure (1)..(353): unsure at all Xaa locations
  Clone ID: MRT4577_181285C.1.pep
MVGRVLTLLKEGIPPPNILAMTFTTAAASEMRERIGTVAGKAVAKDIAISTFHSFCLQLCRTHAEKLGRTSEFIIYGHGQQRRALIETERLLENDKNNGVGDTTKQYDGDIKNSFKDKAKKWQKFITQAKASGRTPEDYEKKGDLTGASVLRHYNEILRSCNALDYHDFINSSITLLTNFPEVYKECQDMWRAIVVDEFQDTSAMQYCLLKILASHNHITIVGDEDQSIFSFNGADVSGFDSFRKDFPDHKEIRLSKNYRSTRAIVEAATALIQNNTKRHHPRLVETDNPSGCKITVKECHSEDSQCAFVIDKIIEITSGTAEGCNFGNIAVLYRRQITGKXFQVSFRRQQRN

SEQ ID NO: 273792 - protein, 55 aa, Zea mays
  Clone ID: MRT4577_181286C.1.pep
RFFFELVYQFTTFQDESKTTRGGNSKFPLFKTLYTSLLPIRMGTINKTVNGTRIG

SEQ ID NO: 273793 - protein, 98 aa, Zea mays
  unsure (1)..(98): unsure at all Xaa locations
  Clone ID: MRT4577_181287C.1.pep
VLAIRYDAFGEDSSSAMGVENRAKLEARLRTLEDRGIRKISGTGKALAKTEKYEHKXVEEEEEEKVAEEEETSVKKKKKRGKKKHIKEEPLSEXRPCT

SEQ ID NO: 273794 - protein, 69 aa, Zea mays
  Clone ID: MRT4577_181288C.1.pep
GPTFYLTSILRRRQTPFYCVFTTKQPSCIHPYNFLITIAYILFIQTLLLSTNYTVINNSQTFLITFQLH

SEQ ID NO: 273795 - protein, 50 aa, Zea mays
  Clone ID: MRT4577_181289C.1.pep
FYQITDLGGFIYPIVKWVSINNPMYKMGSFLGSQKKKKKKKKKKKKKKKK

SEQ ID NO: 273796 - protein, 60 aa, Zea mays
  Clone ID: MRT4577_18128C.1.pep
LLAFPATPKKTIKFGNPFNQPGVTTNTRCSHMDWTHNIQRGEPIPKKTFGPMETNKRVMQ

SEQ ID NO: 273797 - protein, 126 aa, Zea mays
  Clone ID: MRT4577_181290C.1.pep
KKALYFDGPEEDRSLVSCFMTATKAGRHKELLDSQVRNEMRAEVLEEIAHLVMRCLSMSGEERPTMKEAAERLERLRRYQQHPWAQDGNLEERQTLLPMEQRDLPSMNRQQDILDLEEGSAYTYSL

SEQ ID NO: 273798 - protein, 62 aa, Zea mays
  Clone ID: MRT4577_181291C.1.pep
FMSANAPCLFFFIRSQNFFLVIKRGAGVFTKDGFSLFLIGLVDDVYHQNLITGWYLVGVWQN

SEQ ID NO: 273799 - protein, 20 aa, Zea mays
  Clone ID: MRT4577_181292C.1.pep
NVFCSEFRGSIRDLKEPKYF

SEQ ID NO: 273800 - protein, 87 aa, Zea mays
  Clone ID: MRT4577_181293C.1.pep
PPPAPKPYPTHPPRASPGPASPGAGGGHCPPPGMGLAGLATMGQNLALTMAGKGFPISVYNRTAAKGDSTLSRARNKGSLPGLGPRE

SEQ ID NO: 273801 - protein, 90 aa, Zea mays
  Clone ID: MRT4577_181294C.1.pep
DNIFSFVLHMGLVPRHLKEEGNGGVKFGQYIYTSWSIGINVFNLLKFQIILVSSCNHKSLLSHLSEWSKSLAYFCSSACRDGSTDMNNIQ

SEQ ID NO: 273802 - protein, 114 aa, Zea mays
  Clone ID: MRT4577_181295C.1.pep
MMLEEIWMMLEMCFGVVHLSRIKVHTPLFWFPKLIGTTRNYRVMSNFPTCLAMQSLVYGAKVEAAIAIGFNDFITYALRGIWFYQKDNMEIKKANGNGTLIPEQIFEKTRRSSR

SEQ ID NO: 273803 - protein, 175 aa, Zea mays
  Clone ID: MRT4577_181296C.1.pep
FLYAYRPALSNTYVHCFQSHIFSSSLRFTMWSDAWELPSPLSLIRNFLPHLSSAHLPPSWPPPPLPTPEHPAPSTPLHPDSPRPSWPRWGRPWHRLRGDRSGRKCWSTWRRTTSSNGGRSYARASPTPAVSSRSLSGVVGTTPPPRPLGHRTRTCLLSTSLKSLDPMAKVCVYGS

SEQ ID NO: 273804 - protein, 139 aa, Zea mays
  Clone ID: MRT4577_181297C.1.pep
FGSRGDRIYPAELPIKYAGYSTCFRKEAGSHGRDTAGIFRVHQFEKIEQFCITSPNDNDSWEMHEEMLKNSEDYYKEIGLPYQVVSIVSGALNDAAAKKYDLEAWFPASKTFRELNDEQSKQFVHMLNSTLTNTNMLDF

SEQ ID NO: 273805 - protein, 97 aa, Zea mays
  Clone ID: MRT4577_181298C.1.pep
MAKPPLQTATIILLVLLVAASCLHTVDAAALGFSWGKCCVRCARATTRRAREACMSSCGLKCEFCKCGPAMPPRDIHDCPCYRNMLTASPKKRPKYP

SEQ ID NO: 273806 - protein, 114 aa, Zea mays
  Clone ID: MRT4577_181299C.1.pep
MMLEEIWMMLEMCFGVVHLSRIKVHTPLFWFPKLIGTTRNYRVMSNFPTCLAMQSLVYGAKVEAAIAIGFNDFITYALRGIGFYQKDNMEIKKANGNGTLIPEQIFEKTRRSSR

SEQ ID NO: 273807 - protein, 72 aa, Zea mays
  Clone ID: MRT4577_18129C.1.pep
SLGFFFFVGAKKKFKLVAPSTPENRLGPFFWCGKKKKKKKKKKKKKKKKKKKKKKKKKKKKKKKKKKKKTPH

SEQ ID NO: 273808 - protein, 87 aa, Zea mays
  Clone ID: MRT4577_1812C.1.pep
WGKRGCVVATLFLGRRVSAVVHCRAMMNSSMAVGNAGDLCDHADFSPEYMRHRRTALCHGRGPSACLPRSRTGTVKMRSMKVVAMSL

SEQ ID NO: 273809 - protein, 67 aa, Zea mays
  Clone ID: MRT4577_181300C.1.pep
KCHVCVQISVYVRNDGGNSWRIHSTISAPRHHPCLNQRLIITDAYKCLGACGHYHYHTGHDSQPGQG

SEQ ID NO: 273810 - protein, 104 aa, Zea mays
  unsure (1)..(104): unsure at all Xaa locations
  Clone ID: MRT4577_181301C.1.pep
VCDDAGHAVPVVVLSAAARALCVSPSSAVIQLVRVHRLCSWSTSSWWRPPTASIPGSSAFYSAPSPPGLNRGRRGEARGARLPCPCEYRGVVSLFETXPGRPRG

SEQ ID NO: 273811 - protein, 214 aa, Zea mays
  unsure (1)..(214): unsure at all Xaa locations
  Clone ID: MRT4577_181302C.1.pep
PRPCLPGPGPVCFFLRRFFRPRPPGRGPXPQGGGPAPFSIGXPRGPGGPGPXPSPGAAPXPGSXWNPGSFPPPPGFGPPKEFFGWAPPLGAPXPPYPPVVXGPPPPGWVPPGQSFNSGRPPPRTPPDLGPLLFCSSPLSPRSVFVLARAPPASPCFFFGPKGSPFLPFGYGGREAPRYQKLENKMRKILSPPKKKKKKKKKKKKKKKKKKNSRE

SEQ ID NO: 273812 - protein, 122 aa, Zea mays
  unsure (1)..(122): unsure at all Xaa locations
  Clone ID: MRT4577_181303C.1.pep
QAFFFSFFFFFWKYNPSFLGGHIPQPKNTSAATTLSPGRAPPPDTCRAAGAPSNGPPSPYQARRDHGLPASLPLLFLAPPVPPPLIASASLSPPXTSFPFAGGLSFLPSVSGFSLXGPWPPP

SEQ ID NO: 273813 - protein, 64 aa, Zea mays
  Clone ID: MRT4577_181304C.1.pep
LLNLQNQGRRSMTSKQAIKDVKNNRGASAWAGKEKTKDGVHEKAGKARAHIPCRECSGCRHDAR

SEQ ID NO: 273814 - protein, 42 aa, Zea mays
  Clone ID: MRT4577_181305C.1.pep
MEGRVPGPSPMHRSASAATVAASCVSYSSPSPDAGSTRGCRS

SEQ ID NO: 273815 - protein, 433 aa, Zea mays
  unsure (1)..(433): unsure at all Xaa locations
  Clone ID: MRT4577_181306C.1.pep
MAMAFAAASAWSLSLTAFSLPLPQSLRPKPSQLLHGATSSFPRPRRCGWGAVVRCAKRTGKQRYPSEKKRLNRRKQELLRQAAPEEGSKGRESGYWRLSKLAVPARDDPGKDFTGISLPLLQAIAKAIKFPVPSMLPDEAFTVIRKSFDARKVLKEPQFTYIVDMDVKKILNIEPRAWDFIARLEPKLGVVEYMTEEKLAVDLVSMLNXELGAEVTLLERGQPVEQRGRDIGALAVRRILQPESNFCFGEGGAGTWSDGKLMTRIGKNTDGVQAVMKTFVHFGAPPNILVDGKPHLGTDKLVPLLRKFRHHLRELGVTIRFNARVDDLIVEDGQVKGIVVSDVELQPGPASQKLAFDAVVMAVGHSARDTYSMLWQHNVDMSPKSFAVGLRIEHXQELINSIQRLHIFTHMPCYPFAKGTRISIHLYRGDEAG

SEQ ID NO: 273816 - protein, 258 aa, Zea mays
  unsure (1)..(258): unsure at all Xaa locations
  Clone ID: MRT4577_181307C.1.pep
MGISLPLLQAIAKAIKCPVPSMLPDEAFTVIRKSFDARKVLKEPQFTYIVDMDVKKILNIEPRAWDFIARLEPKLGVVEYMTEEKLAVDLVSMLNVSSKGSNNVLGIRDTHSGMIYRQQKKPRVAVIGSGPSGLFASLVLGELGAEVTLLERGQPVEQRGRDIGALAVRRILQPESNFCFGEGGAGTWSDGKLMTTIGKXTDGVQAVMKTFVHFGAPXKILVDGKPHLGTDKLVSLLRKFKHHLRELGCSIRFNARVD

SEQ ID NO: 273817 - protein, 143 aa, Zea mays
  Clone ID: MRT4577_181308C.1.pep
PFKTKTRGPTKTIGKGPPIYKKTKIPGGGGAPNQKPGFAGGPTAQLSPSPLPKEFRWGGPWPLGPKLKGQGPKKQGNQRQVAPKENGGGIRQIPQRGPQWLQGNGPRGQKTQQPCCRFAPNPETGPQVGSQKARVFSPAGPRA

SEQ ID NO: 273818 - protein, 83 aa, Zea mays
  Clone ID: MRT4577_181309C.1.pep
KKKKRERKKGLFLKIRAKSKGGPKEPPPLLKKKAKLLFQAHLGVVNWACTVKQSCSCCSRNGHVFVLCTCYRFPPTELVVPLP

SEQ ID NO: 273819 - protein, 63 aa, Zea mays
  unsure (1)..(63): unsure at all Xaa locations
  Clone ID: MRT4577_18130C.1.pep
PSLLSXAQRPMTNDVGLACKRHYIKLVEVDRRRPARIPFCQFVLRLDFDDVYGVIKKSLVLSE

SEQ ID NO: 273820 - protein, 70 aa, Zea mays
  Clone ID: MRT4577_181310C.1.pep
PTKTKFDICKNNDETLVHSFYRKSSGRRVGACFSTHSWDSYAPIAHTYTVHTYISKVLAKIVFTDNRGKL

SEQ ID NO: 273821 - protein, 66 aa, Zea mays
  unsure (1)..(66): unsure at all Xaa locations
  Clone ID: MRT4577_181311C.1.pep
IPTKIIGVPSLILXSRSTXTYKHAYKYNLLRLGGLFNKSLEXVLARYKIGNDNSLTEEIIAAGTNL

SEQ ID NO: 273822 - protein, 89 aa, Zea mays
  Clone ID: MRT4577_181312C.1.pep
ATREALRPALQDLLEQLLYSNLSSTLCYAEGLPTSEPDFVEDVVSSHSSGPIVLPAERGTLCAIESTIEWIRTRSRSYATSKANKGVIS

SEQ ID NO: 273823 - protein, 197 aa, Zea mays
  unsure (1)..(197): unsure at all Xaa locations
  Clone ID: MRT4577_181313C.1.pep
MPIFSARLYSCSVCQVASSVHTPQIESERRESERDMGKGHVSVLPMPCHCQGHATPLMKVSHRLXVDQGXEVTFVNTEVDHALVVXAALGGGIHLSSIPDGQADEDDRKDMNXKLVDAXSRHMPGCLIAPTWRTAVLGLHAQDSRADGLCNAWGCQSQETFQFAPGDAAAASVASCRGTTPAKPEGQHIHLRAGDPE

SEQ ID NO: 273824 - protein, 162 aa, Zea mays
  unsure (1)..(162): unsure at all Xaa locations
  Clone ID: MRT4577_181314C.1.pep
KSRGPKKIPKMGGKPPPHKTDPNPKFNSQPPKIKRPQQKGENRGRAHPKTGNYEKSRDPKLGFKENFRPTPPEKNTSKPHPPXRVTRRAPPKPPXGRKKRGATPXPETLKPPQTPRGNPEGPRPPGAPHPFDHKWPPCRXSKPGATPPPPLGQNKNTPPLSQ

SEQ ID NO: 273825 - protein, 60 aa, Zea mays
  Clone ID: MRT4577_181315C.1.pep
MDSAKAAVKDFMAKSGHHDTTVHEKVAPAVKHETIERQKHEEYVSAIDKEVHQDHYHTTE

SEQ ID NO: 273826 - protein, 199 aa, Zea mays
  unsure (1)..(199): unsure at all Xaa locations
  Clone ID: MRT4577_181316C.1.pep
AWAAARGAGAGAVRGCGVETARRLSGGRRRRAGEGPXGVAARMHEPPAAWLGPVAHRGTGVCAHTWFGPAATRAVRAATMMKLLVAKILCMVGVFFFMLLGSLLPVKIIETDFEKAHRSKKILSLCNTFGGGVFLATCFNALLPAVRDKLQKVLSLGHISTDYPLAETIVMLGFFMTVFLEQLILTFRKEKPSFIDLET

SEQ ID NO: 273827 - protein, 191 aa, Zea mays
  Clone ID: MRT4577_181317C.1.pep
RQGPSVVVGDVMYKLQSEEKYIMVVDAVQMTLSAVPLPDARTLLYAGNHWIGRTPDGRLCFFVIREQLTLATWVLQAPGKWVEQQPVDLRTLMHPAFMGDLAHMKLSAKMSDQLRGFKLVSFAAFCEGTCTLFFVMADWVVMLDPRTRRLLRLWRNSDESRPLGDVYPCEMLQWPPVLKNFGGSESDEAGL

SEQ ID NO: 273828 - protein, 74 aa, Zea mays
  Clone ID: MRT4577_181318C.1.pep
FNVSLRMRTRTVTSTVSMTPLILEILDPPSIPANGLCWSCPQVWQGSQVRCALRSEQQKASQQWSLHLVTASAL

SEQ ID NO: 273829 - protein, 511 aa, Zea mays
  unsure (1)..(511): unsure at all Xaa locations
  Clone ID: MRT4577_181319C.1.pep
MAKKKEKAVNVSGKPRHSNDVNRPNDKKGAGGGAGGGSRSAATVRRLKMYKTRPKRDRAGKVLRNDFQSKELPNTRIEPDRRWFGNTRVVGQPQLEMFREELQSRLSDNFSVILKERKLPLSLLQDHQKQAKAHLLEVEPFEHAFGPKGKRKRPKLTALDYESLLKRADDSQDVFEQKYASSXSCQGXEEEDGLRDLVRHTMFEKGQSKRIWGELYKVIDSSDVVVQVLDARDPMGTRCYHLERHLKENCKHKHLVFLLNKCDLIPAWATKGWLRTLSKDYPTLAFHASINKSFGKVCKVAPIPGETKVWQYITLTKKIFLIDCPGVVYQNNDSETDIVLKGVVRVTNLADAAEHIGEVLRRVKKEHLQRAYKIQDWSDDNDFLVQLCRTTGKLLKGGEPDLTTAAKMILHDWQRGKIPFFVPPPQQSDGGASESAEPIGITKEDGVSSDRTAAAMKAIAGIISSQQNMNVPCHKENNADNEDTTENADNEDIESSDNEDNDDIEPAERSE

SEQ ID NO: 273830 - protein, 136 aa, Zea mays
  Clone ID: MRT4577_18131C.1.pep
MSWCTIESDPGVFTELIQEMQVKGVQVEELYSLDVDSLSQLQPVYGLIFLFKWMAGGNDERPVVSDPNPNLFFARQVITNACATQAILSILMNRPEIDIGPELSNLKEFTGAFAPDMKGLAINNSDSIRAAHNSFA

SEQ ID NO: 273831 - protein, 554 aa, Zea mays
  unsure (1)..(554): unsure at all Xaa locations
  Clone ID: MRT4577_181320C.1.pep
MAKKKEKAVNVSGKPRHSNDVNRPNDKKGAGGGAGGGSRSAATVRRLKMYKTRPKRDRSGKVLRNDFQSKELPNTRIEPDRRWFGNTRVVGQPQLEMFREELQSRLSDNFSVILKERKLPLSLLQDHQKQAKAHLLEVEPFEHAFGPKGKRKRPKLTALDYESLLKRADDSQDVFEQKYASSXSCQGXEEEDGLRDLVRHTMFEKGQSKRIWGELYKVIDSSDVVVQVLDARDPMGTRCYHLERHLKENCKHKHLVFLLNKCDLIPAWATKGWLRTLSKDYPTLAFHASINKSFGKGSLLSVLRQFARLKNDKQAISVGFVGYPNVGKSSVINTLRSKSVCKVAPIPGETKVWQYITLTKKIFLIDCPGVVYQNNDSETDIVLKGVVRVTNLADAAEHIGEVLRRVKKEHLQRAYKIQDWSDDNDFLVQLCRTTGKLLKGGEPDLTTAAKMVLHDWQRGKIPFFVPPPQQSDGGASESAEQPIGITKEDGVSSDRTAAAMKAIAGIISSQQNMNVPCHKENNADNEDTENADNEDIESSDNEDNDDIEPAERSE

SEQ ID NO: 273832 - protein, 52 aa, Zea mays
  Clone ID: MRT4577_181321C.1.pep
VLPVAESAEVGFYSRRLTSVNRGLAQLPRCAQVLSTLVGIALYPALGVTPSA

SEQ ID NO: 273833 - protein, 56 aa, Zea mays
  Clone ID: MRT4577_181322C.1.pep
PSLKKKWLVLSTSGIVFAGDVVVDSVWTPESVCLALLLKSRCGSSFKLSSSVFLLG

SEQ ID NO: 273834 - protein, 59 aa, Zea mays
  Clone ID: MRT4577_181323C.1.pep
FLYPGILMGKNLYQSGRWIRIRIRVDTIHTRVPIDKIYASYNYYHLLKAHLSCKKILLV

SEQ ID NO: 273835 - protein, 245 aa, Zea mays
  unsure (1)..(245): unsure at all Xaa locations
  Clone ID: MRT4577_181324C.1.pep
GRANRMQTAHYMNCGSEEVRSDFFAFNDYSWCNSDFKTSGWDVKVKNFTDYGIPIFLSEYGCIESRPRKFQEIKPMMDSDMSSVYSGGLMYEYSLEDNDYRIVKIKGNTVTPEDEFDLFKSALSKYPAPTGSGGAAKASHGVECPKSESVWQVDPSYLPEMPAQAEKYMKDGAGXGPGINGXGSHFDTDCGTATASMTVGTSTSTGDSSSSNSDDDDSGAAALGFGALYVTGAATFFTLFGTLLL

SEQ ID NO: 273836 - protein, 100 aa, Zea mays
  unsure (1)..(100): unsure at all Xaa locations
  Clone ID: MRT4577_181325C.1.pep
ASAHASENSAIDEMASYAQFFVCDKDQTGNPNAIVFNYWQYYETPSYRMQTIFRVYSGTMIHPIXISADXSSSLGEYAITCHDVEHIMLRVMGYKYCYDT

SEQ ID NO: 273837 - protein, 86 aa, Zea mays
  unsure (1)..(86): unsure at all Xaa locations
  Clone ID: MRT4577_181326C.1.pep
XXXVIXLRXQXXFLSGRAFLEAVVXMELLXLXVRXDVRXXPSVCRXWAXSSXSXWXLLLVVLPPTXVRGLXSFSLLXCRXMXAXXX

SEQ ID NO: 273838 - protein, 899 aa, Zea mays
  Clone ID: MRT4577_181327C.1.pep
MTGEKKMFTSYVKNKDPPDSIIFGDGNQGKVKGLGKIAISNEHSISNVFLVESLGYNLLFVSQLCNMGYNCLFTNVDVSVFRRSDGSLAFKACQAGKQVGSSHHTKNVMTTSRPLEMLHMELFGPVAYLSIGGSKYGLVIVDDFSRFTWVFFLQDKTETQGTLKRFLRRAQNEFELKVKKIRSDNGSEFKNLQVQEYLEEVYLHRLLKKTSYELLTVKKGRNSKFAPKAIEGFLLGYDSNTKAYRVFNKSSGLVEVSSNVVFDETNGSPREKVVDCDDVDEEEVPTAAIRTMTIGDVRPQEQDVRDQPSSSTMVHPPTQDDEQEACDQGGAQDDLAMEEEAQPAPPTQVRAMIQRDHPVDQILGDISKGVTTRSRLVNFCEHYSFVSSIGPFRVEEALLDPDWVLAMQEELNNFERNEVWTLVPRPKQNVVGTKWVFRNKQDEHGVVTRNKARLVAKGYTQVAGLDFEETFAPVARLESIRILLAYAAHHSFRMFQMDVKSAFLNGPIKEEVYVEQPPGFEDERYPDHVCKLSKALYGLKQAPRAWYECLRDFLIANAFKVGKADPTLFTKTCDGDLFVCQIYVDDIIFGSTNQKSCEEFSRVMTQKFEMSMMGELSYFLGFQVRQLKDGTFISQTKYTQDLIKRFGMKDAKPAKTPMGTDRHTDLNKGGKSVDQKAYRSMIGSLLYLCASRPDIMLSVCMCARFQSDPRECHLVAVKRILRYLVATPCFGIWYPKGSTFDLIGYSDSDYAGCKVDRKSTSGTCQFLGRSLVSWSSKKQTSVALSTAEAEYVVAGQCCAQLLWMRQTLRDFGYNLSKVPLLCDNESAIRMADNPVEHSRTKHIDIRHHFLRDHQQKGDIEVFHVSSENQLADIFTKPLDEQTFCKLRSELNVLDSRNLD

SEQ ID NO: 273839 - protein, 36 aa, Zea mays
  Clone ID: MRT4577_181328C.1.pep
LAICARVFALLAPFSLEKLMTGTTIVVILLPQLGPD

SEQ ID NO: 273840 - protein, 83 aa, Zea mays
  Clone ID: MRT4577_181329C.1.pep
VRGYMEGRRRRVSFADAVEPYRCTTGLEVLVLTVVVVRVEAVARGYQHRQSVSVRLVCGGGGGSMVGARHRGGSQRRCFFRGE

SEQ ID NO: 273841 - protein, 96 aa, Zea mays
  Clone ID: MRT4577_18132C.1.pep
GGSHASGRRCSTISFSVSRHAPPLEPLARTTASSILGTPPACVRAMARLAFKRASCIHDTRFYPRCLSSIFEYGSCNKLVLFADNRICFCSNSSRS

SEQ ID NO: 273842 - protein, 1447 aa, Zea mays
  unsure (1)..(1447): unsure at all Xaa locations
  Clone ID: MRT4577_181330C.1.pep
MDPKGKGMVIDNNEKESILNEPKNDKSTDLGSSHKRKDGKKKKTRHIKEIVYYDDSDESTSSQKDDDNDYRKTVNSNFSFDYSRIPHSSNSHLLSIPLGKPAQFDGEDYGFWSHKMRSHLFSLHPSIWEIVENGMKFDSSDSPMLINEQIHRNAQTTIVLLASLCREEYNKVSGLDNAKQIWDTLKISHDGNDITMLTKMELVEGELGRFAMIRGEEPTQTYNRLKTLINKIRSYGSTRWTDHDVVRLMLRSFTVLDPHLVNNIRENLRYTMMTPEEVLGKFVSGRMMIKEARYVDDALNGPINEPQPLALKATRSKETLPSKVAQIEAAGLNDEEMALIIKRFKTALKGRKGQPSKTKTKGKRSCFKCGKLGHFIANCPDNDSDQDQGNKREKKKNYKKAKGEAHLGKEWDSDCSSSDSDNEGLAATAFNKSSLFPNERHTCLMAREKKVSTQDSTYAFSSDNESSDDDDIDYSCLFKGLDRSKIDKINELIDALNDKNRLLEKQEDLLYEEHDKFVETQKSLALEIKRNEMLSFELSTCHETISTLKGVXNDLNAKLEVANKSNSCVEHVVICTRCKDFDIDACSEHLVSISKLNDELASLNVYASGGSSWIIDSGCTNHMTGEKKMFTSYVKNKDSQDSIIFGDGNQGKNKSETQGTLKRFLRRAQNEFELKVKKIRSDNGSEFKNLQVEEFLEEEGIQHEFSAPYTPQQNAVNTACHAINRVYLHRLLKKTSYELLTGNKPNVSYFRVFGSKCYILVKKGRNSKFAPKAVEGFLLGYDSNTKAYRVFNKSSDLVEVSSDVVFDETNGSPREQVVDLDDVDEEDVPTAAIRTMAIGDVRPQEQDEQDQPSSSTMVHPPTQDDEQVHQQETCDQGGAQDDHVMGEEAQPAPPTQVRAMIQRDHPVDQILGDISKGVTTRSRLVNFCEHYSFVSFIEPFRVEEALLDPYWVLAMQEELNNFKRNEVWTLVPRPKQNVVGTKWVFRNKQDEHGVVTRNKARLVAKGYAQVAGLDFEETFAPVARLESIRILLAYAAHHSFRLFQMDVKSAFLNGPIKEEVYVEQPPGFEDERYPDHVCKLSKALYGLKQAPRAWYECLRDFLIANAFKVGKADPTLFTKTCDGDLFVCQIYVDDIIFGSTNKKSCEEFSRVMTQKFEMLMMGELNYFLGFQVKQLKDGTFISQTKYTQDLLKRFGMKDAKPAKTPMGTDGHTDLNKGGKSVDQKAYRSMIGSLLYLCASRPDIMLSVCMCARFQYDPKECHLVAVKRILRYLVATPCFGLWYPKGSTFDLIGYSDSDYAGCKVDRKSTSGTCQFLGRSLVSWNSKKQTSVALSTAEAEYVVAGQCCAQLLWMRQTLRDFGYNLSKVPLLCDNESVIRMAENPVEHSRTKHIDIRHHFLRDHQQKGDIEVFHVSTENQLADIFTKPLDEKTFCRLRSELNVLDSRNLD

SEQ ID NO: 273843 - protein, 80 aa, Zea mays
  Clone ID: MRT4577_181331C.1.pep
MAMTSKFVLPLLLAVLMLLAVSGSARRVEGDRWAGGETAASVVGRPTIQFLKRLYLQQLAAPCPSGMTYDPNSNPHCHHR

SEQ ID NO: 273844 - protein, 1151 aa, Zea mays
  Clone ID: MRT4577_181332C.1.pep
MDPKGKGMVVNDKEKESIFNEPRDDKATDSGSSQKKKDGKKKRRVKKIVYYDSDESSSSQKDDEYEEKKKTEEYHKVSGLDNAKQIWDTLKISHEGNDVTMLTKMELVEGELGRYNKMTPEEILGKFVSGRMMIKEARYVDEALNGPIHEPQTIALKAKSSREALPSKVAQVEAAGLNEAEMALIIKRFKTALKCRKEHPNKSKTKGKRSCFKCGKDQEKKREKKKTYKKAKGEAHLGKEWDSDCSSSDDEGLAASAFNKSSLFPNEHHTCLMAKEKKVYASRGSSWIIDSGCTKHMTGEKNMFTSYVKNKDSQDSIIFGDGNQGKDKTETQGTLKRFLRRAQNEFELKVKKIRSDNGPEFKNLQVEEYLEEEGIKHEFSVPYTPQQNGVVERKNKMLIDMARTMLGEFKAPERFWSEAMNTACHAINRVYLHRLLKKTSYELLTGNKPNVSYFRVFGSKCYILVKKGRNSKFAPKAVEGFLLGYDSNTKAYRVFNKSSGLVEVSSDVVFDETNGSPREQVVDFDDVDEEEVPTVAIRTMEIGDVRPQEQDVRDQPSSSTMVHPPTQDDEQVHQEEACDQGGAQDDHVVEEEAQPAPPTQVRAMIQRDHPVDQILGDISKGVTTRSRLVNFCEHYSFVSSIEPFRVEEALLDPDWVLAMQDELNNFKRNEVWTLVPRPKQNVVGTKWVFRNKQDEHGVVTRNKARLVAKGYAQVAVLDFEETFAPVARLESIRILLAYAAHHSFRLFQMDVKSAFLNGPIKEEVYVEQPPGFEDERHPDHVCKLSKALYGLKQAPRAWYECLRDFLIANAFKVGKADPTLFTKTCDGNLFVCQIYVDDIIFGSTNQKSCEEFSRVMTQKFEMSMMGELSYFLGFQVRQLKDGTFISQTKYTQDLIKRFGMKDAKPAKTPMGTDGHTDLNKGGKSVDQKAYRSMIGSLLYLCASRPDIMLSVCMCARFQSDPRECHLVAVKRILRYLVATPCFGIWYPKGSTFDLIGYSDSDYAGCKVDRKSTSGTCQFLGRSLVSWSSKKQTSVALSTTEAEYVAAGQCCAQLLWMRQTLRDFGYNLSKVPLLCDNESAIRMADNPVEHSRTKHIDIRHHFLRDHQQKGDIEVFHVSSENQLADIFTKPLDEQAFCKLRSELNVLDSRNLD

SEQ ID NO: 273845 - protein, 1226 aa, Zea mays
  Clone ID: MRT4577_181333C.1.pep
DQGNKREKKKNYKKAKGEAHLGKEWDSDCSSFDSDNEGLAATAFNKSSLFLNERHTCLMAREKKGLDRTKVDKINELIDALNDKNRFLEKQEDLLYEEHDKFVEAQKSHALEVKRNEMLSCELSSCHEIISSLRSINDDLNAKLEIASKSTSCVEIVETCNRCKDFDINACSKHLASISKLSDEVASLNAQLKTSKSNFDKLKFARDAYTVGRHPSIKDGLGFKREAKNLTNHKAPISAKEKGKAPMASSTKKNHAFMYNDRRQSHRSCNAFDAHAYDSYAMFASSSSYLHDRDMSRSYVHHVPRKNIVHVARKVMDGPSTIYHALNASFAICRKDRKIVARKLGAKCKGDKTCIWVPKTIVTNLVGPNKSWVYASGGSSWIIDSGCTNHMTGEKKMFTSYVKNKDSQDSIIFGDGNQGKDKSETQGTLKRFLRRAQNEFELKVKKIRSDNGSEFKNLQVEEFLKEEGIKHEFSAPYTPQQNGVVERKNRTLIDMARMMLGEFKTPECFWSEAVNTACHAINRVYLHRLLKKTSYELLTGNKPNVSYFRVFGSKCYILVKKGRNSKFAPKAVEGFLLGYDSNTKAYRVFNKSSGLVEVSSDVVFDETNGSPREQVFDLDDVDEEDVPTAAIRTMAIGDVRPQEQKEQDQPSSSTMVHPPTQDDEQVHQQEACDQGGAQDDHVMEEEAQPAPPTQVRAMIQRDHPVDQILGDISKGVTTRSRLVNFCENYSFISSIEPFRVEEALLDPDWVLAMQEELNNFKRNEVWTLVPRPKQNVVGTKWVFCNKQDEHRVVTRNKARLVAKGYAQVAGLDFEETFAPIVQIDVKSAFLNGPTKEEVYVEQPLGFEDEWYPDHVCKLSKALYGLKQAPRAWYECLRDFLIANAFKVGKADPTLFTKTCDGDLFVCQIYVDDIIFGSTNQKSCEEFSRAMTQKFEMSMMGDLNYFLGFQVKQLKDGTFISQTKYTQDLLKRFGMKDAKPAKTPMGTDGHTDLNKGGKSVDQKAYRSMIGSLLYLCASRPDIMLSVCMCARFQSDPKECHLVAVKRILRYLVATPCFGIWYPKGSNFDLIGYSDSDYAGCKVDRKSTSGTCQFLGRSLVSWNSKKQTSVALSTAEAEYIAAGQCCAQLLWMRQTLRDFGYNLSKVPLLCDNESAIRIAENPVEHRSRTKHIDIRHHFLRDHQQKGDIEVFHVSTENQLVDIFTKPLYEKTFCRLRSELNILDSRNLD

SEQ ID NO: 273846 - protein, 1518 aa, Zea mays
  Clone ID: MRT4577_181334C.1.pep
MDPKGKGIVINDKEKESFVNEPKDDKPTDSGSGHKRRDGKKKKTRRIKEIVYYDDSDESSSSQKDNDDNDYDKRKTMELVEGELGRFAMIRGEEPTQTNNRLKTLINKIRSYGSTRWTDHDIVRLLLRSFTVLDPHLVNNIRENPRYTKMSPEEVLWKFVSGRMMIKEARYVDDALNGPIHEPQPIALKATRSKESLPSKVAQIEATGLNDEEMALIIKRFKTALKDRKGQPSKTKTKGKRSCFKCGKIGHFIANCLDNESDQEQGSKREKKAYKKAKGKAHLGKEWDSDCSSSDSKNEGLAATAFNKSSLFPNERHTCLMVKEKKVCTRDSTTYDSSSDEEIDYSSLFKGLDRTKVDKINELIDALNEKDKLLEKQEDLLYEEHDKFVEAQKSYALEVKRNEMLSCELSSCHETISSLRSINDGLNAKLEIASKSNSCVEHVMICNRCKDFDIDACSEHIASIAKLSDEVASLNAQLKTSKSEFDKLKFARDAYTIGRHPSIKDGLGFKREAKNLTSHKAPIPAKEKGKAPMASSPKKNHAFMYHDRRQSYRSCNAYNAFDSHAMFASSSSYMHGRDMSRRYVVHMPRRNVVNVPRKVNEPSTIYHALNASFAICRKDRKIVARKLGAKCKGDKTCIWVPKDICANLVGPNMSWVYASGGSSWIIDSGCTNHMTGEKKMFTSYVKNKDSQDSIIFGDGNQGKDKSETQGTLKRFLRRAQNEFELKVKKIRSDNGSEFKNLQVEEYLEEEGIKHEFSAPYTPQQNGVVERKNRTLIDMARTMLGEFKTPERFWSEAVNTACHAINRVYLHRLLKKTSYELLTGNKPNVSYFRVFGSKCYILVKKGRNSKFAPKAVEGFLLGYDSNTKAYRVFNKSSGLVEVSSDVVFDETNGSPREQVVDLDDVDEEDVPTAAIRTMVIGDVRPQEQKEQDQPSSSTMVHPPTQEDEQVYQKEAYDQGGAQDDQVMEEEAQSAPPTQVRAMIQRDHPVDQILGDISKGVTTRSRLVNFCKHYSFVSSIEPFRVEEALLDPDWVLAMQEELNNFKRNEVWTLVPRPKQNVVGTKWVFRNKQDEHGVVTRNKARLVAKGYAQVAGLDFEETFAPVARLESIRILLAYAAHHSFRLFQMDVKSAFLNGPIKEEVYVEQPPGFEDERYPDHVCKLSKVLYGLKQAPRAWYECLRDFLIANAFKVGKADPTLFTKTCDGDLFVWQIYVDDIIFGSTNKKSCEEFSRVMTQKFEMSMMGELNYFLGFQVKQLKDDTFISQTKYTQDLLKRFGMKDAKPAKTPMGTDGHTDLNKGGKSVDQKAYQSMIGSLLYLCASRPDIMLSVCMCARFQSDPKECHLVAVKRILRYLVATPCFDLIGYSDSDYAGCKVDRKSTSGTCQFLGRSLVSWNSKKQTSVALSTAEAEYVAAGKCCAQLLWMRQTLQDFGYNLSKVPLLCDNESAIRMAGNPVEHNRTKHIDIRHHFLRDHQQKGDIEVFHVSTENQLADIFTKPLDEKTFCRLRSELNVLDSRNLD

SEQ ID NO: 273847 - protein, 168 aa, Zea mays
  Clone ID: MRT4577_181335C.1.pep
AQLGLSAAAVLLVDGELPPLRRSHPSPPPYLSTGARPRRPLPPRELSYNDRPSQDTGPIPCRRLDAALEALSAAGSRDAFLHNAVIPGFTDSGLPDSALAAVGRLTASPSPSSSSAARAQAPRGWHEVHEVRHDRVGIIHYSCRLLPEIGVDARAWAGGRRQGWHLSS

SEQ ID NO: 273848 - protein, 1665 aa, Zea mays
  Clone ID: MRT4577_181336C.1.pep
MDPKGKGIVINDKEKESFANEPKDDKPTDSGSGHRRKEGKKKKTRRIKEIIYYDDSDESTSSQKDDDNDYKKTVNSNFSFDYSRIQHSSNSHLLSIPLGKPPHFDGEDYGFWSHKMRSHLFSLHPSIWEIVENGMKFDSSDSPMLINEQIHRNAQATTVLLASLCREEYNKVSGLDNAKQIWDTLKISHEGNDITMLTKMELVEGELGRFAMIRGEEPTQTYNRLKTLINKIRSYGSTRWTDHDVVRLMLRSFTVLDPHLVNNIRENPRYTMMTPEEVLGKFVSGRMMIKEARYVDDALNGPLHEPQPIALKATRSKESLPSKVAQVEAAGLNDEEMALIIKRFKTALKGQKGQPSKAKTKGKRSCFKCGKLGHFIANCPENDSDQEQGKNGKRENKKVYKKAKGEAHLGKEWDSDCSSSDSDDEGLAATAFNKSALFPNEHHTCLMAREKKVITRNANTYDSSSDDESSEDEIDYSSLFKGLDRTKIAKINELIDALNEKDRILEKQEDLLYEEHDKFVSAQNSLALEVKRNGILSCELSTCNETISSLKGEINVLTAKLEVASNSCVENITICTRCKDFDVNACSEHLVSISKLNDEVASLNAQLKTSKSEFEKLKFARDAYTIGRHPSIKDGLGFKREAKNLTSHKTPISTKEKGKAPMANSVKKNHAFMYYDRRYSRNAFRSNDVFDSHAYDSYAMTASSSHVMHGRNVFRRNVVHQMPRRNVDHNAPRKVVNEPSEIYCALNASFAICRKDKKIVARKLGARCKGDKTCIWVPKNICANLVGPNMSWVYASGGSSWIIDSGCTNHMTGEKKMFTSYVKNKDSQDSIIFGDGNQGKDKSETQGTLKRFLRRAQNEFELKVKKIRSDNGSEFKNLQVEEFLEEEGIKHEFSAPYTPQQNGVVERKNRTLIDMARMMLGEFKTPECFWSEAVNTACHAINRVYLHRLLKKTSYELLTGNKPNVSYFRVFGSKCYILVKKGRNSKFAPKAVEGFLLGYDSNTKAYRVFNKSSGLVEVSSDVVFDETNGSPREQVVDLDDVDEEDVPTAAMRTMAIGDVRPQEQLEQDQPHSSTMVQPPTQDDEQVHQQEACDQGGAQDDRVMEEEAQPAPPTQVRAMIQRDHPVDQIMGDISKGVTTRSRLVNFCEHYSFVSSIEPFRVEEALLDPDCVLAMQEELNNFKRNEVWTLVPRPKQNVVGTKWVFRNKQDEHGVVTRNKARLVAKGYAQVAGLDFEETFAPVARLESIRILLAYAAHHSFRLYQMDVKSAFLNGPIKEEVYVEQPPGFEDDRFLDHVCKLSKALYGLKQAPRAWYECLRDFLVANAFNVGKADPTLFTKTCNGDLFVCQIYVDDIIFGSTNQKSCDEFSRVMTQKFEMSMMGELNYFLGFQVKQLKDGTFISQTKYTQDLLKRFGMKDAKPAKTPMGTDGHTDLNKGGKSVDQKAYRSMIGSLLYLCASRPDIMLSVCMCARFQSDPKECHLVAVKRILRYLVATPCFGLWYPKGSTFDLVGYSDSDYAGCKVDRKSTSGTCQFLGRSLVSWNSKKQTSVALSTAEAEYVAAGQCCAQLLWMRQTLRDFGYNLSKVPLLCDNESAIRMAENPVEHSRTKHIDIRHHFLRDHQQKGDIEVFHVSTENQLADIFTKPLDEKTFCRLRSELNVLDSRNLD

SEQ ID NO: 273849 - protein, 1665 aa, Zea mays
  Clone ID: MRT4577_181337C.1.pep
MDPKGKGIMINDKEKESFVNEPRDDKSNDSGSGHRRKDGKKKKTRRIKEIVYYDSDESTSSQKDDDHNDYEKKKPVNSNFSFDYSRIPHSSSSHLLSIPLGKPPHFDGEDYGFWSHKMRSHLFSLHPSIWEIVESGMHFDSSDSPMFINEQIHKNAQATTVLLASLCRDEYNKVSGLDNAKQIWDTLKISHEGNDVTLLTKMELVEGELGRFAMIRGEEPTQTYNRLKTLINKIRSYGSTRWTDHDVVRLMLRSFTVLDPHLVNNIRENPRYTKMSPEEVLGKFVSGRMMIKEARYVDDALNGPINEPQPLALKATRSKEALPSKVAQVEAAGLNNEEMALIIKRFKTALKGRKGQPSKTKTKEKRSCFKCGKIGHFIANCPDNESDQEKGNKREKKKHYKKAKGEAHIGKEWDSDCSSSDSDHEGLAATAFNKSSLFPNERHTCLMAREKKVSTHDTSTYASSSEDESSDDDEIDYSCLFKGLDRSKINKINELIDALNDKNRLLEKQEDLLYEEHDKFVSAQNSLALEIKRNEMLSSEVSTCHESISKLKSVNDDLNAKLEIASKSTSCVEIVETCNRCEDFDIDACSEHLVSISKLNDELASLNAQLKTSKSNFDKLKFARDAYTIGRHPSIKDGLGYKKEAKNLTSHKAPISAKEKGKAPMASNVQKNHAFMYHDRRQTRNTFRSYNTYDDFDSHAMFASSSSYMHGRNMSRRNAFHHVPRKNFIHASRKAVNEPSTIYCALNASFAICRKDRKIVARKLGAKCKGDKTCIWVPKDICTNLVGPNMSWVYASGGSSWIIDSGCTNHMTGEKKMFTSYVKNKDSQDSIIFGDGNQGKDKSETQGTLKRFLRRAQNEFELKVKKIRSDNGSEFKNLQVEEFLEEEGIKHEFSAPYTPQQNGVVERKNRTLIDMARTMLGEFKTPERFWSEAVNTACHAINRVYLHRLLKKTSYELLTGNKPNVSYFRVFGSKCYILVKKGRNSKFAPKAVEGFLLGYDSNTKAYRVFNKSSGLVEVSSDVVFDETNGSPREQVVDLDDVDDEDVPTAAIRTMTIGDVRPREQLEQDQPSSSTMVHPPTQDDEQVHQKEACDQWGAQDDHMMEEEAQPAPPTQVRAVIQRDHPVDQILGDISKGVTTRSRLVNFCEHYSFVSSIEPFRVEEALLDPDWVLAMQEELNNFKRNEVWTLVPRPKQNVVGTKWVFRNKQDEHGVVTRNKARLVAKGYAQVAGLDFEETFAPVARLESIRILLAYAAHHSFRLYQMDVKSAFLNGPIKEEVYVEQPPGFEDERYPDHMCKLSKALYGLKQAPRAWSECLRDFLIANAFKVGKADPTLFTKTCDGDLFVCQIYVDDIIFGSTNQKSCEEFSRVMTQKFEMSMMGELNYFLGFQVKQLKDGTFISQTKYTQDLLKRFGMKDAKPAKTPMGTDGHTDLNKGGKSVDQKAYRSMIGSLLYLCASRPDIMLSVCMCARFQSDPKECHLVAVKRILRYLVATPCFGIWYPKGSNFDLIGYSDSDYARCKVDRKSTSGTCQFLGRSLVSWNSKKQTSVALSTAEAEYVAAGQCCAQLLWMRQTLRDFGYNLSKVPLLCDNESAIRMAENPVEHSRTKHIDIRHHFLRDHQQKGDIEVFHVSTENQLADIFTKPLDEKTFCRLRSELNVLDSRNLD

SEQ ID NO: 273850 - protein, 1662 aa, Zea mays
  Clone ID: MRT4577_181338C.1.pep
MDPKGKGIVINDKEKESFVNEPKDDKHTDSGSGHRRKEGKKKKTRRIKEIVYYDDSDESSSSQKDNDDNDYDKQKTVNSNFSFDYSRIPHSSNAHLLPIPLGKPPHFDGEDYGFWSHKMRTHLFSLHPSIWEIVESGMKFDSSDSPSFINEQIHKNAQATTVLLASLCRDEYHKVSGLDNAKQIWDTLKISHEGNDVTLLTKMELVEGELGRFAMIRGEEPTQTYNRLKILINKIRSYGSTRWTDHDVVRLMLRSFTVLDPHLVNNIRENPRYIKMSPEEILGKFVSGRMMIKEARYVDDALNGPIHEPQPIALKATRSKEALPSKVAQIEAAGLNDEEMALIIKRFKTALKGRKGQPSKTKAKGKRSCFKCGKLGHFIANCPDNDSDQDQVNKREKKKHYKKAKGEAHLGKEWDSDCSSSDSDNEGLAATAFNKSTLFPNERHTCLMAREKKVCTRNSTYASSSEDESSDEDEVDYSCLFKGLDRTKVDKINELIDALNEKNMLLEKQEDLLYEEHDKFIEAQKSYALEVKRNEMLSFELSTCHETISTLKGVNNDLNAKLEVANKSNSCVEHVAICSRCKDFDINACSEHLVSISKLNDELASLNAQLKTSKSDFDKLKFARDAYTVGRHPSIKDGLGFKREAKNLTSHKAPIPAKEKGKAPMATSTKKNHAFLYHDRRQSRSAYRGYNAFDSHHMIASSSSYMHGRNMSRRNAIHHVPRKNVSHAPRKVVNEFSTVYHALNASFAICRKDRKVIARKLGAKCKGDKTCIWVPKKICANLVGPNMSWVYASGGSSWIIDSGCTNHMTGEKKMFTSYVKSKDSQDSIIFGDGNQGKDKSETQGTLKRFLRRAQNEFELKVKKIRSDNGSEFKNLQVEEFLEEEGIKHEFSAPYTPQQNGVVERKNRTLIDMARTMLGEFKTPERFWSEVVNTACHAINRVYLHRLLKKTSYELLTGNKPNVSYFRVFGSKCYILVKKGRNSKFAPKAVEGFLLGYDSNTKAYRVFNKSLGLVEVSSDVVFDETNGSPREQVVDLDEVDEEDVPTAAIRTMAIGDVRPQEQDEQDQPSSSTMVHSPTQDDEQVHQQEACDQGGAQDDHVMEEEAQPAPPTQVRAMIQRDHPVDQILGDISKGVTTRSRLVNFCEHYSFVSSIEPFRVEEALLDPDWVLAMQEELNNFKRNEVWTLVPRPKQNVVGTKWVFRNKQDEHGVVTRNKARLVAKGYAQVAGLDFEETFAPVARLESIRILLAYAAHHSFRLFQMDVKSAFLNGPIKEEVYVEQPPGFEDERYPDHVCKLSKALYGLKQAPRAWYECLRDFLIANAFKVGKADPTLFTKTCDGDLFVCQIYVDDIIFGSTNKKSCEEFSRVMTQKFEMSMMGELNYFLGFQVKQLKDGTFISQTKYTQDLLKRFGMKDAKPAKTPMGTDGHTDLNKGGKSVDQKAYRSMIGSLLYLCASRPDIMLSVCMCARFQSDPKECHLVAVKRILRYLVATPCLGLWYPKGSTFDLIGYSDSDYAGCKVDRKSTSGTCQFLGRSLVSWKSKKQTSVALSTAEAEYIAAGQCCAQLLWMRQTLRDFGYTLSKVPLLCDNESAIRMAENPVEHSRTKHIDIRHHFLRDHQQKGDIEVFHVSTENQLADIFTKPLDEKTFCRLRSELNVLDSRNLD

SEQ ID NO: 273851 - protein, 76 aa, Zea mays
  Clone ID: MRT4577_181339C.1.pep
LGTSRPAGTSLSTSTVTRYVFSNHWKVLLLIADAWTKDDHHPELNLQPRRAVDERLSRDELDASYLDARTGGGQQK

SEQ ID NO: 273852 - protein, 169 aa, Zea mays
  Clone ID: MRT4577_18133C.1.pep
VEPELKRKVAARSIGLEEKHGSTRVQSEFCARSDTSHLGARSEFLCSLVRRARNGPARHAPAWAEESEKGASERARKRHPDRTGPHRCRPRRPYGRPRGLGVWHFVSFFVVCVLPPKETDVPLLPVVACMCSQHACRVEAQDSRRSTTGHPTVRVTDPTCPWMDPASGP

SEQ ID NO: 273853 - protein, 54 aa, Zea mays
  Clone ID: MRT4577_181340C.1.pep
LALGCELVREQLDPQHIHLLGEGQNQGPQGGFVGLTRLADRSSSLWKKNKTLSS

SEQ ID NO: 273854 - protein, 1661 aa, Zea mays
  Clone ID: MRT4577_181341C.1.pep
MDPKGKGIVINDKEKESFVNEPKDDKPTDSGSGHKRKDGKKKKTRRIKEIVYYDDSDESTSSQKDDDNDYRKTVNSNFSFDYSRIPHSSNSHLLSIPLGKPPHFDGEDYGFWSHKMRSHLFSLHPSMWEIVENGMKFDSSDSPMLINEQIHRNAQATTVLLASLCREEYNKVSGLDNAKQIWDTLKISHEGNDITMLTKMELVEGELGRFAMIRGEEPTQTYNRLKTLINKIRSYGSTRWTDHDVVRLMLRSFTVLDPHLVNNIRENPRYTMMTPEEVLGKFVSGRMMIKEARYVDDALNGPINEPQPLALKATRSKEMLPSKVAQIEAAGLNDEEMALIIKRFKTALKGRKGQPSKTKTKGKRSCFKCGKLGHFIANCPDNDSDQDQGNKREKKKNYKKAKGEAHLGKEWDSDCSSSDSDNEGLAATAFNKSSLFPNERHTCLMAREKKVSTRDSTYASSSDNESSDDDDIDYSCLFKGLDRSKIDKINELIDALNDKNRLLEKQEDLLYDEHDKFVSAQNSLALEIKRNEMLSGELSTCHNTISTLEGVNNDLNAKLEVANKSNSCEEYVVICTRCKDFDIDACSEHLVSISKLNDELASLNAQLKTSKNDFDKLKFARDAYTIGRHPSIKDGLGFKREAKNLTSHKAPISAKEKGKAPMASSTKRNHAFMYHDRRQTRNAYRNNNAYDDFDPHAMFASSSSYMHGRNMSRRNAIHHVPKKNIIHAPRKVVNEPSTIYCALNASFAICRKDRKIIARKLGAKCKGDKTCIWVPKDICTNLVGPNMSWVYASGGSSWIIDSGCTNHMTGEKKMFTSYVKNKDSQDSIIFGDGNQGKDKSETQGTLKRFLRRAQNEFELKVKKIRSDNGSEFKNLQVEEFLEEEGIKHEFSAPYTPQQNGVVERKNRTLIDMARTMLGEFKTPECFWSEAVNTACHAINRVYLHRLLKKTSYELLTGNKPNVSYFRVFGSKCYILVKKSRNSKFAPKAVEGFLLGYDSNTKAYRVFNKSSGLVEVSSDVVFDETNGSPREQVVDLDDVDEEDVPTAAMRTMAIGDVRPQEQLEQDQPSSSTMMHPPTQNDEQVHQEECGQGGAQDDHVMEKEAQPAPPTQVRAMIQRDHPVDQILGDISKGVTTRSRLVNFCEHYSFVSSIEPFRVEEALLDPDWVLAMQEELNNFKRNEVWTLVPRPKQNVVGTKWVFRNKQDEHGVVTRNKARLVAKGYAQVAGLDFEETFAPVARLESIRILLAYAAHHSFRLYQMDVKSAFLNGPIKEEVYVEQPSGFEDERYPDHVCKLSKALYGLKQAPRAWYECLRDFLIVNSFKVGKADPTLFTKTCDGDLFVCQIYVDDIIFDSTNQKSCQEFSRVMTQKFEMSMMGELNYFLGFQVKQLKDGTFISQTKYTQDLLKRFGMKDAKPAKTPMGTDGHTDLNKGGKSVDQKAYRSMIGSLLYLCASRPDIMLSVCMCARFQSNPKECHLVAVKRILRYLVATPCFGLWYPKRSTFDLVGYSDSDYAGCKVDRKSTSGTCQFLGRSLVSWNSKKQTSVALSTAEAEYVATGQCCAQLLWMRQTLRDFGYNLSKVPLLCDNESAIRMAENPVEHSRTKHIDIRHHFLRDYQQKGDIEVFHVSTENQLADIFTKPLDEKTFCRLRSELNVLDSRNLD

SEQ ID NO: 273855 - protein, 1554 aa, Zea mays
  unsure (1)..(1554): unsure at all Xaa locations
  Clone ID: MRT4577_181342C.1.pep
MDPKGKGIVINDKEKESFVNEPKDDKPTDSGSGHRRKEGKKKKTRRIKEIVYYDDSDESTSSQKDDDNDYRKTVNSNFSFDYSRIPHSSNSHLLSIPLGKPPHFDGEDYGFWSHKMRSHLFSLHPSIWEIIENGMKFDSSDSPMLINEQIHRNAQATTVLLASLCREEYNKVSGLDNAKQIWDTLKISHEGNDVTMLTKMELVEGELGRFAMIRGEEPTQTYNRLKTLVNKIRSYGSTRWTDHDVVRLMLRSFTVLDPHLVNNIRENXVHDDDARGGTRKIRKXRMMIKEARYVDDALNGPIHEPQPIALKATRSKEALPSKVAQVEVAGLNNEEMALIIKRFKTALKGRKGQPSKTKTKEKRSCFKCGKIGHFIANCPDNESDQEKGNKREKKKHYKKAKGEAHIGKEWDSDCSSSDSDNEGLAATAFNKSSLFPNERHTCLMAREKKVSTHDTSTYASSKHVTICRRCKDFDVDACSDHLVSISKLNEELASLNAQLKTSKNEFDKLKFARDAYTIGRHPSIKDGLGYKREAKDLTSHKAPISAKEKGKAPMASSTKRNHAFMYHDKRQTRNAYRSYNAYDDFDSHAMFASSSSYMHGRNMSRRNAIHHVPRKNIIHAPRKVVNEPSTIYCALNASFAICRKDRKIVARKLGAKCKGDKTCIWVPKDICTNLVGPNKSWVYASGGSSWIIDSGCTNHMTGEKKMFTSYVKNKDSQDSIIFGDGNQGKDKSETQGTLKRFLRRAQNEFELKVKKIRSDNGSEFKNLQVEEFLEEEGIKHEFSAPYTPQQNGVVERKNRALIDMARTMLGEFKTPERFWSEAVNTACHAINRVYLHRLLKKTSYELLTGNKPNVSYFCVFGSKCYILVKKGRNSKFAPKAVEGFLLGYDSNTKAYRVFNKSSGLVEVSSDVVFDETNGSPREQVVDLDDVDEEDVPTAAIRTMAIGEVRPQEQDERDQPSSSTMVHPPTQDDEHVHQQEACDQGGAQDDHVMEEEAQPAPPTQVRAVIQRDHPVDQILGDISKGVTTRSRLVNFCEHYSFVSSIEPFRVEEALLDPDWVLAMQEELNNFKRNEVWTLVPRPKQNVVGTKWVFRNKQDEHGVVTRNKARLVAKGYAQVARLDFEEMFAPVARLESIRILLAYAAHHSFRLYQMDVKSAFLNGPIKEEVYVEQPPGFEDERYPDHVCKLSKALYGLKQAPRAWYECLRDFLIANAFKVGKADPTLFTKTCDGDLFVCQIYVDDIIFGSTNKKSCEEFSRVMTQKFEMSMMGELNYFLGFQVKQLKDGTFISQTKYTQDLLKWFGMKDTKPAKTPMGTDGHTDLNKGGKSVDQKAYRSMIGSLLYLCASRPDIMLSVCMCARFQSDPKECHSVAVKRILRYLVATPCFGLWYPKGSTFDLIGYSDSDYAGCKVDRKSTSGTCQFLGRSLVSWNSKKQTSVALSTAEAEYVVAGQCCAQLLWMRQTLRDFGYNLSKVPLLCDNESAIRMAENPVEHSRTKHIDIRHHFLRDHQQKGDIEVFHVSTENQLADIFTKPLDEKTFCRLRSELNVLDSRNLD

SEQ ID NO: 273856 - protein, 114 aa, Zea mays
  unsure (1)..(114): unsure at all Xaa locations
  Clone ID: MRT4577_181343C.1.pep
APHILISACYTQQRQLPXTSVPAAYPXMNIXLDPVAASYSAGHLQKDLVGPFIQISWREPCILTXHPQLLDXYQDAGPNAGTLLQLQQLLPCNQLALTNPPTLYQQSQVGGALS

SEQ ID NO: 273857 - protein, 50 aa, Zea mays
  Clone ID: MRT4577_181344C.1.pep
PEDGEAIHRLEEMGFNCELVLKVFFADKKEEKLSAIHLLDHGHEFDEQQQ

SEQ ID NO: 273858 - protein, 40 aa, Zea mays
  Clone ID: MRT4577_181345C.1.pep
AYKPDINIQTTPPYFLFPTTNQTRHFFTLYIQYHMLVSSK

SEQ ID NO: 273859 - protein, 75 aa, Zea mays
  unsure (1)..(75): unsure at all Xaa locations
  Clone ID: MRT4577_181346C.1.pep
SRVTLMKALELSSSRAYGSCLPSPIMMLSIALMSLTPPWWWLLVRVCMLRRSEAIGXHFTGMLPRSGRDLHHCKR

SEQ ID NO: 273860 - protein, 62 aa, Zea mays
  Clone ID: MRT4577_181347C.1.pep
STKIQPVYVIDVAAASADILDGDYTMPPTHQTLSHTPTRTIPGSAALPTSPHATHSLTNCSD

SEQ ID NO: 273861 - protein, 126 aa, Zea mays
  Clone ID: MRT4577_181348C.1.pep
GGVTAASQAGGSIVNYTAGFATLGATGIVGMALSKNNTIKPVKQQTFFSSIQHELEQPLFVADLYLEADSHLDFGYLNESLIEGPVTWADVDTDDSQQGWWSITIDAYQVGSHRAVEGAFQSIVDT

SEQ ID NO: 273862 - protein, 67 aa, Zea mays
  Clone ID: MRT4577_181349C.1.pep
SCVLACYYRVLSHTKIIYLRKENNVLSFLYKRFEEFGLSLELLKRYHVNCVILFFGLLTASQPAVPL

SEQ ID NO: 273863 - protein, 76 aa, Zea mays
  unsure (1)..(76): unsure at all Xaa locations
  Clone ID: MRT4577_18134C.1.pep
DGVFITLSTPCPCQKMFPRVMEQLNNMFRRKAFLHWSNGEGMDKMXFAQCDSTMTMWCKSSSSIRNRTHDQEWQYE

SEQ ID NO: 273864 - protein, 71 aa, Zea mays
  unsure (1)..(71): unsure at all Xaa locations
  Clone ID: MRT4577_181350C.1.pep
PASAXIEFMCFSYVILKMSERKLSSRTSLIVTTDMQTSTAPNDGDYLQDMNAIEEKLARWFTFQLIEINKE

SEQ ID NO: 273865 - protein, 176 aa, Zea mays
  Clone ID: MRT4577_181351C.1.pep
PLHPQPLWSSRLIRITSPIRGSISPRLCYRQDGLRLCFPGPRLYYRQGGVGICFGRLSLSSGLGLGVSLDFGLLGFSHGLGRPRLVSDSDSGLRRRSSGLLVRDLDDGAGGQLANLLDRSGSRVLASDAVHWCSAAVRPGVCVWLCVGHNNRRRLKLRQLSRVQSSPVVEAGWRVV

SEQ ID NO: 273866 - protein, 57 aa, Zea mays
  unsure (1)..(57): unsure at all Xaa locations
  Clone ID: MRT4577_181352C.1.pep
CLVGRKFGFGGGFYSWARVLEPLYISFFTGPVFFGNYTLKKKKXPLFFFLKXKIIIF

SEQ ID NO: 273867 - protein, 79 aa, Zea mays
  Clone ID: MRT4577_181353C.1.pep
KSNNTSHNMKFCITHQNSSESRSRSLLRSKARNVAFLFLGFRFRFGATHSSVVTSLWSPTSEFSATPSSIVKVVGNSSS

SEQ ID NO: 273868 - protein, 103 aa, Zea mays
  Clone ID: MRT4577_181354C.1.pep
TGSCSYRSKSAGFRVPSAISSTYTADGSSPVAPVVSHVKQQVQQGLACLATHSVDARSERHEPHAWWWSVSTVSSITTLPPFPAIPSGSQPASGAHRGQYLES

SEQ ID NO: 273869 - protein, 136 aa, Zea mays
  Clone ID: MRT4577_181355C.1.pep
KKKNKKKKKKKKNLKKKKKKKKKKKKKKKKKKKKKSKKERAGGGPLAPQNQGGANKAKKGLGGLKKTKNPEIPKGENLLPRLRNPGPGKKHPGKLNLFIPRGKKKQSHSPNYGQPKGNHPNPKKRGWGKKKKALGF

SEQ ID NO: 273870 - protein, 532 aa, Zea mays
  unsure (1)..(532): unsure at all Xaa locations
  Clone ID: MRT4577_181356C.1.pep
MVHPPTQDVHQEEACDQGGAQDDHVMEEEAQPAPPTQVRAMIQRDHPVDQILGDISKGVTTRSRLVNFCEHYSFVSSIEPFRVEEALLDPDWVLAMQEELNNFKRNEVWTLVPRPKQNVVRTKWVFCNKQDEHGVVTRNKARLVAKGYAQVAGLDFEETFAPVARLESIRILLAYAAHHSFRLFQMDVKSAFLNGPIKEEVYVEQPPGFEDERYLDHVCKLSKALYGLKQAPRAWYECLRDFLIANAFKVGKADPTLFTKTCDGDLFVCQIYVDDIIFGSTNQKSCEEFSRVMTQKFEMSMMGELSYFLGFQVRQLKDGTFISQMKYTQDLIKRFRMKDAKPAKTPMGTDGHTDLNKGGKSVDQKAYRSMIGSLLYLCATRLDIMLSVCMCARFQSDPRECHLVAVKRILRYLVATPCFGIWYPKGSTFDLIGYSDFDYAGCKVDRKSTSGTCQFLGRSLVSWSSKKQTSIALSIAEAEYVVAGQCCAQLLWMRQTLRDFGYHLSKXPLLCDNESAIRMADNPVEHSRTKHI

SEQ ID NO: 273871 - protein, 767 aa, Zea mays
  Clone ID: MRT4577_181357C.1.pep
DKSETQGTLKRFLRKAQNKFELKVKKIRSDNGSEFKNLQVEEYLEEVYLHRLLKKTSYELLTGNKTNVSYYRVFGSKCYILVKKGRNSKFAPKAVEGFLLGYDSNTKAYRVFNKSSGLVEVSSDVVFDETNGSPREQVVDLDEVDEEDVPTAAIRTMAIGDVRPQEQKEQDQASSSIMVHSPYQDCEQVQEEACDQGGAQDVHVIEEEAQPAPPTQVRATIQRDHPVDQILGDISKGVTTRSRLVNFCEHYSFVSSIEPFRVEEALLDPDWVLAMQEELNNFKRNEVWTLVPRPKPNVVGTKWVFRNKQDEHGVVTRNKARLVAKGYAQVTCLDFEETFAPVARLESIRILLAYATHHSFRLFQMDVKSAFLNGPIKEEVYVEQPPGFEDERYPDHVCKLSKALYGLKQAPRAWYECLRDFLIANAFKVGKADPTLFTKTCDGDLFVCQIYVDDIIFGSTNQKSCEEFSRVMTQKFEMSMMGELSYFLGFQVRQLKDGTFISQTKYTQDLIKRFGMKDAKPAKTPKGTDGHTDLNKGGKSVDQKAYRSMIGSLLYLCASRPDIMLSVCMCARFQSDPRECHLVAVKRILRYLVATPCFGIWYPKGSTFDLIGYSDSDYAGCKVDRKSTSGTCQFLGRSLVSWISKKQTSVALSTAEAEYVATGQCCAQLVWMRQTLRDFGYNLSKVPLLCDNESAIRMADNPVEHSRTKHIDIRHHFLRDPQQKGDIEVFHVSSENQLADIFTKPLDEQTFCKLRSELNVLDSRNLD

SEQ ID NO: 273872 - protein, 68 aa, Zea mays
  Clone ID: MRT4577_181358C.1.pep
APPFSVCSSQAYTRTSTFSKSCSTFTPVRRCHHEQQAVLARRPCRYYTASASSRLARRCAVERVTPRR

SEQ ID NO: 273873 - protein, 911 aa, Zea mays
  Clone ID: MRT4577_181359C.1.pep
KDRKIVARKLGAKCKGDKTCIWVPKTIVTNLVGPNKSWVYASGGSSWIIDSGCTNHMTGEKKMFTSYVKNKDSQDSIIFGDGNQGKDKSETQGTLKRFLRRAQNEFELKVKKIRSDNGSEFKNLQVEEFLEEEGIKHEFSAPYTPQQNGVVERKNRTLIDMARTMLGEFKTPECFWSKAVNTACHAINRVYLHRLLKKTSYELLTGNKPNVSYFRVFGSKCYILVKKGRNSKFAPKAVEGFLLGYDSNTKAYRVFNKSSGLVEVSSDVVFDETNGSPREQVVDLDDVDEEDVPTAAIRTMAIGDVRPQEQKEQDQPSSSTMVHSPTQDDEQVHQQEAYDQGGAQDDQVMEEEGQPAPPTQVRAMIQRDHPVDQILGDISKRVTTRSRLVNFCEHYSFVSSIEPFRVEEALLDPDWVLAMQEELNNFKRNEVWTPVPRSKQNVVGTKWVFRNKQDEHGVVIRNKARLVAKCYAQVAGLDFEETFAPVARLESICILLAYAAHHSFRLFQMDVKSAFLNGPIKEDVYVEQPPGFEDERYPDHVCKLSKALYGLKQAPRAWYECLRDFLIANAFKVGKADPTLFTKTCDGDLFVCQIYVDDIIFGSTNKKSCEEFSRVMTQKFEMSMMGELNYFLGFQVKQLKDGTFISQTKYTQDLLKRFGMKDAKPAKTPMGTDGHTDLNKGGKSVDQKAYRSMIGSLLYLCASRPDIMLSVCMCARFQSDPKECHLVAVKRILRYLVATPCFGLWYPKGSTFDLIGYSDSDYAGCKVDRKSTSGTCQFLGRSLVSWNSKKQTSVALSTAEAEYVAAGKCCAQLLWMRQTLRDFGYNLSKVPLLCDNESAIRMAENPVEHNRTKHIDIRHHFLRDHQQKGDIEVFHVSTENQLADIFTKPLDEKTFCRLRSELNVLDSRNLD

SEQ ID NO: 273874 - protein, 62 aa, Zea mays
  Clone ID: MRT4577_18135C.1.pep
PKQDTSSIQHATRFFYGGVLDLRKTAHRFLVLKGAFWGGNFFFYKRVPAWGSRGESFFKPSQ

SEQ ID NO: 273875 - protein, 791 aa, Zea mays
  Clone ID: MRT4577_181360C.1.pep
MTGEKKMFTSYVKNKDSQDSIIFGDGNQGKDKSETQGTLKRFLRRAQNEFELKVKRIRSDNGSEFKNLQVEEFLEEEGIKHEFSAPYTPQQNGVVERKNRTLIDMARTMLGEFKTPECFWSEAVNTACHAINRVYLHRLLKKTSYELLTGNKPNISYFRVFGSKCYILVKKGRNSKFAPKAIEGFLLGYDSNTKAYRVFNKSSGLVEVSSDVVFDETNGSPREQVVDLDDVDEEDVPTAAIRTMAIGQVRPQEQNERDQPSSSTMVHPPTQDDEQVHQQEACDQGGAQDDHVMEEEAQPAPPTQVRAMIQRDHPVDQILGDISNGVTTRYRLVNFCEHYSFVSSIEPFRVEEALLNSDWVLAMQEELNNFKRNEVWTLVPRPKQNVVGTKWVFRNKQDEHGVVMRNKARLVAKGYAQVAGLDFEETFAPVARLESIRILLAYVAHHSFRLFQMDVKSAFLNGPIKEEVYVEQPPGFEDERYPDHVCKLSKALYGLKQAPRAWYECLRDFLIANAFKVGKADPTLFTKTCDGDLFVCQIYVDDIIFGSTNKKSCEEFSRVMTQKFEMSMMGELNYFLGFQVKQLKDDTFISQTKYTQDLLKRFGMKDAKPAKTPMGIDGHTDLNKGGKSVDQKAYRSMIGSLLYLCASRPDIMLSVCMCARFQSNPKECHLVAVKRILRYLVATPCFGLWYPKGSTFDLIGYSDSDYAGCKVDRKSTSGTCQFLGRSLVSWNSKKQTSVALSTAEAEYVAAGQCCAQLLWMRQTLRDFGYNLSKVPLLCDNESAIRLAENPV

SEQ ID NO: 273876 - protein, 75 aa, Zea mays
  unsure (1)..(75): unsure at all Xaa locations
  Clone ID: MRT4577_181361C.1.pep
VFRVVFGGPLKGILGXVGEVLVSPDFTGERGLSIFEAKAGIALKDHFIRLVFGEEKGWGXRKGVVALIRQMFKTQ

SEQ ID NO: 273877 - protein, 40 aa, Zea mays
  Clone ID: MRT4577_181362C.1.pep
ARTFPLSFSLKPHLRSDPGGSIPLLLLWDTVVPRADLRPL

SEQ ID NO: 273878 - protein, 1656 aa, Zea mays
  Clone ID: MRT4577_181363C.1.pep
MDPKGKGIVINDKDKESFVNEPKDDKPTDSGSGHKRRDGKKKKTRRIKEIVYYDDSDESSSSQKDNDDNDYDKRKTVNSNFSFDYSCIPHSSNAHLLSIPIGKPPHFDGEDYGFWSQKMRSHLFSLHPSIWEIVESGMKFDSSDSPMFINEQIHKNAQTTTVLLASLCREEYNKVSGLDNAKQIWDTLGISHEGNDVTMLTKMELVEGELGRFAMIRGEDPTQTYNRLKTLINKIRSYGSTRWTDHDIVRLMLRSFTVLDPHLVNNIRENPRYTKMSPEEVLGKFVSGRMMIKEARYMDDAMNGPIHEPQPIALKASRSKEALPSKVAQVEAAGLNDEEMALIIKRFKTVLKGRKEHPKKTKTKGKRSCFKCGKIGHFIANCPDNDSDQEQGNKREKKNYKKAKGEAHLGKEWDSDCSSSDSDNEGLAATAFNKSSLFPNKHHTCLMAKEKKGLDRTKVDKINELIDALNDKNRCKDFDVDACSKHLASISKLNDEVASLNAQLKTSKSDFDKLKFARDAYTIGRHPSIKDGLGFKREAKNLTSHKAPISAKEKGKAPMASSTKKNHAFMYHDRRYSRNAYRSYDTYDSYAMTASSSHVVHDRDMPRRNVVPRKINEPSTIYHACNASFAICRKDKKVYASGGSSWIIDSGCTNHMTGEKKMFTSYVKNKDPQDSIIFGDGNQGKVKGFGKIAISNEHSISNVFLVESLGYNLLSVSQLCNMGYNCLFTNIDVSVFRRCDGSLAFKGVLDDKLYLVDFAKEEAGLDACLIAKTCMGWLWHRRLAHVGMKNLHKLLKGEHVIGLTNVHFEKDRPYAACQAGKQVGGAHHSKNVMTTSRPLELLHMDLFGTVAYLSIGGSKYGLVIVDDFSRFTWVFFLQDKSKTQGTLKRFLRRAQNEFELKRKNRMLIDMARTMLGEFKTPEHFWSEAGNTACHAINRVYLHRLLKKTSYELLTGNKPNVSYFRVFGSKCYILVKKGRNSKFAPKAVEGFLLGYDSNTKAYRVFNKSSGLVEVSSDVVFDETNGSPTEQVVDFDDVDEEEVPTAAIRTMAIGDVRPQEQDERDQPSSSTMVHPPTQDDEQEACDQGGAQDDHVMEEEAQLAPPTQVRAMIQRDHLVDQILGDISKGVTTRSRLVNFCEHYSFVSFIEPFRVEEALLDPDWVLAMQEELNNFKRNEVWTLVPRPKQNVVGTKWVFRNKQDEHGVVTRNKARLVAKGYAQVAGLDFEETFAPVARLESIRILLAYAAHHSFRLFQMDVKSAFLNEPIKEEVYVEQPPGFEDERYPDHVCKLSKALYGLKQAPRAWYECLRDFLIANAFKVGKADPTLFTKTCDGDLFVCQIYVDDIIFGSTNQKSCEEFSRVMTQKFEMSMMGELNYFLGFQVKQLKDGTFISQTKYMQDLLKRFEMKDAKPAKTLMRTDRHTDLNKGGKSVDQKAYRSMIGSLLYLCASRPDIMLSVCMCARFQSDPKECHLVAVKRIFRYLVATPCFGIRYPKGSTFDLIGYSDSDYVGCKVDRKSTLGTCQFLGRSLVSWNSKKQTFVALSTAEAEYVAAGQCCAQLLWMRQTLRDFRYNLSKVPLLCDNESAIRMAENPVEHSRTKHIDIRHHFLRDHQQKGDIEVFHVSTENQLADIFTKPLDEKTFCRLRSELNVLDSRNLD

SEQ ID NO: 273879 - protein, 1608 aa, Zea mays
  Clone ID: MRT4577_181364C.1.pep
MDPKGKGIVINDKEKESFVNEPKDDKPTDSGSGHRRKEGKKKKIRRIKEIVYYDDSDESSSSQKDNDDNDYDKQKTVNSNFSFDYSRIPHSSNAHLLPIPLGKPPHFDGEDYGFWSHKMRTHLFSLHPSIWEIVESGMKFDSSDSPSFINEQIHKNAQATTVLLASLCRDEYHKVSGLDNAKQIWDTLKISHEGNDVTLLTKMELVEGELGRFAMIRGEEPTQTYNRLKILINKIRSYGSTRWTDHDVVRLMLRSFTVLDPHLVNNIRENPRYIKMSPEEILGKFVSGRMMIKEARSKEALPSKVAKIEAAGLNDEEMALIIKRFKTALKGRKGQPSKTKTKGKRSCFKCGKLGHFIANCPDNDSDQEHRSKREKKKHYKKAKGEAHIGKEWDSDCSSSDSDNEGLAATAFNKSTLFPNERHTCLMAREKKMSTRDTTYVSSSDDESSDEEIDYSNLFKGLDRNKIDKINKLIDALNEKDRLLEKQEDLLYEEHDKFIEAQKSYALEVKRNEMLSFELSTCHETISTLKGVNNDLNAKLEVANKSNSCVEHVVICTRCKDFDIDACSEHLVSISKLNGELASLNAQLKTSKNDFDKLKFARDAYTIGRHPSIKDGLGFKREAKNLTSHKAPIPAKEKGKAPMASNVQKNHAFIYHDRRQSRNAYRNYNAYDDFDSHAMFASSSSYMHGRNMSRRNAIHHVPRKNIIHAPRKVVNEPSTIYHALNASFAICRKDRKVYASGGSSWIIDSGCTNHMTREKKMFTSYVKNKDSQDSIIFGDGNQGKDKSETQGTLKRFLRRAQNEFELKVKKIRSDNGSEFKNLQVEEFLEEEGIKHEFSAPYTPQQNGVVERKNRTLIDMARTMLGEFKTPECFWTEAVNTACHAINRVYLHRLLKKTSYELLTGNKPNVSYFRVFGSKCYILVKKGRNSKFAPKAVEGFLLGYDSNTKAYRVFNKSSGLVEVSSDVVFDETNGSPREQVVDLDDVDEEDVPTAAMRTMAIGDVRPQEHLEQDQPSSSTMVHPPTQDDEQVHQQEACDQGGAQDDHVMEEEAQPAPPTQVRAMIQRDHPVDQILGDISKGVTTRSRLVNFCEHYSFISSIEPFRVEEALLDPDWVLAMQEELNNFKRNEVWTLVPRPKQNVVGTKWVFRNKQDEHGVVTRNKARLVAKGYAQVAGLDFEETFAPVARLESIRILLAYAAHHSFRLFQMDVKSAFLNGPIKEEVYVEQPPGFEDERYPDHVCKLSKALYGLKQAPRAWYECLRDFLIANAFKVGKVDPTLFTKTCDGDLFVCQIYVDDIIFGSTNKKSCEEFSRVMTQKFEMSMMGELNYFLGFQVKQLKDGTFISQTKYTQDLLKRFGMKDAKPAKTPMGTDGHTDLNKGGKSVDQKAYRSMIGSLLYLCASRPDIMLSVCMCARFQSDPKECHLVAVKRILRYLVATPCFGLWYPKGSTFDLIGYSDSDYAGCKVDRKSTSGTCQFLGRSLVSWNSKKQTSVALSTAEAEYVAAGQCCAQLLWMRQTLRDFGYNLSKVPLLCDNESAIRMAENPVEHSRTKHIDIRHHFLRDHQQKGDIEVFHVSTENQLADIFTKPLDEKTFCRLRNELNVLDLRNLD

SEQ ID NO: 273880 - protein, 1057 aa, Zea mays
  unsure (1)..(1057): unsure at all Xaa locations
  Clone ID: MRT4577_181365C.1.pep
MLLCIMIGDMLEMQIEVMMLLIHMFMIHMLCLLLVLPVYASGGSNWIIDSGCTNHMTGEKKMFTSYVKNKDXQDSIIFGDGNQGKVKGLDVSVVRRSDGSLAFKGVLDDKLYLVDFAKEEAGLDACLIAKTSMGWLWHRRLAHVGMKNLHKLLKGEHVICLTNVQFEKDRPCAACQAGKLVGSSHHIKNVMTTSRPLEMLHMDLFGPVAYLSIGGSKYGLVIVDDFSRFTWVFFLQDKSETQGTLKRFLRRAQNEFELKVKKIRSDNGSEFKNLQVEEYLEEEGIKHEFSAPYTPQQNGVVERKNMTLIDMARTMLGEFKTLERFWSEAVNTACHAINRVYLHRLLKKMSYELLTGNKPNFSYFRVFGSKCYILVKKGRNSKFAPKAVEGFLLGYDSNTKAYRVFNKSSGLVEVSSDVVFDETNGSPREQVVDFDDADEEEVPTTAICTMAIGDVRPQEQDEQDQPSSSTMVQPPSQDDEQEVCDQGGAQDDLAMEEEAQSAPPTQVRAMIQRDHPVDQILGDISKGVTTRSRLVNFCEHYSFVSSIEPFRVEEALLDPDWVLAMQEELNNFKRNEVWTLVPRPKQNVVGTKWVFRKKQDEHGVVTRNKARLVAKGYAQVAGLDFEETFAPVARLESIRILLAYAAHHSFRLFQMDVKSAFLNGPIKEEVYVEQPPGFEDERYPDHVCKLSKALYGLKQAPRAWYECLRDFLIANAFKVGKADPTLFTKTCDGDLFVCQIYVDDIIFGSTNQKSCEEFSKVMTQKFEMSMMGELSYFLGFQVRQLKDGTFISQTKYTQDLIKRFGMKDAKPAKTPMGTDGHTDLNKGGKSVDQKAYRSMIGSLLYLCASRPDIMLSVCMCARFESDPKECHLVAVKRILRYLVATPCFRIWYPKGSTFDLIGYSDSDYAGCKVDRKSTSGMCQFLGRSLVSWSSKKQTSVALSTAEAEYVAAGQCCAQLLWMRQTLRDFGYNLSKVPLLCDNESAIHKADNPVEHSRTKHIDIRHHFLRDHQQKGDIEVFHVSSENQLADIFTKPLDEQTFCKLRSELNVLDSRNLD

SEQ ID NO: 273881 - protein, 1595 aa, Zea mays
  unsure (1)..(1595): unsure at all Xaa locations
  Clone ID: MRT4577_181366C.1.pep
MDPKGKGMVVDNNEKESIFNEPKNDKSTDLGSSHKRKDGKKKKTRRIKEIVYYDSDESSSSQKDDDNDYRKTVNSNFSFDYSRIPHNSNSHLLSIPLGKPPHFDGEDYGFWSHKMRSHLFSLHPSIWEIVENGMKFDSSDSPMFVNEQIHKNAQATTVLLASLCRDKYNKVSGLDNAKQIWDTLKISHEGNDITMLTKMELVEGELGRFATIRGEEPTQTYNRLKTLINKIMSYGSTRWTDHDVVRLLLRSFTILDPHLVNNIRENPRYTKMSPEEVLGNFVSGRMMIKEARYVDDALNGPINEPQPLALKATRSKEALPSKVAQIEAAGLNDEEMALIIKRFKTVLKGHKGQPSKTKTKGKRSCFKCGKIGHFIANCPDNDSNQEQENKREKKKNYKKAKGEAHLGKEWDSDCSSSDSDNEGLAATAFNKSSLFPNERHTCLMAREKKVSTRDSTYASSSDNESSDDDDIDYSCLFKGLDRSKIDKINELIDALNDKNRLLEKQEDLLYEEHDKFVEAQKSLALEIKRNEMLSCEVSTCHDSISSLKSINDDLNAKLERSSKSTSCVEHVVICTRCKDFDIDACSEHLVSISKLNDELASLNAQLKTSKSEFDKLKFARDAYTIGRHPSIKDGLGFKREAKNLTSHKTPISAKEKGKAPMASXRQTRNAYRSYNXNVARRNAIHHVPRKNVLYAPRKVVNEPSTVYCALNASFAICRKDRKVYASGGSSWIIDSGCTNHMTGEKKMFTSYVKNKDSQDSIIFGDGNQGKDKSETQGTLKRFLRRAQNEFELKVKKIRSDNGSEFKNLQVEEFLEEEGIKHEFSAPYTPQQNGVVERKNRTLIDMVRTMLGEFKTPECFWTEAVNTACHAINRVYLHRLLKKTSYELLTGNKPNVSYFRVFGSKCYILVKKGRNSKFAPKAVEGFLLGYDSNTKAYRVFNKSSGLVEVSSDVVFDETNGSPREQVVDLDDVDEEDVSTAAIRTMAIGDVRPQEQDEQDQPSSSTMVHPPTQDDEQVHQQEACDQGGAQDDHVMEEEAEPAPPTQVRAVIQRDHPVDQILGDISKGVTTRSRLVNFCEHYSFVSSIEPFRVEEALLDPDWVLAMQEELNNFKRNEVWTLVPRPKQNVVGTKWVFRNKQDEHGVVTRNKARLVAKGYAQVAGLDFQETFAPVARLESIRILLAYVAHHSFRLFQMDVKSAFLNGPIKEEVYVEQPPGFEDERYPDHVCKLSKALYGLKQAPRAWYECLRDFLIANAFKVGKADPTLFTKTCDGDLFVCQIYVDDIIFGSTNKKSCEEFSRAMTQKFEMSMMGELNYFLGFQVKQLKDDTFITQTKYTQDLLKRFGMKDAKPAKTPMGTDGHTDLNKGGKSVDQKAYRSMIGSLLYLCASRPDIMLSVCMRARFQSDPKECHLVAVKRILTYLVATRCFGIWYPKGSTFDLIGYSDSEYAGCKVDRKSTSGTCQFLGRSLVSWNSKKQTSVALSTAEAEYVAAGQCCAQLLWMRQTLRDFGYNLSKVPLLCDNESAIRMAENPIEHSRTKHIDIWHHFLRDHQQKGDIEVFHVSSENQLANIFTKPLDEKTFCRLRSELNVLDSRNLD

SEQ ID NO: 273882 - protein, 38 aa, Zea mays
  Clone ID: MRT4577_181367C.1.pep
FVKGCKQKYMIWLGSQTSIPYATLTIPYTTDDTLYKEV

SEQ ID NO: 273883 - protein, 123 aa, Zea mays
  Clone ID: MRT4577_181368C.1.pep
LGDLLSPLQSSFGGDEISTDDGFLFADTRLLTVYFLIRVFRPESSGSRSSSWFGTSRARTHPSGRRRFSRPASLWGESYEGNTGTSPRDEENNQSFDEQVFGTRRRRFRRRTVIDDDDEEEEP

SEQ ID NO: 273884 - protein, 95 aa, Zea mays
  Clone ID: MRT4577_181369C.1.pep
PDRLHRWFRKYPTPARTMAKITGARLLRLYLPRGLTLLFLPPPPTAAAPSSPLSSSPPRCLSSSPSASPYLSSSGAGGCGVVERRSLKPPWHRPG

SEQ ID NO: 273885 - protein, 149 aa, Zea mays
  unsure (1)..(149): unsure at all Xaa locations
  Clone ID: MRT4577_18136C.1.pep
MTTSSFLRHIFSIMAPTKNKLLAVVQQRDYXNNAVTTHINLVAHHPFFSWCHNKEEGTNHRSXQQLSMLDEXYDPCCSASFTAAVVVTTSMTTTIVSSLLPAASAAFPPFFVTTVGFSPQDVINGLLPGGLLSAALQLLHHKLVEGDDG

SEQ ID NO: 273886 - protein, 54 aa, Zea mays
  unsure (1)..(54): unsure at all Xaa locations
  Clone ID: MRT4577_181370C.1.pep
ALYPYSSLPXPGERAHRPTRRKFFFPYLFTTLNKNSTPFAHYLYIHSGVNFLLN

SEQ ID NO: 273887 - protein, 46 aa, Zea mays
  Clone ID: MRT4577_181371C.1.pep
GDRSLYQEIYRSCFLLGGTASVTVASSAVGDSSCPRRSPYPIRSLP

SEQ ID NO: 273888 - protein, 185 aa, Zea mays
  Clone ID: MRT4577_181372C.1.pep
VPAPPSRVFFFFFFFFFFFFFFFFFFFFFFWFFYLKGEGCFFSTTTIKKLGKLIGVYFIQFLEARKPMPGNKNAIQKLPRGKPSKGDGVNQTPGAGQTKAGHKQAGGAEKKKKGPLRGILALLGPKKGPLEKGPPPVAEHGQKVPGGKKIFVGALPPLGKFRALLPTGKKKTKGPPAQNWERGGR

SEQ ID NO: 273889 - protein, 66 aa, Zea mays
  Clone ID: MRT4577_181373C.1.pep
LLCRNLQGSNLYNHLKQSKLFSNLQFHTWDSVAEIKVIDNLLTWKNTSRSYTFLLIISILNLNNII

SEQ ID NO: 273890 - protein, 48 aa, Zea mays
  Clone ID: MRT4577_181374C.1.pep
KYTKHETGVLRWLCLCSRPDFTNIQCVAPNILSFYTHWRKKARGVPRC

SEQ ID NO: 273891 - protein, 133 aa, Zea mays
  Clone ID: MRT4577_181375C.1.pep
GERQARGKKGTRSQKRQGRAGAKGRTGRSGRNAKKEEHPRNAEETEKEHQEHTDQQPDEGQTTPQQEKPQRRRQPTPDKQQHEKEKANKRNDRPKQEETEETRQDRKNQRPRKDEGPGKRRTNAPERRKNRKG

SEQ ID NO: 273892 - protein, 113 aa, Zea mays
  Clone ID: MRT4577_181376C.1.pep
MGCAGSTPKVDENSKKLKRPKAWKHTQPITPARLKQMRDEFWDTAPHYGGQKEIWDALRVAAESDLALAQTIVDSAGIIVSNPDMTLCYDERGAKYELPKYVLSEPANLIRDG

SEQ ID NO: 273893 - protein, 113 aa, Zea mays; identical to SEQ ID NO: 273892
  Clone ID: MRT4577_181377C.1.pep

SEQ ID NO: 273894 - protein, 56 aa, Zea mays
  Clone ID: MRT4577_181378C.1.pep
VLSRAEHVARDVQKLSQPPDRVGPPQIHHAGKRQSVHYVFLLSACILSIGSRRTDL

SEQ ID NO: 273895 - protein, 82 aa, Zea mays
  unsure (1)..(82): unsure at all Xaa locations
  Clone ID: MRT4577_181379C.1.pep
GHGSLLFIVRISLGAYLLLLYLSMITPIIHDFENYDMEMAXFASLLAKFTQDLTLIGVLXFYLGMKNSIPKRHGGKKKAPNA

SEQ ID NO: 273896 - protein, 87 aa, Zea mays
  unsure (1)..(87): unsure at all Xaa locations
  Clone ID: MRT4577_18137C.1.pep
SFLLLENGIQPYVTIFHWDVPQAQKKKTAAFLVRILRDLVKXYPTSAYGRAENTSDTXKNGLTFNEPQTFTSFSTEQGPLAPRRAQQ

SEQ ID NO: 273897 - protein, 83 aa, Zea mays
  Clone ID: MRT4577_181380C.1.pep
GPFFFFFLDRMPNGIWIFGWKKKNGEKKKKEGINGSTRITNKLQHGAVQISLLSVEGGGGHGGGGGGGEPLGGGGGDGGEREA

SEQ ID NO: 273898 - protein, 97 aa, Zea mays
  Clone ID: MRT4577_181381C.1.pep
IECRMEYGYSDGRKKMVKRKKKEGINGSTRITNKLQHGAVQISLLSVEGGGGHGGGGGGGEPLGGGRGRRRRRRALPWPGPRAGSAPLEPRVGEREA

SEQ ID NO: 273899 - protein, 51 aa, Zea mays
  Clone ID: MRT4577_181382C.1.pep
KKKKLYYYKMERFWRCICLRNKNNSSYGSIKCNHTWANYFFKRKKKKISIG

SEQ ID NO: 273900 - protein, 85 aa, Zea mays
  Clone ID: MRT4577_181383C.1.pep
RQPKAKVKSYWKWLNNIKLKVYWYTKLVTNHWGMQVFHFFNLFLWCSNFCVCCPILTFVNMFRIPVVFHEKKTKNKKKNQITKKI

SEQ ID NO: 273901 - protein, 84 aa, Zea mays
  unsure (1)..(84): unsure at all Xaa locations
  Clone ID: MRT4577_181384C.1.pep
GKARVTKHKTEEKGKSEVSSESPGDSPDSVLYLGPVTGAPPSYMTGEIPGDYGWDTAGLLADPETXAKNXRELEDIHSRWGKLG

SEQ ID NO: 273902 - protein, 92 aa, Zea mays
  Clone ID: MRT4577_181385C.1.pep
AVGPCLQALGGGIHLKMAPLLAKNPCVPPNMLCFFRRCFFLGVRSPSGHGLSVGCPEGTVHSVSCIVLVPFLLPIHGSLGVSVLFCGSPVTL

SEQ ID NO: 273903 - protein, 48 aa, Zea mays
  Clone ID: MRT4577_181386C.1.pep
YASLAIDNSRSVHIHHHAFVTLPEDQPRVKSDISYSPVQNKRHLRQLS

SEQ ID NO: 273904 - protein, 183 aa, Zea mays
  Clone ID: MRT4577_181387C.1.pep
TSPLSLLPIAPIPFHSIPPLDPATTTVLRIQQLASRTDHRIWFLDRRPSCLDQHRATQDEMKMRTPAVAFAALLLLLLQITTRAHGIRMDRQLHEAINSKKMMADPKSGGGGEAASIAAAGDSVRKHCAPDGRRRCSGTTKQMTPTTVVGSRYSEVAMIISAHAAPRFHEDYYGPSGHEPNHH

SEQ ID NO: 273905 - protein, 134 aa, Zea mays
  Clone ID: MRT4577_181388C.1.pep
EEESDRDGFFRRLLRDSKEEDMELTPSSDGLLKRLFRDKEDRQGEDDEKEGFFRRMFKDKNEERRDSNHARHGNEERLGKSVGNDGIEGFFGKIFKDKNEEKKDEGHQKPDEREKVGAHIEDDKTPGFFRQLFK

SEQ ID NO: 273906 - protein, 60 aa, Zea mays
  unsure (1)..(60): unsure at all Xaa locations
  Clone ID: MRT4577_181389C.1.pep
LPPPPPGAARXLAGPFVLGLLSLLSAXVRLRGVLALVLPSXRGLLPRARRGGPGGPPLGL

SEQ ID NO: 273907 - protein, 181 aa, Zea mays
  Clone ID: MRT4577_18138C.1.pep
LVYGLMSRRRVREAYRVFHGVKEKEIALYHGLMKGLLRIKRAGEATEVFREMITRGCEPNMHTYIMLLQGHLGKRGRKGRDPLVNFESIFVGGLVKAGRTLEATKFVERTMWGGVDVPRFDYNKFLYYFSNDEGAVMFEEVSKRLREVGVIDLADILSAYGERMTTRDRRRIAMNGLLKSV

SEQ ID NO: 273908 - protein, 84 aa, Zea mays
  Clone ID: MRT4577_181390C.1.pep
ATDRSGNGDPGGGPVPKVVRWVPRGFKEDVPPLAEMVDPAFLRGPPLPKKKVVGGFPVALQCPESAPELRPRIKAVSPTLEKIG

SEQ ID NO: 273909 - protein, 144 aa, Zea mays
  unsure (1)..(144): unsure at all Xaa locations
  Clone ID: MRT4577_181391C.1.pep
VFFMPDLAHAKFGAATATAAGAAGSNSXRPRGPSPXDVAQKIVKQVEYQFSDINLVANEFLLKIMNKDTEGYVPLSVIASWKKIKSLGATNQMLVKALRTSTKLNVSDDGKKVRRRQAFTEKHKEELQSRMIIAENLPEDSSRN

SEQ ID NO: 273910 - protein, 183 aa, Zea mays
  unsure (1)..(183): unsure at all Xaa locations
  Clone ID: MRT4577_181392C.1.pep
MSARRSSAGSDDRDQSRLQQLGYKQELKRGLSVVSNFAFSFSMISVLAGVTTTYNTGLRYGGPASMTLGWLVVALFNGCVALSMAEICSAYPTTGVFLXWSAKLAGKDWGPLACWITGXWACTTSVDFSLAQFVQVIVLLATGGDNGGGYLGSKYGEIDIYCDIIENERESSIELHITLNGTN

SEQ ID NO: 273911 - protein, 518 aa, Zea mays
  Clone ID: MRT4577_181393C.1.pep
MGTVGGGELPVADPAAADADRARLQQLGYKQELKRGLSVVSNFAFSFAIISVLTGVTTTYNTGLRYGGPASMTLGWLVVATFNGCVALSMAEICSAYPTSGGLYYWSAKLAGNEWAPLASWVTGWFNIVGQWACTTSVDFSLAQLIQVIILLSTGGANGGGYLASKYVVLAIYTAILVVHGLINSLHIQWLSWFGQLGALWNVAGVFVLVILVPSVAKERASAEFVFTHLNTDNGMGIHSKAYILAVGLLMSQYSSIGYDTSAHMTEETKKADWSGPMGIVYSVALSSVFGWVYLLALTSVVTDIPYLLDTSNGAGGYAIAQALYDTFRRRYGTGAGGIACLVIIAVAVFLCGTACVTSNSRMGYAFSWDGAMPFSHLWYRVNKQEVPFNVVWLSVSVAFVMALTSLGSQVAFQAMVSIATLGLYIAYALPIFFRVTTARKSFVPGPFHLGRCGIAVGSVAVLWVALVTVLFCLPVAYPVAKDTFNYTPVAVGGVLVLSLVAWVLHARFWFRGPITNV

SEQ ID NO: 273912 - protein, 85 aa, Zea mays
  Clone ID: MRT4577_181394C.1.pep
LIYYRVFQDIPHKRIWSSRLRKVSKKAKKIHGLFQSFISSMTNIMLFLFATTFIEHSHDVQIKKMAHVGNKREYVTSNPFGGGFW

SEQ ID NO: 273913 - protein, 539 aa, Zea mays
  unsure (1)..(539): unsure at all Xaa locations
  Clone ID: MRT4577_181395C.1.pep
MSARRSSAGSDDRDQARLQQLGYKQELKRGLSVVSNFAFSFSMISVLAGVTTTYNTGLRYGGPASMTLGWLVVALFNGCVALSMAEICSAYPTTGGLYYWSAKLAGKDWGPLACWVTGWFNIVGQWACTTSVDFSLAQFVQVIVLLATGGANGGGYLASKYVVLAIYCAILVLHGLINSLPIHWLAFFGQLGAFWNLGGVFVLTVLIPVVAKERASMEFMFTHCYTDDAVGIHSKVYVLAIGLLTSQYSLLGYDTSAHMSEETKNAEWSGPMGIVVSVALSSVFGWIYLVALTSAVTADDVPSLLDPTNDAGGYAIAQALYDTFRRRYGTGAGGIACLVIIAVAVFLCGTACVTSNSRMGYAFSRDGAMPFSHLWYRVNKQEVPFNVVWLSVSVAFVMALTXACMRCESSFISSASQLLALLTSVHMQSLGSQVAFQAMVSIATLGLYIAYALPIFFRVTTARKSFVPGPFHLGRCGIAVGSVAVLWVALVTVLFCLPVAYPVAKDTFNYTPVAVGGVLVLSLVAWVLHARFWFRGPIT

SEQ ID NO: 273914 - protein, 122 aa, Zea mays
  Clone ID: MRT4577_181396C.1.pep
MVKKRASNGRNKKGRGHVKPIRCSNCSRCTPKDKAIKRFTIRNMVESAAIRDISDASVFPEYAVPKMYLKLQYCVSCAIHGKIVRVRSREGRRNRAPPPRVRYNKDGKKINPNQAAAKTTTA

SEQ ID NO: 273915 - protein, 140 aa, Zea mays
  unsure (1)..(140): unsure at all Xaa locations
  Clone ID: MRT4577_181397C.1.pep
MGTIPVIXPATMLVVALLVSTVCXFGATDTDTDSDXAIRLPSRSGAAGRPRECXDYGTKDTXITRPTRWRCNHAANTCSCDCQECXTSIATDXHACIXTVSTDIVARLXTPRPCDCCDFAGCTRXYIPNCQCGYETESSP

SEQ ID NO: 273916 - protein, 120 aa, Zea mays
  Clone ID: MRT4577_181398C.1.pep
SVPLAARRGGPPRGVFWVQRWRKRGAPYQQRRSFKTRPGRAGLRSRAACWPAGASPPPPMFEVPCIEREFSCDLGVLLWVAPGNKLLACVSGALPSRSDKPRTLCMRGPPPQKKKKKSGP

SEQ ID NO: 273917 - protein, 105 aa, Zea mays
  Clone ID: MRT4577_181399C.1.pep
VAMVWIVVLATDGRGRNGGCGQRGGEKLAGPEQSEEGQGGVERRMHGRVGRAMECQWHGGEGRDCAPVGEGSETPAARRLPSGVGAANDGLDSKTALMAAVCHAS

SEQ ID NO: 273918 - protein, 65 aa, Zea mays
  Clone ID: MRT4577_18139C.1.pep
PCGHLGTFFSSLIQIPFECSLYALKVGNLIPLLATNSGVFIIISNALEGGLLVIYGFQLESMAFC

SEQ ID NO: 273919 - protein, 70 aa, Zea mays
  Clone ID: MRT4577_1813C.1.pep
SRPGRDCTELASPRADAGGPSVRAPLLPTRSTTQRHHEGSYLSSRLPGARRSWKSVTTRTYVTCYDRTVS

SEQ ID NO: 273920 - protein, 61 aa, Zea mays
  Clone ID: MRT4577_181400C.1.pep
MLVIDLGIWLIPLALVLVPCRRIALLLSRLEELGRSVTGPRLPTADMWARFATLNSMAFMA

SEQ ID NO: 273921 - protein, 102 aa, Zea mays
  unsure (1)..(102): unsure at all Xaa locations
  Clone ID: MRT4577_181401C.1.pep
LXGPGRXKKKSTSGRKIQKLWSRFNYGQIPPHPLDRGSMARSRSKQRGTWLLTSATQVTSNGDGFVIVTLRPEHERDGVACLRGGGMAEIRLLHATDPQILI

SEQ ID NO: 273922 - protein, 104 aa, Zea mays
  Clone ID: MRT4577_181402C.1.pep
VTLAFFRALGADARLPASADQPDAYSALVRAILSSVAVSASPTPRISCTITVSHAVTSEVDVEAQILRKGRSVVVTTIDFRLKDTKKLCYTSRATFYIMPVASL

SEQ ID NO: 273923 - protein, 56 aa, Zea mays
  unsure (1)..(56): unsure at all Xaa locations
  Clone ID: MRT4577_181403C.1.pep
LDREPYCPIEKLRIFITWAGGIIGSHMAGRMKNEGHYIFASXDWKKNEHIXEDMCL

SEQ ID NO: 273924 - protein, 168 aa, Zea mays
  Clone ID: MRT4577_181404C.1.pep
MPPPPPVNPQRLSPAESRERTLYFFHGLGVDVPLPVSAERPDAYTSLVRAIVSSAAVTSSRVSCTLTVSPAVANQYNTLHGGAVAAVAEAVGMACARAAAGDKEMFLGELSTAYLAAARLNSEVDVEAQILRKGRSVVVTTIDFRLKDTKKLCYTSRATFYIMPVASL

SEQ ID NO: 273925 - protein, 84 aa, Zea mays
  Clone ID: MRT4577_181405C.1.pep
KTPSNNAGVTKNLPWALQKTEKFIFKNRLRATQGNYFSPAFFWHLYLLNKKPFPIHHIPTPFLQPLTKFHLFTTTKFALFLWGD

SEQ ID NO: 273926 - protein, 169 aa, Zea mays
  Clone ID: MRT4577_181406C.1.pep
MADGEPGHKLSPADSRAVTLAFFRALGADARLPASADQPDAYSALVRAILSSVAVSASPTPRISCTITVSHAVTNTYNTLHGGAVAAVAEAVGMACARAAAGDREMFLGELSIAYLAAARCDSEVDVEAQILRKGRSVVVTTIDFRLKDTKKLCYTSRATFYIMPVASL

SEQ ID NO: 273927 - protein, 45 aa, Zea mays
  unsure (1)..(45): unsure at all Xaa locations
  Clone ID: MRT4577_181407C.1.pep
GGWVFFLHXKDGREHYFLLFGTLKLESMISNLVALQIMLTPHRLP

SEQ ID NO: 273928 - protein, 113 aa, Zea mays
  Clone ID: MRT4577_181408C.1.pep
MRAYSTASQLWSLDEQIPSTARARQQSTMRSEYAGDMRERRLPPCVLALLVEVSTLDLAAGGGGGGGHVPTGQRRMQQPVETGVCLARGAPREAQHGIRCARKPSSHGHRRRA

SEQ ID NO: 273929 - protein, 83 aa, Zea mays
  Clone ID: MRT4577_181409C.1.pep
ARKNPLWSTSPRDKKGPMVQIRSDTPLQKRDQRQAPPLNCDVGGWGGCSLWSLSRGFFSEKKKKKKKKKKKKKSNKKKQGRPV

SEQ ID NO: 273930 - protein, 154 aa, Zea mays
  unsure (1)..(154): unsure at all Xaa locations
  Clone ID: MRT4577_18140C.1.pep
APARAAAREGPDSRXPREREREAXAXRGAKTGKPGAGQKXPKQEEREXTXHQHKTPKQARXPEHPRNSTTGRNERERDQXRRDPRTTEPAXRKTEENNTXGRXGDPKXDKKKNKXAXKKXEDTQAKKGNTXXRPRGKKKAQGKPTPDHEAPRRG

SEQ ID NO: 273931 - protein, 84 aa, Zea mays
  Clone ID: MRT4577_181410C.1.pep
EKKKKKKKKKKKKNKKKNFWVGSEFGVATLIQFIYLPSGRPPCSLTRAWLTGALLVWGMMRCASPTCFALCYNMVPNPLLWIIF

SEQ ID NO: 273932 - protein, 84 aa, Zea mays
  unsure (1)..(84): unsure at all Xaa locations
  Clone ID: MRT4577_181411C.1.pep
HPRHPNLSTQLDQNSFLXKPXQPYLLNISRSAKQNXXNTPHKQTNPNPQYPRHPPNILKLPKNNQPPAANAQHDPKPCLTNKTP

SEQ ID NO: 273933 - protein, 61 aa, Zea mays
  Clone ID: MRT4577_181412C.1.pep
SQRVDFFLDGVTPAIQRRARPLFRPLIPLLVIEGSKNCYLKKWGCAGACLLDHFQRGHQAQ

SEQ ID NO: 273934 - protein, 80 aa, Zea mays
  Clone ID: MRT4577_181413C.1.pep
EKILRLYLPHKVFLGPGEHGPNLKKLQFPTCWKGETGGKQIRKSFPKGSQRKTHLLGGKGLPTGLAPIFCGGCVWPQFAG

SEQ ID NO: 273935 - protein, 63 aa, Zea mays
  Clone ID: MRT4577_181414C.1.pep
TCILVWCTNLSSQQQVSSNEIKTKRKLSSIFQVLRAGGAQLTPAMTSITNTSCSAPPAFPETP

SEQ ID NO: 273936 - protein, 85 aa, Zea mays
  Clone ID: MRT4577_181415C.1.pep
SPSMAEVGAVGTSSTAADDVLDDIAVVEAVVAFRAVGTPSAATPLDVGTAAAGPPAGAWEPGGAVSTAVAGGGGGAALGAEGEEA

SEQ ID NO: 273937 - protein, 892 aa, Zea mays
  unsure (1)..(892): unsure at all Xaa locations
  Clone ID: MRT4577_181416C.1.pep
MAVGDALRRLCEEIGWSYAVFWKAIGAADPVHLVREDGYCGHTSCPVGSEPSESLPLPSDAGCSVPAADTICWLVNNDMASQVHVVGQGIVGRAAFSGNHQWIVHGTANGHGLSSEVAAEVNNQFRVGIKTIAIIPVLPRGVLQLGSTGLVMENTNFVMFAKKLCSQLNNRSSMAASASVKNTSSQHGQSRPDTATVSTSTPPNALLSASLLKVAQQNGHPVREHSVYAERDLRFIQQASICESQFGSNLQSGVMNSCLTSPSFASVKKQSLLMNSIGQLQFSNNVHSSADLAREIILKSLGRQDSSICENTNMNMHRGRYVVSLGRQDSSVCENTNMNMHRGRYVVSNDINGSRNFDFLPIGAKESRANLSIPASSQILDHMPGTLQQKQSLVPFRVTQSSEFSKKVENPESGSFQIPSVTTSDSGGQVSNSFNMVQENRLSMSNNVRQVQKIDRFSDPSANVSTQRMKNRDVCESAMPIERGSSLLVEPGADNDLFDMLGSEFHQFSHNVGSDLVTWSGTESQNSDRDGPESSIYLNSSPLFSSLDNELHYSGILSLTDTDQLLDAVISNVHPSSKQCPDDSASCKTALTDVPSTSHLGSIDLKRCESSGVPSVLIKHELAQLVKQPCIFDKSENCLSQNNGMHKSQIRLWIESGQNMKCESTSASNSKGLDTPSKANRKRSRPGESAKPRPKDRQLIQDRIKELRELVPNGAKCSIDGLLEKTVKHMLFLQSVTKNADKLKDSTESKILGSENGXFGKTTXEGGATWAFDVGSQSMTCPIIVEDLDRPRQMLVEMLCEDRGIFLEIADFIKGLGLTILRGVMEMRKSKIWARFTVEANRDVTRMEIFLSLVRLLEPNCDGSAAAENASNMNMPLGLVHQPVIPATGSIQ

SEQ ID NO: 273938 - protein, 241 aa, Zea mays
  unsure (1)..(241): unsure at all Xaa locations
  Clone ID: MRT4577_181417C.1.pep
IRHEGSWQRHLNLLTWPEILRQFALSAGFGPQLKKRTVEDSYYRNDNEGHDGENVILTIRNGTAAVNAAAKMKERGYTNRRRSRHRLTPGTVKFAAFHVLSLEGSNGLTILEVAEKIQKSGLRDLTTSKTPEASIAAALSRDTKLFERTAPSTYCVKSPYRKDPADSEAVLSAARERIRAFQNVLSDSEAEKEVDEAERDDDSDCDDGDDDPDGDDVNTEXGDDKDPLLAXQSQDEVPSTT

SEQ ID NO: 273939 - protein, 155 aa, Zea mays
  unsure (1)..(155): unsure at all Xaa locations
  Clone ID: MRT4577_181418C.1.pep
TGGKLILALXCLSTELLNRQIQSVPAKIPVLPIGPPMTETRXRLSDGRYLDYLETGVPREKARHRLGSVHGFDYCRHDALAISTELAHELDAYMFDLDRPLYAESEPNPVRXEESIVLDIDELDDNLQYGXKIYLAGFFMGGEIMWSXLKYILHR

SEQ ID NO: 273940 - protein, 119 aa, Zea mays
  Clone ID: MRT4577_181419C.1.pep
QWCCRARVRLVAPFPPPSWMCCQSDDGDASVWLSSKGHRSSKRLACNAITDEKLVGALVCPAFCSVLFLPRTSRSQRTVVTGREGLVLGLPAKKGTKTPWSLHPHSVMHPKKKALKPVT

SEQ ID NO: 273941 - protein, 49 aa, Zea mays
  Clone ID: MRT4577_18141C.1.pep
HPGTLLVCGQIFAVGYFRSGYAPKDGPSHSVLIHRPLPFVELFLLSYEH

SEQ ID NO: 273942 - protein, 141 aa, Zea mays
  unsure (1)..(141): unsure at all Xaa locations
  Clone ID: MRT4577_181420C.1.pep
MAATRTALALLGHEGMESGPRPAAPRRSRLRVVAVALRTRPTSLAAPGLPPAAPEPVLPSPPVAAGAAAVLLEAGVPPADLPRAAGMCPELLSVSAEAVKAALRFXTVDAVVGKVNLXRVLQRKPLPHNYTVKAQLKTKLY

SEQ ID NO: 273943 - protein, 33 aa, Zea mays
  Clone ID: MRT4577_181421C.1.pep
SLVPIPKSDDRFPRKYRFEPPTELPLASPPDAW

SEQ ID NO: 273944 - protein, 124 aa, Zea mays
  Clone ID: MRT4577_181422C.1.pep
WFFSGGWPFSHSKGPAGFTPLVSAVAPCFVVREFRLLLVIPACSVYVPGRSYFFLARAMSFSRRPAFSPFFCLRWVPYCMSGGWLFAQGHRSWLWCVPRLRSCGASHNRLVTRPKIINKKKTKE

SEQ ID NO: 273945 - protein, 90 aa, Zea mays
  Clone ID: MRT4577_181423C.1.pep
PFVHAGSWSLRAFLVSRNAPYRSSDLTCTMVASRCQSCSLWSSWAGIASPDVFAAAAGASAPSIDINPPLRERGCGRRQRPRGSHRVRRG

SEQ ID NO: 273946 - protein, 157 aa, Zea mays
  Clone ID: MRT4577_181424C.1.pep
MPPPSKKLARVDTLQLKDQIVKRLGPLRAELYFRSLKKFLGCQLGKDEFEKICVTTLGKENIKLHNFLLRSILSNACLSDGPPPSMQAATGNSQTSTVSNGTFSNGLLPVRRVRPRTKRFSDKPSPIGKSPLGHPSAGGGVCVSWLQGFAGGHLCGG

SEQ ID NO: 273947 - protein, 69 aa, Zea mays
  unsure (1)..(69): unsure at all Xaa locations
  Clone ID: MRT4577_181425C.1.pep
MSLLNAVYFLLRSQTLIGGCITXPGLXLTETLIDADGRLAIHLVGCYMMTVFMLGLAMRYYHWTTPGKH

SEQ ID NO: 273948 - protein, 342 aa, Zea mays
  Clone ID: MRT4577_181427C.1.pep
MEYTRLGKSGLKISKVVLGGMSYGSSEWRKWVLDEEDSLPLIKHAFDSGINTWDVADTYSDGASERIVGKALKQYNIPRNRVVILTKCFFAVAEPGDDKDIKGKDTAQWVNRVGLSRKHIFDAVDASVERLGTYIDVLQIHRLDKDTPREEIMKALNDVVESGKVRYIGASSMAAWEFQTLQNIADKHGWHKFISMQNYYNLIYREEEREMIPYCNDTGVGLIPWSPIARGALARPFDARSTVRETSDPFLTSLIRSKETETDKTIIGRVQEVAEKKGVSMAKVAIAWALQKGTSPIVGLSSKERIDDAVEAVKWQSGGGLTEEDCKYLEEGYAPKAVAVVM

SEQ ID NO: 273949 - protein, 263 aa, Zea mays
  unsure (1)..(263): unsure at all Xaa locations
  Clone ID: MRT4577_181428C.1.pep
GRLQVPVRNSRVDPRVRTANWNPLGDSAFYRKXELXSMDWDLKEELKDCLVAAAPYGGPIALLRNCWRKEKAASVRPVLEIYSASGLPLASLLWKSGPVVALGWSAEEELLCVQEDGAVLVYGLHGDFRRHFSMGNEVLQNRVLDARIFHTEFGSGVAILTGAYRFTLSANVGDLKLRRMPEVPGMQSAPSCWTTLCHDRVPHILLAVGPDLYLLDHATCSAVTPAGLAPXVSSFLQMAVSLTYXYLALFTDTGYIWMGTASL

SEQ ID NO: 273950 - protein, 72 aa, Zea mays
  unsure (1)..(72): unsure at all Xaa locations
  Clone ID: MRT4577_181429C.1.pep
MVVPVIDFSKLDGAERAETLAQIANGCEEWGFFQLVNHGIPXLSFFERVKEGGVPNWLSALPGGGGRLFIRG

SEQ ID NO: 273951 - protein, 69 aa, Zea mays
  Clone ID: MRT4577_18142C.1.pep
SARGSLSQLFRTLRRLAALQRGAGLEHLFSGARQEKGIPWDLMNFLWHAELHAHQVLLVPHDPALHLVE

SEQ ID NO: 273952 - protein, 173 aa, Zea mays
  Clone ID: MRT4577_181430C.1.pep
MSTELKAMEGSICHEFETGLPAAAVWEVYGSLLFGKLMPQLLPEVVSKVELVEGDGGAGTVLLVTFPPGTPGSETFREKFIKVDDENYIKETVVTEGGLLDHGFRKYMVRIEIVGKKKKTSIVRSTIQYEVDHEHAGSHAPPVFSTDGLATIAEAIPKYIKEKRGFESVIFPK

SEQ ID NO: 273953 - protein, 136 aa, Zea mays
  Clone ID: MRT4577_181431C.1.pep
GDKPGGFFPATFKKMLSLQPRGSPPKGKLLKVKALFKLSGPPKKALPKTKAKPAKAPPTKTPPSKPAKPPPPKSKKATAAHPKKTPFFGAKPKAPQKKIVGKPKKSPPPKAKAKPKTVKSPAFKKARKAPPPNGFF

SEQ ID NO: 273954 - protein, 73 aa, Zea mays
  Clone ID: MRT4577_181432C.1.pep
ARSSTKYNYFVHHHDSISIHDIRSIYTSFMITYHVPSLFVITDNSLNSSNHISPLSIIKLSINNSANFQQINT

SEQ ID NO: 273955 - protein, 108 aa, Zea mays
  Clone ID: MRT4577_181433C.1.pep
NPNTDDEDRQELLDQTPWSKLNSLWTPHLQVTRSSSSAPEQIALDTSTSCSGFLGFSGEEVLAFDDVQRDPAGERDASLGAFLASCLAAFPGDAKNAQHGSDMIDPGR

SEQ ID NO: 273956 - protein, 392 aa, Zea mays
  unsure (1)..(392): unsure at all Xaa locations
  Clone ID: MRT4577_181434C.1.pep
PPSGRPTLRSGLPAEFKHINKRRRRTYEDSPSNGERTGSSPPLQAAPRVQPFSAPAPIPIFSSKPRAAVRSPIPPPHLPAAVTSAPAPLAATAEAPSRPPPASTDQPPQQQTGAMPPPPAPAPGXKGGPKPKAQLNEQNSGEYSQSENNVVETAQGHDKETTPGPVKATKRIKKLKASKHNLNNTNSGAIEGDADPSLSSLNHCRYDSSLSLLTKKFINLLQGAEDGALDLNKAAETLEVQKRRIYDITNVLEGVHLIEKGLKNMVRWKGFDISKPKDIERQISSLKEELESLYDEELRLDDEIREAKEKLQALALDGDKRKSLYLLKEDINKIPHFQRSTMIAINAPRGTCVEVPDPNADQYMYGNLGLQEKHYKIVLRSSMGPVDCYLIS

SEQ ID NO: 273957 - protein, 53 aa, Zea mays
  Clone ID: MRT4577_181435C.1.pep
NKHNIFYQNVQMIFTTLWNSQITLAWTLILYCIPSGILYYFNFKLPSSSWKDS

SEQ ID NO: 273958 - protein, 51 aa, Zea mays
  Clone ID: MRT4577_181436C.1.pep
NPFKKGGGPLFLKKKKKKKKKKKKKKKKKKKKKKKKKKKKKKKKLAEGARY

SEQ ID NO: 273959 - protein, 57 aa, Zea mays
  Clone ID: MRT4577_181437C.1.pep
FLGGGGPAKTICVQLAPKFSLWRSFTASSNGLRQQLDPRDRVAGGSAAPGGGFFFLD

SEQ ID NO: 273960 - protein, 124 aa, Zea mays
  unsure (1)..(124): unsure at all Xaa locations
  Clone ID: MRT4577_181438C.1.pep
DPASGKPQRLRPPRGGGWPSTPDSATRGRPRRGNKPAAEEARGRGGGGEKTKWFYPFAXKRPPAGGAAARGAARTRXEGGGSTPDPQKHIFKGGSRGTPTSGYPPRAGPSGTPSSTTSAGSWPA

SEQ ID NO: 273961 - protein, 80 aa, Zea mays
  Clone ID: MRT4577_181439C.1.pep
SPTRALFFFRTRPMTGPSRGGDPRCRGGRRLLRRPATAIYMGATGYALTLQTAAVFPPDDSVVAGAAVCFRSGTSWPLAA

SEQ ID NO: 273962 - protein, 44 aa, Zea mays
  unsure (1)..(44): unsure at all Xaa locations
  Clone ID: MRT4577_18143C.1.pep
KEGFHPRFQIRSSSCGVSCTLVCASXVNQCVMQYGLSFQGRSYE

SEQ ID NO: 273963 - protein, 118 aa, Zea mays
  Clone ID: MRT4577_181440C.1.pep
KKLCLHRNVICSKCKGKGSGAGASMRCPTCQGSRLKLSIYHLGPPMIQQMHHACNECQGPGQSINEKDRCPRCKGEKVIQDKKVLAVYVQNGEQHNRKITLLSEPDKSPYTDNGDIRF

SEQ ID NO: 273964 - protein, 65 aa, Zea mays
  Clone ID: MRT4577_181441C.1.pep
VPILICRFFVDKPFFRVTPFPICACPLVFLFVSGIGPKYVIMFFASKLCKNPIRFFSPQFIKTPQ

SEQ ID NO: 273965 - protein, 86 aa, Zea mays
  Clone ID: MRT4577_181442C.1.pep
PTNTIQQYCESLSSLSTQSKGGGGGKKKQRYLPTPLVKINDSPIIMLAADNPNYTQSLIPPGMGCTCNRHCQNPSLSSFVSGNLLW

SEQ ID NO: 273966 - protein, 241 aa, Zea mays
  unsure (1)..(241): unsure at all Xaa locations
  Clone ID: MRT4577_181443C.1.pep
PRVRSCINKWYSKLSRKDIKARCPACRGLCNCKPCSLGNSKGSTPKEPPKVERKIXHKNFQPSILQAFTXRLDQEQLDELELEAKIQGTKISNVCVQVAETGQSESLYCNNCKLSMSRLLRCCPTCPFKLCLSCCQKIREGNMSDNTPEDKFKNRLIQQESVHEDGSITCPSIELGGCGDAMLNLIYSSPSSQSEELSSECELDAAGNHSGVKDAQAHGSPVPESNGRLLAAAQAETVSEE

SEQ ID NO: 273967 - protein, 36 aa, Zea mays
  Clone ID: MRT4577_181444C.1.pep
HGAGTFAKLRAQGPFLMSSKPIYKGGGNQYSFSHTE

SEQ ID NO: 273968 - protein, 143 aa, Zea mays
  Clone ID: MRT4577_181445C.1.pep
MLIPEVLTKAGLINAPQWYDAGKSEYFASSSTLFVVEFILFHYVEIRRWQDIKNPGSVNQDPIFKSYSLPPHECGYPGSVFNPLNFAPTLEAKEKELANGRLAMLAFLGFLIQHNVTGKGPFDNLLQHLSDPWHNTIIQTFSG

SEQ ID NO: 273969 - protein, 123 aa, Zea mays
  Clone ID: MRT4577_181446C.1.pep
AGRVGNVLDLPPPLHPSPRSQSPGSYEAWQDIKNPGSVNQDPIFKSYSLPPHECGYPGSVFNPLNFAPTLEAKEKELANGRLAMLAFLGFLIQHNVTGKGPFDNLLQHLSDPWHNTIIQTFSG

SEQ ID NO: 273970 - protein, 68 aa, Zea mays
  Clone ID: MRT4577_181447C.1.pep
FSSADLVVFAELFWNPGVLIQAEDRVHRIRQTSFSRAHYLVATGTADDYLWPLIQEKIKVLAEAGLSE

SEQ ID NO: 273971 - protein, 223 aa, Zea mays
  unsure (1)..(223): unsure at all Xaa locations
  Clone ID: MRT4577_181448C.1.pep
MMAGASGSVEEEGGLRAEESPSGGVDVWSDAVSSHAPEHLLVMVHGILGSTNDWQYAANEFVKQLPDDVIVHCSEKNMNTLTLDGVDVMGERLADEVLDVISRKPELTKISFLAHSVGGLVARYAIAKLYRHPNSTFDSKAEGTICGLEAVNFITVATPHLGSRGNKQVPLLFGFITIEKVASRVIHWIFRRTGRHLFLTDSAEGEXPLLQRMVEDYGDLYFI

SEQ ID NO: 273972 - protein, 205 aa, Zea mays
  Clone ID: MRT4577_181449C.1.pep
MASVTARAPVAALRPSASLKSSSSSAAAFLGHSSRLGRTATASPTRRSLKAGMLIPEVLTKAGLINAPQWYDAGKSEYFASSSTLFVIEFILFHYVEIRRWQDIKNPGSVNQDPIFKSYSLPPHECGYPGSVFNPLNFAPTLEAKEKELANGRLAMLAFLAFLIQHNVTGKGPFDNLLQHLSDPWHNTIIQTLSGLSRRSIQSCG

SEQ ID NO: 273973 - protein, 70 aa, Zea mays
  Clone ID: MRT4577_18144C.1.pep
FNRCRSVVSGQTSLHPQVPGINQLGTKTLVSIFSTKSELRAHSCQYYSASGCIGIKIDPKYRVFLLPHAS

SEQ ID NO: 273974 - protein, 116 aa, Zea mays
  Clone ID: MRT4577_181450C.1.pep
MLGVAGMLIPEVLTKAGLINAPQWYDAGKSEYFASSSTLFVVEFILFHYVEIRRWQDIKNPGSVNQDPIFKSYSLPPHECGYPGSVFNPLNFAPTTPSSRPSPVESRSRRNTIHRW

SEQ ID NO: 273975 - protein, 227 aa, Zea mays
  Clone ID: MRT4577_181451C.1.pep
MVGSSVEGGADGDGGCCGVGDTSPGTIVWVRRRNGSWWPGRILGPQELPPSQIMSPRSGTPVKLLGREDASVDWYNLEKSKRVKAFRCGEFDACIEKAEATQGTLVKKREKYARREDAILHALELERKQLASKYQTQGFRPGPPGNISACTKHHKDLGSTRYKSKKGKKRKDASVPPDVKKEVGQCFLPAGSKRNFSGSLTQGNLVSNHMGDFSPLGHSHGGATLEN

SEQ ID NO: 273976 - protein, 149 aa, Zea mays
  Clone ID: MRT4577_181452C.1.pep
MASVTARAPVAALRPSSASLKSSSAFLGHSSRLGRTASPTRRSLKAEAKGEWLPGLPSPSYLDGSLAADNGFYPSRLAEDPENLLWLVQADLGNGRGPMLGQIGMLSRPGREVKRLRSYPSSLVLRCVALRACSPLSNLCCIGFRFRRM

SEQ ID NO: 273977 - protein, 193 aa, Zea mays
  unsure (1)..(193): unsure at all Xaa locations
  Clone ID: MRT4577_181453C.1.pep
VPFWISLCVLIYLEGTDSGRVAMLGVAGMLIPEVLTKXGLINAPQWYDAGKSEYFASSSTLFVVEFILFHYVEIRRWQDIKNPGSVNQDPIFKSYSLPPHECGYPGSVFNPLNFAPTLEAKEKELANGXSSTVRSFSDDGYDLIIRFCVXRLAMLAFLGFLIQHNVTGKGPFDNLLQHLSDPWHNTIIQTFSG

SEQ ID NO: 273978 - protein, 109 aa, Zea mays
  unsure (1)..(109): unsure at all Xaa locations
  Clone ID: MRT4577_181454C.1.pep
MXRXAGRRXXXAXAGRPAAAAXGXRGPXAXTXPGRDDDDTRDGRAXXAXEXPXXAAGGXGXAETXXPRNQEGGXXEXPATGAAGKXPXGKXXXEEXNXERXPXGDPSKX

SEQ ID NO: 273979 - protein, 104 aa, Zea mays
  unsure (1)..(104): unsure at all Xaa locations
  Clone ID: MRT4577_181455C.1.pep
ARRSSTFPHRRRHQDHKSRTLWTVLKIDRLESIDLCIQEYPTSYTENXCQELIWRIHEGNXGFLKFLGPYYTVPITRRRKVGRICGHXFYSIGKSEMVAIEICI

SEQ ID NO: 273980 - protein, 196 aa, Zea mays
  Clone ID: MRT4577_181456C.1.pep
WLPGLPSPSYLDGSLAGDNGFDPLGLAEDPENLRWFVQAELVNGRWAMLGVAGMLIPEVLTKAGLINAPQWYDAGKSEYFASSSTLFVVEFILFHYVEIRRWQDIKNPGSVNQDPIFKSYSLPPHECGYPGSVFNPLNFAPTLEAKEKELANGRLAMLAFLGFLIQHNVTGKGPFDNLLQHLSDPWHNTIIQTFSG

SEQ ID NO: 273981 - protein, 284 aa, Zea mays
  unsure (1)..(284): unsure at all Xaa locations
  Clone ID: MRT4577_181457C.1.pep
MASVTARAPVAALRPSSAFLGHSSRLGRTASPTRRSLKAEAKGEWLPGLPSPSYLDGRSVILLLTLVWPHWIARPQRWLADDXCPSPMYVRVRTVRARSLAGDNGFDPLGLAEDPENLRWFVQAELVNGRWAMLGVAGMLIPEVLTKAGLINAPQWYDAGKSEYFASSSTLFVVEFILFHYVEIRRWQDIKNPGSVNQDPIFKSYSLPPHECGYPGSVFNPLNFAPTLEAKEKELANGXSGRLAMLAFLGFLIQHNVTGKGPFDNLLQHLSDPWHNTIIQTFSG

SEQ ID NO: 273982 - protein, 70 aa, Zea mays
  Clone ID: MRT4577_181458C.1.pep
NTNSTMSSAPLLFFLLSVAPSVCPLQTQISKASVLILGAYYNILYGLVMLSYMLKFHFLVFNLIGKITIF

SEQ ID NO: 273983 - protein, 227 aa, Zea mays
  Clone ID: MRT4577_181459C.1.pep
IALAVSFMINLFVTTVFAKGFYGSKEAGNIGLENAGQYLQEKFGGGFFPILYIWGIGLLAAGQSSTITGTYAGQFIMGGFLNLRLKKWVRALITRSFAIVPTITVALFFDTSDSALDILNEWLNVLQSIQIPFALIPLITLVSKEQVMGVFKIGPNTQAVTWTVATLLITINGYLLMDFFSSEIRGPLSGSLLCVAVLIYASFVLYLILRGTELSEKIAKAIRGSFS

SEQ ID NO: 273984 - protein, 139 aa, Zea mays
  Clone ID: MRT4577_18145C.1.pep
HASASAQYSSLSDSKRAKKKSGYKIGSLVEAEIIDIKPLELLLKFGGNLHGRIHITEILEEDSAEHPFSELRIGQKLTARIVSEAEPSGKSGKKFKWELSIRPCIVNGEFAQKEQNHTTNGIVRAYVVKVDKEWVWLTV

SEQ ID NO: 273985 - protein, 307 aa, Zea mays
  unsure (1)..(307): unsure at all Xaa locations
  Clone ID: MRT4577_181460C.1.pep
MASVTARAPVAALRPSASLKSSSSSAAAFLGHSSRLGRTATASPTRRSLKAEAKGEWLPGLPSPAYLDGRSVVFLFLINSGQRRRLTRTHGHVSLPGDNGFDPLGLAEDPENLRWYVQAELVNGRWAMLGVAGMLIPEVLTKAGLINAPQWYDAGKSEYFASSSTLFVIEFILFHYVEIRRWQDIKNPGSVNQDPIFKSYSLPPHECGYPGSVFNPLNFAPTLEAKEKELANGXALHCTISSHRRPPVVVGHFRSFSDVINSAGRLAMLAFLAFLIQHNVTGKGPFDNLLQHLSDPWHNTIIQTLSG

SEQ ID NO: 273986 - protein, 154 aa, Zea mays
  unsure (1)..(154): unsure at all Xaa locations
  Clone ID: MRT4577_181461C.1.pep
PAGNIPNISPLFCLSILQYLAFSYIYPIRRVTHHHCPAAIESIVAQGEKKMITVISSDGQEVEXKEAVAXESQTIRHMIEDDCADDDIPLPNVNSQILSQVIEYCNKHVHAAAAYAGDSKIASNEVFAISVNRTAFSGEDLKNWDANFRKVNQA

SEQ ID NO: 273987 - protein, 77 aa, Zea mays
  Clone ID: MRT4577_181462C.1.pep
CCAPTPSDSSSYDASHPALTISAINLTSRSRRYHKPLVDQYNNARNAPSLYKDDTDIVTRIIGAPSCHNVMNLQIRV

SEQ ID NO: 273988 - protein, 87 aa, Zea mays
  Clone ID: MRT4577_181463C.1.pep
DVQQGCLKWRLSTPGPSSSPSRTPARGSPLAGGPRLSACVWAVGRPFWSRIGHRSRCRAHQTRLSHGCPCILLFGLSLCVRMVARIL

SEQ ID NO: 273989 - protein, 283 aa, Zea mays
  unsure (1)..(283): unsure at all Xaa locations
  Clone ID: MRT4577_181464C.1.pep
MRPSVQKVRIFCSDPDATDSSDDEDGQIIAVKKMVMEILVPVTNSKTSNSLKTLVPCGAKDLEVSEKKGESSRFRGVRKRRWGRSEAEIRDPVEXTRKWIGSYDSEEAAAGAYQAYAKQIREELLAIKNQRSVSERAALSSSSSVSCVSSSPPCEQTGHEPQTRVLVEKDPEPVDEVFLNFSLTPKGISMDDLLGRIDEIPVCDDPVSPTDELPLDNFTSLEDAFPISDFIGSRDEHLYEHYIGLADISHLPLPMDDPAFNLDAELDWSGFDFAAIEGELDVL

SEQ ID NO: 273990 - protein, 57 aa, Zea mays
  Clone ID: MRT4577_181465C.1.pep
RSSAGERTLRAHAQPLSVRRVESSAGAPDRARNFTCLFRGRFAHAFIQVVNADNRSR

SEQ ID NO: 273991 - protein, 45 aa, Zea mays
  unsure (1)..(45): unsure at all Xaa locations
  Clone ID: MRT4577_181466C.1.pep
TRLQXXRVSXPSXXXCXLVPLLXVSTVHFSLENTFPSYXRSVLEL

SEQ ID NO: 273992 - protein, 126 aa, Zea mays
  Clone ID: MRT4577_181467C.1.pep
FLKRFTPFSCLPRHVRFCIRTVIYLGKMLGSLAQFFIWCYWWRDPELGHFLLLRSRIPSAYRRSVGGLFRGLLRCGNMVDLISVLDVWATSSTGPVSLQERRGCGGQLAWHMVSRFTLPCRHWGSR

SEQ ID NO: 273993 - protein, 64 aa, Zea mays
  Clone ID: MRT4577_181468C.1.pep
FYFFFFFEDTFKGFWVIPRPKKFFHRSTLQMLLFCILTPISNLSLQRVSYSRSPNHNIIPTTFS

SEQ ID NO: 273994 - protein, 98 aa, Zea mays
  Clone ID: MRT4577_181469C.1.pep
GSLKAALFFFFFFFFFFFFFFFFFGVTGFVGPKQVMGIQRVIKRVVGTFRAAFYSSFLGDKWSRNNIPDFPFWARTLDFLLSGFYHSKVSRSIVAIPL

SEQ ID NO: 273995 - protein, 118 aa, Zea mays
  unsure (1)..(118): unsure at all Xaa locations
  Clone ID: MRT4577_18146C.1.pep
GSLSFFSLFLAVXCLCCRSSPCCPRGPRVWSRAXCCWGWWRPCFCGLLCPRSCRPRSXAWPLAGXVVVXGAWXXGLLXXSAPPPVXLSLPCSRFGPSVVAFFFACGVSLSGPSXRRRA

SEQ ID NO: 273996 - protein, 190 aa, Zea mays
  Clone ID: MRT4577_181470C.1.pep
FYIHIICCCFSCLRAKNKGKKKKKNLQNSQDSKRGPQGAQGKRAGRTQKRKNQNRKLRKRNRGPKKGERKKEHQGPKKKRDNRRKPRKETGGAPGGEPEEKTEGRKKPVTGGKNKESEGGQTPPPPKKESRGPPGQHKEGGEALSKKKKKPPARRERTAKPPPETKKRGEGPGVAKKQEGLKEGTPPPPP

SEQ ID NO: 273997 - protein, 79 aa, Zea mays
  Clone ID: MRT4577_181471C.1.pep
EIQALKSQECMLKAAYEILLKNIVERSSLLHVGMVVLDQQNGCFSTVPMVGQVISCIPLTVLSGYSICWGSEMGYSFCR

SEQ ID NO: 273998 - protein, 139 aa, Zea mays
  Clone ID: MRT4577_181472C.1.pep
RRGGARQGATAMGKTSVGSRLDGARSRSKHQRRARRGGYQRNPWRRPGRGAVGVVTRWSRERRTAGQHGRAGDGRWREQGRSKGRAWRPWRATGGWPSWSRRAQGGARERGELGTRSSVELGAERQQRKDGTARRGASG

SEQ ID NO: 273999 - protein, 127 aa, Zea mays
  unsure (1)..(127): unsure at all Xaa locations
  Clone ID: MRT4577_181473C.1.pep
MVSPGGPSRVAVWGGVAGPGSPRVSSAATAFAALRRGWRWAHSGAPTLERAARTFLLASAALVLACALYLYVLRYVGRGGRAFAAAGFVGGSGLGLGGEACDVFDCAXVPHDSGRHPVYIICQCPLW

SEQ ID NO: 274000 - protein, 293 aa, Zea mays
  unsure (1)..(293): unsure at all Xaa locations
  Clone ID: MRT4577_181474C.1.pep
MAAANGAAGAVLFSEEDLREVSGVRWGEDFVEVTCGCTSHRYGDAVGRLRVFASGDLEINCECTPGCREVSILQYPCISVCLEYYCRNFNSIXGKLGRHQSANSSVXAVQNRVWTADSIRSEKREGIANPHHPRVLDNLLIIRSSAFKHGLNTADKMTPAAFEKHSGKETAGKWRNTVWVMVQGEKVPLSKTALLKYYYLAHKSGNGSHKGRNGRPSHRDEFICCAGCGKERRFRLRSKEECRVYHDALAKASWTCADLTTDRQEFWLSRPEFGAWEQRGCRHLLPGDKAYRP

SEQ ID NO: 274001 - protein, 73 aa, Zea mays
  Clone ID: MRT4577_181475C.1.pep
GRSPFHALQCGLSIQQVATRMRHACSEDMLSMSLMSCAQIFLTVLPSRYMTCTAPALMLSVTSLRKALETCWS

SEQ ID NO: 274002 - protein, 264 aa, Zea mays
  Clone ID: MRT4577_181476C.1.pep
MAAANGAAGAVLFSEEDLREVSGVRWGEDFVEVTCGCTSHRYGDAVGRLRVFASGDLEINCECTPGCREDKMTPAAFEKHSGKETAGKWRNTVWVMVQGEKVPLSKTALLKYYYLAHKSGNGSHKGRNGRPSHRDEFICCAGCGKERRFRLRSKEECRVYHDALAKASWTCADLTTDRVTCDDEEERASRKVLRGCSRAPSCTGCMKCVCFGCETCRKKKKKKKKKKKKKKKKKKKKKKKKKKKRRGRAPHTDASAASAFLRQA

SEQ ID NO: 274003 - protein, 57 aa, Zea mays
  Clone ID: MRT4577_181477C.1.pep
KSFPYFFIKFRGRVSFLMCLCFFLSAVVDIGDYEKQMKLTQKFIKKKKKKKKKKKKY

SEQ ID NO: 274004 - protein, 65 aa, Zea mays
  unsure (1)..(65): unsure at all Xaa locations
  Clone ID: MRT4577_181478C.1.pep
SSHSFYTQAINKIAIMLFLPYSYASIAVNCDFISLKEIKKNCNSWXVPGGGTAAPPMLRXVRPGA

SEQ ID NO: 274005 - protein, 62 aa, Zea mays
  Clone ID: MRT4577_181479C.1.pep
RRALLFPRGGARVGVPLPPTGEASRATILWPLRGLGFVILSVYSMVFPFASVAVLVSVLPLV

SEQ ID NO: 274006 - protein, 49 aa, Zea mays
  Clone ID: MRT4577_18147C.1.pep
RIIWITVHYHSYIHTTNPISFLLDYRMITDCLQSSTADSFHTDRQQRNS

SEQ ID NO: 274007 - protein, 127 aa, Zea mays
  Clone ID: MRT4577_181480C.1.pep
PRVRTTTTLLVIHRTDHTRHNENVWSTTPTIQAGACCGRSTDYDRYQVDSSQRCCALFLTSSRRIRLEALLSNDPSCDHELFHDTLTLDVNKHRLGDTQRYTSKFLYNMCAGDALVTILVYTVGSTY

SEQ ID NO: 274008 - protein, 560 aa, Zea mays
  Clone ID: MRT4577_181482C.1.pep
RPGAQNTSGSVFEAQDGSVEVTGSPTEKAILSWGLDHRMKFADERSRSSIIHVSPFNSEKKHAGVAVVARDSNVHVHWKGAAEIVLALCTSWLNVDGSTHEMTPDKANQLKKLIEDMAEQSLRCIAFAYRNLDLKDVPSEEQRINWQLPDNELTLIGIIGMKDPCRPEVRDAVELCKKAGVKVRMVTGDNLKTAKAIALECGILDDSEASAQAIIEGRVFRAYDDTERENVADKISVMARSSPNDKLLLVKALKKIGHVVAVTGDGTNDAPALHEADIGLSMGIQGTEVAKESSDIIILDDNFSSVVKVVRWGRSVYANIQKFIQFQLTVNVAALVINVVAAVSSGNVPLNAVQLLWVNLIMDTLGALALATEPPTDQLMRRPPVGRREPLVTNIMWRNLFIQAVFQVAVLLTLNFRGRDLLHLTHDTLGHSSKVKNTLIFNTFVLCQVFNEVNSRKPEELNIFSGVSRNHLFLAVVSITVVMQVIIIEFLGKFTSTVRLNWKLWLVSVVIAFLSWPLAFVGKFIPVPRTELKDLIVRCWPKRGESAAQQTQDDRMEVPV

SEQ ID NO: 274009 - protein, 178 aa, Zea mays
  Clone ID: MRT4577_181483C.1.pep
HHRRVAFFPPPKNPTPRDDQPAAAMLLRRPLQTLTLPLLRRHFSASAAAVSAPDHNIDELLSPPFDYLPGHPRPDAKHDEVIFAVPRDSSGRHFAAKERKAGRVPAIVFEQENGQEGGNKRLVSVPSKQIRKLVDHLGRSFFLSRLFRLQVWSEQAGQGDLIESVRVLPRKVHLHAGT

SEQ ID NO: 274010 - protein, 74 aa, Zea mays
  unsure (1)..(74): unsure at all Xaa locations
  Clone ID: MRT4577_181484C.1.pep
MDPIMGEVTQMFSRFKAVYTRIDLDACVTLLLQLKVHLTKLPSLXPPXFEHTPNAVAELKLARDIYVHACCYDR

SEQ ID NO: 274011 - protein, 105 aa, Zea mays
  Clone ID: MRT4577_181485C.1.pep
NPVGRVRVQSAAVCFEKATPQRPPRKTFSVSRAPPSRPEGLVFGPPRREGGPNPQEAPFPWVLSQKKKKKKKKKKKKKKKKKKKGRPPTSELVDPGINSGPVPAG

SEQ ID NO: 274012 - protein, 61 aa, Zea mays
  Clone ID: MRT4577_181486C.1.pep
ACGPHRESAPSPLVPAVAMWNLRYLRDASMWRVCVLSARLTGAKGHPVCDAPVGCCLQAGS

SEQ ID NO: 274013 - protein, 60 aa, Zea mays
  Clone ID: MRT4577_181487C.1.pep
DAWAEASRAQSGDCSDSSSLRAIYAHRCRLSHTYHYRSSSSPMLCSLTHCQNRKKKSLLR

SEQ ID NO: 274014 - protein, 63 aa, Zea mays
  unsure (1)..(63): unsure at all Xaa locations
  Clone ID: MRT4577_181488C.1.pep
HTESKGRQKPSTTREFRVPTPKTYLDRAHIEYAKRTLTRXIISPRQLCRETXAERHLVPHYQA

SEQ ID NO: 274015 - protein, 119 aa, Zea mays
  Clone ID: MRT4577_181489C.1.pep
ILIKGPSCSFILNSHCLCPTHFQRYLTALCVQAWQQKFIKFRKFGTCLSSGHKVFLKWPGEKNTELVISIKAGSAPIPLRLVCPHDQISRQDYVLRPPSLHGKRRPTEQNHHNKKAKQN

SEQ ID NO: 274016 - protein, 52 aa, Zea mays
  Clone ID: MRT4577_18148C.1.pep
SNFVALSSKFFGITYSPTPYRCSHETLLLCAKNGCSTVSKNTIQKKHKNMIQ

SEQ ID NO: 274017 - protein, 235 aa, Zea mays
  Clone ID: MRT4577_181490C.1.pep
KCGIGIPFLWLQDRPNKKTNNSNSYMNIFASLFLENVELEFPEEFRSHFLWLQDRPNKKTNNSNSYMNIFASLFLENVELEFPEEFRSHFLWLQDRPNKKTNNSNSYMNIFASLFLENVELEFPEEFRSHFLWLQDRPNKKTNNSNSYMNIFASLFLENVELEFPEGILSHFLWLQDRPNKKTNNSNSYMNIFASLFLENGEIGKFSPRGKISPNSPQFFSPLFWGPFQGEKGPL

SEQ ID NO: 274018 - protein, 103 aa, Zea mays
  unsure (1)..(103): unsure at all Xaa locations
  Clone ID: MRT4577_181491C.1.pep
SKRECAGGRPDSKYACVRAVMGHNQLMLGKHEDIDNDDGGIKVYRENYLKFYNAIREAYADIHIIXNCDGLSRPLDHADYLYDYHDYTDYNTSFNMTSTFHRT

SEQ ID NO: 274019 - protein, 128 aa, Zea mays
  Clone ID: MRT4577_181492C.1.pep
LEFAEEFRSHFLWLQDRPNKKSNNYNSYMNIFASLFLENVELEFTEEFRSHFLWLQDRPNKISNNSNSYMNIFASLFLENVELRFTEEFRSHFLWLQDRPNKKTDNSNSYMNISAPLFLENVKLKFTE

SEQ ID NO: 274020 - protein, 89 aa, Zea mays
  Clone ID: MRT4577_181493C.1.pep
PRHMPQDNPSFLQLMAHMSVRSHGPCNLWFCDWHVGASASAAGGTSADSISSMQRRPAVKSLLESSISSPRSQRRRPSLCDRVGIQAEP

SEQ ID NO: 274021 - protein, 124 aa, Zea mays
  Clone ID: MRT4577_181494C.1.pep
VSGRLPGPARSQGESKNWYFFSLVKPKSAQNSRKSRTVGGGKGTWKQERGNDVVDAEGHAVGRFEKFTYTPNPKEDKKPPEWLMMEFSVGQEDGGQPRPVLCLCKIYQSPRFLRVRAQEEDAGR

SEQ ID NO: 274022 - protein, 166 aa, Zea mays
  Clone ID: MRT4577_181495C.1.pep
MTFSTKTWWGGGGVYFKEPPRKTFEPIARIPREPSLTLLRFPLPNMGRSGEENRIPPQPEESPGGGQNLMASELGIFTGLRLHPRFLNLGVVIGAGSNVLLMPSLIMHGESSGNIQWVSSTGPLTLNKCWGHMSPGGGSRGGNHDLDTLTRVLDKDYAPGVGPLWG

SEQ ID NO: 274023 - protein, 85 aa, Zea mays
  Clone ID: MRT4577_181496C.1.pep
LSQSPPRALSLPYRADDWQISAPRSQTPCLGPFTSEYQAPGTVATSDAITRLAVWYGEIESRPYALPRILLGRITISESSVICLA

SEQ ID NO: 274024 - protein, 81 aa, Zea mays
  Clone ID: MRT4577_181497C.1.pep
RGYRFLSGVFDYSTISLSQQNDWHVDTLFPKRLAPVYLSAVLEYRTAEVLELAGNAARDNKNRIVLRHIQLVVRNDEELRV

SEQ ID NO: 274025 - protein, 140 aa, Zea mays
  Clone ID: MRT4577_181498C.1.pep
SPPAAAGTGPWGSGHHEEEGCAGIGPAGHGIKSEIVKEKPRDSRRWPESVAIGWPMKMKRRDKNDAAGARRKREGRRRTLPPSRFGSFPHREDQTRQGPDVDVGRTGRGTRGRKASMSGGRAGTAAYAAGTAARGWADPA

SEQ ID NO: 274026 - protein, 92 aa, Zea mays
  Clone ID: MRT4577_181499C.1.pep
MLAVFSGQVVEVPAELVAAVSRTPSPKTNASHLVGRFLAASEPVVFVQLGDHRHLVYSHTNHALLRPMSFAVKDDVFCLVEGVLDNLGRLIQ

SEQ ID NO: 274027 - protein, 101 aa, Zea mays
  Clone ID: MRT4577_1814C.1.pep
YAGSKRAPLFQSHPTHLMGPEQELPLEATVIFIESGAQVFPLTRAGAFIRVVVEHVFLCCPTVYSAYVTRYPSLPLVVGRDRCVELSSLCVCWLRPRSSTR

SEQ ID NO: 274028 - protein, 119 aa, Zea mays
  Clone ID: MRT4577_181500C.1.pep
FFFFFFFFFFFVFGFFFFFFKNSNVFEQASFTSVFNTANTVFWNQGPPQILPTFLIVLYPNPLTQTFPLFREGKLAKKSKENSGPFFATSQKTPDKTKQAAFTRDLWNSRHTKKTNLLF

SEQ ID NO: 274029 - protein, 97 aa, Zea mays
  Clone ID: MRT4577_181501C.1.pep
LYETEVPLDIDTINKGLNYLKKKKKKKKKKKKKKKKKKKKKKKKKKKKKKKKKKKKKKKKKKKKKKKKKGGALLKKKKFSTPFFEKKIFFFGATKIK

SEQ ID NO: 274030 - protein, 72 aa, Zea mays
  Clone ID: MRT4577_181502C.1.pep
SPINTTTHKKPFLAIIASALEPFSTEVPGTDFAHLPPPWCEQDRLEPPNLQGHYSLKQAINLESHKKPALYI

SEQ ID NO: 274031 - protein, 84 aa, Zea mays
  unsure (1)..(84): unsure at all Xaa locations
  Clone ID: MRT4577_181503C.1.pep
VLSSQLHTQAAEQFKALALSQMILXPYTFGPGQEDNNEMVAGTGVKAKSIELVMTQESVSRPKAAKAHKAYNGDIVTAIMDLTP

SEQ ID NO: 274032 - protein, 127 aa, Zea mays
  Clone ID: MRT4577_181504C.1.pep
GNHSSNKNVRGQAPKEQLIGSLSGSPDAAVLINTRKGWSTNQKKGRKSGEDRTQLALYVNDHCHVKRVHSKISHWGRDTVLTLPAAKNEAPNGGFTGNQKQEAGHAEADMYKLGVSKLRPHTFLVAL

SEQ ID NO: 274033 - protein, 84 aa, Zea mays
  unsure (1)..(84): unsure at all Xaa locations
  Clone ID: MRT4577_181505C.1.pep
STVFKIFMDGELRVLVGNHLSAIGLPVPEGGLVVNLVCPPDCPPYAQDLERPGSVGRKGIQVTIWVRAPPFXVRKMRHQLFVVF

SEQ ID NO: 274034 - protein, 131 aa, Zea mays
  unsure (1)..(131): unsure at all Xaa locations
  Clone ID: MRT4577_181506C.1.pep
GFRGPTPFKRAFVKVNSAPFKQWYPTHYGVDIGRKKKTLLAKKDNLEDQKVKATAEKXKKSTHVPRKLKKRKEGRTLDPPIKEQFGSGRLLACISSRPGQCGRTDGYILEGKELEFYMKKLQRKKGKSAVA

SEQ ID NO: 274035 - protein, 265 aa, Zea mays
  Clone ID: MRT4577_181508C.1.pep
MAEREQQEQVASDDAAEWKQVAELRAVTQAQDPSCKDEDDYTLRRFLRARDHNIGKASAMLLKYLKWKPAAKPHGAIAAAEVAREAAQGKLYLQGHDREGRPLIYGFGARHHPARRDLDEFKRYVVHVLDATVARLPPPPPPPGDARQEKFAAVADLAGWGYANCDIRGYLAALDIMQSYYPERLARVFLVHVPYVFMAAWKIVYPFIDDNTKKKFVFVPDKDLDRTLREAIDDSQLPEIYGGKLKLKLVTQTANYKPLVRQMYI

SEQ ID NO: 274036 - protein, 103 aa, Zea mays
  Clone ID: MRT4577_181509C.1.pep
TPSHQSKMRFSHNPYRRGPNGRSGSPMHLDVYRNILRRRCTRHLRHRDCRHYGFWVWRPRFSRHFPSGGLAPPFKGWAVHCPCRAPPHSHSASVTPSHDLGNS

SEQ ID NO: 274037 - protein, 152 aa, Zea mays
  unsure (1)..(152): unsure at all Xaa locations
  Clone ID: MRT4577_18150C.1.pep
LYHIHLLDYAHCERGFLREARKFFNDMISDGLPPSAVTYTVIIHAYCRRGNLYSAYGWFRKMXRKEVEPNEITYNVLIHALCRMGRTQLAYRHFYEMLERGLVPNKYTYTLLIDGNCEEGNWEDAMRFYFEMHQNGIRPDYVTHKALFKGFD

SEQ ID NO: 274038 - protein, 46 aa, Zea mays
  Clone ID: MRT4577_181510C.1.pep
HSIQPHYECALLVYPLEVVDSGHIALHDLPQGGQSELLFNCAEESV

SEQ ID NO: 274039 - protein, 106 aa, Zea mays
  unsure (1)..(106): unsure at all Xaa locations
  Clone ID: MRT4577_181511C.1.pep
MAAKIFCFLMLRGLSARVATETIMPQCSQAPITSLLPPYLSPAVSTMCETPIVQSYSIHQAITTGILPLXKLXLQQXSPITAMXPLVHSLAHRIRTHQLQHLVISN

SEQ ID NO: 274040 - protein, 145 aa, Zea mays
  unsure (1)..(145): unsure at all Xaa locations
  Clone ID: MRT4577_181512C.1.pep
CSLRHRLPVPGPTLRLRRRLRRLRRRRHGRRAGFAQSHADYIQGTNPMRTSYLAGYRPAXPRRGHHSAEARAAYRHDRYFIRXLQGIYWWYSGRTDNPFDLISAGDRRTNGNDAFTCRPGPVMQTEDCPHDWTSIGRLFSSLHAS

SEQ ID NO: 274041 - protein, 221 aa, Zea mays
  Clone ID: MRT4577_181513C.1.pep
MALPNQQGVDYPSFKLVIVGDGGTGKTTFVKRHLTGEFEKKYEPTIGVEVHPLDFSTNCGKIRFYCWDTAGQEKFGGLRDGYYIHGQCAIIMFDVTSRLTYKNVPTWHRDLCRVCENIPIVLCGNKVDVKNRQVKAKQVTFHRKKNLQYYEISAKSNYNFEKPFLYLARKLAGDQNLHFVEAVALKPPEVQIDMAMQQQHEAELAAAAAQPLPDDDDDLIE

SEQ ID NO: 274042 - protein, 167 aa, Zea mays
  unsure (1)..(167): unsure at all Xaa locations
  Clone ID: MRT4577_181514C.1.pep
FDARQIREVAIGLEASGKRFLWVVRSPPNDDPAKKFEEPPEPDLDALLPEGFLERTKGTGLVVKSWAPQRDVLAHGAVGGFVTHCGXNSVLESVMAGVPMLAWPLYAEQRMNRVFLEEELGLAVAMDGYDKEVVEADQVASKVRWLIDSDGGRVLRERTTAAMRRAK

SEQ ID NO: 274043 - protein, 221 aa, Zea mays
  Clone ID: MRT4577_181516C.1.pep
MALPNQQVVDYPSFKLVIVGDGGTGKTTFVKRHLTGEFEKKYEPTIGVEVHPLDFSTNCGKIRFYCWDTAGQEKFGGLRDGYYIHGQCAIIMFDVTSRLTYKNVPTWHRDLCRVCENIPIVLCGNKVDVKNRQVKAKQVTFHRKKNLQYYEISAKSNYNFEKPFLYLARKLAGDQNLHFVEAVALKPPEVQIDMAMQQQHEAELAAAAAQPLPDDDDDLIE

SEQ ID NO: 274044 - protein, 269 aa, Zea mays
  Clone ID: MRT4577_181517C.1.pep
MGDLLGSPRVAFHQTPSTNPAHFELSLDASSVSLFTAAPYRTPLRAVEMALPNQQGVDYPSFKLVIVGDGGTGKTTFVKRHLTGEFEKKYEPTIGVEVHPLDFSTNCGKIRFYCWDTAGQEKFGGLRDGYYIHGQCAIIMFDVTSRLTYKNVPTWHRDLCRVCENIPIVLCGNKVDVKNRQVKAKQVTFHRKKNLQYYEISAKSNYNFEKPFLYLARKLAGDQNFHFVEAVALKPPEVQIDMALQQQHEAELAAAAAQPLPDDDDDLIE

SEQ ID NO: 274045 - protein, 112 aa, Zea mays
  Clone ID: MRT4577_181518C.1.pep
GRCWRVISSSPSATKPLCNSEEVICHVACKSHKSENVLHSIRCNMRKESKIRISPKILLCSRSGRIRGWGRRSRTWRPCSSRQQSRRGAPWRGGLSTASFFLILLSFYPRGF

SEQ ID NO: 274046 - protein, 243 aa, Zea mays
  unsure (1)..(243): unsure at all Xaa locations
  Clone ID: MRT4577_181519C.1.pep
MVEGMVVAVPNGVKADGAAATAAAAKADSPKSVLEDEKISESKNGNASLATEPVKQGDETSDDFVDAMMSLPVDHEIDSADVPPAVEAVKDEDQLLEPAKEEKFDDFLDAGLSIPIDLEAKNGDVSLITEAMKKEEEQLEEARIKAEEEEEARKXREEVAKLAFDPESRYSKLDELLTKTQLFSEFLLEKMDXIADEVVEPQGEESPVEKKKRRGPKKKANATPQYNDKKAKTAVAAMLYRSX

SEQ ID NO: 274047 - protein, 165 aa, Zea mays
  unsure (1)..(165): unsure at all Xaa locations
  Clone ID: MRT4577_18151C.1.pep
PRVRGKLPNGEEVAVKMLTATGRDDDEEQFEKELGAVTSIQRENIVEFVXTGTRMYCRPLFCLXGRSPVYEKIIRALCFKYMEKRSLKNHVAGLDWHSRYEIIKXICEGLHHLHSKSIVHRDLKLDNILLYGAMRPXIADFGFVPXFMARKNHRFTGNIIGTPGA

SEQ ID NO: 274048 - protein, 156 aa, Zea mays
  Clone ID: MRT4577_181520C.1.pep
QHSHGLHNLFLRRYSTYSGTWLRLVNLLNSSAETCMCLMASKRPFQTLFNLCAHRLSSIMHQLQAQLGPSVSFTGLPCCNERPGENPSCVATSCTNCGDGRSARGERTHDRWFPASHSLEMPGLGRSFWGDDERKRSFGETMKASCNYRKALDADP

SEQ ID NO: 274049 - protein, 95 aa, Zea mays
  Clone ID: MRT4577_181521C.1.pep
GKMMHRHVIREHVFQNPIEMQAAPAGLASRSSRMVAPPARADAVEAPSEAQRLNRVWNGLLDAIRHMQVSADELRRLTRRNHVPEYVEYLRKNRL

SEQ ID NO: 274050 - protein, 75 aa, Zea mays
  Clone ID: MRT4577_181522C.1.pep
CIIFFLKIKVIWHFFKVEEPANAVTQQPESLSICTHAQHLEIMFPLELPSHPIQVKRKDRPSTELPETRGPHQHV

SEQ ID NO: 274051 - protein, 240 aa, Zea mays
  Clone ID: MRT4577_181523C.1.pep
QHSHGLHNLFLRRYSTYSGTWLRLVNLLNSSAETCMCLMASKRPFQTLFNLCASEGASTASARAGGATIREEREARPAGAACISDDGANRSATQWKTTASDLSGSEIRAHVSHVDASFCLTSMCAQHIPQAQLHHASATGTAGAIRLIHWTALLQREERRESKLRRKLHQLWRRAKRTRREDARSVVPGVAFAGDARSWEVLLGRRRTQKVILFPGDDWRRRSIVAGNCRKTCMTVVGHW

SEQ ID NO: 274052 - protein, 124 aa, Zea mays
  Clone ID: MRT4577_181524C.1.pep
NFPLDRERERERERECVCVFGARRVATSREEIPTHRLSSIMHQLQAQLGPSVSFTGLPCCNERRGENPSCVAKAAPTVETGEAHEERGRTTGGSRHRIRWRCQVLGGPLRDPSRVGGRVGSPFL

SEQ ID NO: 274053 - protein, 189 aa, Zea mays
  unsure (1)..(189): unsure at all Xaa locations
  Clone ID: MRT4577_181525C.1.pep
VPTSERRGALRIPPPPLGIGGGAFGTKRPLPPRGVPPRQKLPFPSPPPFCGEASPXRISQPPKPPGAQQPDPPPPPFFPFPPPFELLFPPPPPXAPFLSPPRXAPKKRLLGAPXSGGESPFSLENPPPPPPEKGGKNHEKLPTLNRNPKPTPKTXNRPPKKKKKKNKKKKKKKKKKKKKKKKKKKKRAA

SEQ ID NO: 274054 - protein, 83 aa, Zea mays
  Clone ID: MRT4577_181526C.1.pep
RWDPGGGGPLCLKHQGPFGLRISKAWAFWDWSCKIRGFVYNLASMDGHPWSCNNNRGYFSLHNFDAIYICPIPPFLGKGPRNP

SEQ ID NO: 274055 - protein, 227 aa, Zea mays
  unsure (1)..(227): unsure at all Xaa locations
  Clone ID: MRT4577_181527C.1.pep
MAPPRNEDPMAQIMAKIEEGNKETHRRMETVQASLATVEATMKGMIKEQGEFRKWRPEVEMKVTEVAEALKTIQAKVDQFGPSSSTEPLPDGKQTKKGVPISVQLEIPPVDATNGQFRHRFAENHRRPGVEENLRTPAPVGGMPIPPETFTPFFDWGSLGRNSVANWSQMSGPTMPNMVFPVFYGSNPKLWKHRCETYFDFYAVPFEKWVRIATMHXEGPAMYWGSV

SEQ ID NO: 274056 - protein, 98 aa, Zea mays
  Clone ID: MRT4577_181528C.1.pep
VYGFSSRTVLLAGTGEYGVAVVLVDPVNNASAEAIGATASPVPCPVPDLSVSTGGPISPVCQLRLERCSDVHLCPTNRVLVTLSPKKKNKGGRRQMSS

SEQ ID NO: 274057 - protein, 57 aa, Zea mays
  Clone ID: MRT4577_181529C.1.pep
HSFSINMSPVQLFSSVAGVVPRAVRAASRVVHVLSACCSCVTCSWSRADSCVFALVA

SEQ ID NO: 274058 - protein, 99 aa, Zea mays
  Clone ID: MRT4577_18152C.1.pep
GTKALASSAHTFTESESVKRARAAYEAASSTATSTTSTALKSTGRVIGQGAAWTWETPVVKGLRKGVSATGKGIEKVTRPVRETEAYKSVKEAIDDGSS

SEQ ID NO: 274059 - protein, 94 aa, Zea mays
  Clone ID: MRT4577_181530C.1.pep
ALHYCFFVYPSSGRSTTLDISIWTGPQRYGGLTGPGRPRMAEPEMECPGRLLLFRWKNSVCTDELFGGTKNHHAGAHLNIYSRLAVPTMACLAH

SEQ ID NO: 274060 - protein, 96 aa, Zea mays
  Clone ID: MRT4577_181531C.1.pep
LTARKFRVRLLVRSAKGLQLPSHSHSRSPSPVTAASPEREPPGAAQPRAAVAAEVRWKGPRASALGSMRRAAVRRNRTREDAGAAWEEEFESVVTL

SEQ ID NO: 274061 - protein, 197 aa, Zea mays
  unsure (1)..(197): unsure at all Xaa locations
  Clone ID: MRT4577_181532C.1.pep
ATGTPWILRAPGRLGDAFKTRVFSAFGFVHKIATFEKAAGFQALIQYTDAPTALEAKNSLDGRSIPKYLLPEHIGACHMRITFSAHKDLNIKFQSHRSRDYTNPYLPVNQTAIEGIVQPTVGPDGKVKEPESNVLLASIENMQYAVTVDGLHTVFSAXGAXQKXAMLEKXGGMQALIPYXDITTAAVAXQXWRTCIY

SEQ ID NO: 274062 - protein, 186 aa, Zea mays
  unsure (1)..(186): unsure at all Xaa locations
  Clone ID: MRT4577_181533C.1.pep
SNIQRGVGVREGLKWTSATFHSYKVVFNITTAAVAKQALEGHCIYDGGYCXHDERSRDYTLSDPNVQLQAAAQTPVLRSPGVAWQNTASVPAAPFYASTATSTPIGVGQVAAWNPNMQAGSFASASTAYPNQPLMANSMPHYPAIGSSSGAPPVAFQASQQMTQYSMPPGAPPHAPPAGQSIYYPK

SEQ ID NO: 274063 - protein, 466 aa, Zea mays
  unsure (1)..(466): unsure at all Xaa locations
  Clone ID: MRT4577_181534C.1.pep
MPPGSATQFRYTQTPSKVLHLRNMPWECTEEELVDLCKPFGRVVNTMCNVGANRNQAFVEFADQNQAISMVSYYASSSEPAQVRGKTVYIQYSNRQEITNNKGTGDSSGNVLLVTFEGVQPNDVTIEVIHLVFSAFGFVHKIATFEKAAGFQALIQYTDAPTALEAKNSLDGRSIPKYLLPEHIGACHMRITFSAHKDLNIKFQSHRSRDYTNPYLPVNQTAIEGIVQPTVGPDGKVKEPESNVLLASIENMQYAVTVDVLHTVFSAFGAVQKIAMFEKNGGMQALIQYPXDITTAAVAKQALEGHCIYDGGYCKLXLTYSRHXTDLNVKAHDDRSRDYTLSDPNVQLQAAAQTPVLRSPGVAWQNTASVPAAPFYASTATSTPIGVGQVAAWNPNMQAGSFASASTAYPNQPLMANSMPHYPAIGSSSGAPPVSFQASQQMTQYSMPPGAPPHAPPAGQSIYYPK

SEQ ID NO: 274064 - protein, 86 aa, Zea mays
  Clone ID: MRT4577_181535C.1.pep
DPRGRIIKVGLQKKKKKDPPVGLLFLKGPRRGPQGGCNKGSFMFGQKPFSVVKGPVFSGPGLGVFPHGATWGGFEVSGEKKNVFFG

SEQ ID NO: 274065 - protein, 96 aa, Zea mays
  Clone ID: MRT4577_181536C.1.pep
LMAAALSANRLNSALVFASGFSLWDYSPSVCGAVSLYSMEVFQCHVKISPILYSRCLGSSCGSRVVDDREVTSVGSYVPQVGPFQFLVGRRFLSST

SEQ ID NO: 274066 - protein, 79 aa, Zea mays
  Clone ID: MRT4577_181537C.1.pep
AGRVAQRTNLTEIARCQVGKYCQVTYVLNQAGFRVGSDAKENCANLKKKKKKKKKKKKKKKKKKKKKKRKKKKKKAPRA

SEQ ID NO: 274067 - protein, 194 aa, Zea mays
  Clone ID: MRT4577_181538C.1.pep
MFPLCSCLLRPALFLPFGGYPQSLTIIHLVFSAFGFVHKIATFEKAAGFQALIQYTDAPTALEAKNSLDGRSIPKYLLPEHIGACHMRITFSAHKDLNIKFQSHRSRDYTNPYLPVNQTAIEGIVQPTVGPDGKVKEPESNVLLASIENMQYAVTVDVLHTVFSAFGAVQKIAMFEKNGGMQALIQYPERCRSS

SEQ ID NO: 274068 - protein, 90 aa, Zea mays
  Clone ID: MRT4577_181539C.1.pep
TDTREKPNRRPKGWGKKNRLKTTRELTPIFFCKVLGGGPSLFFFFFGPYWGGGTHLFFGGIETPRGQPGKKLGKKNLARDVLPRTRGGPP

SEQ ID NO: 274069 - protein, 508 aa, Zea mays
  Clone ID: MRT4577_18153C.1.pep
MDSSPLIHDKESCFPLEPEGSVNEDNFTAVLSQFNDAPNKESEGYGESGCGKHGEKSLVESVGSLNIGIVDSEFMDSSPLIHDKESCSPLEPEDSVNEDNFAAVLSQFNDAPNKESEAYGESGCGKHGENSLDESVGSLNIGVIDSEFMDSSPLIHDKESCSPLEPEDSVNEDNFAAVLSQYSDGPNEGNEGYGESGHYKHEEKSLDESVGSLTIGIIDSEFMDSSRPIHDKESCSTGSAADQCSRTIPAKYELSSEESDSTGSHLVFDSGKNYLELNNHSVTDLERIYDGHATSVDQYVRGNGETLADHPKKEEAGLQKDTGTIAQHRDTLACDGESVCSSCEEPRRGLNGEPSDFSSESHSRLTPTHNTGGKLSMVSEHPVHNMESDMTGMASDSTNPELNPEASTRNEMDGSRSTDNPVEPENVAQDSATRGRPEGDAPRSGKGVLRSVAGGITLVGAVFFMFHLSAALLQKKQGGKLCDGHTISFGKICSEQRKGQEHGQRKRP

SEQ ID NO: 274070 - protein, 164 aa, Zea mays
  Clone ID: MRT4577_181540C.1.pep
MPAGHGLRSRTRDLFARPFRKKGYIPLTTYLRTYKIGDYVDVKVNGAVHKGMPHKFYHGRTGRVWNVTKRAIGVEINKQVNGRIIRKRIHVRVEHVQPSRCTEEFRLRKAKNDQLKVDAKDRGEVISTKRQPVGPKPGFMVEGATLETVTPIPYDVVNDLKGGY

SEQ ID NO: 274071 - protein, 611 aa, Zea mays
  unsure (1)..(611): unsure at all Xaa locations
  Clone ID: MRT4577_181541C.1.pep
MPPGSATQFRYTQTPSKVLHLRNMPWECTEEELVDLCKPFGRVVNTMCNVGANRNQAFVEFADQNQAISMVSYYASSSEPAQVRGKTVYIQYSNRQEITNNKGTGDSSGNVLLVTFEGVQPNDVTIEVRCPRLSRRRLRFAVATSDSPPPPPIWTLSPAIQPPPPWIWPPPLPIRRCHPETAPPLSLPLCPMPSCCFSPRRRGRLGSFGRLDAXDAFKTRVFSVLNIFXYSSYLVNSCLQHDSPLCSICLLLDLAPCYSAIWLRIDXLNCLTIVHVXXVFSAFGFVHKIATFEKAAGFQALIQYTDAPTALEAKNSLDGRSIPKYLLPEHIGACHMRITFSAHKDLNIKFQSHRSRDYTNPYLPVNQTAIEGIVQPTVGPDGKVKEPESNVLLASIENMQYAVTVDVLHTVFSAFGAVQKIAMFEKNGGMQALIQYPDITTAAVAKQALEGHCIYDGGYCKLHLSYSRHTDLNVKAHDERSRDYTLSDPNVQLQAAAQTPVLRSPGVAWQNTASVPAAPFYASTATSTPIGVGQVAAWNPNMQAGSFASASTAYPNQPLMANSMPHYPAIGSSSGAPPVAFQASQQMTQYSMPPGAPPHAPPAGQSIYYPK

SEQ ID NO: 274072 - protein, 465 aa, Zea mays
  unsure (1)..(465): unsure at all Xaa locations
  Clone ID: MRT4577_181542C.1.pep
MPSGSATQFRYTQTPSKVLHLRNMPWECTEEELVELCKPFGRVVNTMCNVGANRNQAFVEFADQNQAISMVSYYASSSEPAQVRGKTVYIQYSNRQEITNNKGTGDSSGNVLLVTFEGVQPNDVTIEVIHLVFSAFGFVHKIATFEKAAGFQALIQYTDAPTALEAKNSLDXGRSIPKYLLPEHIGACHMRITFSAHKDLNIKFQSHRSRDYTNPYLPVNQTAIEGIVQPTVGPDGKVKEPESNVLLASIENMQYAVTVDVLHTVFSAFGAVQKIAMFEKNGGMQALIQYPDITTAAVAKQALEGHCIYDGGYXRFHNEFCSLKRLXCNVKAHDDRSRDYTLSDPNAQLQAAAQAPVISSPGVAWQNPASAPAAPFYGSTAASTPVGQPPAWNPNMQAPGFASASTAYPNPPLMANSTPYYPAIGSSSGAPPVSFQASQQRPQYGMPPGAPPHAPPAGQPMYFQK

SEQ ID NO: 274073 - protein, 115 aa, Zea mays
  Clone ID: MRT4577_181543C.1.pep
MEPSAWAVAFAALCIVALAPPASGFYLPGVAPNDFEKVRVRQPPFVSPPFLLLGSWHEISSLALCVFGDRVRFGPAVGRPRSANARVGRIEIWLRVFATILALRAISGAQNVSVL

SEQ ID NO: 274074 - protein, 136 aa, Zea mays
  unsure (1)..(136): unsure at all Xaa locations
  Clone ID: MRT4577_181544C.1.pep
GRGAXPCXGXARXGARXPXGXXXXGCXGAXRXXRLAXXXXRXXGAPXRVXXXXRPCLXXXXXFXXXXPFFLXLXXLAXXSXPXLLXXXWXGCVPRLCWVWXVXXSXCLSXXACPVLSPPPAXXXXGRVGXRVGXXR

SEQ ID NO: 274075 - protein, 401 aa, Zea mays
  Clone ID: MRT4577_181545C.1.pep
RRVLSQLNLRSSSLRHFAGLGCFSAAASSSASTSFLPGYAPDFCVFVALRPIKPPATAVANPPASPSPLEEEHRRQAAVPWHSDDPPAPSVPAPLRVGIVGFGNFGQFIAGGVQRQGHTVLAASRSDYSAYCAQHGIRFFRSVDALCEEQPDVLLICSSILSTESVVRAIPFHKLRPDTIVADVLSVKEFPRNLLLEVLPPGFGIICTHPMFGPESGKHGWGKLPFVFDKVRVADDGDQAATCDRFLSIFEQEGCRMVEMSCAEHDRYAAGSQFITHTIGRVLSQLNLSSTPINTKGYETLLQLTQNTVSDSFDLYYGLFMYNINATEQLDRLEMAFEKVRQMLSGRLHDFIRKQIVERADPSGKLANGRSSSPAAHHLSTLTEENKTRVSPALTLASPTL

SEQ ID NO: 274076 - protein, 108 aa, Zea mays
  Clone ID: MRT4577_181546C.1.pep
GAQIFLNGKGASPRWFQISPWWGGQLQRVFFLVAGLALTPPRGGPSPSSRALPPGSFRGPAFPFFRGGGVFLSGGFCVCFKNSGGNRKIPPPGLFLGGSLPPPWSRSP

SEQ ID NO: 274077 - protein, 125 aa, Zea mays
  unsure (1)..(125): unsure at all Xaa locations
  Clone ID: MRT4577_181547C.1.pep
MVLSQLNLSSTPINTKGYETLLQLVXSCPFLIAETNAGSYRLRTLQTQNTVSDSFDLYYGLFMYNINATEQLDRLEMAFEKVRQMLSGRLHDFIRKQIVERADPSGKLANGRSSSPAAHHLSTLT

SEQ ID NO: 274078 - protein, 258 aa, Zea mays
  unsure (1)..(258): unsure at all Xaa locations
  Clone ID: MRT4577_181548C.1.pep
MRALLSRIPISPAAFFSSSSQTLAPLRLGHRFVAMAAAAAEEFVKGRVFPNGVAVITLDRPKALNAMNLEMDLRYKTFLDDWETNPNVKCILVESSSPRAFSAGMDIKGVAAEIQKDKSTSLVQKVFTAEYSLICKIHEYAKPYICLMDGVTMGFGIGLSGHGRYRIITERTLLAMPENGIGLFPDVGFAYIGAKAPGGGAVGAYLGMTGKRISSPADALFIGLGTHYVPXSGDLGSLKESLLSANFTADPHKDVESL

SEQ ID NO: 274079 - protein, 227 aa, Zea mays
  unsure (1)..(227): unsure at all Xaa locations
  Clone ID: MRT4577_181549C.1.pep
LPLRVCHRLVHLRGLPSSLRPPLPSTMAAPQPGCKTLRPTTTSSPSPAGPATKRSRTMATDAAASPASAGCSAMKAEFTGHAEYLNALNDKRERLVKASRDVTMNSKKVIFQVHRISKNNKEEVLSKAENDLAAVVNQYIGKLVKELQGTDFWKLRRAYTPGVQEYIEAATFCRFCKTGTLLGLAKINDSLLALSDKSIEPLQINVLDYLLXVADLSGELVRLAIGR

SEQ ID NO: 274080 - protein, 104 aa, Zea mays
  unsure (1)..(104): unsure at all Xaa locations
  Clone ID: MRT4577_18154C.1.pep
AKGSGKSVAEYDSLPSFYSGLFDLGWRFXGEKVGGEVFFGEKKRAWAKPNFGNFWLKAAKFFGFFFKGGSAKENQAFPRVSRGHPPVAQFQGFKKEGVVFVSKI

SEQ ID NO: 274081 - protein, 688 aa, Zea mays
  Clone ID: MRT4577_181550C.1.pep
MAGAPDPSVTSALEAQSKSMEAQSRTLATQSQLLQQLCDRLESQDHRWSQMEDAVKMNTTNISKLQEKLGDGEIEAFRTDLTRSLGDRVEAQIAQLEAATLGRVDGLVTETSNRVAVLENATSAFESWRPRVEHSVDGIRNSVDTLRSDLARLTQFLERNNNTTGDHRGQDSILGPYVPAGEHTSASPTCTGRPDGHGTATTNREYGFGKPHPIQLPINGICSSQPRRGQSEFHSVPCGRTFDMNGVEGPGHFSAKNLGNLPKIHFPSFDGDNPRLWQKRCEDYFIMYEVDPAVWIRVSSMQFTGPAARWLQSVESRVSTMSWGEFGRLILERFGKDQHQLLLRQLFSIRQTHSVASYVDEFSQLVDKLNAYQTMSDPLYYTLKFVDGLRDEVKAVVMLHRPSDLDTAMVLAQLQEEAGAMMKRTGSKWGDSTTAFKPRLGAAPAQPVKEPKHMTALSTGDKSIGGTLPSTDDRIASLYAYRKAKGLCYKCGLQYNRGHRCSDTVQLQVVEELWQMVQCTNTEAIPECAEVSEDNVEINVLQLSQAAVDGSEAPRTMKFVGHIAGMDILALLDSGSSHSFLSMAVASSIPTISTMDQPMKVQVANGSYMSCAKHIVDASWSISGVTFSSTLRVLPLSTYDLIVGMDWLESHSPMLIHWSQKWLSIPLQDTTVTLHGVKSSVLQTAVIQ

SEQ ID NO: 274082 - protein, 68 aa, Zea mays
  Clone ID: MRT4577_181551C.1.pep
HATLPLRLDRSLSAIHVPFIVVVPGRQSALCHLTKDMAYLVGSGQRDPSPGSMMSPSGSLGVSVKLSI

SEQ ID NO: 274083 - protein, 70 aa, Zea mays
  Clone ID: MRT4577_181552C.1.pep
SWPGPVQGQYNATATPCSTRQWHHAPQMCARTITGPWTHNNAPCPCHVLVLKNDSPPHEHVSGVILRARL

SEQ ID NO: 274084 - protein, 85 aa, Zea mays
  unsure (1)..(85): unsure at all Xaa locations
  Clone ID: MRT4577_181553C.1.pep
PAQVFSHNQYMNWHVSHVALPVPATSYIFFSSPPLGGGGGFPFXSHLTFLHSNPXAFFNLSLVDTQQVMMRASLKCGRLARRLVF

SEQ ID NO: 274085 - protein, 106 aa, Zea mays
  unsure (1)..(106): unsure at all Xaa locations
  Clone ID: MRT4577_181554C.1.pep
MIVTSLPCDSWFVGAVGFSRHNGVGTHDGLGHNPEQQDVEILFGPGYTGLADLGNSXYMASIMQVMFLTHHSISRYFEKQSLKAAFATALADPTVDLNMQINHHSG

SEQ ID NO: 274086 - protein, 91 aa, Zea mays
  Clone ID: MRT4577_181555C.1.pep
GPPLGVWVDRNPIGIKKLLSRGVFRAGVKVTWAKKKVHPVEIIVGPRVSGARPQTFPGTHLLFLVKVGPDSFCLPIPPQASLGRVWAPLFG

SEQ ID NO: 274087 - protein, 135 aa, Zea mays
  Clone ID: MRT4577_181556C.1.pep
MLREAPESERPELRQKLDDLLFNEENPYDSIRLGLPGWKSRFFREHFGAKTSSEIGKLQNDMAQKYLEGLCWVLQCYFADVPSWSWYYPFYVAPFVSDLKGLSRIEISFTVDKPLRPFDQLMAVLPMQSWGALPK

SEQ ID NO: 274088 - protein, 78 aa, Zea mays
  Clone ID: MRT4577_181557C.1.pep
ALNSAGYLQQQQLRLVNQLDHVSPVAFLTQRQLLPFYLHDAPNAGAVCELQLLMPFNQLALTNPATFYQQPVIQGALW

SEQ ID NO: 274089 - protein, 57 aa, Zea mays
  Clone ID: MRT4577_181558C.1.pep
SLNTIGRRHQAEQVYRRRRCHFTAMLIQPQRMPLGSPVGSPMCNEQRLLDDLHLTGK

SEQ ID NO: 274090 - protein, 101 aa, Zea mays
  unsure (1)..(101): unsure at all Xaa locations
  Clone ID: MRT4577_181559C.1.pep
SYYYNLFTPHSLFSRLSFIKKKKKKNLTIFFXPFLFPLFFLLLFLITSLNHFYNILNSNHLHYHLPRXDKPXXXQXXAPTWRRGSGGGAAKSGWEWEGREG

SEQ ID NO: 274091 - protein, 86 aa, Zea mays
  Clone ID: MRT4577_18155C.1.pep
PTTITPMDQTELTRKTTTRKSQSQNLVGSLSLTATDAAPQTKTTSTKTDRVPKTANIIDTCTTHSTAPALPSSIMTTLMAANTPTT

SEQ ID NO: 274092 - protein, 122 aa, Zea mays
  Clone ID: MRT4577_181560C.1.pep
PAGVNIISPAIGDQLSSRGSVLHLATIRSRLLAQQDDSDEQSEGDDWFRRPPHQRGDDLVLVSKIRSVFSSLHPFSGFKKNGTREISSVRHSVQDCRIQEASIKAAVPCRCLSIIASATRRA

SEQ ID NO: 274093 - protein, 159 aa, Zea mays
  Clone ID: MRT4577_181561C.1.pep
ATAPSLTARGRSPGVAGTASSGRGLSRGGERAASARWRARPRGRRVGARPHARRCGREAPYATVCAHGQAAPTGVSPVQASAASAVRPHHPAGSWPQHECAATAGRSGTGAGTTSSWHGRHSHARMRLGRRRCSLGCRQAKACRSQAQEWQKYSLIMNL

SEQ ID NO: 274094 - protein, 1000 aa, Zea mays
  unsure (1)..(1000): unsure at all Xaa locations
  Clone ID: MRT4577_181562C.1.pep
MMNNFSKNSETSHFLDSNAVEVRTGTSEPTVQSSNDEGDSDISPETDLAVCNVPLVSSEGQLKSESRADDQQAAEPTVSVRSVSREKPSVEIARSKSAAGKRKKKKEMLAKADAAGSSDLYNAYKGPEEKSEMVGTADGADSSSIVDTTHVLLDEAERDVSTFADDCKKKVELDDWEDAADMSTPKLAPDSGNQAGTTQVLDSDTSEANSRKKYSRDFLLTLQHHCTGLPVGFQMNEAVNAIMNNLVGKSYVVDREPYPSPGRGLDRPTSRGDRRGAAMTDDRWTKTGVPLSPGRDVHMDLPNGTSVVNYRSSGGNHGVLRNPRGQPSNQYGGGLLAGPVHSVGPQVPRSGSDSDRWQQKGLMPSPVTPMQTMHKAERKYVVGKVSDEEEAKQRQLKGILNKLTPQNFEKLFEQVKEVNIDSVATLTGVISQIFDKALMEPTFCEMYANFCFHLAGALPDFSEDNEKITFKRLLLNKCQEEFERGEREEAEADKTEEEGEIKQTXXXXXXXXXRARRRMLGNIRLIGELFXXKMLTERIIHASXGNHDDPDEENIEALCKLMSTIGDMIDHVKAKEHMDAYFSMMQIMSTNQKLSSRVRFMLRDSIDLRRNKWQQRRKVEGPKKIEEVHRDAAQERHAQSSRLGRGPAVSSVPRRAHPMDYGPRGPSASASSSSQQGSIRGMPPHSRGSQDIRHDERHQFDNRTVLPQRVVKDEAITLGPQGGLARGMSIRGQPPVSNTEIPSVIDHRRIVSSSNGYNSAADWTSSSGREDSNSRLPDRTSGRIPASSQSAVTSQRPASQEGRSRSKSYSEDELREQSVLTIREYYSAKDEKEVVLCIEELNAPNFYPFLVSLWVNDSFERKDMERELLAKLLVSLCSGRHNLLSKQQLSDGLSNVLASLEDNLSDAPRATEYLGRLLARFVEESILLLQEVGKLIQESGEEPGYLIQGGIAADILGAVLDSIKSDKGNSFLDEIKTTSSLKLVDFRPQHLKRSKLDAFM

SEQ ID NO: 274095 - protein, 80 aa, Zea mays
  Clone ID: MRT4577_181563C.1.pep
NMKGIAYASLHQNRRASLRTSTDTRLELLDLPTYSWQALWVCSSMPLMYLLYALRHHIGPLKQNWRYATISSSTFSPSLG

SEQ ID NO: 274096 - protein, 1391 aa, Zea mays
  Clone ID: MRT4577_181564C.1.pep
MDSSGQRAAPSIAQQSQPGVNYAPHLGFFHQPPNSYNQSGMYYSTTASVNQVATGSSGPRYNYPVTQSAQAMTYISPSAAPPVSGQSQYTVKPHPMGLLSEKSGTHVTISAPPAKSDPPKLHAAGDAASSLKKDNEVVSGITVLNKPTLERESNDPLVTVKHSTVISPSLPIHGEKPQTLVTSSPVANSVSPVTGADGKSKEPIQRSGSFKDSKKNVTKKDVRNSYEPPNPASFVEDKVQTVKVGDVDLQETKKLNNELDLTNSSSAPTVPLAVSTENADSTAVTTADVPGTDTSSRRPSSEGTGEPGVESFTVSAVECDESKRTHKVVKDPSKDNISSDATKHELPKECAVDSTEQASAVTSNTDDSYAAPLVTNQEQLLKGSASEKQAVMNNSSKNSDTSAHFFDGNDVGVTTSGTSEPTAQTSNDEGDSDISPETDLAVYNVPLGSSERQLKSESRADDQQPAAPTVSVRSVSREKPSTKSAAGKKKKKKEMLAKADAAGSSDLYNAYKGPEEKSEVVGTVEGADNSSTVDTTHVLSDELEKDPSTSADDCKKKVELDDWEDAADMSTPKQPSDSGNQASITQVLDSDVTEANSRKKYSRDFLLTLQHHYTGLPFGFQMNEAVNAIMNNLAGKSYVADREPYPSPGRGLDRPTSRDRRGAAMADDRWTRAGVPLSPGRDVHMDLPNGPSVINYRGGPGGNHGVLRNPRSQPSNQYGGGLLAGPMHSVGPQVPRSGSDADRWQQKGLMPSPGTPVQAMHKAERKYVIGKVSDEEEAKQRQLKAILNKLTPQNFEKLFEQVKEVNIDSVATLTGVISQIFDKALMEPTFCEMYANFCFHLAGALPDFSEDNEKITFKRLLLNKCQEEFERGEREEAEADKTEEEGEIKQTKEEREEKRIRARRRMLGNIRLIGELYKKRMLTERIMHECIKKLFGNHDDPDEENIEALCKLMSTIGDMIDHVKAKEHMDAYFSMMQIMSTNQKLSSRVRFMLRDSIDLRRNKWQQRRKVEGPKKIEEVHRDAAQERHAQSSRLGRGPAVSSVPRRAHPMDYGPRGPSASASSSSQQGSIRGMPPHSRGSQDIRHDERHQFDNRTVLPQRVVKDEAITLGPQGGLARGMSIRGQPPVSNTEIPSVIDHRRIVSSSNGYNSAADWTSSSGREDSNSRLPDRTSGRIPASSQSAVTSQRPASQEGRSRSKSYSEDELREKSVLTIREYYSAKDEKEVVLCIEELNAPNFYPFLVSLWVNDSFERKDMERELLAKLLVSLCSGRHNLLSKQQLSDGLSNVLASLEDNLSDAPRATEYLGRLLARFVEESILLLQEVGKLIQESGEEPGYLIQGGIAADILGAVLDSIKSDKGNSFLDEIKTTSSLKLVDFRPQHLKRSKLDAFM

SEQ ID NO: 274097 - protein, 92 aa, Zea mays
  unsure (1)..(92): unsure at all Xaa locations
  Clone ID: MRT4577_181565C.1.pep
LLLLLRXRNYSNGSLPRGRGHAWPPCRSLGQTSPVRHPYHSSQGRAQDGRAVPTLFAVHTHLFVSDRDSLIAFRCNNTELLRELYLSGARTF

SEQ ID NO: 274098 - protein, 71 aa, Zea mays
  Clone ID: MRT4577_181566C.1.pep
MGIDLLAGGRNKKTKRTAPKYDDVYLKLLVKLYRFLFRRTNSNFNAVVLKKLFMSKNNRPPIFMRRLVKFI

SEQ ID NO: 274099 - protein, 284 aa, Zea mays
  Clone ID: MRT4577_181567C.1.pep
MAASRSEERDQNQPVVLVTGCSEGGIGHAMARAFAAAGCAVVATARSRGSMRGLDGDPRFLLLELDVRSDESARAAVADALREHGRIDVLVNNAGVHLVAPLAEVPMESFHQVFDTNVYGAMRLIQSVIPHMMERRKGTIVNVGSITALAPGPWAGVYSASKAALHALSDSLRVELRSFGINVMTVAPGGTRSNLGNSSAAKYDQMHEWKYYKKYEEGLRARTGISQGPRSTPAEELAKAVVASVLKKNPPAWFAYGQYSAILSILYYAPLWFRDYLYKFVMKC

SEQ ID NO: 274100 - protein, 132 aa, Zea mays
  Clone ID: MRT4577_181568C.1.pep
FLNFFFFFFFFFFFFFFFFFFFFLGAKFFFFFFRQNTMFLYKKTWNIHRPWQKRQKNLVAKVQDSKPPKCPGTEVWHKTKGSHGFCPNQPFKEGGLGKEIKIFQQHQLFPSLNGDPQIKKLPGGILASFFEN

SEQ ID NO: 274101 - protein, 42 aa, Zea mays
  Clone ID: MRT4577_181569C.1.pep
AMPGFCHYSRWLVSPCSVICANAIAFVFLWHAKESKQRAAAD

SEQ ID NO: 274102 - protein, 52 aa, Zea mays
  unsure (1)..(52): unsure at all Xaa locations
  Clone ID: MRT4577_18156C.1.pep
XSSXIXFLSFXSSSXHGPXXKCXKHMKXPNPTEGDENGEIGGGXENGGGXRQ

SEQ ID NO: 274103 - protein, 70 aa, Zea mays
  Clone ID: MRT4577_181570C.1.pep
LEKKRERISLKGNCVRNVSLLKWNCGIVFPIVSSIRSIISQTFLALTELTENCRKYVQHQIRFIVSRTCM

SEQ ID NO: 274104 - protein, 231 aa, Zea mays
  unsure (1)..(231): unsure at all Xaa locations
  Clone ID: MRT4577_181571C.1.pep
MGPAAQPPDSGGGGDPEAWYGSIQYLINISAVGAASCVLLFLLVKLRFDHRRIPGPSALAAKLLAVYHATAAQIALHCGADAAQFLLFERASFLILAAVAAAAVAAALPLNLLAGDAAVVDQFASTTISHIPKSSPLLWLHLLLTAAVVAIAHLGISRMEDALRITRFRDGNGNPSDPNSSSVAVFTIMIQGIPKTLAADKTPLKDYFEHKYPGKXVYRVIVPFDLCTLEH

SEQ ID NO: 274105 - protein, 36 aa, Zea mays
  unsure (1)..(36): unsure at all Xaa locations
  Clone ID: MRT4577_181572C.1.pep
DXXRRLXPXSGKEPHFXRQGGRSTSARAARPAGAAL

SEQ ID NO: 274106 - protein, 74 aa, Zea mays
  Clone ID: MRT4577_181573C.1.pep
SSIKELNTGARRFHQMCIYMQGLPSNLISCMMVTQPQQKRAQHSPPLRPQLQENIKFRTTQGFRLCILTHASVH

SEQ ID NO: 274107 - protein, 129 aa, Zea mays
  unsure (1)..(129): unsure at all Xaa locations
  Clone ID: MRT4577_181574C.1.pep
AMSPTERAEAPRNRCNVXAETEEGRRRREDTTGHIFMRRREESLPKTRREGLQAQVLVTAXXVVQTKLESLTGMRSEAYSDEXNLQAEATTQLRQQPCIERSPHIEQVIKSGGPERFVQVLTRKDLPHL

SEQ ID NO: 274108 - protein, 61 aa, Zea mays
  unsure (1)..(61): unsure at all Xaa locations
  Clone ID: MRT4577_181575C.1.pep
ILMKTTNCYTNINTXLTHTMSQYSSQAALYIVETKLHNQIGPSLTFALSRMAKCDRAHVAL

SEQ ID NO: 274109 - protein, 46 aa, Zea mays
  Clone ID: MRT4577_181576C.1.pep
IELIRLEEDHQVDRWGLVKGGHDVDIADLKVQMSSAVVFLGLSRGL

SEQ ID NO: 274110 - protein, 243 aa, Zea mays
  Clone ID: MRT4577_181577C.1.pep
MAMGVATRVCFVVLVLICTSFRGGRAATFTFVNRCAATVWPGIQSNAGSSRLDPTGFALPAGASRAVPAPSGWSGRVWARTGCVQDAASGKVACATGDCGSGSLECDGRNAATPATLAEFTLDPAGGNDFYDVSLVDGYNLPVVVEPAGGSGGGGGAATTTTCAAAGCAADLSERCPAELRAEGGSGCRSACDAFGRPEYCCSGAYASPGTCRPTAYSQLFKSACPRSYSYAYDDPTSTFTCA

SEQ ID NO: 274111 - protein, 231 aa, Zea mays
  unsure (1)..(231): unsure at all Xaa locations
  Clone ID: MRT4577_181578C.1.pep
CTHFPQIRLLISLGTMDFSGNNLSGEIPHTLGSCVTLQFLYLQGNLLQGQIPVELNALRGLEVLDISSNNLSGPIPDFLGDFQVLKKLNLSFNNLSGPVLDRGIFHNNATSVSLSGNAMLCGGPGFFQFPPCSTYGRSNHQRMHVLAFSFTGALVVFVCITACYFMKKASDKASDAAHGLXLRFLEXKYQRISYAXVYEATDSFSDSNLXGRGRFGTVYKGILHDDSNTET

SEQ ID NO: 274112 - protein, 87 aa, Zea mays
  Clone ID: MRT4577_181579C.1.pep
MLISCLSCYNVETLVHSTLEHCEDADFTFPVHFNFREHTIYVRCRPYLKEFLDRVASVFETIIFTASQSIYAEQLLNVLDPKRKLFR

SEQ ID NO: 274113 - protein, 76 aa, Zea mays
  Clone ID: MRT4577_18157C.1.pep
PSHHPVPIPLGASQGVEHAFDNACYNWRSLITQSIFEHHTTTCKLHQFRLHLTARVYDLSQLYQDLSGVSLSSLIK

SEQ ID NO: 274114 - protein, 159 aa, Zea mays
  unsure (1)..(159): unsure at all Xaa locations
  Clone ID: MRT4577_181580C.1.pep
EGGPPPGRGGNSGGPPGPXESFGSRPLPPGXFCQNFFFFSGGGFFSPXGTCPSQGPPPFFPPGGXAFSRGGRGPPPGPLSPPRGVGGPPPPFEGVWVPPKKKRPPPRFSPPCFGGPPAPLAGGLEPPSGGELMGMCVIFVPNPRFSPPFFGGKETQYNI

SEQ ID NO: 274115 - protein, 109 aa, Zea mays
  unsure (1)..(109): unsure at all Xaa locations
  Clone ID: MRT4577_181581C.1.pep
SAGKGGYGEVAAAEEDXKLMHLDFVQVAVAQAASSLAVLYGLDKDHCGPVRPSDDVGYAYDNGVVSPVYDRLRGLPVDELAFVYRKVDDTVHEVDKHLPRALKAASVHV

SEQ ID NO: 274116 - protein, 87 aa, Zea mays
  Clone ID: MRT4577_181582C.1.pep
TGGLVFLVALAPLGMGCWGPRSSCTRGAPTHLCFRRPDPACAPPLVPLPRKQRSVTISQATKTSTKERSRKKNYNKDKKKKKKKKKK

SEQ ID NO: 274117 - protein, 82 aa, Zea mays
  Clone ID: MRT4577_181583C.1.pep
LPLNKSPQTHNPKGDGKKLGAEPAHNNSKPKEPQKARTQTPIAKRKGPTRPPPPGQQARTHSKPNTNPNKPTNIQQQGPKTR

SEQ ID NO: 274118 - protein, 70 aa, Zea mays
  Clone ID: MRT4577_181584C.1.pep
TPPLARYYHTGKRTLSTPPWLAGSSLSGEQRGFNVLSLSSVSVNSRAASQLSVDTVHRTCCSAPALISIF

SEQ ID NO: 274119 - protein, 109 aa, Zea mays
  unsure (1)..(109): unsure at all Xaa locations
  Clone ID: MRT4577_181585C.1.pep
EAEGPQGPPXPPQRTAPGGPPPPERPPRGPPPPARGPGPPGPPPRGPRNPPGSRGRNPSPPGSCDRLGPVXPPPPPPGLIMGPARRLLPGPGXPPGPLINYMGGSRFGS

SEQ ID NO: 274120 - protein, 65 aa, Zea mays
  Clone ID: MRT4577_181586C.1.pep
RERTRQRCQRRADQPTSPALKWPRNGNGKTTTRPTDQAQATLRDDAMAAETERARIEDGDGERDA

SEQ ID NO: 274121 - protein, 102 aa, Zea mays
  Clone ID: MRT4577_181587C.1.pep
STRPQPSLMNLYLQRIGGGQLQHQLVPIINQVVAANLAVYLQQQQFLPFNQLAGVNPAAYLQAQQLLPFNQLVRSPAVFLLEQQLVSFHLQVVANIGCFLQQ

SEQ ID NO: 274122 - protein, 127 aa, Zea mays
  Clone ID: MRT4577_181588C.1.pep
AVTMYTHFSLRFLVHRASWDVTVEHVPTFSVLSVPRRRVTTLACVSSLVKHVQLHVSPLHQRKSMFLHLSFKSTGVLPVKASALLSRISLQLPTPYSSTPFLKVSSSNKLHLLVFLRLVFLFPGGGK

SEQ ID NO: 274123 - protein, 72 aa, Zea mays
  Clone ID: MRT4577_181589C.1.pep
VLWFNMVFLWMRWISLLIWCLAELKLVLYSIEVRLCMSSDFGYAERFRVTSYSPVLARPQRYKLIVEQAPPP

SEQ ID NO: 274124 - protein, 46 aa, Zea mays
  Clone ID: MRT4577_18158C.1.pep
FWGVPKTRGLMRKKPRPRPIPPTRAIKARKPLRPGAVVNQKERVAA

SEQ ID NO: 274125 - protein, 61 aa, Zea mays
  Clone ID: MRT4577_181590C.1.pep
GAFEGGSINPPVSLGPALVSWEWGSQWVLWVGPLMGGGLAGVIYELFFFSPPPEQLPSPGF

SEQ ID NO: 274126 - protein, 124 aa, Zea mays
  unsure (1)..(124): unsure at all Xaa locations
  Clone ID: MRT4577_181591C.1.pep
MPLLRWPHAYCATFTMAPKKEKASTSLPTGAMSGVCKLQKTMRGPGMQMEKVNNAGLYDQGTXYDKLLSQXPKYNHMTTDMLSERLRHNGYLIRKAIKDLMADALILMRYVYSKGYIYTTSANT

SEQ ID NO: 274127 - protein, 151 aa, Zea mays
  unsure (1)..(151): unsure at all Xaa locations
  Clone ID: MRT4577_181592C.1.pep
FGSSLDRLLDVQKLDNVDIEGAIHAYYDITRQQCIICRELSEEQLKRYTSLHSASLDESLRIVKDYLIAATXKDCSFMICFRQRKAGDSGSGSICSNIYLESTKQTFDFKVYFIDLDLKRMSKMEEYYELDKKIVSCYEEMIKMDQGINSQ

SEQ ID NO: 274128 - protein, 39 aa, Zea mays
  Clone ID: MRT4577_181593C.1.pep
LHYTFETSIYFLQKIKGRKQNVYCPAFKGPHWGLPLTPT

SEQ ID NO: 274129 - protein, 64 aa, Zea mays
  Clone ID: MRT4577_181594C.1.pep
ASSCISKHALRYSTVEAPSRSMHMDQLSTRTDGSYHGGITITSHPQRDDWLSHSSIDLAMAGRS

SEQ ID NO: 274130 - protein, 124 aa, Zea mays
  Clone ID: MRT4577_181595C.1.pep
MMPLPVPPMLIEFFTRSIGEGRLTERGGEATGNGGWGGECSLLRPRAGGCRGGAPGRCSRRGRVGARGRERGREKEKREKGGGRRSGGGLGFFFFFFFFFFFFFFFFFFFFFFLIKYVFTAGLE

SEQ ID NO: 274131 - protein, 51 aa, Zea mays
  Clone ID: MRT4577_181596C.1.pep
THYFIILNCNDLRVHGPKKQASTKKGANKADETKSASKCNSINSEIRRGSS

SEQ ID NO: 274132 - protein, 80 aa, Zea mays
  unsure (1)..(80): unsure at all Xaa locations
  Clone ID: MRT4577_181597C.1.pep
MAIGSELDGVDPDDADEDKEEVDNDDDGATDQPSSSHGAKRKRDDDDLSXSGDDSEDDGVEDLRPFSTSDGAANVHGSLP

SEQ ID NO: 274133 - protein, 35 aa, Zea mays
  Clone ID: MRT4577_181598C.1.pep
PVFVRWWFHVVEAQARTITKKKKKKRTGGRRIVCS

SEQ ID NO: 274134 - protein, 68 aa, Zea mays
  Clone ID: MRT4577_181599C.1.pep
MTTSRRLADRKTAKFQKNITKRGSVPETTVKKGNDYPVGPIVLGFFIFVVVGSSLFQIIRTASSGGMA

SEQ ID NO: 274135 - protein, 449 aa, Zea mays
  Clone ID: MRT4577_18159C.1.pep
RAIPLDLTKRWRLSFSPPAVRPFQLAKRSRAAAMAGAGAPAVPQAGRPAPNFDVIVVGAGIMGSCTAHAAASRGARVLLLERFDLLHPLGSSHGDSRIIRDAYAQPRYLRMVRLARRLWAAAEAEAGYRVLTPTPHLSMGPRSSASLAAAIANIGAEEVDVDDLHRRWGGAFALTVPGPVDAWVTALSDHGGVLSATKAVAMFQSLAVAKGAVVRDNTEVVGIDRAPEPDGGGVVVRAAGGEAFRGARCVVTVGAWAAKLLGSWGVDLPIRPLHTLHLYWRVKPGQEQTVSASAGFPTFSSYGDPPVYGAPSLELPGLIKISCDGGPPCDPDARDWLAGDAEVTHRVARWIQEAMPDHVDAAGGPVVRQSCICSMTPDADFVMDFLGGGRDVVVGAGFSGHGFKMGPAVGKILAEMAIDGGSETAAEAGLDLGFFRIGRFDGNPMGNAK

SEQ ID NO: 274136 - protein, 82 aa, Zea mays
  Clone ID: MRT4577_1815C.1.pep
SFLATMKKKERSSLCATLIIGACWDTQIPNRFHHTQNLFSGGREQFTVVCLYQRKKPQLLLLFSMHASSAPRLSRGSCTDFF

SEQ ID NO: 274137 - protein, 82 aa, Zea mays
  Clone ID: MRT4577_181600C.1.pep
MSCCSGNCGCGSGCQCGSGCGGCKMSPDMETTATVGMKPMVLAAPTTKASAGGFEAAVEGGGCDCNTCKCGSSCGCSCCSCN

SEQ ID NO: 274138 - protein, 95 aa, Zea mays
  Clone ID: MRT4577_181601C.1.pep
AICRCQAPLPRRAATGTAALWRHTFSLPQALHATASSGGSSLLSAPWPSRSSNDGLYHGVTFLLHLRHPPFSHSFLARCFSCPPAMLRNMMLARG

SEQ ID NO: 274139 - protein, 221 aa, Zea mays
  unsure (1)..(221): unsure at all Xaa locations
  Clone ID: MRT4577_181602C.1.pep
MNASVEGDTFSGSMQIPGGTTVLVELAPDIHICGLCKQHFSNLDAFVAHKQSGCQLTTTPVTAPSTVQFVAEETEPATQTTTTTISSETQTITVSAPEFVFEHGYQTYLPTESTDNQTATVISLPTKSRTKKPTAPPAQKRLGCCYPGCQFKTAYGMKDMERHLKIHTGDKPHKCEVCXKCFSRKDKLKTHMRCHTGVKPYKCXTXRLRAADSSSLYKHLR

SEQ ID NO: 274140 - protein, 360 aa, Zea mays
  Clone ID: MRT4577_181603C.1.pep
MASGPPSPSGKPYSRKSHASSKAPSVPSFDAHNGQLLPTVTFSLPSTTTARRELRRRLSSELSQVRAAVKRLNSLPAPAPSSALSATDPSTPHPPYPPASKHKSKKGGGVPQPHLSAEARRKLYAPVFKTCAALLSRLMKHKHSWVFNKPVDASALGLHDYHTIITKPMDLGTVKSKLGAGQYKSPREFAGDVRLTFQNAMTYNPKGQDVHFMAEQLLNMFEEKWPEIEAEIAQLSPQPPTPSSAAPKKPKPKEIDNSRPLERSDSTVHAAGIEATPKTHTGRPQVLKKPKAREPNKRDMTFWEKQRLSNNLQDLPPEKLDNVVQIIKKRNLLLIPHDDEIEGDIDSFDVETLLGLDRFV

SEQ ID NO: 274141 - protein, 45 aa, Zea mays
  Clone ID: MRT4577_181604C.1.pep
LATKRAPRVAVAGPDRARAHCDVRSAPPDSMPLLWCRPRTPLKKL

SEQ ID NO: 274142 - protein, 158 aa, Zea mays
  unsure (1)..(158): unsure at all Xaa locations
  Clone ID: MRT4577_181605C.1.pep
MAGGVVVSSGGGKDYPGKLTMFVLFACIVAATGGLIFGYDIGISGGVTSMNPFLMKFFPSVYRKEQEAERNQSNQYCKFDSQLLTMFTSSLXYLAALVASFFAATVTRVAGRKWSMFGGGAGFXLVGRALNGAAQDVGMLILXRVLXXGVGVGFANQS

SEQ ID NO: 274143 - protein, 97 aa, Zea mays
  Clone ID: MRT4577_181606C.1.pep
GLSISKHNLLNLIREVISQWEQRQYQNQSMNRNTHVFIGRFKFPCVQVSIKPSTTLQLNPHSVQLLYGLIWIQRHPYSAPNSLSEKSTVILFFPSSS

SEQ ID NO: 274144 - protein, 82 aa, Zea mays
  Clone ID: MRT4577_181607C.1.pep
LVALVEGARMQQVYDIIVALADILDKLPVVEILALAHEHLIVYARLLVLLLRDLLIHVLDPDPVLYGDPERIVVHGCYDGDG

SEQ ID NO: 274145 - protein, 78 aa, Zea mays
  Clone ID: MRT4577_181608C.1.pep
NPFSSHLCKTFYRQCKSAEAGDTVNRREQEEITNSYPLFWLLHTHVIHAMPNLSFGVVLMLALYLNCFDVNPVIIVCM

SEQ ID NO: 274146 - protein, 57 aa, Zea mays
  unsure (1)..(57): unsure at all Xaa locations
  Clone ID: MRT4577_181609C.1.pep
LHQLRDIPCNTDILGSTQVVKRQKPWTKHPKTDTHAXAHKTCEXWKKVALEETGDKN

SEQ ID NO: 274147 - protein, 122 aa, Zea mays
  Clone ID: MRT4577_18160C.1.pep
MTVAKAMKSPGQKPKTPKKGPSTPNVKSPKGKGVGTPAGTPKQTPGKGPKVDQKTPKKPLAPANGTPKPKTPNANGSTKPQTPNPKANATPKSKTPKGNATPKLKTPKAANESPKSLGKRSA

SEQ ID NO: 274148 - protein, 128 aa, Zea mays
  unsure (1)..(128): unsure at all Xaa locations
  Clone ID: MRT4577_181610C.1.pep
RQTSYKXDKNLSRHGGEAXTTEQKYSLVNQDGWAIEKVMTLQGVLLADHFNLQMKYCITNVPSKPNTCSVLVLLGIAWLKSTKQQKKVTKSIISNTSNGLKELFAEVEKELTSSSSSHPNVAAAPTTA

SEQ ID NO: 274149 - protein, 94 aa, Zea mays
  Clone ID: MRT4577_181611C.1.pep
TSIEEYMPETWCRLNWTAIGGWRVERILLEYCPDCYYLLHCLPPAGSQRQGVVAEILQEQQQHLLLHPHRRQRVELEPLKPAAAIRLKPAASAF

SEQ ID NO: 274150 - protein, 101 aa, Zea mays
  unsure (1)..(101): unsure at all Xaa locations
  Clone ID: MRT4577_181612C.1.pep
VAMYDQNTQRRRGFGFITCDCXDALDHVLHKTLHDLGGKLVEVKRALPREANHXXGSGSDRIRASGSNQNSNGRYTSSDSYDGRSDRGWYRHAQQVIELAS

SEQ ID NO: 274151 - protein, 112 aa, Zea mays
  Clone ID: MRT4577_181613C.1.pep
ATPRTGAGPGVGYRRRINLDFSMSSGIMGVNTRGALQSNSQPHISGHHHQQQQLQRLSTPLDAPNIPFLYSSAAAAAAAAAVTTPTTADGQFAAFQLWNGFQHADMKEKGKH

SEQ ID NO: 274152 - protein, 142 aa, Zea mays
  Clone ID: MRT4577_181614C.1.pep
IICTMTITMSIKTSYMTIYMTIISIIVCLIEVLYACPFRIAAGISTAMSHIVAEAAASIGGSIDRVADVGDQVWIPAWIQDWAQITARITRHGPSSWSSSSSGFGGIWPEAGTKAARRGRFRAGFGTCCRLRKLRVACCDAC

SEQ ID NO: 274153 - protein, 63 aa, Zea mays
  Clone ID: MRT4577_181615C.1.pep
MRGARDPLSGLASPHFAIFFCKRLGSIVGRFASFFFKTCLPTFLYSVYLYKLFSFCFFFPVVR

SEQ ID NO: 274154 - protein, 45 aa, Zea mays
  Clone ID: MRT4577_181616C.1.pep
VVMKGEFVGGGACEIPPKFGVGQIRPLSGVPAYVSRSLKFKMCQI

SEQ ID NO: 274155 - protein, 69 aa, Zea mays
  Clone ID: MRT4577_181617C.1.pep
DRKGLLHDVFHILSDLELIGHRVKVATTPYGRVVDLFCITDGMELLHRMERHEETCSELTCTLGPYINC

SEQ ID NO: 274156 - protein, 70 aa, Zea mays
  Clone ID: MRT4577_181618C.1.pep
FLVFYHLVCLSDSFCPLLVSQALCLLSVFLLHYCCPIPLGFYVHLILLSHCISCRCPLSYGCFKGAHLFL

SEQ ID NO: 274157 - protein, 121 aa, Zea mays
  Clone ID: MRT4577_181619C.1.pep
CSQKCAQGFEKRHQLPRHYGHLVVWEIWEHRNDEGMLQLAVNENSLWCFSPLRVTRQVTLSLTIRSGCVWWRSVFSNLCGSPATIHLQSWPSSLSLYFFLLNEMIHSSPASLEKKGHCLLS

SEQ ID NO: 274158 - protein, 60 aa, Zea mays
  Clone ID: MRT4577_18161C.1.pep
MAEIFQLDKWNCVVKPFVENFFKKTFVGLECWKKSFYLSEFLRAIKIFSGIMFVLLTRFL

SEQ ID NO: 274159 - protein, 72 aa, Zea mays
  Clone ID: MRT4577_181620C.1.pep
KKNRFLQHRGFLFRFWKKTNLGWLNKHLRMSPFVMKGANGPLNPGEMLKGLPPFLNMGFCPYRKGRSGRFGT

SEQ ID NO: 274160 - protein, 124 aa, Zea mays
  Clone ID: MRT4577_181621C.1.pep
STLNNLPTITTNMRMLLIHLTLSSYIYNSTIFPQCSQTPISSLLPPYLPSIISTICENPPLHPYILQQAITTNNIPLSPLLIQQSPAISFLHSLLQTINSHTLQQLHLPTINQFTPLNLPLYFH

SEQ ID NO: 274161 - protein, 126 aa, Zea mays
  unsure (1)..(126): unsure at all Xaa locations
  Clone ID: MRT4577_181622C.1.pep
KPHVVLGPCPGHGHIAPHVRVGRALRARGVHATLVHTELYHRRLLRAERXXATXGRRPGPGRGXFSVEGMPGGVSVEDPPRAVRACHEARGRNCLXRGEALLRDLLLPPTGGRGGXCVVGDTPMPV

SEQ ID NO: 274162 - protein, 115 aa, Zea mays
  Clone ID: MRT4577_181623C.1.pep
VLIKPKFSLGKGLQFASAPCLGPFFRFWPPLSPFFAVRPLCLGVFVFPLTLFCPLFWGGGGSSSSYPKGASLPWGFFLPGRAICFVHLFFFPPCFWAFFPPFLKRNNKKKMIIYH

SEQ ID NO: 274163 - protein, 125 aa, Zea mays
  unsure (1)..(125): unsure at all Xaa locations
  Clone ID: MRT4577_181624C.1.pep
GGAFSSKNRTKVDRSGAYLGRHAGKSMVASGLHRRXLVQVYYAIGKPDPLYAVVDCYGTGRIRHKEILKIVXKENFDVWPGMVTMNLHLNNGRNRMINTCAYGHFFRDDAEYTCEVGNPINKASS

SEQ ID NO: 274164 - protein, 333 aa, Zea mays
  Clone ID: MRT4577_181625C.1.pep
MEAEAAAKRAREGGEDATAPVAGAEAVVAGAGEQAGISAVIPGWFSEISPMWPGEAHSLKVEKVLFQGKSDYQNVMVFQSSTYGKVLVLDGVIQVTERDECAYQEMITHLPLCSIKDPKKVLVIGGGDGGVLREVSRHISVEQIDICEIDKMVVDVSKQFFPHLAVGFEDPRVSLHIGDGVAFLKNAPEGTYDAVIVDSSDPIGPAQELFEKPFFQSVARALRPGGVVCTQAESIWLHMHIIEDIFVNCRQVFKGSVNYAWTTVPTYPSGVIGFMLCSTEGPAVDFQHPVFNIEEDEHSTKSKGPLKFYNSEIHTASFCLPSFAKRVIESKAS

SEQ ID NO: 274165 - protein, 79 aa, Zea mays
  unsure (1)..(79): unsure at all Xaa locations
  Clone ID: MRT4577_181626C.1.pep
MAAKAGPAKKGDAXDPLLXVATAAKSGAANTMTNKIRTSVSFHRPTTLNNAWDPNYPRISTTGRNKLDQYHNLTYPLTT

SEQ ID NO: 274166 - protein, 117 aa, Zea mays
  Clone ID: MRT4577_181627C.1.pep
GFPREGGGFPGTLPPPVVAKGETPGFFFPGGGLGKTQSGPSQVWGGALFFGPIKLGGGGGPSVFGRGSKKFFPFWEIGIPQGGAPPPGFFWGNDQNLGVGPAQNRPLVFVCFSPNPF

SEQ ID NO: 274167 - protein, 64 aa, Zea mays
  Clone ID: MRT4577_181628C.1.pep
IARPLFFFFNASSHSSVGTLSYSLSFSPFSFRLRVLVHLLNLATAPRTYPLNLPAPVAHAQHLK

SEQ ID NO: 274168 - protein, 45 aa, Zea mays
  unsure (1)..(45): unsure at all Xaa locations
  Clone ID: MRT4577_181629C.1.pep
GGFSPFFKPRAGPXLKKKKKKKKKKKKKKKKKKKKKKKKKKLEGG

SEQ ID NO: 274169 - protein, 130 aa, Zea mays
  Clone ID: MRT4577_18162C.1.pep
MVMDKSNLPQPPPSPPFFAFSLKSLNKASYKISKQSSSASSAPSPAPPSTMRAPSPSPPAPRPPAPLPPPQASSVPADHPPPQPPVYNIDKSDFRDVVQKLTGSPFHLLPAQPRAGPRPRSRIGASLFFL

SEQ ID NO: 274170 - protein, 120 aa, Zea mays
  unsure (1)..(120): unsure at all Xaa locations
  Clone ID: MRT4577_181630C.1.pep
MYSDNHWGGSSEIVDGAAEDDHSRXNMELNRGAMSWRQXHELHXTQQSWVXGRRIAQKKDXYGYLACASVHLKLLWGGLWCVVPDFVLIPLPIILEKCIPNKKPEPPPTYRDPDTLHNVL

SEQ ID NO: 274171 - protein, 57 aa, Zea mays
  Clone ID: MRT4577_181631C.1.pep
VWLSGSMDMYYVGLGFEIIEVMGCGGKGMGRIGYSYWVGNWVKDLFEMGWCFDMNFC

SEQ ID NO: 274172 - protein, 128 aa, Zea mays
  unsure (1)..(128): unsure at all Xaa locations
  Clone ID: MRT4577_181632C.1.pep
IPHAGSPPPPQQAWESGQRPAEKRRQRALRPSWLVFISYYLLFLLSLLFYHFFLFYYFFLLKIIFXLIYXIFIFYFILFTFFIFFYFIYIIYFSFXITLFKPFXSFFSLTNVSFHPYFLTSNVNVYFL

SEQ ID NO: 274173 - protein, 110 aa, Zea mays
  unsure (1)..(110): unsure at all Xaa locations
  Clone ID: MRT4577_181633C.1.pep
RXRNPAVDHTLPLFFAPCFALIYLVGPPSPRGVLNNSCLYNNSPPPHSHFFFRNYVLFTILNNTAFPYSLTNAISFFISISTKSFPIRPIVELLFAFFFTHFLYFTYQII

SEQ ID NO: 274174 - protein, 49 aa, Zea mays
  Clone ID: MRT4577_181635C.1.pep
LSPQMPEHQILTDGKNPFLSGDWTHKITDYRRTREGFSLLKQTKRRQYA

SEQ ID NO: 274175 - protein, 172 aa, Zea mays
  Clone ID: MRT4577_181636C.1.pep
VKRVESLHGIKPYIKTERLHGIKPYIKIINRSWVTFRSRENYILQLPPKKSPEERTNWLGVWNRTRVTQPNPSARRTRSCEETQTTRPNYRSLDREEPLRNAHLAGKSPRFSSDLTPDRGGHHARRASAPTAHVEIGSSPSSLPLVVVGGGGGGGVRERPSRVGEGGRGEVW

SEQ ID NO: 274176 - protein, 55 aa, Zea mays
  Clone ID: MRT4577_181637C.1.pep
LDRSIKTAQTPGWAQNNCWGCTLLYTPTTHQPNRTLKNRSAPYIYILYNTLGTSS

SEQ ID NO: 274177 - protein, 75 aa, Zea mays
  Clone ID: MRT4577_181638C.1.pep
FHGEVEFNVRPPLLMQPLGAPEPVHSVLGWGPPPPPQVRTLYRIGEHIGLNNPPCVFRCNKRWECAHFGETTMVP

SEQ ID NO: 274178 - protein, 104 aa, Zea mays
  Clone ID: MRT4577_18163C.1.pep
PFEKKAHGKSETPFKTQKFWTFQKVVNLNGPTTKPRKDYRGNPSSGSFTCGEEAKPRKFDDHLVRNFWVFRNTNGGKNLGGHPFRNRGDTPKKKGDIFRGFRVM

SEQ ID NO: 274179 - protein, 124 aa, Zea mays
  unsure (1)..(124): unsure at all Xaa locations
  Clone ID: MRT4577_181640C.1.pep
SLCFVYAEGNQYQSIHKFNAQYKDITKRVVVPSLPDAASHISHKQQHTNYQKQNTSSAFMINQMQAQHQEIKCDVRNIITQNEIMANSTESQLWSLRGANPIYHASKTSKESTMRGXYTEPRAE

SEQ ID NO: 274180 - protein, 87 aa, Zea mays
  unsure (1)..(87): unsure at all Xaa locations
  Clone ID: MRT4577_181641C.1.pep
KNAKKVFTPPPIWGFQGPPFSPFFSKRDXKVFLENYPLKGVVPQKLLFKFFPPLRSIGGSGVLVTKLPPIFGEETPRGGHFPSEVGL

SEQ ID NO: 274181 - protein, 70 aa, Zea mays
  unsure (1)..(70): unsure at all Xaa locations
  Clone ID: MRT4577_181642C.1.pep
YISISLSIAAFLTYPSIRAHRCFIISPIYNSLTXIQQPLDYKNTTATNLNILKSHTPHYSSLNIEEIITI

SEQ ID NO: 274182 - protein, 105 aa, Zea mays
  Clone ID: MRT4577_181643C.1.pep
MHHRMGRFLLLPALTLVVASAWVPITFADPQATLLNQGCSQYNATPASAFIAALNSTFASLRANLSAASSVGFATAAEPRAAAPAFAMAQCRPYVAGRDCVACFD

SEQ ID NO: 274183 - protein, 41 aa, Zea mays
  Clone ID: MRT4577_181644C.1.pep
KFNFTAGHCKRNVTDPRLKTCFEKFCFWKSMLWHWGLEEQE

SEQ ID NO: 274184 - protein, 131 aa, Zea mays
  Clone ID: MRT4577_181645C.1.pep
TSSEALAPSRLASFSHSRHKAQATEATLPQRTRHAAHRRTGSRHRAVRTSPPGAGTCQCQPRGSRRPLQVSRSATPGRGSPAACSTPERRSPARPVLAAARQRGRGCALLHLAAAVLRGWRLRPARVLGQF

SEQ ID NO: 274185 - protein, 64 aa, Zea mays
  Clone ID: MRT4577_181646C.1.pep
GGQNFKGPLWVLQFRSLTIYKGTKAVLYFSKYLWAQLNQGFLAIPFGNQPKTGGSCEGVRVLIQ

SEQ ID NO: 274186 - protein, 96 aa, Zea mays
  Clone ID: MRT4577_181647C.1.pep
MFFFFFFFFKTFFFFRAGCIGFLSYAIWFWFFFENLKYTRFDRFFFFSHDQFSQKRDAGGGARTPTGTFFFARKIIGIPIRTRRKHDNSVRGGGPP

SEQ ID NO: 274187 - protein, 212 aa, Zea mays
  unsure (1)..(212): unsure at all Xaa locations
  Clone ID: MRT4577_181648C.1.pep
ILRRERPPPPLLPPXPPPPPPPPPAYSVTSSMPPYSVTSSMPPSPLPPPLIPFSPIRIRKREKRDGDLDGDDSTDEDDDTDSCSTPLPPPPPPGMEWEYTDPITMRPLDFLPSSLADRDDKEVASQVSMDDDWVETNIEFDGQDESVSGNADGILRRVELHPAKSRVMGDENSSMMSSWVTKDSNSSVMAWATDKSLVEIAKEIDEYFLKAA

SEQ ID NO: 274188 - protein, 114 aa, Zea mays
  Clone ID: MRT4577_181649C.1.pep
GAGAQKTNIGGPGPLAKRRGKIFPEKNPKKMPPKIGGHCPQNRGNKQAHAALLHSPVHGKQPNNAEKFIFITPRRDKNLFLKTKTFTLLYSNPRNKPVNWETPNFLNQTPFSSK

SEQ ID NO: 274189 - protein, 76 aa, Zea mays
  Clone ID: MRT4577_181650C.1.pep
FLAHLKRHVVCIDILKMCLYEPLIRYASCQLNRCTLSMAAVFCPSRRTGLTQSTVYTVSSCSSLANERHASIRFSV

SEQ ID NO: 274190 - protein, 147 aa, Zea mays
  unsure (1)..(147): unsure at all Xaa locations
  Clone ID: MRT4577_181651C.1.pep
CKRFSTFHFKPNTRKFFSLILFFCFRVAWSQEKGRNFATVNPSALYHQDXFSISNSEQKVKDSGIVFCHCISERIDKRHRRMKLVLADKRVKAERGCKLPLARRVEGQCCVRAGQPHCRRHVAQRKVTRLVHLRRQAQRRTRGRTRG

SEQ ID NO: 274191 - protein, 825 aa, Zea mays
  unsure (1)..(825): unsure at all Xaa locations
  Clone ID: MRT4577_181652C.1.pep
MAIGEHEAATFDSSLLLEVRVNVNPVLDFNVFKWSSATFPFIATQKKLWRLALPMSTSPSDSFASFVSHSSSREPTPKWHPIAAYEKHTPLHWDADGWDFAVASESEGNLTDGDDLQFLVDGELDSDTSTEWSWTYDGESSDVESLDNDDDPMSGHWMGMVSSNDEDDENDDGSSDYNSSDEDNDGSGDNDGDDDGGASQCDEMPPSKRRRLQHDSLFGYPREPSFVFGPKIHCKKANSIADKAIGRMQEIADKIFSVARETIRPGRGLTSFEATKLRVALEDISCMMEQDSLVLQEHLDTVNNVTNLVHANYEPSDLSSPIPAKDDLGEDWDFAEHFENFWGVEYESNQMPSFSDNEMGKSGKVIAKWDTRGTKIYTEICVEEVNAGNKPHNFLNAKGYANLINKFEERTGRTYTRDQMKNRWDSLMRMYTQWKTLNQRAIGLGRDPHTRSISAPDEWWAKQNEAMPVCIMFKTVPLENEDNLKIMFGPIVCTNETTLVPRVEDANSSSDGHEEDIXLVRVKTTHLTPALQLRESVRCFXDTDHSDDDRDHEELLVAALTLDIWGSSSSRVPRRSMVQTRIQWVERTLENSDDCYDMFRMRLTVFRRLHDTLVHNYGLQPSRGVSTKEAIAIFLWACGGPQSFRQIRNKFGHSLETISRKFSEVLNTIYMMSSDVIKPKDTHFNEIHPRLRESRFWPHFKDCIGEIDGSHFPASVPASEQPKYIGRHGCTSQNVMAVCDFDMRFTFVVTGWPGSVHDTRVLHDTLIMYRDRFPHPPKGKYYLVDSGYPNRKGYLAPYKGHKYYTSEWQNARRPVRVAVLAHLMS

SEQ ID NO: 274192 - protein, 152 aa, Zea mays
  Clone ID: MRT4577_181653C.1.pep
LNLPASPCGTARESALCRDHCRAAKNSAESASRATSASHSTLSWATRARVRLPLPLSVVLMGSCRRRRPDLGALVLELPRLPARRQQRLQKAPVRRRPGALSPGLEEASPRGGVTRFVAAHSVCLPYSRATCRSSEICTAPHHNYCAGILLT

SEQ ID NO: 274193 - protein, 94 aa, Zea mays
  Clone ID: MRT4577_181654C.1.pep
TPLREVGSAPRGRNWERLRQKNSFGWAVKKIPFYVPPRRWGFRQNPGCGCFWVSQGSGGFFSRREKGFFLTQVRGAFFPPQGGVFLPPPRSSFP

SEQ ID NO: 274194 - protein, 28 aa, Zea mays
  Clone ID: MRT4577_181655C.1.pep
ERFSSIQFTAISATGRHDNPPALVPVRV

SEQ ID NO: 274195 - protein, 46 aa, Zea mays
  Clone ID: MRT4577_181656C.1.pep
GVGLKVHFLLSFLVSKGRFFGPIFFVNSGLFSKPKDRNNNIHRVKV

SEQ ID NO: 274196 - protein, 69 aa, Zea mays
  unsure (1)..(69): unsure at all Xaa locations
  Clone ID: MRT4577_181657C.1.pep
HMPYKRFAEAIIMASKKYKIAYNKKRSGWAEDIFKWEHTIQTGVPIDLREFNTSYLVLQVMTMWXNDRR

SEQ ID NO: 274197 - protein, 241 aa, Zea mays
  unsure (1)..(241): unsure at all Xaa locations
  Clone ID: MRT4577_181658C.1.pep
MKLNIANPTTGCQKKVEIDDDQKLRNLYDKRISQEVVGDLLGEEFKGYIFKIMGGCDKQGFPMKQGVLTSGRVRLLLHRGTPCFRGFGRRNGERRRKSVRGCIVSQDLSVINLVIVKKGENDLPGLTDTEKPRMRGPKRASKIKKLFNLGKDDDVRSYVNTYRRTFLNKKGKKVSKAPKIQRLVTPLTLQRKRARIADKKKRIAXKKKSEAAEYQKLLAQRLKEQRDRRSESMXKRRSKLS

SEQ ID NO: 274198 - protein, 111 aa, Zea mays
  unsure (1)..(111): unsure at all Xaa locations
  Clone ID: MRT4577_181659C.1.pep
PTGSIGKHNRAPTVAAKIQGLLMQLGLSACAATVTIHPHSXQGPIAYLLSQHLTPGGAFVWKNPKLXPYKKQHDTRAGVLPKSTLHLQQXSALLQQGPLAQXLAHNSRGQQ

SEQ ID NO: 274199 - protein, 54 aa, Zea mays
  Clone ID: MRT4577_18165C.1.pep
MQMAVTTTECQAGVPTKHPNAHAHSPAQYADPHHHMPETLWVVFPYPPTPSMVV

SEQ ID NO: 274200 - protein, 194 aa, Zea mays
  Clone ID: MRT4577_181660C.1.pep
MKLNIANPTTGCQKKVEIDDDMKLRNLYDKRISQEVVGDLLGEEFEGYIFKIMGGCDKQGFPMKQGVLTPGRVRLLLHRGTSCFRGHGRRVGERRRKSVRGCIVSQDLSVINLVIVKKGKNDLPGLTDTEKPRMRGPKRASKIKKLFNLGKDDDVRQYVNTYRRSFTNKKGKTVSKAPKIQRLVTPLTLQRKRA

SEQ ID NO: 274201 - protein, 88 aa, Zea mays
  Clone ID: MRT4577_181661C.1.pep
GRDYLVYVEPHPPGVDCQAYQLGILAAALGGEAQAKAAMLYNYRNVMSGFSARLTPPELEAVKKQPQVSRVLPSATLSLMSSKFDGVS

SEQ ID NO: 274202 - protein, 57 aa, Zea mays
  Clone ID: MRT4577_181662C.1.pep
MKKLYSMVRPDWFFGLSGTISAFVAGSQMPLFALGVTQALVSYYMGWETTKLEVRKI

SEQ ID NO: 274203 - protein, 129 aa, Zea mays
  unsure (1)..(129): unsure at all Xaa locations
  Clone ID: MRT4577_181663C.1.pep
YFFKAXSAALVFFFIERNQWPASTGKSKFTKHRDEKNERITKPEELVRLYDLLXRYVCFLSHPLFRHIYHVFTRLRVRPLXQNVTDLTDLVSSGRNKNEEENSFIHEYELKGLAFRAERFVTLYPSLAY

SEQ ID NO: 274204 - protein, 53 aa, Zea mays
  unsure (1)..(53): unsure at all Xaa locations
  Clone ID: MRT4577_181664C.1.pep
CILSTLGRMVDALERSDAMTREMGDSTVQTSDCARXXRISERAVRMSXSTRAA

SEQ ID NO: 274205 - protein, 58 aa, Zea mays
  Clone ID: MRT4577_181665C.1.pep
PTRARNDINRGYESESGAILSCEREYNDGLNVEGIPKIRRIGVYLSSGRQHYTKCLMI

SEQ ID NO: 274206 - protein, 65 aa, Zea mays
  unsure (1)..(65): unsure at all Xaa locations
  Clone ID: MRT4577_181666C.1.pep
MTREYDLLSPPSQHXVSCNNTARRVSVHGCNSRSAALRLDSGNYSXGSVAVTRKSRILDVVYSAS

SEQ ID NO: 274207 - protein, 54 aa, Zea mays
  Clone ID: MRT4577_181667C.1.pep
KGAQTGGRGGSFSRIDAWSQSAKPSCSNLSSLRRRKLILPQCVGGAHQPWGLKG

SEQ ID NO: 274208 - protein, 93 aa, Zea mays
  Clone ID: MRT4577_181668C.1.pep
PACILYLKKKKKKKKKKKKKKKKKKKKKKKKKKKKYFLGCYHCLRANFGKNKIGRLSMHLKGPIPIGSGIKINWRGFYKGWIWKTLGVLNLMA

SEQ ID NO: 274209 - protein, 232 aa, Zea mays
  unsure (1)..(232): unsure at all Xaa locations
  Clone ID: MRT4577_181669C.1.pep
MATTTPAVTEPDNADASPPSPTSPPSKKLMYELAARNIYYAKPTAAPRSLAQLLKPCGAAPTPPDYILRDVSLTARAGEILAVVGPSGAGKSTLLDILAARTAPTHGRLLLNSAPLRPSSFRRLSSHVPQADVALTLLTVSETFAFAASLLHPESESAVSAAVTALLADLRLAHVAHTRVSPARLSGGERXRRVSIGLALLXNPAVLLLDEPTSGLDSSSAAXVVSCLRAVA

SEQ ID NO: 274210 - protein, 41 aa, Zea mays
  Clone ID: MRT4577_18166C.1.pep
MKRMHRMQTRKSHSWWWDSHISPKNSKWLAENLEGNDSVFY

SEQ ID NO: 274211 - protein, 67 aa, Zea mays
  Clone ID: MRT4577_181670C.1.pep
LLSNVHCLRENHGNPQNLLAHKKNNSSFLTTLNSFPNVFQLLSHNQLWTKPKNPPCPTLRLPSKPKT

SEQ ID NO: 274212 - protein, 105 aa, Zea mays
  Clone ID: MRT4577_181671C.1.pep
MGRVRTKTVKKTSRQVIEKYYSRMTLDFHTNKKVLEEVSILPSKRLRNKVAGFTTHLMRRIQRGPVRGILLKLQEEERERRMDFVPEKLVLEVEEIRVDMETMEM

SEQ ID NO: 274213 - protein, 70 aa, Zea mays
  Clone ID: MRT4577_181672C.1.pep
IRHEDPWPNASLRAWLVNSFFYDSFGSRRSSDKVRTMKLIDPITGNTIRAVEVLADVLVLSCRPYDAWPG

SEQ ID NO: 274214 - protein, 117 aa, Zea mays
  Clone ID: MRT4577_181673C.1.pep
FHIAPTAKTKPSPNKPTLENAHKKPTAEKLMPRKEVGEKNGNTNAMKSVTTYKIYIFNALNQVHPDIGISSNAMSIMNSFINYIFEKLAVDAGNLARYNKKPTITFLEIQTFVRLVL

SEQ ID NO: 274215 - protein, 87 aa, Zea mays
  unsure (1)..(87): unsure at all Xaa locations
  Clone ID: MRT4577_181674C.1.pep
VKLTHDQELLFRYIQRNEYHNLFNFISGKQCEILNLGDGQGRTSGVTSCLQSTDDDPVDQHLKRIQHQAGNEXSDEEDEDSVADKDD

SEQ ID NO: 274216 - protein, 105 aa, Zea mays
  Clone ID: MRT4577_181675C.1.pep
PTQHTLFFYLLFFKPPSPGNRLNPPAPSLVFSQQKLKKGLAQISNFANWAKALAPHGCRLAGEKNPGFTKGEAFNWGAKLLRDDAQPNPGGGFPLKGGARPRRGI

SEQ ID NO: 274217 - protein, 1402 aa, Zea mays
  unsure (1)..(1402): unsure at all Xaa locations
  Clone ID: MRT4577_181676C.1.pep
MSTQRDHVDPLLEEIPITSSGEEVDPKVLDLAMKIAEKMFLKMKEEDAKKKAEEEESRRKAEEDKGKGKFDVEGVEQGKSQHRGIIYQKQRNFIPNFSSSPLGKLPTLSELNYDEWADKMKSHLIGVHPSLWEIVNVGMFKPAQGEEMTPEMMQEVHRNAQAVSIIKGSLCPEEYRKVQGREDARDIWNILKMSHEGDPKAKRHRVEALESELARYDWTKGESLQSLFDRLMVLVNKIRVLGSEDWSDSKVTRLFMRAYKEKDKSLARMIRDRDDYEDMTPHQLFAKNQQHESEEAPIKTRDSHALITNEQDNPKKNKDHKAKKVVETSSGEDSSSDEDTTMFIKTFKKFVRKNDKFQRKGKKRACYECGQTGHFIVDCPNKKEQEAKKEYKKDKFKKGGKTKGYFKKKKYGQAHIGEEWNSDEESSSSKEEEVVANVAIQSTSSSQLFTNLQDDSYTPTCLMAKGDKVSLFSNDLPNDDDDEQIAMKNKMIKEFGLNGYNVITKLMEKLDKTKATLDAQEDLLILEKERNLELQELLHNKDEMLDVLTKEVSLVKITIENKDKEVINMKTSIANLANEKNALETSMLSLNVQNQELQVQLENCKNINASSLVIESKSSSLNDNFCKHCAKYHASCCLTNHARKNSPQVKVKGILKRCSSNDGLKKVKPKYKSLKPNNGRRGLGFNSSKENPSTVHKGWRSPKFIEGTTLYDALGRIHSSNDKSPQVKVYSSGGSSWVLDSGCTNHMTGEKDMFHSLQLTQEAQEIVFGDSGKSKVIGIGKIPISDQQSLSNVLLVDSLSYNLLSVSQLCGMGYNYLFSDVDVKILRREDSSVAFTGRLKGKLYLVDFTTSKVTPETCLVAKSDKGWLWHRRLAHVGMRNLAKLQKDNHIIRLTNVVFEKDRVCGACQAGKQHGVPHKSKNVVTTKRPLELLHMDLFGPMAYISIGGETQEILKKFMRRAQNEFELKIKKVRSDNGTEFKNTGVEEFLGEEGIKHEFSVPYTPQQNGVVERKNRTLIEAARTMLDEYKTPDNFMQSTVSIFTRSTKRLLMSFSLKVKSSKFAPRVDEGFLLGYASNAHGYRVFNNTTGLVEIAIDVTFDESNGSQGHVSNGTAGNEELPCEAIKKLAIGEVRPQEKDDEEGTXDDQXVVDVGAKVVGDKSSTQANPSTSSHPSIEENHQFQRMPTMVEDGHESVDGEVPLDQVNDEEEQIQRQPSVPHPRVHHTIQRDHPVDNILGSIRRGVTTRSRLANFCEFYSFVSSLEPLKVEEALGDPDWIIAMQEELNNFTWNEVWSLVQRPKQNVIVTKWVFRNKQDEHGVVTRNKARLVAQGYTQVEGLDFGETYAPVARLESIRILIAYATNHDFKLYQMDVKSAFLNGPLQERVYVEQPPGFEEPKKPNHVY

SEQ ID NO: 274218 - protein, 35 aa, Zea mays
  unsure (1)..(35): unsure at all Xaa locations
  Clone ID: MRT4577_181677C.1.pep
LAALQVRHTKLMWFAYMATTXAFATGLYTVLEDRL

SEQ ID NO: 274219 - protein, 117 aa, Zea mays
  unsure (1)..(117): unsure at all Xaa locations
  Clone ID: MRT4577_181678C.1.pep
LPXRXCLAGPPLPFPXXVXXLXALAVLRSPCPVSXVXXXGAPVXXVFXFXXSPPPPAXXXLXXCVRXXXVXXCSLSFLLXLXXLXGSXFCXWXXAAPWXGLCXXSAVPPLVPXGNSL

SEQ ID NO: 274220 - protein, 1291 aa, Zea mays
  unsure (1)..(1291): unsure at all Xaa locations
  Clone ID: MRT4577_181679C.1.pep
MSTQRDHVDPILEDIPVTSSGEEVDPKVLDLAMKIAERMFLKMKEEDAKKKAEEEESRRKAEEDKCKGKFDYNDDLVDLLVSKVLSKVCISPPKEKSPEMMQEVHRNAQAVSIIKGSLCSEEYRKVQGREDARDIWNILKMSHEGDPKAKRHRVEAFESELARYDWIKGESLQSLFDRLMVLVNKIRVLGSEDWSDSKVTRLFMRAYKEKDKSLARMIRDRDDYEDMTPHQLFAKIQQHESEEAPIKTRDSHALITNEQDTPKKNKDHKAKKVVETSSDEDSSSDEDTTMFIKTFKKFVRKNDKFQRKGKKRACYECGQTGHFIADCPNKKEQEAKKEYKKDKFKKGGKTKGHFKKKKYGQAQIGEEWNSDEESSSSEEEEVVANVAIQSTSSSQLFTNLQDDYYTPTCLMAKGDKDALESSILSLNVQNQELQLQLENCKNINASSLLIESKSSSSNNTFCKHCAKCHASCCLTNHARKKSPQVKVKEILKRCSSNDGLKKIEPKYKSLKPNNGRRGLGFNSSKENPSTVHKGWRSPKFIEGTTLYDALGRIHSSNDKSTQVKVYSSGGSSWVLDSGCTNHMTGEEDMFHSLQLTQEAQEIVFGDSGKSKILRREDSSVAFTGRLKGKLYLVDFTTSRVTPETCLVAKSDRGWLWRRRLAHVGMRNLAKLQKDGHIIGLTNVVFEKDRVCGACQVGKQHGVPHQSKNVVTTKKPLELLHMDLFGPMAYISIGGSKYGLVIVDDFSRFTWVFFLSDKGETQETLKKFMRRAQNEFEVKIKKVRSDNGTEFKNTGVEEFLGEEGIKHEFSVPYTLQQNGVVERKNRTLIEAARTMLDEYKTPDNFWAEAVNTTCHAINRLYLHKIYKKTAYELLTGNKPKIDYFRVFDCKCFILNKKVKSSKFAPRVDEGFLLGYASNAHEYRVFNNTTGLVEIAIDVTFDESNGSQGHVSNGTAGNEEPPCEAIKRLAIGEVRPQEKDDDEGTXDDQXVFDVGAKVVGDKSSTQANPSTSSHPNLEENHQPQRMPTVVEDEHESIDGVVALDQVDDEEEQIQRQPSVPHPRVHHTIQRDHPVDNILGSIRRGVTTRSRLANFCEFYSFVSSLEPLKVEEALGDPDWIIAMQEELNNFTRNEVWSLVPRPKQNVIGTKWVFWNKQDEHGVVTRNKARLVAQGYAQVEGLDFGETYAPVARLESIRILIAYATNHDFKLYQMDVKSAFLNGPLQERVYVEQPPGFEDPRKPNHVYLLHKALYGLKQAPRAWYDCLKDFLIKNGFTIVSGTIIRGTLKTPNLSW

SEQ ID NO: 274221 - protein, 90 aa, Zea mays
  Clone ID: MRT4577_18167C.1.pep
ASPWVFSRFIYATLPIRGVKLSGIQLHALGSLKPFCGMAQYRAKDRRFTVVIVSPATLSVVPYFPGVSHQPVCRLVNSSRHDSVITRPKV

SEQ ID NO: 274222 - protein, 941 aa, Zea mays
  Clone ID: MRT4577_181680C.1.pep
MPTVVVDEHESIDGEVPLDQVNDEEEKIQRQPSVPHPRVHHTIQRDHPVDNILGSIRRGVTTRSRLANFCEFYSFVSSLEPLKVEEALGDPDWIIVMQEELNNFTRNEVWSLVQRPKQNVIGTKWVFRNKQDEHGVVTRNKARLVAQGYTQVEGLDFGETYASIARFEMSMMGELKYFLGFQVKQLKEDTFLCQTKYTQDMLKKFGMEKAKHAKTPMSSNGHLDLNEEDYAGCKVDRKSTTGTCQFLGRSLVSWSSKKQNCVALSTAEAEYIAAGACCAQLLWMKQTLRDFGCEFNKIPLLCDNESAIKLANNPVQHSRTKHTDIRHHFLRDHEAKGDIELFHVLFLFLRMVRRRNPSVVESDSSDDQQIHGDTPPRSRSKRGRGSGNVMQGAEASGSQSARGRTSRNPSGRSRPATNPQAWEATSDDEGGKDDEVDLPPAHAPVIRGLVLHRVEARRAGNEPVTDFTASGGSALLQDLCFQNPALRIRDARIDGNRFWTLHHVDFYNSVILPKKHQPILLQRYINWEGCEAIGDPEMTQALRACERKKMKIIAQFYSTLWIKPADEESPYSYPYPNFYIEGSWYKVSYRRFAHILGFSDNDISGDKIKIHDFRQPTRDEAKDLHLSESGKYWESTNIHKYYRYINSLCRMTLIPKGGNQMNILGESKVLLSFMKPSSSESINVFDMIWQEIIHAACFPLKGCLDAPFIMKMIEVVTQFKFDKGTRHQSYTPFWIDPNNPAGRLRKAPSSSRAHTSAGPSAGPAAAAAGASRPSPSHGSPTPRGRGRGRGRGRGMGARLAHGFAAFFSMCRNIAADVHEVARRQRETDDNLRRQASSLGTPFAPRSPDVPLHPPPPEINEWYQQAYGVPFTTTDDVEEEEEAYFDDCEQFVPPLYHGDPGQSSSYPPPQNPSGSAPQSGEEHFASDLAHHLFAPHHPPPNR

SEQ ID NO: 274223 - protein, 151 aa, Zea mays
  Clone ID: MRT4577_181681C.1.pep
MSTQRDHVDPLLEEIPVTSSGEEVDPKVLDLAMKIAERMFLKMKEEESRRKAEEDKADCPNKKEQEAKKEYKKDKFKKGGKTKGYFKKKKYGQAHIGEEWNSDEESSSSEEEEVVANVAIQSTSSAQLFTNLQDDSYTPTCLMAKGDKNLA

SEQ ID NO: 274224 - protein, 186 aa, Zea mays
  Clone ID: MRT4577_181682C.1.pep
RGDQIYAFYQLKTRSRIIHQIHFIQSYTQYGKRVKRTRSRIAWLKDGDANTKLFYSWSRYRKRKNFIAKIHDGEQLVTSHSDKAEVFRSFYSDLIGTGQQRSRTVNLDTIGLQHIDLQGLEQQFSEEEVWNTIKQLPPDKAPGPDGFTSRFYKACWSIIKKDIMAAILTVWNKDFRNFRYLNTAFI

SEQ ID NO: 274225 - protein, 1503 aa, Zea mays
  Clone ID: MRT4577_181683C.1.pep
MSTQRDHVDPLLEEIPITSSGEEVDPKFLDLAMKIAEKMFLKMKEEDANKKVLSKVSLNTEGSSTKSKGNEFSKVQFDYSRNFIPNFSSAPLGKLPTLSELNYDEWADKMKSHLIDVHPSLWEIVNVGMYKPAQGEEMTPEMMQEVHRNAQAVSIIKGSLCPEEYRKVQGREDARDIWNILKMSHEGDPKAKRHRVEALESELARYDWTKGEPLQSLFDRLMVLVNKIRVLGSEDWSDSKVTRLFMRAYKEKDKSLAWMIRDRDDYEDMTSHQLFAKIQQHEFKEAPIKTRDSHTLITNEQDTPKKNKDHKAKKVKFVRKNDKFQRKGKKRACYECGQTGHFIADCPNKKEQEAKKEYKKDKFKKGGKTKGYFKKKKYGQAHIGEEWNSDEESSSSEEEEVVANVAIQSTSSSQLFTNLQDDSYTPTCLMAKGDKVTLFSNDFPNDDDDEQIAMKNKMIKEFGLNGYNVITKLMEKLDKRKATLDAQEDLLILEKERNLELQELLLNKDEMLDVLTKEDALESSMLSLNVQNKELQVQLENCKNINASSLVIESKSSSSNNTFCKHCAKYHASCCLTNHARKNSPQVKVKEILKRCFSNDGLKKVEPKYKSLKPNNGRRGLGFNSSKENPSTVHKGWRSPKFIEGTTLYDALGRIHSSNDKSTQVKVYSSGGSSWVLDSGCTNHMTGEEDMFHSLQLTQEAQEIVFGDSGKSKMIGIGKIPISDQQSLSNILLVDSLSYNLMSVSQLCGMGYNCLFFDVDVKILRREDSSVAFTGRLKGKLYLVDFTTSKVTPETCLVAKSDKGWLWHRRLAHVGMRILAKLQKDNHIIGLTNVVFEKDRVCGACQAGKQHGVPHQSKNVVTTKRPLELLHMDLFGPVAYISIGGSETQEILKKFMRRAQNEFELKIKQVRSDNGTEFKNTGVEEFLGEEGIKHEFSVPYTPQQNGVVERKNRTLIEAARTMLDEYKTPDNFWAEAVNTACHAINRLYLHKIYKKTAYELLTGNKPKVDYFRVFGCKCFILNKKVKSSKFAPRVDEGFLLGYASNAHGYRVFNNTTGLVEIAIDVTFDESNGSQGHVSNGTAGNEELPCEAIKKLAIGEVRPQEKDDEEGTLWMTNEVVDVGAKVVGDKSSTQANPSTSTHPSLEENHQSQRMPTVVEDEHESVNGEVPLDQVNDEEEQIQRQASVPHPRVHHTIQRDHSVDNILGSIRRGVTTRSCLANFCEFYSFVSSLEPLKVEEALGDPDWIIAMQEELNNFTRNEVWSLVQRPKQNVIGTKWVFRNKQDEHGVVTRNKARLVAQGYTQVEGLDFGETYALVARLESIRILIAYATNHDFKLYQMDVKSAFLNGPLQERVYVEQPPGFEDPKKPNHVYLLHKALYGLKQAPRACSNTSWDFKSNNSRKALFYAKPNILKKFGMEKAKHAKTPMSSNGHLDLNEEDYAGCKVDRKSTTGTCQFLGRSLVSWSSKKQNCVALSTAEAEYIAAGACCAQLLWMKQNLRDFGC

SEQ ID NO: 274226 - protein, 57 aa, Zea mays
  unsure (1)..(57): unsure at all Xaa locations
  Clone ID: MRT4577_181684C.1.pep
RRVMAWSCTSYGVIISCIRSSGGTSSRFRDISAAXAAVXAPVEGVQSARERTRRRPF

SEQ ID NO: 274227 - protein, 58 aa, Zea mays
  unsure (1)..(58): unsure at all Xaa locations
  Clone ID: MRT4577_181685C.1.pep
PRVRAHRVEKMLAGLDTNILXVNPDWGLKTRKYTEVKPALTNXIGXTKLPSTQLVSAK

SEQ ID NO: 274228 - protein, 1763 aa, Zea mays
  unsure (1)..(1763): unsure at all Xaa locations
  Clone ID: MRT4577_181686C.1.pep
MKNKMIKEFGLNGYNVITKLMEKLDKRKATLDAQEDLLILEKERNLELQELIHNKDKEVINMKTSIDNFANEKNALESSMLSLNVQNQELQVQLEKCKNINAPSLVFESKSSSNDDSCKHCAKYHASCCLTNHARKHSPQVKVKEFLKRCSSNDGLKKVEPKYKSLKPNNGRRGLGFNSSKENPSTVHKGWRSPKFIEGTTLYDALGRIHSSNDKSSQVYSSGGSSWVLDSGCTNHMAGEKDMFHTLQLTQEAQEIVFGDSGKSKVIGIGKIPISDQQSLSNVLLVDSLSYNLLSVSQLCGMGYNCLFSDVDVKILRREDSSVAFTGRLKGKLYLVDFTTSKVTPETCLVAKSDKGWLWHRRLAHVGMRNLAKLQKDNHIIGLTNVVFEKDRVCGACQAGKQHGVPHQSKNVVTTKRPLELLHMDLFGLVAYISIGGSKYGLVIVDDFSRFTWVFFLSDKGETQEILKKFMRRAQNEFELKIKKVRSDNGTEFKNTGVEEFLGEEGIKHEFSVPYTPQQNGVVERKNRTLIEAARTMLDEYKTPDNFWAEAVNTACHAINRLYLHKIYKKTAYELLTGNKPKVDYFRVFGCKCFILNKKVKSSKFAPRVDEGFLLGYASNAHGYRVFNNSTGLVEIAIDVTFDESNGSQGHVSNDTAGNEELPCEAIKKLAIGEVRPQERDDEEGTLWMTNEVVDVGARVVSDKVSTQANPSTSSHPSHEENHQRMPTVVEDEQENIDGEVPLDQVTDEEEQIQRHPSVPHPRVHQTIQRDHPVDNILGSIRRGVTTRSHLANFCEFYSFVSSLEPLKVEEALGDPDWIIAMQEELNNFARNEVWSLVQRPKQNVIGTKWVFRNKQDEHGVVTRNKAQLVAQGYTQVEGLDFGETYALVAXLYQMDVKSAFXLNGPLQERVYVEQPPGFEDPKKPNHVYLLHKALYGLKQAPRAWFEMSMMGELKYFLGFQVKQLKEGTFLCQTKYTQDMLKKFGMENAKHAKTPMSSNGHLDLSEEDYAGCKVNRKSTTGTCQFLGRSLVSWSSKKQNCVAFSTAEAEYIAAGACCAQLLWMKQTLRDFGCEFNKIPLLCDNESAIKLANNPVQHSRTKHIGIRHHFLRDHEAKGDIELFHLNRSYERLKCMLNILCVSTQTCLILAHHRFYFLFLRMVRRRNPSVVESDSSDDQEIHGDTPPRSQSKRGRGSGNVMPGAEASGSQSARGRTSRNPSGRSRPATNPQAWEPASDDDGGKDDEVDLPPAHAPVIRGLVLHRAEARRAGNEPVTNFTASGGSALLQDLRFQNPVLRIRDARIDGNRFWTLHHVDFYNSVILPKKHQPILHQRYINWEGCKAIGDPEMSQALRACERKQMKNIMTFQYDWNDEVIAQFYSTLWIKLADEESHYNYPYLNFFIEGSWYKVSYRRFAHILGFSDDDISGDKIKIHDFRQPTRDEAKDLHLSESGKYWESTNIHKYYRYINSLCRMTLIPKGGNQMNILGESKVLLSFMKPNSSERINVFDMIWQEIIHAACFPLKGCLHAPFIMKMIEVVTQFRFDKGTRHQSYTPFWIDPNNPAARLRKAPSSSRGHTSAGPSADAGAAAAGASRPSPGRGSHTPRGRGRGRGRGRGMGARLAHGFAAFFSMCRNIAADVHEVARRQRETDDNLRRQASALGTPFAPRSPDVPLHPPPPDVNEWYQQAYGVPFSTADDVEEEETYFDDPEQFVPPPYHGDPGQSSSYPPPQDPSGSAPPPARSGEEHFASDLAQHLFAPHHPPPHW

SEQ ID NO: 274229 - protein, 1929 aa, Zea mays
  Clone ID: MRT4577_181687C.1.pep
MSTQRDHVDPILEDIPVTSSGEEVDPKVLDLAMKIAERMFLKMKEEDAKKKAEEEESRRKAEEDKGKGKFDYNDDLVDFLVSKVLSKVSLNTEESSTKSKGNEFSKVQFDYSRNFIPNFSSAPLGKLPTLSELNYDEWADKMKSHLIGVHPSLWEIVNVGMYKPAQGEEMTPEMMQEVHRNAQAVSIIKGSLCPEEYRKVQGRDDARDIWNILKMSHEGDPKAKRHRVEALESELARYDWIKGESLQSLFDRLMVLVNKIRVLGSEDWSDSKVTRLFMRAYKEKDKSLARMIRDRDDYEDMTPHQLFAKIQQHESEEAPIKSRDSHALITNEQDNPKKNKDHKAKKVVETSSDEDSSSDEDTTMFIKTFKKFVSKNDKFQRKGKKRACYECGQTGHFIADCPNKKEQEAKKEYKKDKFKKGGKTKGHFKKKKYGQAHIGEEWNSDEESSSSEEEEVEFGLNGYNVIIKLMEKLDKRKATLDAQEDLLILEKERNLELQGLLLNKDEMLDALTKEVSLVKITIEDKEKEVINMKTSIASLANEKDALESSILSLNVHNQELQVQLENCKNIKASSLLIESKSISSNNTFCKHCAKYHASCCLTNHARKKSPQVKVKEILKRCSSNDGLKKIEPKYKSLKPNNGRRGLGFNSSKENPSIVHKGWRSPKFIEGTTLYDALGRIHSSNDKSPQVYSSGGSSWVLDSGCTNHMTGEKDMFHTLQLTQEAQEIVFGDSGKSKVIGIGKIPISDQQSLSNVLLVDSLSYNLLSVSQLCGMGYNCLFSDVDVKILRREDSSVAFTGRLKGKLYLVDFTTSKVTPETCLVAKSDNGWLWHRRLAHVGMRNLAKLQKDNHIIGLTNVVFEKDRVCGACQAGKQHGVPHQSKNVVTTKRPLELLHMDLFGPVAYISIGGSKYGLVIVDDFSRFTWVFFLSDKGENQEILKKFMRRAQNEFELKIKKVRSDNGTEFKNTGVEEFLGEEGIKHEFSVPYTPQQNGVVERKNRTLIEAARTMLDEYKTPDNFWAEAVNTACHAINRLYLHKIYKKTAYELLTGNKPKVDYFRVFGCKCFILNKKVKSSKFAPRVDEGFLLGYASNAHGYRVFNNTTGLVEIAIDVTFDESNGSQGHVSNDTAGNEEPPCEAIKKLAIGEVRPQERDFEEGTLWMTNEIVDVGARVVSDKVSTQANPSTSSHPSHEENHQRMPTVVEDEQESTDGEVPLDQVIDEEEQIQRHPSMPHPRVHQSIQRDHPVDNILGSIRRGPLKVEEALGDPDWIIAMQEELNNFTRNEVWSLVQRPKQNVIGTKWVFRNKQDEHGVVTRNKARLVAQGYTQVEGLDFGETYAPVARLESIRILIAYATNHDFKLYQMDVKSAFLNGPLQERVYVEQPPGFEDQKKPNHVYLLHKALYGLKQAPRAWYDCLKEFLIKNGFTIGKADSTLFTRKVDNELFVCQVYVDDIIFGSTNEKFCEEFSKVMTNRFEMSMMGELKYFLGFQVKQLKEGTFLCQTKYTQDMLKKFGMEKAKHAKTPMSSNGHLDLNEEEAEYIAAGACCAQLLWMKQTLRDFGCLSPAIFSVAQHLFDRSQQLCMQKLFPLSRMTVLPKGGNQMNVLGESRVFFLLLAPNSLARINVFDMIWEEIVRASWSPLKGCVHAPFIMKMIEVVTQTHFEKPVKHSRYVPYWVDSSNPAARTKRAPSRSGGPASSTEPPRQPPHHPSSSPPAAASRPSPGRGSPMPRARGRGRGRGRGMGARLVHGVATFFSMCRNISADVHEVARRQRETDDNLRCQASSMGMPFVPRSPDVPLHPPPPEINEWHQQAYGVPFMSADDEDEEVYVDDREEFAPPPYHGDPGQSSSHPPPPYPGPGPIPGDPRPSGSGYHHHPPPSPDHRTSSASVFSAADEPPRDSTFEEDAMRTFFPDYTSYPPSYPPSYPPPGGY

SEQ ID NO: 274230 - protein, 129 aa, Zea mays
  unsure (1)..(129): unsure at all Xaa locations
  Clone ID: MRT4577_181688C.1.pep
PPPAAPGGGGSPPPGGPFLGAPPRPPAGGKQGPSWSPGEKGXRHNSPQKPAPKHKGKTPGGPRGGPPPLNGGAPPAPFPKGKPGAPASXKNPPPPGGGGLGFGGFSASSPTNPGAPGHRRGGGGPPPSG

SEQ ID NO: 274231 - protein, 1880 aa, Zea mays
  Clone ID: MRT4577_181689C.1.pep
MNKKNNGQAHIGEEWNTDDESSSSEEEEVVANVAIQSTSSAQLFTNLQDDSYIPTCLMAKGDKVTLFSNDFSNDDDDDQVAMKNKMIKEFGLNGYNVITKLMEKLDKRKATLDAQEDLLILEKERNLELQELIHNKDIEVINLKTSIDNLANEKNALESSMLSLNVQNQELQVQLESCKNINAPTLVFESKSGSNDNSCKHCAKYHASCCLTNHARKQSPQVKVKEILKRCSSNDGLKKVEPKYKSLKPNKGRRGLGFNSSKENPSTVYSSGGSSWVLDSGCTNHMTGEKDMFHTLQLTQEAQEIVFGDSGKSKVIGIGKIPISDQQSLSNVLLVDSLSYNLLSVSQLCGMGYNCLFSDVDVKILRREDSSVAFTGRLKGKLYLVDFTTSKVTPETCLVAKSDKGWLWHRRLAHVGMRNLAKLQKDNHIIGLTNVVFEKDRVCGACQAGKQHGVPHQSKNVVTTKRPLELLHMDLFGPVAYISIGGSKYGLVIVDDFSRFTWVFFLSDKGETQEILKKFMRRAQNEFELKIKKVRSDNGTEFKNTGVEEFLGEEGIKHEFSVPYTPQQNGVVERKNRTLIEAARTMLDEYKTPDNFWAEAVNTACHAINRLYLHKIYKKTAYELLTGNKPKVDYFIVFGCKCFILNKKVRSSKFAPRVDEGFLLGYASNAHGYRVFNNSTGLVEIAIDVTFDESNGSQGHVSNDTAGNEKLPCEAIKKLAIGEVRPQERDDEEGTLWMTNEVVDVGARVVSDNVSTQANPSTSSHPNHEENHQRMPTVVEDEQENIDGEVPLDQVTDDEEPIQRHPSAPHPRVHHSIQRDHPVDNILGSIRRGVTTRSRLANFCEFYSFVSSLEPLKVEEALGDPDWITAMQEELNNFTRNEVWSLVQRPKQNVIGTKWVFRNKQDENGVVTRNKARLVAQGYTQVEGLDFGETYAPVARLGSIRILIAYATNHDFKLYQMDVKSAFLNGPLQERVYVEQPPGFEDPKKPNHVYLLHKALYGLKQAPRAWYDCLKDFLIKNGFTIGKADSTLFTRKVDNELFVCQIYVDDIIFGSTNEKFCEEFSKVMTNRFEMSMMGELKYFLGFQVKQLKEGTFLCQTKYTQDMLKKFGMEKAKHAKTPMSSNGHLDLNEEGKPVDQKLYRSMIGSLLYLCASRPDIMLSVCMCARFQANPKDCHLVAVKRILRYLVHTQNLGLWYPKGSFFDLLGYSDSDYAGCKVDRKSTTGTCQFLGRSLVSWSSKKQNCVALSTAEAEYIAAGACCAQLLWMKQTLRDFGCEFNKIPLLCDNESAIKLANNPVQHSRTKHIDIRHHFLRDHEAKGDIELFHVSTENQLADIFTKPLDETRFYLLFLRMVRRRNPAVVESDSSDEQEIHGDTPPRSRSKRGRECGNVMPGTEASGSQSARGRTSRTPSSRSRPATNPQAWEPASDDDGGKDDEVDLPPASAPVIRGLVLHRAEARRAGNEPVTDFTASGGSALLQDLRFQNPVLRIRDARIDGNRFWTLHHVDFYNSVILPKKHQPILHQRYINWEGCEAIGDPEMSQALRACERKQMKNIMTFQYDWNDEVIAQFYSTLWIKLADEESHYNYPYLNFFIEGSWYKVSYRRFAHILGFSDEDISGDRIKIHDYRQPTRDEAKDLHLSESGKYWESTNIHKFEKGTRHQSYTPFWIDPNNPAGRLRKAPSSSRGHTSAGPSAGAGAAATAAAGASRPSLGRGSPTPRGRGRGRGRGRGMGARLAHGFASFFSMCCNIAADVHEVARRQRETDDNLRRQASALGTPFAPRSPDVPLHPPPLDVNEWYQQAYGVPFSSADVVEEETYFDEPEQFDPPPYRGDPGQSSSYPPPQDPSGSAPPPAQSGEEHFAYDLAQHLFAPHQPPPHW

SEQ ID NO: 274232 - protein, 95 aa, Zea mays
  unsure (1)..(95): unsure at all Xaa locations
  Clone ID: MRT4577_18168C.1.pep
SGXRXGSXXAGSPSXXLGSVXLXPPRSCLLPGXVLSGVGAPXXAPPPLLXXXAFXXXFSPLLAVRXGPLXAAASXXRSLGXLRLXLGSXCCXCAG

SEQ ID NO: 274233 - protein, 1604 aa, Zea mays
  Clone ID: MRT4577_181690C.1.pep
MSTQRDHVDPLLEEIPITSSGEEIDPKVLDLAMKIAEKMFLKMKEEDAKKREEEEESRRKVEEDKGKGKIEYNDDLVELLVSRVMSKVSLNTEGSSTKSKGNEFNKVQFDYSRNFIPNFSSAPLGKLPTLSELNYNEWADKMKSYLIGVHPSLWEIVNIGMYKPAQGEEMTPKMMQEVHRNAQAVSIIKGSLCPEEYRKVQGREDARDIWNILKMSHEGDPKAKRHRIEALESELARYDWTKGESLQSLFDWLMVLVNKIRVLGSEDWSDSKIQQHESEEAPIKTRDSHASISNEQDTPKKNKNHKAKKVVEASSDEDSSSDEDTAMFIKTFKKFRIVLTKRNKKQRRNTKKDKFKKGRKNKGYFKKKKYGQAHIGEEWNSDEESSSSEEEEAVANVAIQSTSSSQLFTNLQDDSYTPTCLMAKGDKVTLFCDDFSNDDDEQIAMKNKMIKEFGLNGYNVITKLMEKLDKRKATLDAQEDLLILEKERNLELQELLLNKDEMLEALTKEVSLVKLTIEDKEKEVTNMKTSIPNLANEKDALESSMLSLTVQNQELQKVEPKYKSLKPNNGKRGLGFNSFKENSSIVHKGWRSPKFIEGTTLYDALGRIHSSNDKSTQVKVYSSGGSSWVLDSGCTNHMTGEKDMFHSLQLTQEAQEIVFGDSGKSKVIGIGKIPISDQQSLSKVLLVDSLSYNLMFVSQLCGMGYNCLFSDVDVKILRREDSSVAFTSRLKGKLYLVDFTTSKVTPETCLVAKSDKGWLWHHRLAHVGMRNLAKLQKDSHIIGLTNVVFEKDRVCGACQVGKQHGVPHQSKNVVTTKRPFELVHMDLFGPVAYISIGGSKYGLVIVDDFSRFTWVFFLSDKGETQETLKKFMRRAQNEFELKIKKVRSDNGTEFKNTGVEEFLGEEGIKHEFSVPYTPQQNGVVERKNRTLIEVARTMLDEYKTPDNFWAEAVNIVCHAINRLYLHKIYKKTAYEHLTGNKPKVDYFRVFGCKCFILNKKVKSSKFAPRVDKGFLLGYASNAHGYRVFNNTTGLVEIAIDVTFDESNGSQGHVSNDIAGNEEPPCEAIKKLAIGEVRPQEKNDEEGTLWMINEVFDVGAKVVGDKSSTQANPSTSSHPSLEEGHQPQRMPTMPLKVEEALGDPDWIIAMQEELNNFTRNEVWSLVQRPKQNVIGTKWVFRNKQDEHGVVTRNKTRLVAQGYTQVEGLDFGETYAPVARLESIKILIAYDTNHDFKLYQMDVKSAFLNGPLQERVYVEQSPGFEDPRKPNHVYLLHKALYGLKQAPRAWYDCLKDFLIKNGFTIGKADSTLFTRKVDNELFVCQIYVDDIIFGSTNEKFCEEFSKVMTNMFEMSMMGELKYFLGFQVKQLKKGTFLCKTKYTQDMLKKFGMEKAKHAKTPMSSNGYLDLNEEANPKDCHLVAVKRILRYLVHTQNIGLWYPKGSLFDLLGYSDSNYAGCKVDQKSTIGTCQFLGRSLVSWSSKKQNCVALSTAEAEYIAAGACCAQLLWMKQTLRDFGCEFNKIPLLCDNESAIKLANNPVQHSRTKHIDIRHHFLRDHEAKGDIELFHVSTENQLADIFTKPLDETRFCFLRSELNILDSRNVS

SEQ ID NO: 274234 - protein, 89 aa, Zea mays
  unsure (1)..(89): unsure at all Xaa locations
  Clone ID: MRT4577_181691C.1.pep
NSAEDGAKSLGRKWSGSAWKKPEGDPVRRASCRPLPLCSRGPRAAPAAXGRGRRRLRRGARRPRRALPRPSRRGLSSPSGGGRGGALWL

SEQ ID NO: 274235 - protein, 39 aa, Zea mays
  Clone ID: MRT4577_181692C.1.pep
AEYGNQGVGVVSQQLYKSLTSLQMGNVEDWMGWTVQLNQ

SEQ ID NO: 274236 - protein, 142 aa, Zea mays
  Clone ID: MRT4577_181693C.1.pep
GISVRQLRVPWHETAFHALLRLSTVLLLPRAPPPAAAPVGAAAAAAVALSSAAPAPCHVSPLARFRTVRSWPVCARLRLAFCAFAVASRGRRYDRTPPPPFGFTRAVAARAEFGTRRERERERERERERERERERERERDSC

SEQ ID NO: 274237 - protein, 49 aa, Zea mays
  Clone ID: MRT4577_181694C.1.pep
DAWVRTRGQETKDLLKSMGFDSIPTNVVAVSQQQVVERPRRFNDRPGRS

SEQ ID NO: 274238 - protein, 80 aa, Zea mays
  Clone ID: MRT4577_181695C.1.pep
MPLVVPGLQSKDGNSGDDWMSKLMGKKLGDQHDEMTFAKTDLPQQHRVLKPDSMQTMDFQPERLNVHVDEDGTVKKVTKG

SEQ ID NO: 274239 - protein, 66 aa, Zea mays
  Clone ID: MRT4577_181696C.1.pep
SLVCCFCVMLRCRSLPWPVPCTSTGHALELSEYDSYDCDEKGAYRLCTHQLRGKPLARSPTMDHTT

SEQ ID NO: 274240 - protein, 551 aa, Zea mays
  Clone ID: MRT4577_181697C.1.pep
MAARPDARSGYCAATRTFRSKRADVPLPADADLDVVRFLASRRHAGVVALVDAATGHRVTFQELWRAVEGAATALAAPPLSLRKGQVALILSPNSVHFPVAALAAMSLGAVLTTANPLNTPAEIAKQVDDARPVVACTARFVLDLSSRASAGAGIRVVLLEPDRLPSDPSPVVATIGEISATPPDPTRRRDRVTQDDPATLLYSSGTTGPSKGVVATHRSLISMVQIIMSRFRLEASDRTETFLCTVPMFHVYGLVAFATGLLGCGATIVVLSKYELPEMLRAINEYGVTYLPLVPPILVAMLAHPNRLPLGGLRKVLSGGAPLSKELIEGFKEKYPQVEILQGYGLTESTAIGASTDSAEESSRYGTAGLLSPSTEAKIVDPETGEALPVNRTGELWIRGPYVMKGYFKNAEATQSTLTPDGWLKTGDLCYIDEDGYLFVVDRLKELIKYKGYQVPPAELEALLLTHPEIEDVAVIPFPDREVGQFPMAYVVRKKGSNLSEREVMEFVAKQVAPYKKVRKVAFVAEIPKNASGKILRKDLIKLATSKSKL

SEQ ID NO: 274241 - protein, 305 aa, Zea mays
  unsure (1)..(305): unsure at all Xaa locations
  Clone ID: MRT4577_181698C.1.pep
QARGRPAPRRRGPGRRQVPRVPPPRGRRRARRRCHGPPGHVPGTLARGGRGGHRARRAAAVAPQGPDRAYPLPELRPLPRCRPRSHVPRRRPHHRQPAQHARRDRTGELWIRGPYVMKGYFKNAEATQSTLTPDGWLKTGDLCYIDEDGYLFVVDRLKELIKYKGYQVPPAELEALLLTHPEIXDVAVIPFPDREVGSYVVRKKGSNLSEREVMEFVAKQVXFSRLNGSDDSPNITFTVCVRMRASTRLKFMQFLXRCGACNVTFAXAPYKKVRKVAFVAEIPKNASGKILRKDLIKLATSKSKL

SEQ ID NO: 274242 - protein, 636 aa, Zea mays
  Clone ID: MRT4577_181699C.1.pep
IEFHGSLLKVSPVSIYSHSGLPFPAVRAKVSWPRKASRGVALVTCASGEAEFIVKDCFALGVGGRYVNCEVSNKWANCVFVTGIPLHVTEPELYDAFHSTTTRRILDIHLLRGQPTASSSVSECTEALMRAISLFMPNRNFPCQKFRVQVFPPEEKDSMMKATITFDGSFHREAARALDHLQGSVLPCCLPWQIIQCEHVFHSTVSCPMRIYNVISQDVGALLESFRSQKGVAYNLEKNENGNFRVKLTANATKTIADLRRPLELLMKGKIINHPDLMLSTVQLLWSRDGMEQLRSVERETGTYILYDRQSLNIKIFGSTDNVAAAEEKLVHALVQLHEKKPLEVCLRGRNLPPNLMKEVIVKFGADLEGLKNEVPAVDLQLNTRRQTLYVRGSKEDKQRVEGMISELITSSDHSAQLSSENACPICLCELEDPFKLESCGHMFCLACLVDQCESAMKSQDGFPLRCLESGCNKLFLLADLRSLLPDKLDELFRASLNAFVASSAGLYRFCPTPDCTSIYQVAAAGAQGDRPFVCGACSVETCTKCHIEYHPFISCEAYKEYKADPDATLLEWRKGKENVKNCPSCGFTIEKSEGCNHVECRCGSHICWNCLENFKSSEECYGHLRSVHLSYADLM

SEQ ID NO: 274243 - protein, 56 aa, Zea mays
  Clone ID: MRT4577_18169C.1.pep
TAKGEGQVKTGCILPMAQSSQLGAGFARSSRAKPGFIKFPAAKIKPQESRLWGGLP

SEQ ID NO: 274244 - protein, 62 aa, Zea mays
  Clone ID: MRT4577_1816C.1.pep
LPPLGAPRQERAYLPPVLSSRSSVTKPIHDPIHIKRGNQSSNSIFLWSVPSTVAVMFCSCKL

SEQ ID NO: 274245 - protein, 226 aa, Zea mays
  unsure (1)..(226): unsure at all Xaa locations
  Clone ID: MRT4577_181700C.1.pep
MAARPDARSGYCAATRXFRSKRADVPLPADADLDVVRFLASRRHAGVVALVDAATGHRVTFQELWRAVEGAATALAAPPLSLRKGQVALILSPNSVHFPVAALAAMSLGAVLTTANPLNTPAEIAKQIADARPVVAFTTRDLLPLPRAGAGAGIRVVLLEPDRLPSDSPSSIGCHWPPGHVTGTLTRAGRCGHTSRRPTSVSPEGPALCYDNSEIRPITRPCSRTH

SEQ ID NO: 274246 - protein, 83 aa, Zea mays
  Clone ID: MRT4577_181701C.1.pep
GLPGYFRNVEATQSTLTPDGWLKTGDLCYIDEDGYLFVVDRLKELIKYKGYQVNVADDILISCREVSYLRPCPAGYPYGHPKH

SEQ ID NO: 274247 - protein, 156 aa, Zea mays
  unsure (1)..(156): unsure at all Xaa locations
  Clone ID: MRT4577_181702C.1.pep
GGXGGKQNKREGEGAQGGKKNAPKQQKKRKGAGXPPRPPRPKKKKGPQISLGSPAPLCFFSXXXXQPKAHXVFSGRPPPFGRLKAPGGVPLFLTTKKKHCLLHSKRAATNQRFDWPLKGGGGKPPEGRIDPSTAQRIHHDGGMNQALKHVGKAKGN

SEQ ID NO: 274248 - protein, 360 aa, Zea mays
  Clone ID: MRT4577_181703C.1.pep
MAARPDARSGYCAATRTFRSKRADVPLPADADLDVVRFLASRRHAGVVALVDAATGHRVTFQELWRAVEGAATALAAPPLSLRKGQVALILSPNSVHFPVAALAAMSLGAVLTTANPLNTPAEIAKQVADARPVVAFTTRDLLPKLPRAGAGAGIRVVLLEPDRLPSDPSPVVATIGEISATPPDPTRRRDRVTQDDPATLLYSSGTTGPSKGVVATHRSLISMVQIIMSRFRLEASDRTETFLCTVPMFHVYGLVAFATGLLGCGATIVVLSKYELPEMLRAINEYGVTYLPLVPPILVAMLAHPNRLPLGGLRKVLSGGAPLSKELIEGFKEKYPQVEILQGYGLTESTAIGASTDSA

SEQ ID NO: 274249 - protein, 37 aa, Zea mays
  Clone ID: MRT4577_181704C.1.pep
FFFFFFFFFFFFFFFFFFFFFFFFFFLTHKNIRFYRG

SEQ ID NO: 274250 - protein, 74 aa, Zea mays
  Clone ID: MRT4577_181705C.1.pep
DARTENPTPRSPARRNPLALPAPAQAVVVPLYFESSTTKITAAVLCELRTTVVSLARTMTLSRAGHHMPKLCWP

SEQ ID NO: 274251 - protein, 71 aa, Zea mays
  Clone ID: MRT4577_181706C.1.pep
LLWAIGTLEAGRTVRKNHGAEDTAAERIDAMAAGELLRPSTGDGATYDSPFSRRYPSIPCTNPDGDHRRRA

SEQ ID NO: 274252 - protein, 46 aa, Zea mays
  Clone ID: MRT4577_181707C.1.pep
LCRRKNAQPTDCDLPRGEERFLWLSIPNTRCGLGVRGICFHLGGLQ

SEQ ID NO: 274253 - protein, 75 aa, Zea mays
  unsure (1)..(75): unsure at all Xaa locations
  Clone ID: MRT4577_181708C.1.pep
ALLNTVSPMFTTITTEQGSWCGWLALYLTGLSQPARLQGWADLQAEISLPLTQNSYVHLPSXXLSPGSLKCASEK

SEQ ID NO: 274254 - protein, 51 aa, Zea mays
  Clone ID: MRT4577_181709C.1.pep
VLAVTGEVPNLIIVNRLYTSMIAITVRHTINVCKSFYERLSISYLVISNRN

SEQ ID NO: 274255 - protein, 101 aa, Zea mays
  unsure (1)..(101): unsure at all Xaa locations
  Clone ID: MRT4577_18170C.1.pep
MVGRGILWPFWPPGSAWRPLPLRGKSLALFLVGPPGPALSAPGPLVWGGFLPPAXRARGSPPPPPPGLPLRSSPPPRALGFPPPPPXAPGPAPPPRGPGGP

SEQ ID NO: 274256 - protein, 87 aa, Zea mays
  unsure (1)..(87): unsure at all Xaa locations
  Clone ID: MRT4577_181710C.1.pep
XXFFFFFFVXVVFFFPVISPWQWQKEGHTKFTRLKIPGPAGGPLKIYRCFLFPREKTSGEIKNSNFSIASGNWEGGVNLRSKGPQIY

SEQ ID NO: 274257 - protein, 202 aa, Zea mays
  unsure (1)..(202): unsure at all Xaa locations
  Clone ID: MRT4577_181711C.1.pep
PLLPSPSIALTHSHPRRLAVSAAEPLERRPRQELATPRPGLGAAPPRPHETAELDAEAALGGESAEERNRFLVLRLYEALNALDHRGFVFSPRSVDAFGSTVVAEGADDARQLYWVHAWTVGPHGVITQLREYFNTDLTLLSGQPDVVAGAAPPKQKDAASSSSSSSPSXQRHPAAAGSKCLWQSRRADSAHKSLPGLVLAI

SEQ ID NO: 274258 - protein, 90 aa, Zea mays
  unsure (1)..(90): unsure at all Xaa locations
  Clone ID: MRT4577_181712C.1.pep
MEDSKAPVSEHGGETSKAAVLVGVAAGSGGRRGRAATRVLAVVDLILRSVAVVATVGSAIAMGTTNQTLPFFTXFLRFKAQYSDLPTLTY

SEQ ID NO: 274259 - protein, 243 aa, Zea mays
  Clone ID: MRT4577_181713C.1.pep
GSGLPASSAPLLPSPSIALTRSHSHPRRLAVSAAEPLERRPRQELATPRPGLGAAPPRPHETAELDAEAALGGESAEERNRFLVLRLYEALNARDARRAQELLAPDLEWWFHGPPARQHMMRLLTGALDHRGFVFSPRSVDAFGSTVVAEGADDARQLYWVHAWTVGPHGVITQLREYFNTDLTLLSGQPDVVAGAAPPKQKDAASSSSSPSAAAPAAGPKCLWQSRRADSAHKSLPGLVLAI

SEQ ID NO: 274260 - protein, 137 aa, Zea mays
  Clone ID: MRT4577_181714C.1.pep
PAGSGYTAGRVRDRWHRRTTISLPLLLLQLRMLLIALSPAAPDARIHNRRGLCHEPAKRVLQRKLRTCRGSFPSRETHILIGEGIVPVRGQTIREAYLMMHYAGRVCLSDIHIARQSSAIPACRGLFQHAPLLSGHQ

SEQ ID NO: 274261 - protein, 200 aa, Zea mays
  Clone ID: MRT4577_181715C.1.pep
MGEPTRQELAEAALAGESAEQRNRFLVLRLYEALGSRDARRARKLLAPDLEWWFHGPPTRQHMMRLLTGADHQRHMSGGGFAFSPRSVDAFGSTVVAEGGADDARQLYWVHAWTVGPDGVITQLREYFNTDLTVTLLAGAASAKKAAPPKQQQDAASSSTSSSSPPSAASSSAAAGSRCLWQSRRADSAHKSLPGLVLAI

SEQ ID NO: 274262 - protein, 60 aa, Zea mays
  Clone ID: MRT4577_181716C.1.pep
VTETRVVSHRLRHCRYQRHLIHLHSGRVRVGVYIYRVGALDNICYRSDSTANRRMICPSF

SEQ ID NO: 274263 - protein, 174 aa, Zea mays
  unsure (1)..(174): unsure at all Xaa locations
  Clone ID: MRT4577_181717C.1.pep
TPKGDWDQQGRPGPSLLSPTSPSLSLPSLASYPEQPLPVADPAIPCXRDARSSPRPKQPGPXCSSRPPYTVPCAPDPAHAAPQPDAXPTAARQPRRAEPPFHAQVPDAQHPKPPRPEPRPGAPXEPDRRPTSXKQGPTRAEPPRSPRPFVFVLLELYYDRFSFPITPSLHQWCL

SEQ ID NO: 274264 - protein, 140 aa, Zea mays
  unsure (1)..(140): unsure at all Xaa locations
  Clone ID: MRT4577_181718C.1.pep
HGRKDIEVSRRPEAGELSGXDYCEPXSAPLIDAQELTQWTLYRAVIAECIATLFFLYITVATVIGYKHQTYALASGPDAPCEAVILLXMSWHLQXKXLILLYCTACIYGYHTDPNRDGEHVLISKTRPRHFGSLCCRSRA

SEQ ID NO: 274265 - protein, 272 aa, Zea mays
  Clone ID: MRT4577_181719C.1.pep
MATVGQSGALRRVTVHYANSPTGSTVAEVSFDDLDDELLLFVLADLLPGQEGLHQSILEGTYNNQENHMRGAAPSAPYGYSRPEEYRAESSTAAAAATGSRNSGMDEAQIASDFEYAKQLQQEMEDLSVDEDDNDISCVPSPSDSDDEHEHHDEEEEAEEDGDGGWNHDDPDNMTYEQGQALVESVGTEYRGLSDELISYLQPWKYKAVKASGLFSRKTNHEDCPICLSTFRNRETMITLPCRHHYHAACVTRWLKVNKTCPVCKYELFGPS

SEQ ID NO: 274266 - protein, 115 aa, Zea mays
  Clone ID: MRT4577_18171C.1.pep
SKKPRVPLLGKKCFGHQSPIPGFTLTKRGFQKKGVCRFPGDLSPQIWTRPKFKARSNSKTFFRGNLLFQPFLPKCKRLTPAFGLDPVKRPPKTKSQESPVGPFKRGLLDFLARKV

SEQ ID NO: 274267 - protein, 103 aa, Zea mays
  Clone ID: MRT4577_181720C.1.pep
KTDPVCVRPPAHEAGTLPGAIEDMSAAADDAEHATPSSSKAHARDTAEHAVALLFLLELNDYHGVDPGLHGAQGCGRSAMEYVPPVTGAHHPMSDCHRNSDDS

SEQ ID NO: 274268 - protein, 87 aa, Zea mays
  Clone ID: MRT4577_181721C.1.pep
DHASGMSSLCMLSISSTPHVPHGCIRRFIDPDSYRSRSYLVCQSHLPSGPLSSVCFFVGRIVLFLTFFILLSFYLFTILNYYHIIFL

SEQ ID NO: 274269 - protein, 59 aa, Zea mays
  Clone ID: MRT4577_181722C.1.pep
MVFSGLFGCSCPICLSTFRNRETMITLPCRHHYHAACVTRWLKVNKTCPVCKYELFGPS

SEQ ID NO: 274270 - protein, 53 aa, Zea mays
  Clone ID: MRT4577_181723C.1.pep
WLSFTPSQGCPPRFHRTSRSRSSITSAPQRPTCNICFSSGTLYCIACYAHPHR

SEQ ID NO: 274271 - protein, 139 aa, Zea mays
  Clone ID: MRT4577_181724C.1.pep
MELPSGSHGVRLPALRSSLIPSSCAASALESLSAMAVPLCLGSSFCAPSSLKATLRLLLARILARRPRPRPGPYGALGPCSSLCSASNASLRRGFLPPSLQLSALALSPPCSLSGVAQRGSADGRESLFVAVPTSLSQP

SEQ ID NO: 274272 - protein, 134 aa, Zea mays
  Clone ID: MRT4577_181725C.1.pep
NFFFFFFFFFFFFFFFFFYFSFFFSVRLILFFFFSPGFSPSLRGGGGGHPLSTLNVNSLPPETRALPGQQQAGQRGPRGPQRGKPPARGTPPPRRPWPPQGPGESQPFPPIPPPPPTPPVPSPCRAVARSPLPP

SEQ ID NO: 274273 - protein, 106 aa, Zea mays
  Clone ID: MRT4577_181726C.1.pep
SCNMKKKPPVLLPIVITKGSCAIPYQIPFTALLNLCFDSWSILQWLLAVHNTQILLSVFLAILALLLGGFCAYHAHLCLTNTTTNEVRLSDLEPLKGRPIFFPQLA

SEQ ID NO: 274274 - protein, 62 aa, Zea mays
  Clone ID: MRT4577_181727C.1.pep
SYKIASVHSSRLNLTSARMGNHSLCTVPPNMNLLSGTLQTPDLKNLDDTKLIGLAPNLRFAR

SEQ ID NO: 274275 - protein, 120 aa, Zea mays
  Clone ID: MRT4577_181728C.1.pep
YTAPLLEFFFFFFFFFFFFFFFFFFFFFFFFFFFFFWPTQGRNNRGVVPKGTLKGGPWVLAHKKWGSPQIPTGPNSIFKTPNKMENGFSRLQGYHTPGGGNVVIAPPASGVKLGPPILFF

SEQ ID NO: 274276 - protein, 56 aa, Zea mays
  Clone ID: MRT4577_181729C.1.pep
ILNLLPDPHAFSLFLTPQRGSTPPYPTIGPKKKIPPTRPKPGWGMKKRGQPPTILN

SEQ ID NO: 274277 - protein, 64 aa, Zea mays
  Clone ID: MRT4577_18172C.1.pep
PLVRCRVSLVAGGTTICVGGKIDPITFTRKPLRTTGTRPRLTAEIAQIFGDKSKHHMTFYLETN

SEQ ID NO: 274278 - protein, 112 aa, Zea mays
  unsure (1)..(112): unsure at all Xaa locations
  Clone ID: MRT4577_181730C.1.pep
STRTHTLDHTRSSTRDPSXRGVNAFVRHIKNVIIHATPVIFNTLYQPYREGAYYLHIYHYKLNMGTHTAVYHXLSLNIPDYYTPTQLMKPKAKNETYLDAVITIPNGTLFTM

SEQ ID NO: 274279 - protein, 48 aa, Zea mays
  Clone ID: MRT4577_181731C.1.pep
LWVTRASHRHTYFFLHPYPETNQSLLRYKLCAYQQVILDLGTCHFTTR

SEQ ID NO: 274280 - protein, 30 aa, Zea mays
  unsure (1)..(30): unsure at all Xaa locations
  Clone ID: MRT4577_181732C.1.pep
PTSARLASLFVGSSSVIRAHFESYPSSDXP

SEQ ID NO: 274281 - protein, 63 aa, Zea mays
  Clone ID: MRT4577_181733C.1.pep
KENRGFLISIGQELVKKPVGRVNIAPGRFESCAGGGPNAQWLVVFAKQFFLGGKLRKSNFNSN

SEQ ID NO: 274282 - protein, 104 aa, Zea mays
  Clone ID: MRT4577_181734C.1.pep
SRFFILRPLFFLFLFFAPALGVLAHSVWLAFPGCPGSSSRRAFALSLCLLVPCPLFLPLGLCCRGLSLWSFSLPLPMLDVSRSPSRLAFSLFICASHFFLLELL

SEQ ID NO: 274283 - protein, 246 aa, Zea mays
  Clone ID: MRT4577_181735C.1.pep
LWVPSGSRVEYERQVYALDPSQILLRDSKLRNTAFIYGVVIFTGHDSKVMQNSTESPSKRSRIEEKMDLIIYILFTVLVLISLISSIGFAVRIKLDLPRWWYLQPEKSNKLDDPSRPALSGIFHLITALILYGYLIPVSLYVSIELVKVLQAHFINQDIHMFDEDTGNTAQARTSNLNEELGQVHTILSDKTGTLTCNQMDFLKCSVAGVSYGVGSSEVERAAAKHMASGADDHDIPLPRYMGGEQ

SEQ ID NO: 274284 - protein, 88 aa, Zea mays
  Clone ID: MRT4577_181737C.1.pep
AAHGSRCGQPDPWGRPEAEGPAVGARTFNQAWLPRRGELRRGSLSPPVGDPLSREWPKRKMAGEMVLVGRMWHSWAGGLRRLGGDGLK

SEQ ID NO: 274285 - protein, 86 aa, Zea mays
  Clone ID: MRT4577_181738C.1.pep
RPLFFCILNFTLCYVPGILVKEENPFLMHGLRDRTRWGDTVYKHEGEISIERWIYVYKGEENTTQICGVTALYGESPTIGLRVSLT

SEQ ID NO: 274286 - protein, 73 aa, Zea mays
  Clone ID: MRT4577_181739C.1.pep
SALHTTFYLLFFFSSSPICIYHHLLEVSLASSNMERVPATVVSVVAAPEAAHALLHPYLYIQPNTSYMTTGES

SEQ ID NO: 274287 - protein, 43 aa, Zea mays
  Clone ID: MRT4577_18173C.1.pep
RFHRSSYLLLRRRQAEFESPLPPRVVPVLLGGTRASDRLRNPA

SEQ ID NO: 274288 - protein, 131 aa, Zea mays
  Clone ID: MRT4577_181740C.1.pep
FIHDFNMPTLLEVSLASSNMERVPATVVSVVVAPEAAHAERPAHLHHGILGGSSGSRTEEDLQSRIQSKGRKVAGIGSDVGSGLGGGGSTQRLESEKRDRRRRLARVVAHAEGGKGIQSGSERAEVIVEHR

SEQ ID NO: 274289 - protein, 86 aa, Zea mays
  Clone ID: MRT4577_181741C.1.pep
GGEKPTPSRAPKVNLNRHIHKNGALSLNGSSSKRKPLKKVPPFFGEQGSPHGSQQGGRRNWRKTPPPPGGEGHYGSSGRSGMEWGG

SEQ ID NO: 274290 - protein, 82 aa, Zea mays
  Clone ID: MRT4577_181742C.1.pep
GRGAEHRAGALASVVVGAGGSEALQAEPVRAGAMGRLLLMVQGGCSERAKRKAQHLLKLLRSAWPSADCVANSDDFLQHYHY

SEQ ID NO: 274291 - protein, 74 aa, Zea mays
  unsure (1)..(74): unsure at all Xaa locations
  Clone ID: MRT4577_181743C.1.pep
RLGWGFXSWSPPLWFRLLLVGVFRLLGSGGRXAAGAXPLALXXQRGQXXPRSGSXLLESAADSRXFRVPWGPGV

SEQ ID NO: 274292 - protein, 78 aa, Zea mays
  unsure (1)..(78): unsure at all Xaa locations
  Clone ID: MRT4577_181744C.1.pep
MVGSLVGKKIVSVTGNAKKLEEVVQILGDKFPCTLVAQRIDLPEYQGEPDEISMQXCQEAVRQVQGPVLVEDXCLCIN

SEQ ID NO: 274293 - protein, 67 aa, Zea mays
  Clone ID: MRT4577_181745C.1.pep
LPGPQISLGLLCARFLPLFILLPKRWPLDSSPCIFSPLFFRGPPLFLHPWFWSVCHAFGLWVSFLIG

SEQ ID NO: 274294 - protein, 63 aa, Zea mays
  Clone ID: MRT4577_181746C.1.pep
MTPMEAGPTTMNTEQELVKKAKKVMKPGHGGGDGNQACLLLPLSKRSKGISSMFFSVRNGHNF

SEQ ID NO: 274295 - protein, 129 aa, Zea mays
  unsure (1)..(129): unsure at all Xaa locations
  Clone ID: MRT4577_181747C.1.pep
MALHQPLGAGRGRAKKGSXAGRKXVGGPREEVSXRGSVIGPGLQFPVXGVRXRYLKKGXRYAQXXVGTPAXXVYLXPPSLEYXLAAEVXLELAGNAARDNKKTRIIPRRVLLAIRNDEELGKLLSGVAI

SEQ ID NO: 274296 - protein, 59 aa, Zea mays
  unsure (1)..(59): unsure at all Xaa locations
  Clone ID: MRT4577_181748C.1.pep
KKKYKKKKKKRKKKNKKKRXKNIKKKKKKNKKKKKKNKRKKNKKSYFXRNNRKKKKIKK

SEQ ID NO: 274297 - protein, 75 aa, Zea mays
  unsure (1)..(75): unsure at all Xaa locations
  Clone ID: MRT4577_181749C.1.pep
DAVGRRIMMTYGEAVKYKSLLDAFQQFLKKEGXPKSVFKGGGANIVRAMAGAGVLSGXDELQILFFGKKSGFAGA

SEQ ID NO: 274298 - protein, 66 aa, Zea mays
  Clone ID: MRT4577_18174C.1.pep
MTNRIYAIIKRLAISTSVANATLLPQCSQAPIATLLHPYLPSIIASVCENPALQPYRLQQAIAASN

SEQ ID NO: 274299 - protein, 39 aa, Zea mays
  Clone ID: MRT4577_181750C.1.pep
MASLARVCSLLLVGVAVVLLLPGTYGWHESNCPPGHGGG

SEQ ID NO: 274300 - protein, 84 aa, Zea mays
  Clone ID: MRT4577_181751C.1.pep
PSMLLGASMALMLCGSVTFMLGFFLMPWVVGLGFLFLFVGFITNLSGIWRDIILWPSVACSASDSPKEAPSPWHMFSKPSSMST

SEQ ID NO: 274301 - protein, 102 aa, Zea mays
  Clone ID: MRT4577_181752C.1.pep
YGGRVGPLLPRHVTPAGVASMLLGASMALMLCGSVTFMLGFFLMPWVVGLGFLFLFVGFITNLSGIWRDIILWPSVACSASDSPKEAPSPWHMFSKPSSMST

SEQ ID NO: 274302 - protein, 59 aa, Zea mays
  Clone ID: MRT4577_181753C.1.pep
MLLLSSMFLLLMQAVVLPLQMAGLSGHRTAKRTFSKAGGDIKVKAGTEVYNPLRTTILL

SEQ ID NO: 274303 - protein, 81 aa, Zea mays
  unsure (1)..(81): unsure at all Xaa locations
  Clone ID: MRT4577_181754C.1.pep
AFRVFDXGPXGFISAAELRHVMTNLGEKLTDEEVDEMIREADVDGDGQINYEEFVKVMLGGVVMGTWPSEERSPLSMNELK

SEQ ID NO: 274304 - protein, 131 aa, Zea mays
  Clone ID: MRT4577_181755C.1.pep
MRPASDAHQSRLLYELCALLLTVLRASPDDGAVARPLLPRHVTPAGVASMLLGASMALMLCGSVTFMLGFFLMPWVVGLGFLFLFVGFITNLSGIWRDIILWPSVACSASDSPKEAPSPWHMFSKPSSMST

SEQ ID NO: 274305 - protein, 128 aa, Zea mays
  Clone ID: MRT4577_181756C.1.pep
MADQLTDEQIAEFKEAFSLFDKDGDGCITTKELGTVMRSLGQNPTEAEQNLMARKMKDTDSEEELKEAFRVFDKDQNGFISAAELRHVMTNLGEKLTDEEVDEMIREADVDGDGQINYEEFVKVMMAK

SEQ ID NO: 274306 - protein, 183 aa, Zea mays
  Clone ID: MRT4577_181757C.1.pep
MALSSSRAPLLPLLCLLLTVVAAAKHPKQEKPTPAALAPVVTLEGCPDKCGNVSIPYPFGTKDGCFRPGFFVVCNDTFDPPRPFINSSLALGTDDTRTQIVVEDLYYLTAEDGMPETTPTRSAWPIELAGVSLSDAKARLLGAFSYECRLNETHHSVRRQRINFGVYRSPFLLSDADNVLMGI

SEQ ID NO: 274307 - protein, 80 aa, Zea mays
  Clone ID: MRT4577_181758C.1.pep
MADQLTDEQIAEFKEELKEAFRVFDKDQNGFISAAELRHVMTNLGEKLTDEEVDEMIREADVDGDGQINYEEFVKVMMAK

SEQ ID NO: 274308 - protein, 118 aa, Zea mays
  unsure (1)..(118): unsure at all Xaa locations
  Clone ID: MRT4577_181759C.1.pep
MADQLTDEQIAEFKEAFSLFDKDGDGCITTKELGTVMRSLGQNPTEXDTDSEEELKEAFRVFDKDQNGFISAAELRHVMTNLGEKLTDEEVDEMIREADVDGDGQINYEEFVKVMMAK

SEQ ID NO: 274309 - protein, 119 aa, Zea mays
  unsure (1)..(119): unsure at all Xaa locations
  Clone ID: MRT4577_18175C.1.pep
SGHNLSGAAMPNCHCTEEDLSRRSRVRSPLYVLARPSSCWSPQVSDSGLRYPGPDVLPGPSSAGCTXTGTHATESPRVEPRRPSGETSRLNPRATYLFRDRLVCRICLLHVRSSQGDLR

SEQ ID NO: 274310 - protein, 138 aa, Zea mays
  Clone ID: MRT4577_181760C.1.pep
AVVTTQSTRAFTRDGVLRTDVKTPSKARATVAHPMSEMTTVGNTRKAITPNAARSSKLETKSNNYRLKGPSALDSHSTRSNRMDLQVSGKQKSSSVNLPPRKIFSSTAGEPSVGTIFRSKKKKKKKKKSTLRCYHCLR

SEQ ID NO: 274311 - protein, 193 aa, Zea mays
  unsure (1)..(193): unsure at all Xaa locations
  Clone ID: MRT4577_181761C.1.pep
AIYNLXTVLYGLAEDTMRSGKPDVSPNELYSQSAIYVAAAHALKPNYSVYRSALRLVRSMLPLPYLKVGYLTAPPANNSIAPHKDWERSQFILNHEGLQQVDASDQPPSQSPGHLDRGRKPVRINIADIVSVSACADLTLPSGAGLCIETISGPTFLVADSWEALESWLDAIRLVYTIFARGKSDVLAGIITG

SEQ ID NO: 274312 - protein, 47 aa, Zea mays
  Clone ID: MRT4577_181762C.1.pep
YDLVVVDGVHVHGRRAADEAIVIYADVVYVVVLKSRLRLAVGGSLCG

SEQ ID NO: 274313 - protein, 225 aa, Zea mays
  unsure (1)..(225): unsure at all Xaa locations
  Clone ID: MRT4577_181763C.1.pep
AGPFIESSRESVQRTEVEQAEEEQATRGXLRDARHKRRATXGKQKGGRKKRKXAAGRQPANTKXXSNKTXRRARGRGGNXKGRAPRXDTGNHPGGXEAGTRKTXXXDXXXKAXNXERGRTQTXXKXAXAQXDAAPXKQGXPTHXGXDXXRKKKTPAAKKXKAEGQEXEAAAEETKKSNHXTRKXEKRKEGXTPDPHIEEQFGSGRLLACISFRPGQCGRADGYIP

SEQ ID NO: 274314 - protein, 255 aa, Zea mays
  Clone ID: MRT4577_181764C.1.pep
MADQLTDEQIAEFKEAFSLFDKDGDGCITTKELGTVMRSLGQNPTEAELQDMINEVDADGNGTIDFPEFLNLMARKMKDTDSEEELKEAFRVFDKGQNGFISAAELRHVMTNLGEKLTDEEVDEMIREADVDGDGQITDEQIAEFKEAFSLFDKDGDGCITTKELGTVMRSLGQNPTEAELQDMINEVDADGNGNSTSDTWSLLIVMLSCIIAPAVLLELLGFVVSSYFQGVLDLLCESIKKKKKKKKKKKKGPP

SEQ ID NO: 274315 - protein, 149 aa, Zea mays
  Clone ID: MRT4577_181765C.1.pep
MADQLTDEQIAEFKEAFSLFDKDGDGCITTKELGTVMRSLGQNPTEAELQDMINEVDADGNGTIDFPEFLNLMARKMKDTDSEEELKEAFRVFDKDQNGFISAAELRHVMTNLGEKLTDEEVDEMIREADVDGDGQINYEEFVKVMMAK

SEQ ID NO: 274316 - protein, 149 aa, Zea mays; identical to SEQ ID NO: 274315
  Clone ID: MRT4577_181766C.1.pep

SEQ ID NO: 274317 - protein, 42 aa, Zea mays
  Clone ID: MRT4577_181767C.1.pep
NRGLAYSSRDEERRVNGVRARFMRSTRLPTSHTRQPHTEARV

SEQ ID NO: 274318 - protein, 149 aa, Zea mays
  Clone ID: MRT4577_181768C.1.pep
MADQLTDEQIAEFKEAFSLFDKDGDGCITTKELGTVMRSLGQNPTEAELQDMINEVDADGNGTIDFPEFLNLMARKMKDTDSEEELKEAFRVFDKDQNGFISAAELRHVMTNLGEKLTDEEVDEMIREADVDGDGQINYDEFVKVMMAK

SEQ ID NO: 274319 - protein, 66 aa, Zea mays
  Clone ID: MRT4577_181769C.1.pep
RQQFLILLMLPTSLNISPTIYLTIIKLFTIITNYISRNSYFIHPKHSNSVEYFKQMDEYVKVIDKT

SEQ ID NO: 274320 - protein, 50 aa, Zea mays
  Clone ID: MRT4577_18176C.1.pep
QVLQKVNFRPFIFGPSKYPPTAVQTMIQTARDHEALSSHCVNTRSVVTTG

SEQ ID NO: 274321 - protein, 42 aa, Zea mays
  Clone ID: MRT4577_181770C.1.pep
MAAESFLITSESENEGDPNKLCDQVSDAMLDASLAQEPRQKR

SEQ ID NO: 274322 - protein, 78 aa, Zea mays
  Clone ID: MRT4577_181771C.1.pep
VTSLARTSSQRTRTRPPSSSSRSLQSGYITRAPSHPPLHSVVVVSSFCLLWGERHTHSDTDLVHTLARWSSNEHAWRC

SEQ ID NO: 274323 - protein, 68 aa, Zea mays
  Clone ID: MRT4577_181772C.1.pep
TTKTELLTFVRYHLLKSPMFYKRILRRNYIFSGIKQKFNSGCTKKRILSYLFKSKEFRFWIEYFSILR

SEQ ID NO: 274324 - protein, 149 aa, Zea mays
  unsure (1)..(149): unsure at all Xaa locations
  Clone ID: MRT4577_181773C.1.pep
IAKSYGKLKKLRFLGLSGNNLGGAIPAELFEMSALEQLIIGSNEFTGTIPAAIGNLANLQYLDLAIGKLEGPIPPEFGRLSYLNTVYLYKNNIGGPIPREIGNLTSWVMLDISDNTLTGTFPVELXQLANLQLLXLMCNRLRGGIPAAI

SEQ ID NO: 274325 - protein, 96 aa, Zea mays
  unsure (1)..(96): unsure at all Xaa locations
  Clone ID: MRT4577_181774C.1.pep
PRPSRPNKAASGGKSGERSRRPGEEKRRGKGXDDKGGXAXPXPGGKDXRXTXGSGGGRKHXXXGXGEHSQXSPSTXGRATTPNGHENRRXNSPSGA

SEQ ID NO: 274326 - protein, 53 aa, Zea mays
  Clone ID: MRT4577_181775C.1.pep
PQKVPWRGQLVFPPGPFIPFLKGPGVKNKPWGKTNFPGHFFLGLDFSGPPNFF

SEQ ID NO: 274327 - protein, 45 aa, Zea mays
  unsure (1)..(45): unsure at all Xaa locations
  Clone ID: MRT4577_181776C.1.pep
RIVSHTRLAXGGGLKIFLTSRHHHSLPALGLPKMSLHFRYYHTLY

SEQ ID NO: 274328 - protein, 64 aa, Zea mays
  unsure (1)..(64): unsure at all Xaa locations
  Clone ID: MRT4577_181777C.1.pep
TQKFFFIFNGRIYKVSRFDDCXNVYPLSIFNVTVETYFLVVEGATVARFCNEWIFFNYFFKVFF

SEQ ID NO: 274329 - protein, 110 aa, Zea mays
  Clone ID: MRT4577_181778C.1.pep
DLYMTFYLASARGSLSHDEMPQAGTELFMGFLFYIYNAINNFLSDWDAEGSMYATNTIRGRRTRVGLGYAYVPDLFAQWNAHYGCLICLIHVKHACLIDALHYMEARILG

SEQ ID NO: 274330 - protein, 98 aa, Zea mays
  Clone ID: MRT4577_181779C.1.pep
QHGGGGGVFFCCPAGGFFEGKTKGGTFLGHNKVWEGENMGRVLAGLREGKGQGPIISGRTGGQKGGQVVSAHVEARGGGPIHHVRRGQQRGLPWGHNV

SEQ ID NO: 274331 - protein, 141 aa, Zea mays
  Clone ID: MRT4577_18177C.1.pep
TGSGGVVVDSGTAISRFARDAYAAVRDTFVSHAAAAGMRRLRNKFSVFDTCYDLHGNGPGTGARVPSIVLHFAAAADMALPQANYLIPVVGGDRRTYFCLGLQAADDDLNVLGNVQQQGFGVVFDVERGMIGFTPNGCSGE

SEQ ID NO: 274332 - protein, 185 aa, Zea mays
  Clone ID: MRT4577_181780C.1.pep
MSTADAASPALAPDGDAPAGEGLALAQFAAGCFWSVELVYQRLPGVARTEVGYSQGHRHAPTYRDVCGNGTGHAEVVRVHYDPNACPYDVLLDVFWAKHNPTTLNRQGNDVGTQYRSGIYYYTAEQETLARESLAAKQKEWQDAIVTEVLPARRFYPAEEYHQQYLEKGGQSAKKGCSDPIRCYG

SEQ ID NO: 274333 - protein, 86 aa, Zea mays
  unsure (1)..(86): unsure at all Xaa locations
  Clone ID: MRT4577_181781C.1.pep
SFRTAPDAVGLGLAQDGIGGXHAAYGNLILLHQPINAMEFYIYXQLIFGYRLTTTRALDHTKTARIGASADAITDALATPLDVMKT

SEQ ID NO: 274334 - protein, 154 aa, Zea mays
  unsure (1)..(154): unsure at all Xaa locations
  Clone ID: MRT4577_181782C.1.pep
ARNSARAGLSPPVLFATSSSTKKEDSFFLMLAFSHGTLRLTHDEAQDVHLKPTLPAFVHQADAIHADRNRTKAKADHLDKIQKPFGLPTEHAQRVSKGFTTTKXSTATEASAARWQNCVQDVRGLKEAHFQLHSWMAEPLTESIYSTTAEELLP

SEQ ID NO: 274335 - protein, 94 aa, Zea mays
  Clone ID: MRT4577_181783C.1.pep
PPGTRPSFFSPARFFSPTTRRGFPPKSWPIKPLVARGGPRNVLNPNPLSIFKRGVPVLLTNSPILLVGNFGGSWGISWGGPGVRENSFEGTPLG

SEQ ID NO: 274336 - protein, 51 aa, Zea mays
  Clone ID: MRT4577_181784C.1.pep
YFRYVNKKFSNQYKATIGADFLTKEVQFEDRLFTLQVRLVPLSICCAVLSE

SEQ ID NO: 274337 - protein, 27 aa, Zea mays
  Clone ID: MRT4577_181785C.1.pep
GVIGKTTRPDDRFLGRHYSSAAYIMPL

SEQ ID NO: 274338 - protein, 42 aa, Zea mays
  Clone ID: MRT4577_181786C.1.pep
KKKKKKKKKKKKKKKKKKKKKKKNFFKKKKKNKKKKKKNKKV

SEQ ID NO: 274339 - protein, 72 aa, Zea mays
  unsure (1)..(72): unsure at all Xaa locations
  Clone ID: MRT4577_181787C.1.pep
MGYALVFSLPCIFLSILLGFNCYLLGKHKDQQEMLTAVHTHIYRTPLPPPVVNXPPXTPEPFHSKKQWSEAV

SEQ ID NO: 274340 - protein, 206 aa, Zea mays
  Clone ID: MRT4577_181788C.1.pep
MEPIPLLTPYKMGQFDLAHRVVLAPLTRQRSYGNVPQSHAAVYYSQRATAGGLLIAEATGVSDTAQGYNDTPGIWTAEHVEAWKPIVAAVHPKGALFFCQIWHVGRVSTFELQPGGAAPLSSTEKGVGPQMSFDGHREEFSPPRRLTVEEIPAIVDDFRKAARNAIDAGFDGVEIHGANGYIIEQFLKDSANDRIDEYGGSLRNRC

SEQ ID NO: 274341 - protein, 65 aa, Zea mays
  Clone ID: MRT4577_181789C.1.pep
ARPRPWFCPVVIPPETEMQRLLFEFPWHMYRSATNSSPAPQQLAPCHRLIAKKVTMISCLMFKKE

SEQ ID NO: 274342 - protein, 78 aa, Zea mays
  Clone ID: MRT4577_18178C.1.pep
PSFLEQNLAMGGVYKNRVSFTAGTWKRGTLEDTRGTSNLVDHQTRVKVQSNQQLLTLQKPTITIEEQRITGKWGHGTQ

SEQ ID NO: 274343 - protein, 68 aa, Zea mays
  Clone ID: MRT4577_181790C.1.pep
TKQNSGSTSAGTNNPTRRGGGLRSNGRPTNGAPSPAPAAATTTTSAPGGQTAAAMTSGRMPLPGGPSP

SEQ ID NO: 274344 - protein, 74 aa, Zea mays
  Clone ID: MRT4577_181791C.1.pep
PTPATLSSTSQLVTSLSSSKQALKHEIDAYYGHLVRILGLMGLQKFECKQQSVYLSVQLAYWFHFHSLLTRTII

SEQ ID NO: 274345 - protein, 67 aa, Zea mays
  Clone ID: MRT4577_181792C.1.pep
TLTIESPLCHVIIPLHDIQPSYMAPKSQFPRAQASVGSRSRSPPPPACLHVAIRTLFASDHEVSVLC

SEQ ID NO: 274346 - protein, 74 aa, Zea mays
  Clone ID: MRT4577_181793C.1.pep
KTPEKNWAPEILIGKRFPFKKFIGKQKKKKNPLKKPILLKTGGRKHCLGGWVFPKFKNSKRFIGPNFVKIKLIQ

SEQ ID NO: 274347 - protein, 143 aa, Zea mays
  unsure (1)..(143): unsure at all Xaa locations
  Clone ID: MRT4577_181794C.1.pep
MTTVNKLVLFPVLLRTTKAPVVISQRRRVTEEEKCLALRKAMEFKSKHPFTMQIMIESYVYVGFFMNIACEFVRESLPRTSKKMTLWDPLGKPWDVSYVXRRPRRRLLRXGWGRFALGNNLEKSDVCVFELFEEDNMRVHIYR

SEQ ID NO: 274348 - protein, 502 aa, Zea mays
  unsure (1)..(502): unsure at all Xaa locations
  Clone ID: MRT4577_181795C.1.pep
MRGRKRQQVSASSAAALVKGRESTKQKEKEARKEKEARETGREPAAKERQMRRKAGKEKETETGGEGKEPAKEKEVREEGKENDKHKEKAKTKANVCPQFFKVFFPEQSTERLRIPTMFNQHLKEQQPTGAVSLRGPSGNRWQAALASESESEAAWCFDQGWKEFVTDHSLRLGHFLVFTRDGPAQFSVAVFSSSGVIDPAALDARPTANGGAAVKLEEGEGVGVRGDVDAGGDTSSEVSLLPAEEGDGGATGRRTGATSGGAGGASEMSLVLREEGRGVTGKRARATTSDLPADASAPKKHSALAKKAGKRRPQAATSKDVSMIVHNPTFSLLDESKTFNKTQIRDKNVPRSGKFLLRTTKAPVVISQRRRVTEEEKCLALRKAMEFKSKHPFTMQIMIESYVYVGFFMNIACEFVRESLPRTSKKMTLWDPMGKPWDVSYVXRRPRRRLLRXGWGRFALGNNLEKSDVCVFELFEEDNMRVHIYRVVPEITPLLRASNKD

SEQ ID NO: 274349 - protein, 67 aa, Zea mays
  Clone ID: MRT4577_181796C.1.pep
KGIQSPSIPSGVGETKHTLIGICRSDQEHYIKNPRIWLVFLVGILAFYKVHKFISLMMRTHISFQLE

SEQ ID NO: 274350 - protein, 149 aa, Zea mays
  Clone ID: MRT4577_181797C.1.pep
MPTRFSQTRKHRGHVSAGKGRVGKHRKSPGGRGMAGGQHHHRTNIDKYHPGYFGKVGMRYFHKLQNQFWKPVINLDKLWSLIPAEQREKYLANKSSETAPVLDLLSFGYSKVLGKGRIPEVPIIVRARYFSKDAERKIKEAGGVVQLVA

SEQ ID NO: 274351 - protein, 99 aa, Zea mays
  Clone ID: MRT4577_181798C.1.pep
YVSSCTMLLLSPPTSHYEWALHLWSLQSGARVWRDPHHGIGMLLWNFQRMLCGEIDINRWLSTTCFGICCQLNLLTLHSRVVPVIGSLLLLCTLHFSLP

SEQ ID NO: 274352 - protein, 36 aa, Zea mays
  Clone ID: MRT4577_181799C.1.pep
KHVVQSISTQQEKETIAKCIADLKLLAKKAQAQPVM

SEQ ID NO: 274353 - protein, 108 aa, Zea mays
  Clone ID: MRT4577_18179C.1.pep
EVPRRVGCLNWLNCGLVWYMNEIYIACSNNTSTLSSRPCDTYSFCGSLLATLILCSMEMEILAQSWQSTNSMEDGLFYINNGVAFLLLCETKLAGGKKLTLSVYGHFP

SEQ ID NO: 274354 - protein, 123 aa, Zea mays
  unsure (1)..(123): unsure at all Xaa locations
  Clone ID: MRT4577_1817C.1.pep
LTISSGAGGFEETVXSSHILINHXGSLLKASLKDPYCRIIFSTTRGDSASLLLDLLNQILSGQANFSYLSARHSYCSSARLCWDLCTFFRMHMHKPFXDATYSLKVCELSYILDTYSXVHIIL

SEQ ID NO: 274355 - protein, 113 aa, Zea mays
  Clone ID: MRT4577_181801C.1.pep
SWCRDHNEGGRSDIPSIDGHRCRYWGRATGIILHALQLPLQLSALMRDSSSCLCEHGGRRAAWRGQPGTELDGLSSSYACGEHSGVSRQGRAHPWEPLLVMAMLVIRLIYLPQ

SEQ ID NO: 274356 - protein, 81 aa, Zea mays
  Clone ID: MRT4577_181802C.1.pep
YTPNRGPMPPFANPHYMSHPVPYGQYESQPPNVQKCLAPKKSFDSPPLPLYQDSPRTPPVPLKGLKPPGSQFFLFIGEICS

SEQ ID NO: 274357 - protein, 86 aa, Zea mays
  Clone ID: MRT4577_181803C.1.pep
RTGRRGFFGPIYFFKPPKKRGSTPLRVQMTRKFGGGKDPSFYSQVFKKGGGSPGQHPCGVAQKGHMWGNRPPPGEEPQPHLGHQGT

SEQ ID NO: 274358 - protein, 245 aa, Zea mays
  Clone ID: MRT4577_181804C.1.pep
MGGGAADEGQTSEDPRVDPGILDQRRRSSPRLLPSRDGFQEMASLPIPDELVAEIFLRLPTPGDVIRTSGACVSFRRLVAGRPFLRRFRKLHDPPLLGFLALTGAFFPVLPPSPSASAASAVALAADFSFSFLPGPARDWKVRDARGGRVLLSRSPLDNSLAVCDPLHRRYRLLPLIPEVEGWVPHSVENPYRESFLGDAEETAEETSFTGISIAHWGDKDKQGAFVFSSSTGQWRSTPWIGSFA

SEQ ID NO: 274359 - protein, 49 aa, Zea mays
  Clone ID: MRT4577_181805C.1.pep
TSIVKSRAWLPSSGFDYDPYESDMLVFYLTSFTAVSDDAASLARSMSFS

SEQ ID NO: 274360 - protein, 20 aa, Zea mays
  Clone ID: MRT4577_181806C.1.pep
ASAQPFFVLGLLVTALATSH

SEQ ID NO: 274361 - protein, 817 aa, Zea mays
  unsure (1)..(817): unsure at all Xaa locations
  Clone ID: MRT4577_181807C.1.pep
RTRGGDIDESSPRWLLKQEVPKVVKSINRQLREKSIKTKVGAFSVLKELVVVLPDCLADHFGSLVPGIEKALNDKSSTSNLKIEALVLTRLVMASHSPSVFHPYIKALSAPILSAIRDRYYKVTAEXLRXVGGELVRVLRPNLETTSVDFKPYIGPIYNAILGRLANQDQDQEVKECAISCMSLVVSTFGDGLERELPACLPILVDRMGNEITRLTAVKAFSVIANSPLRIDLSCVLDHVVSELTAFLRKANRALRQATLGTLNSLVVTYGGQIGSSSYETIIAELSTLISDMDLHMTALALELCCTIMVDRKSIQNVGLAVRDKVLPQALVLIRSALLQGQALQXLQRFFASLVQSANTSFDALLESLISAAKPSHSGSLAKQALSSIAKCVAVLCLAAGDQKCASTIEMLKGILKDDSTTNSAKQHMALLCLGEIGRRKDLSNHVQIENIVIESFQSPFEEIKSAASYALGNIAVGNLSKYLPFILDQIDNQQKKQYLLLHSLKEVIVRQSVDHTGQSELQDSNIEKILALLFNHCESEEEGVRNVVAECLGKISLIEPKKLVPALEVRTSSPAANTRATVAIAIKYSIVERPEKIDEIMYSKISTFLMLIKDSDRHVRRAAVLALSTAAHNKPNLIKGLLPEILPLLYDQTVIKQELIRTVDLGPFKHVVDDGLELRKAAFECVDTLLDSCLDQVNPSSFIVPFLLSGLGDHYDVKMPCHLILSKLADKCPSAVLAVLDSIVEPIEKTISHKPKGDAVKQEVDRNEDMIRSALRAISSLSRISGSDYSIRFKNLMNKITATPALAEKYNSVRGE

SEQ ID NO: 274362 - protein, 60 aa, Zea mays
  Clone ID: MRT4577_181808C.1.pep
FIDKGTPVPKKWGVPLALFGTLPGAQKYVLDKKGVVQYVYNTQFQPEKPIGETLKIFQPL

SEQ ID NO: 274363 - protein, 42 aa, Zea mays
  Clone ID: MRT4577_181809C.1.pep
GVVKLDNVVLAHKIEGIHFLSNPCNKISIILSMKLRRWKLIC

SEQ ID NO: 274364 - protein, 97 aa, Zea mays
  Clone ID: MRT4577_18180C.1.pep
MNRAQSILTMVPNQERHQPASMPTPTTTNRINVQSRGPPCLHTDEIDGSSSLFGDGDRGDYFTSADNHHYRDDLRDVGGHDGPFVAGDGGLLRTHKD

SEQ ID NO: 274365 - protein, 61 aa, Zea mays
  Clone ID: MRT4577_181810C.1.pep
TYLLSSSLCKPTPQPPSMMYFVQGVPMATTSAFLTLTVDMIPQRLSRPHCACSLLLAQYQE

SEQ ID NO: 274366 - protein, 88 aa, Zea mays
  Clone ID: MRT4577_181811C.1.pep
GTLEAGREPSRGRPGIRRSTFPQRITAPGPPFPCSLPHNPPRHAQAIPPKGQEQDAPYVIEPALPPHTQGSRISNNHLRVSTSSKMLH

SEQ ID NO: 274367 - protein, 67 aa, Zea mays
  Clone ID: MRT4577_181812C.1.pep
VDLPQHLKTEVSMQMVQSALSVPDPPGCPRFVGHAWIEGSLRQDIQLVMQWPPPLGSPGSCHPPVVH

SEQ ID NO: 274368 - protein, 37 aa, Zea mays
  Clone ID: MRT4577_181813C.1.pep
DRASAPRGRVHWLNGPARRQGGGLLGAPYPTAGVINP

SEQ ID NO: 274369 - protein, 56 aa, Zea mays
  Clone ID: MRT4577_181815C.1.pep
VSNQHATNDVRQINQYPRVVLYMIPQALMFCVLIRGLRLIAGSCYDDYFTLLWYAL

SEQ ID NO: 274370 - protein, 76 aa, Zea mays
  unsure (1)..(76): unsure at all Xaa locations
  Clone ID: MRT4577_181816C.1.pep
KKKRPPPPRHMSLDRGRQPRAGSLGPRSCXVVSTSFLFCFFFFFFFFFFLKQDSKSPRVLCVVTTAHERIXQISIT

SEQ ID NO: 274371 - protein, 111 aa, Zea mays
  Clone ID: MRT4577_181817C.1.pep
AGELKHISSSLFFLLAFNRSQQDMLPRQGMRSPMVSFHSHWHALLWYTRTFFGIIKMLKILALPNSQTLTWWETGSTYQRTKKVIIFQVNIMNHDVVILNMIKNWVLNTYT

SEQ ID NO: 274372 - protein, 442 aa, Zea mays
  unsure (1)..(442): unsure at all Xaa locations
  Clone ID: MRT4577_181818C.1.pep
MGNCIDTTARVDHSMNNAAYPSKVTSKTSLSSVPSTIKSNSSRSTLTLPSMRDRNELPTPRTEGEILSSSNLKAFTFNDLKNATKNFRPXDSLLGEGGFGHVYKGWIDEHTLAPSRPGSGMVVAVKKLKPEGFQGHKEWLTEVDYLGQLHHKNLVKLIGYCSDGDNRLLVYEFMPKGSLENHLFRRGADPLSWAIRLKVAIGAARGLSFLHDAENQVIYRDFKASNILLDSEFNAKLSDFGLAKAGPTGDKTHVSTQVMGTHGYAAPEYIATGRLSAKADVYSFGVVLLELLTGRRALDKSKPGFEQNLVDWARPHLGDKRRLYRIMDTKLGGQYPKKGANAIASIASQCICGDAKLRPPMSQVLEELEQLQDAKYGAPSPLVDIRKASHAAPKSPMSSTPKSPLSSTPKSPMRAQPAARPSPRRSLGAAAPLAGYRTAQVH

SEQ ID NO: 274373 - protein, 268 aa, Zea mays
  Clone ID: MRT4577_181819C.1.pep
MGNCMDKAVPVDNTSYQSKAGSKSISSSNPSTVKTGSTRSTWTVASYKDSRELPTPRTEGEILSSPNLKAFSFGDLRTASRNFRSDSLLGEGGFGYVFKGWIDEQTLAPSKPGSGMVVAIKKLKPEGFQGHKEWLTEVDYLGQLHHQNLVKLIGYCTDGDHRLLVYEYMPKGSLENHLFRRGADPLSWGTRLKVAIGAAKGLSFLHDAENQVIYRDFKASNILLDQEFNAKLSDFGLAKAGPTGDKTHVSTQVMGTHGYAAPEYIATG

SEQ ID NO: 274374 - protein, 42 aa, Zea mays
  Clone ID: MRT4577_18181C.1.pep
GILLVWQLQIYKFLKGISCLKASIALYPRSLIQTNTQNTEKS

SEQ ID NO: 274375 - protein, 218 aa, Zea mays
  Clone ID: MRT4577_181820C.1.pep
EENQESISDALKQLNEFEKKHPKPDDTMLKKAHEDMQSRLDYLRKQAEGYDDKGPVIDIVTWNDGDVWRVAVDTQTLEGNNDGGKLADFVPLTNYRLERKYAIFSKLDACSFVANVYNDGNLVSIVTDCSPHATHVAGIAAAFHPDEPLLNGVAPGAQLISCKIGDTRLGSMETGTGLVRALIAAVEHKCDLINMSYGEPTLLPDYGRFIDLDSNGIR

SEQ ID NO: 274376 - protein, 198 aa, Zea mays
  Clone ID: MRT4577_181821C.1.pep
ANRPPKVQSLQGLDGAQPLIREGKPARSVATEPRKQRARRSNLYCRLYPGYLKSQSKSRRPNPVSFSLELTNRAPLARIQAAALFFPFSLQVVEEPRPVMTHSQTHSWRREGKITLLAETAAPQQMSEELTPRGEARPLKGKHTALTGRPGRSRLGAAGSLDLALAGWLDGGEVRRRQMKQASKQTGGRSEADRHRPS

SEQ ID NO: 274377 - protein, 326 aa, Zea mays
  unsure (1)..(326): unsure at all Xaa locations
  Clone ID: MRT4577_181822C.1.pep
PTRPLVKLIGYCSDGDNRLVVYEFMPKGSLENHLFRXCASSLWLCFVKTQFLITFLFIPFNHAIFLLFRXGADPLSWAIRLKVAIGAARGLSFLHDAENQVIYRDFKASNILLDSEFNAKLSDFGLAKAGPTGDKTHVSTQVMGTHGYAAPEYIATGRLSAKADVYSFGVVLLELLTGRRALDKSKPGFEQNLVDWARPHLGDKRRLYRIMDTKLGGQYPKKGANAIASIASQCICGDAKLRPPMSQVLEELEQLQDAKYGAPSPLVDIRKASHAAPKSPMSSTPKSPLSSTPKSPMRAQPAARPSPRRSLGAAAPLAGYRTAQVH

SEQ ID NO: 274378 - protein, 68 aa, Zea mays
  Clone ID: MRT4577_181823C.1.pep
MRFAVANKAYIPVTLGAAIELKEQVAKPCSSAAKRGALRLSAAGKIGGGGGAEESLRMIMFLSCWGPS

SEQ ID NO: 274379 - protein, 49 aa, Zea mays
  Clone ID: MRT4577_181824C.1.pep
LDAENVVSSVMEVLLNDKFKQWLSSKCEQNIDGDHLLPKQYRNIIHTVA

SEQ ID NO: 274380 - protein, 129 aa, Zea mays
  unsure (1)..(129): unsure at all Xaa locations
  Clone ID: MRT4577_181825C.1.pep
QQWQPTNLRLLKLLDLSACAANATLTRHCSQGPIAXLLSPYLTSMIGGVGENPAVEPYRIQQGWEQSNIPLXTLAKKWTALSFVHTLRQTMRAHXLQQLWLPGINQRTLXNLSTYSHQKKKKKRPNKAQ

SEQ ID NO: 274381 - protein, 57 aa, Zea mays
  Clone ID: MRT4577_181826C.1.pep
LSLVRQRVRSWAVEPYITERTEDRNLCDHCVSTISFQQHVRPILHTVWYIRTHRQVQ

SEQ ID NO: 274382 - protein, 121 aa, Zea mays
  unsure (1)..(121): unsure at all Xaa locations
  Clone ID: MRT4577_181827C.1.pep
IPTPPAHAGXATWRRGKICRPVTCDRLLSTRPXRVPXNSVLWLSLPFSPPCRGGGRCRTHVRKRMSAAIPFESFAAKGWCFSFLQHVPXSGVSHQRTRCQVDPLSFGMRQNPSDLPEGKVP

SEQ ID NO: 274383 - protein, 68 aa, Zea mays
  Clone ID: MRT4577_181828C.1.pep
SSPNSLPCSTPTIVNYLNNRVWSQRLAEGQEETARPERSVSLGIFHDTLFFLYWCVEWYFLVCLSPNI

SEQ ID NO: 274384 - protein, 58 aa, Zea mays
  Clone ID: MRT4577_181829C.1.pep
SVQGAALFLYLTATTKKDHRAAGEGRVRRAACHSDAMGRGDAGHNQQHKAGRLWPLPP

SEQ ID NO: 274385 - protein, 78 aa, Zea mays
  unsure (1)..(78): unsure at all Xaa locations
  Clone ID: MRT4577_18182C.1.pep
PIXKPPLPKHFQFINPPPTTFFPPXNXPINPTQLILIXHSLTTPXFSLYXSXSYLSPPSXXITIXHKTPPPPPLXXFL

SEQ ID NO: 274386 - protein, 77 aa, Zea mays
  unsure (1)..(77): unsure at all Xaa locations
  Clone ID: MRT4577_181830C.1.pep
AANIKVYAYWPALFAKLLKKRNVQDLILSAASSRGAAPSAAASPGADAAAAAGPNDKEKKVKTKDQXDDHMSFNLLH

SEQ ID NO: 274387 - protein, 51 aa, Zea mays
  Clone ID: MRT4577_181831C.1.pep
SGHLSRLAIIQTQPHNKALEEQPFMVRVSSIPLWSENVSASGQVQRRREQG

SEQ ID NO: 274388 - protein, 60 aa, Zea mays
  Clone ID: MRT4577_181832C.1.pep
LVLLWSIYISVYCTCSFHGWISSSFPKRWLNWVASQFIFSFNSRFIYNICDVICKYSSLG

SEQ ID NO: 274389 - protein, 257 aa, Zea mays
  Clone ID: MRT4577_181833C.1.pep
MDPGAGAHYSARTAEEVFRDFRGRRAGMIKALTNDVEKFYQLCDPEKENLCLYGYPNETWEVTLPAEEVPPEIPEPALGINFARDGMNEKDWLALVAVHSDSWLLAVAFYFAARFGFDKEARRRLFNMINNLPTIFEVVTGVANKQNKEKGPNSTSKSNKTSSKMTSRPESHSKATKVAVPPKDDDDESGEEYEEEEERDNTLCGSCGTNDGKDEFWICCDSCERWYHGKCVKITPARAEHIKHYKCPDCNNKRAGA

SEQ ID NO: 274390 - protein, 62 aa, Zea mays
  Clone ID: MRT4577_181834C.1.pep
HHTWCNERVVGSAYIKGGGVEFFYILQEKEGPYKEVKALHLHKTKCTTYLCRCLVRMIRHAR

SEQ ID NO: 274391 - protein, 329 aa, Zea mays
  Clone ID: MRT4577_181835C.1.pep
MSSRMAGAALLRHLGPRLFAAEPVTGLAARGVMPAAARILPARMSSTAAEAAKEAAAPQQRQKPEAAAAAPEGQDKKAVVSYWGIEPRKLVKEDGTEWRWFCFRPWDTYRADTSIDMKKHHEPKALPDKLAYWLVKSLVVPKQLFFQRRHASHALLLETVAAVPGMVGGMLLHLRSLRRFEHSGGWIRALLEEAENERMHLMTFLEVAQPKWWERALVLAAQGVYFNAYFVAYLASPKFAHRFVGYLEEEAVHSYTEYLKDLEAGIIDNTPAPAIAIDYWRLPADARLKDVVAVVRADEAHHRDVNHFASDIHYQGMKLRDTPAPLGYH

SEQ ID NO: 274392 - protein, 79 aa, Zea mays
  Clone ID: MRT4577_181836C.1.pep
SSAPFPIKNWKGFVFKSSQQCLLFSGGGYKKNIGSGLFPKKKRKDPKVPFPFPSFFSVLKGCEVPFNQKTPIRIWKNWD

SEQ ID NO: 274393 - protein, 307 aa, Zea mays
  Clone ID: MRT4577_181837C.1.pep
MEEAAVARTTSETQVGDLPEVCLAQAIARTSPRDACRCAAVSPAFRVAADSDQVWRAFLPEQLEAAEDHLDSRRVSPPSQAAHPAATVRGLSKKDAYLSLCDAAGAVAVDGSGCRVWLERASGATCYALSARRLSLPWDDGEFSWRFTHHPRSRFAEVAELVDCTCLDIYGSLPLAALTPATVYAAFLVYGTAPEGAYRGLSYPDQETAVAVGGRVVARHAVCLRPDDAEARKFRGRGAGEEARRPSLRADGWEEMEMGRLRTPPVESGGGGGDVCVVQASFEVLGWYPKRGLVVEGIEFRALHDAS

SEQ ID NO: 274394 - protein, 61 aa, Zea mays
  Clone ID: MRT4577_181838C.1.pep
RGFTTNPWAPLVLTALRIFPLHSRIRSGFPGVKENNLLFPPLHTSKAASSRGSYLVFYCQG

SEQ ID NO: 274395 - protein, 95 aa, Zea mays
  Clone ID: MRT4577_181839C.1.pep
MPEQSQCSLQSRKQYAAAAQRVARGCRGCLACRRRRSFSWSRSISRTLRPGAAPEPRRNISPFVLALEAIVVEVSGDVAISRPLWRISWPLSRRS

SEQ ID NO: 274396 - protein, 123 aa, Zea mays
  unsure (1)..(123): unsure at all Xaa locations
  Clone ID: MRT4577_18183C.1.pep
PFVLPWWXWWSXXLWFLGPFGSLVLFLCGWLWSAVLFLLLALWLSLSACGLWSPLCVSCVLPLLFVLLVRPGPAPSWVSGPRLCXGXARGGPLALPLDQPRRCCGRLCASRALLCACVPRACS

SEQ ID NO: 274397 - protein, 88 aa, Zea mays
  Clone ID: MRT4577_181840C.1.pep
NSSPATSPTVDSPRTSSCASGTTLAPLMTAQLNYMISHCKMTITLVQTWSTCRNGSPADRFTLSMTMCLDYVHWDLTYNALTTMMAPD

SEQ ID NO: 274398 - protein, 182 aa, Zea mays
  unsure (1)..(182): unsure at all Xaa locations
  Clone ID: MRT4577_181841C.1.pep
MASTSCWLINRTTVRVEASAGVAAALPRRVQLLSCKALQQEPAADQRDRSGRDVLGLLGAVPPAGEAKVAPAAAQYGQQANAYRKHRANTEYMAHSRDRPYKLLDPVSRARSDERGXPYCLQRSSHYYGQLSNIADARTMIVHTYANINVRDYYSPDELLTCCEYMLLLQGYCAKINCEGMV

SEQ ID NO: 274399 - protein, 39 aa, Zea mays
  Clone ID: MRT4577_181842C.1.pep
GRPTRPNRLRQALVSDVHSALTDDLARLIVSYRDSPTCA

SEQ ID NO: 274400 - protein, 46 aa, Zea mays
  Clone ID: MRT4577_181843C.1.pep
LLLKNEREPVTELTRTCTENKRYMWFESDNAIAHTKMESREHAASS

SEQ ID NO: 274401 - protein, 427 aa, Zea mays
  unsure (1)..(427): unsure at all Xaa locations
  Clone ID: MRT4577_181844C.1.pep
KRRHAGRLETIRATAGQDPLPGRKVAPRRVTAVSWVKHYFADVPQEAVQAHFNRRMVFSECYDHKVSADSIRTQKHHLKKIKHNDAMEPGMRIHLPVSVAESDIKKRYETIPTATLHPNKDEIEYLRRLVIYRDSAILVLNKPPKVPMKGHLPVHNSMDVLAAAALSYGSEEGPKLVHRLDRESSGLILMGRTKESFTRLHWLLTSVNLARTSSQTWNKACEAYAQKYWALVIGTPKEREGVISAPISKVLLDDGKAERVILAHPSGIDGAQEAITEYRVMGPTINGCSWIELQPLTGRKHQLRVHCAEALGTPIVGDYKYGWFVHQTWKQNPQPDFEPFTGEPYKLRRPEGLEIQKGSVLSKVPLLHLHCREMVIPNIAKFLXAALEDGTKTAPHGPXEKPNLLRFVAPMPPHMKISWNIMSSYLV

SEQ ID NO: 274402 - protein, 239 aa, Zea mays
  unsure (1)..(239): unsure at all Xaa locations
  Clone ID: MRT4577_181845C.1.pep
VISAPISKVLLDDGKAERVILAHPSGIDGAQEAITEYRVMGPTINGCSWIELHPLTGRKHQXLIMFGFCLCEHNPPSSICLSFVLRNMENKFMSCLGMGIFNCKXTCSVCSGLQLRVHCAEALGTPIVGDYKYGWFVHQTWKQNPQPDFEPFTGEPYKLRRPEGLEIQKGSVLSKVPLLHLHCREMVIPNIAKFLXAALEDGTKTAPHGPXEKPNLLRFVAPMPPHMKISWNIMSSYLV

SEQ ID NO: 274403 - protein, 549 aa, Zea mays
  Clone ID: MRT4577_181846C.1.pep
MAGDPAAGVGGNAHPASGSKSSRSSTRHRQFRDRAKVRVDDLQEMFCGLQSARKESRSADAAVLEEQVHQMLREWRAELSVPSPASSLQNSQGNNREASDPPSDTLRLLQLAVPEEEDDASSKLLVPPSRQTHEHGQDSRMANTDQQCEAIDGGTAPAQHSLGQGVDGDCGEVSSVANAMFNHRMYYTDYELNIDDFLCGDGYKINISGSNEDQFNNLHGIGQLGHQQFDLPLDLPPTHSYADANNSEQNTGDVFVHMSDLLTTIWPSPSQYLGPKCALWDCGRPAGGTEDSGDYCNPYHAGLALNDDGLLGIRPVMRPRGIDLKDGPLFAALIAKVQGKNVGIPVCGGAATSKSPWNAPELFDLSLLEGESLREWLFFDTPRRAFESGNRKQRSLPDYGGRGWHESRKLVMKDFAGLKRSYYMDPQPSSSHEWHLFEYEINASDALALYRLEYKSSDPKKGAAKSKLASPLNEIRQRMGRLTADSPVENKRTARSKPKANQNQKDTNANTRPHVNTPNQVNAPNAYQTTQQGYSAEGSSFFWNPSDGT

SEQ ID NO: 274404 - protein, 139 aa, Zea mays
  Clone ID: MRT4577_181847C.1.pep
PVSLAARAGQVLVTVTASYVPAYVRCRTLSHTDASNRSVLNSVIPCHTVPCTRASVSAASRARRSPGPWRPLLARGLTCWPSRAPQEQQPPPRGPAHVDQQEQEPLACPRRAPREQQPLPRPQARPPRAPWHQQEPTQP

SEQ ID NO: 274405 - protein, 114 aa, Zea mays
  Clone ID: MRT4577_181848C.1.pep
MAGDPAAGVGGNAHPASGSKSSRSSTRHRQFRDRAKVRVDDLQEMFCGLRSARKESRSADAAVLEEQVHQMLREWRAELSVPSPASSLQASPPNPSPPPVPPFPFRLSCAVDWC

SEQ ID NO: 274406 - protein, 84 aa, Zea mays
  Clone ID: MRT4577_181849C.1.pep
RPGARVALTVSSAEKPSPAATTSAPTTASTCPPSPHQRAPAAPKRTGRSSLPSSPRKREQDRPRTRVPPSQRTTCCATPRRSRP

SEQ ID NO: 274407 - protein, 79 aa, Zea mays
  Clone ID: MRT4577_18184C.1.pep
QELHDLGKNAGTSLAPDNTNDFSVLEGMIALVFENPALQNYMLKQAAAARNIPLYPLLSHQSPAVCLVQPVVQTITAQQ

SEQ ID NO: 274408 - protein, 53 aa, Zea mays
  Clone ID: MRT4577_181850C.1.pep
ADQDSSDRSGSRCLPTVPEGSSIRAMPLVARFFLIPSDISNCLFFLATFLCLN

SEQ ID NO: 274409 - protein, 257 aa, Zea mays
  unsure (1)..(257): unsure at all Xaa locations
  Clone ID: MRT4577_181851C.1.pep
RGAATSKXPWNAPVLFDLSLLEGESLREWLFFDTPRRAFESGNRKQRSLPDYGGRGWHESRKLVMKDFAGLKRSYYMDPQPSSSHEWHLFEYEINASDALALYRLEYKSSDPKKGAAKSKLASPLNEIRQRMGRLTADSPVENKRTARSKPKANQNQKDTNANTRPHVNTPNQVNAPNAYQTTQQVNQMAFLNGNVVYGPHLPHSESVVYGPHLPHSENVVYGPHLPHSENVVYGPHLPQGYSAEGSSFFWNPSDGT

SEQ ID NO: 274410 - protein, 101 aa, Zea mays
  Clone ID: MRT4577_181852C.1.pep
METFPFLAVALPLEPLAPDTLLIGDRLLYVKLAPGDRYDVPRRTNLIRTAARVTMTYKERHNQEQLPHATAAAAQQRPPAKNPPLTHASDQEGQTDTLLRA

SEQ ID NO: 274411 - protein, 74 aa, Zea mays
  Clone ID: MRT4577_181853C.1.pep
VTGPPILSGGKTHLSTDNVSVFGNEKSQGFHRWAKLEKQEQPPPPPIKKATVVFDALFKLDKLKSLWVWAWTPG

SEQ ID NO: 274412 - protein, 102 aa, Zea mays
  Clone ID: MRT4577_181854C.1.pep
DRALPAGVLQTGPDAQRVPIVALASIGHAHLAGFRSSYQTEIGQTLDLLTAPQGNVDLVRFTEKRYKSIVKYKTAFYSFYLPIAAAMYMAGIDGEKEHANAK

SEQ ID NO: 274413 - protein, 86 aa, Zea mays
  Clone ID: MRT4577_181855C.1.pep
DPRAQPTRSAHAIRPASSARCVRRTRGVDISTLTVEYHVKTALANHSIGTMYSGIKKRLRPHTRRKHSKVKQKCLEHCYRAHNLDI

SEQ ID NO: 274414 - protein, 96 aa, Zea mays
  Clone ID: MRT4577_181856C.1.pep
GTDSHLAATARPHTRFARVARAYEETRLAVDPPDDREHERDVRAEYESWSSAAGRITQVHGQGSSDYFVTQTREHGRSTTKKVTQSTHTPVRQAAP

SEQ ID NO: 274415 - protein, 39 aa, Zea mays
  Clone ID: MRT4577_181857C.1.pep
FRIPCDVIRFHGVVQLIRRSRTRSRKKVTVSCLVSLKLL

SEQ ID NO: 274416 - protein, 93 aa, Zea mays
  unsure (1)..(93): unsure at all Xaa locations
  Clone ID: MRT4577_181858C.1.pep
MAGCTMAISSTAMASTTIKVGSSTEGRITMRKTVGXPKVAASSTPLYXPNRRKYLCPLSGEPTSYLTGESTRDYRCDTPXLSCNPDTFSKNTE

SEQ ID NO: 274417 - protein, 68 aa, Zea mays
  Clone ID: MRT4577_181859C.1.pep
KTAPMGIKNRRGGGWGGRKRAEKANTLPTKQDHLGDNTLNYKLRGGPTSLQNLKKKTVSKPYGEKKPG

SEQ ID NO: 274418 - protein, 98 aa, Zea mays
  Clone ID: MRT4577_18185C.1.pep
RPRRRRDPAREAGRTGRGGGGRKRKHLSSIASHVLRQCSLTLDRSVDDLVADFELGLKTAAVDSYSRKLVEFCSLQALQIITLRDIGEKISEGSLGRF

SEQ ID NO: 274419 - protein, 413 aa, Zea mays
  Clone ID: MRT4577_181860C.1.pep
MNPPNPPPGGVDPLIAAQMRMMQQMADTMADMRAQMQQERQEMRQEREDARREMHQEREEIRQERRVQQQQLQQQLQQQQQQQQVPLPPPPPPVPPRDKHREFMSHKPPTFSNSTDPLQADDWLKSIEKMLNIAQCSDREKVLYASGRLAGPAADWWDAYCAAHAAVDTITWAEFSTQFRNYHIPAGLMKIKRKEFLSLKQGSMSVSEYRDKFIQLSRYAPRDVEDDEQKQELFLDGLIGPLQYQLVSHTFPSFQRLLDKAIVVENKRSIFGEKRKAANQGQAGSSSRPRYTTTPSTPASGSSGQQTQQAPTAPPKASTSAGPVASNTSTNRACFKCGQPGHYANYCPNRAAYTTPAPMKQGQASAGKSQPISVNRGQAYHAEVETEPGELEIQEEEPVEEEIVGEEVNEQQE

SEQ ID NO: 274420 - protein, 59 aa, Zea mays
  Clone ID: MRT4577_181861C.1.pep
GTFYSFKNIYLLKKFQKCIYQKALDFKHLLKGVLQIYHFSLISELIYNFFGERKGKKAE

SEQ ID NO: 274421 - protein, 88 aa, Zea mays
  unsure (1)..(88): unsure at all Xaa locations
  Clone ID: MRT4577_181862C.1.pep
ILGMLGGNNYPTXPSPPLINSLYHHFLPPPYFTLKTNIPFYTYPFTPFHSHTTTNSYHFYTLSFLXNPSSFFHYPLLSSNPFSLINLF

SEQ ID NO: 274422 - protein, 245 aa, Zea mays
  Clone ID: MRT4577_181863C.1.pep
MQSSLFFYVLVACSGVMALPTSPPQLEARSEAHHNPDSYESYNQASPSYSPPPSTDYQPASPHATAPSPPPRTIPSPPPRVASPSPPSPATSPLPLPHATSPSSPPHANTPSPPSHVTHPSPSPQGITPSPPPHVNTPSPSLHVNTPSPPPHVNTPSPPPRVITPSPPPRTTGPLPSLHPTIPSAPPRGTIQAETSRPGGRGGLVGATEVGTGGLPIVGVAGGVNANIGATVPAVAVGHLGVGAG

SEQ ID NO: 274423 - protein, 38 aa, Zea mays
  Clone ID: MRT4577_181864C.1.pep
SAHYMKVHSACGRRSVLNSHFRLLSSKRRRNVLSIAGY

SEQ ID NO: 274424 - protein, 87 aa, Zea mays
  Clone ID: MRT4577_181865C.1.pep
GTESLQCRGIGQFLLFLHEEHMMTILPHHMPIPISVLRWSSAPLGSIYFATMSRNTVTTTLWTSTSLCPHDPFTVRNWTNFTKHWCC

SEQ ID NO: 274425 - protein, 216 aa, Zea mays
  unsure (1)..(216): unsure at all Xaa locations
  Clone ID: MRT4577_181866C.1.pep
TFQFPTSVVPEIRGTPGIFTFNLTWNDISDSSLKPKISSPLSTYYLVRNPRYTNTGKFVKFSDFLEYEXAAFMAKSLGFDVLESLTTALNDAGYNNQTTKEVMIQSTDSAVLVKLKQQKAKYKLVYTLQPGIGDASASSLADGKEFAEAVXVHRXSFFAQXVHFIINQXSLLTDLQSAGLPVYAXVFRNELXSQSWDFFGDETVEINNYAPPNGDG

SEQ ID NO: 274426 - protein, 247 aa, Zea mays
  Clone ID: MRT4577_181867C.1.pep
MGLFNKRNTAAPADTTTATGTPQHREKKGIFASKGQHGSARAWNSRPTFGAWIKATALDIVTMAVLGAIGLGVYFADPAPSRSFPVTFRDGEIVYPEFAYPLRNEIVPIWAAALMAFFIPFAVFLICQIRVRSFWDVNNATIGLLYSLIVAAVFQVFIKWLIGGFRPHFLAVCKPVIPANLAFDTDTFESAGPTGTNVANGYRSIMFDRSICTGDKKEINDSLESMPSGHTTAAFAGFVFLYLYLTL

SEQ ID NO: 274427 - protein, 78 aa, Zea mays
  Clone ID: MRT4577_181868C.1.pep
ACLLLQCMPWAEQTVPPNGHGSGAQVEKSVPNPVDLTTERKEDCDWKVTLRGRGISITGANRGIELSLPRASLGTHAT

SEQ ID NO: 274428 - protein, 99 aa, Zea mays
  Clone ID: MRT4577_181869C.1.pep
LYIRAPWLRTITPDLWLRTSDSSLYDLEIRLLKRGCKWLRTTTPDSWARGDGGQQWISEWGHVSYKWSERRWLALVAQTLGAMAAERETDETRQTRPTR

SEQ ID NO: 274429 - protein, 129 aa, Zea mays
  Clone ID: MRT4577_18186C.1.pep
HWVPRGRPGLLSAIANIPHTDTTRYIRSIASSLWRTEQPFDHLYNPTAITHFNHAFSPIHRHLIPVSQTHSQPSIDHPPSRREHFEIILDIFDDFLFDIVVTDPSTVPVYGGQAGHLSETVRAVSCCDL

SEQ ID NO: 274430 - protein, 71 aa, Zea mays
  Clone ID: MRT4577_181870C.1.pep
KKKKKKKKKKKKKKKKKKKKKKKKKKKKKKFKKKLKKKKKKKKRFFPAPGGPLKGQFLGFSFTLGGVGPCF

SEQ ID NO: 274431 - protein, 78 aa, Zea mays
  Clone ID: MRT4577_181871C.1.pep
ALFAHFQISSWMNGDKHCLPILLHSNGPNAGDQEPFPMGSNILSRSGRSQTSLGEENHHDIQTVLTNCDNSIPTDLTI

SEQ ID NO: 274432 - protein, 157 aa, Zea mays
  Clone ID: MRT4577_181872C.1.pep
VPWINNWAGYLGGCYGGAFFPSYYSLYFAKATEAESHSVNRRATRLDAEHLFRREEADKVSCINDKGVTEVFSKSECAKAADTLREKNVHSASSGNCKLSLVNAKDKVVAKNLPDQTLQKAVQEILKTCGQANEQAKGSETAAHVDEKQVVMLLSKA

SEQ ID NO: 274433 - protein, 64 aa, Zea mays
  Clone ID: MRT4577_181873C.1.pep
SREPAANHTSFTDARMSSATLCIELVCRGTTNVHSCEIGHDTHLAVHSPAGHGHLACSTVLTGG

SEQ ID NO: 274434 - protein, 74 aa, Zea mays
  Clone ID: MRT4577_181874C.1.pep
PTRPHQFLYHGSVGNVLSPHQFLYQGCVGNVLESSIYISEGKVKQDMVVRLRNVESGEIELQLQWVDLPGSKGV

SEQ ID NO: 274435 - protein, 165 aa, Zea mays
  Clone ID: MRT4577_181876C.1.pep
MLDHLVGLLKLRVVRGVNLAVRDLRSSDPYVVVRIGKQKLKTRVVKKSVNPEWDEELTLSIEDPAVPIRLEVFDKDTFVDDTMGNAEVDIRPLVEIVKMKLQDVADRTVVKKLVPNRQNCLAEESSIYISEGKVKQDMVVRLRNVESGEIELQLQWIDLPGSKGV

SEQ ID NO: 274436 - protein, 47 aa, Zea mays
  unsure (1)..(47): unsure at all Xaa locations
  Clone ID: MRT4577_181877C.1.pep
GLGWLWRDVRMXWCEGWCLVAPLTPLKWXXFDGWELYLYPVFDDKIN

SEQ ID NO: 274437 - protein, 178 aa, Zea mays
  unsure (1)..(178): unsure at all Xaa locations
  Clone ID: MRT4577_181878C.1.pep
PLEPGVCRDREPSHPRRPPPEKQKIVSRVRRPTPSRLLLLPPPPNKHHTARHASVCRRXEPAHQRPRSGMPXQERTCCTLCRAVRRCLGSPARTAASGRTTAPSTQRTRSSARTSAPSPSGSAPSSPRPPPRGTSPWPPCTTPSTTRSSSASRSPGPTPGSPAVCFAPASSTLPPGYH

SEQ ID NO: 274438 - protein, 49 aa, Zea mays
  Clone ID: MRT4577_181879C.1.pep
ATFKRDTRTFYVFLLKRLDGSNSNHVLSFKRRFNNNVLSKIIEMIFTKM

SEQ ID NO: 274439 - protein, 153 aa, Zea mays
  unsure (1)..(153): unsure at all Xaa locations
  Clone ID: MRT4577_18187C.1.pep
GEASFPSPYGWDNPEFLPDAIGWEGVKPGKGTKEMKPKEIDLQSMNPASQDEEKQLMHLKLMGWRHFPVNIDRLSHVRVLLLGAGTLGCEVARLLMTWGVRKLTVVDSGXVVMSDLAKQSLYIDKDCGGPRVSAITPHLKKRCPAMEVESIPL

SEQ ID NO: 274440 - protein, 48 aa, Zea mays
  Clone ID: MRT4577_181880C.1.pep
DIKYFDHYHHYLGRPRCIYKRPLIPPHAVIKSQNFYPHRPRTRGSAGF

SEQ ID NO: 274441 - protein, 111 aa, Zea mays
  Clone ID: MRT4577_181881C.1.pep
GGEGASLVMDCSFRKTTSLWTYTTQNRCQDKTDEQGRCDRPLTKERGVGHISQNKEGEDAMTILEGGHPITYYYLNAKVTTSCMCRTSWEVIPKESTTEAEAEEANSFIPV

SEQ ID NO: 274442 - protein, 109 aa, Zea mays
  Clone ID: MRT4577_181882C.1.pep
GRGLLKKNPACFLGTPGILAPLLGETVFWGFFRGPPTRGFSPPKTGVITAPGFAFAPFTPGKFPPPFKVGGVLGFLKGQTRPLLTPIAKKSVWDFGEKLLVPLFPRQGV

SEQ ID NO: 274443 - protein, 62 aa, Zea mays
  Clone ID: MRT4577_181883C.1.pep
LQGRNGAEPHELSQALLAAQGRVPSVHGYVAFASRRLGAERAGVGRMQQPSIVVVARLGVQE

SEQ ID NO: 274444 - protein, 59 aa, Zea mays
  Clone ID: MRT4577_181884C.1.pep
STGRQRSCTCTAPGRGRPKGLSVLCPEAVEKRHRQAPGHYLVPPPTWITMPPVSLRPLR

SEQ ID NO: 274445 - protein, 68 aa, Zea mays
  Clone ID: MRT4577_181885C.1.pep
RPAGTDHKERALSITTQDRGSPVRIFGKRDDLTLEGIKQLYETLDEVNTYLKPLNCTTYMVTLAETIP

SEQ ID NO: 274446 - protein, 66 aa, Zea mays
  Clone ID: MRT4577_181886C.1.pep
GRVKSRLSKLLFKEFKRFSPRAYTTCLQAIPRLVKAHDMGLDLVALGGLTSNRCLGLSTLEDVGSA

SEQ ID NO: 274447 - protein, 91 aa, Zea mays
  Clone ID: MRT4577_181887C.1.pep
SHRHVISIVIGGLTDTEQRLLLVACGRDHRANIPIDTSFLLYAYSYGRDGSAGDRVSASLFQHYGGYDPRRKCYFVHPREDANARTCRRRG

SEQ ID NO: 274448 - protein, 72 aa, Zea mays
  Clone ID: MRT4577_181888C.1.pep
WLGTCTLLPAFRSLFCVGRLCCGPGLVPGHAFVLAGAGCRVAFCCSRFRPLRRWLVRALLRLWVASVAVVCG

SEQ ID NO: 274449 - protein, 109 aa, Zea mays
  unsure (1)..(109): unsure at all Xaa locations
  Clone ID: MRT4577_181889C.1.pep
SQAVSLASPSGSHPPCQARLFYFFNPTRSRRQERRETGNEHAKGADDRTTMVRDQFMSLTALICPSSPCSFISCCFRAQSEARERWLCNGILPLVRAFLRTILRQMXPN

SEQ ID NO: 274450 - protein, 52 aa, Zea mays
  Clone ID: MRT4577_18188C.1.pep
LIFYAKRTYKRKQEKNTKMELKQNDYINDDIIAKAGKPKRPDKIKIRARTNN

SEQ ID NO: 274451 - protein, 91 aa, Zea mays
  Clone ID: MRT4577_181890C.1.pep
RLTSWHRSLPECIKDGQSWTPAVVGMHMFYHVYIITISSYLKVHPSAPASTVSSAQQLCISSAIAVRDLMNTYRSNWRRIEYQPVEYMQIT

SEQ ID NO: 274452 - protein, 97 aa, Zea mays
  Clone ID: MRT4577_181891C.1.pep
PSPGSKWATFVRPPEAPPSQGPISEGSPPLSFHGGALRPKGFLLWFHFWTHAWSFILGFKCPVIVKDWNFCFSLGPPRPQVLFPPCILQILYKKMFQ

SEQ ID NO: 274453 - protein, 107 aa, Zea mays
  Clone ID: MRT4577_181892C.1.pep
DICSRRRRLMITSQCYRNGSLRPQGGGRGACFGGISGCGLPRDGHPRDDIRCMKTCGKGIVCHTHDVHGSLLHNSDGTEHILKDRISYPNIDEPSDVTPDAHYENDT

SEQ ID NO: 274454 - protein, 144 aa, Zea mays
  Clone ID: MRT4577_181893C.1.pep
PPFPGGDACIYQIKTNPVSSLPAPAGGRAPAALVNSAPRPLQPYLRLMRLDKPIGTWLLYLPCTWSIGLAADPGCFPDWYMLSLFGTGAILMRGAGCTINDMWDRDFDKKVTRTANRPIAAGDISTFQSFVFLGGQLTLALGVL

SEQ ID NO: 274455 - protein, 63 aa, Zea mays
  Clone ID: MRT4577_181894C.1.pep
PFLSESSSTMCSDIIELKLRRPGVQQSVGVVGQIDGPGEFFRPQIHSLYPPPTRPPTRPRTRR

SEQ ID NO: 274456 - protein, 98 aa, Zea mays
  Clone ID: MRT4577_181895C.1.pep
MAASSLCHGHLLLFLLVSVKIDGVSAKGYGLPAKTSNTKVILNGGQRVTFARPDGYFAFHNMPAGTHLIEVSSIGYFFSPVRVDISARNPGYIQAALT

SEQ ID NO: 274457 - protein, 96 aa, Zea mays
  unsure (1)..(96): unsure at all Xaa locations
  Clone ID: MRT4577_181896C.1.pep
RRASXSAGEIVHLTLNSGADGTPHVTSVNSPCMLCVRIREPNIHRHAQDRINDHMSLAPRARASDDPALELSPTCMAVPRIDSRQQEGSIQSREYR

SEQ ID NO: 274458 - protein, 208 aa, Zea mays
  Clone ID: MRT4577_181897C.1.pep
MAASSLCHGHLLLFLLVSVTSACLGTAAAHQAGSGEGYTIAGRVKIDGVSAKGYGLPAKTSNTKVILNGGQRVTFARPDGYFAFHNMPAGTHLIEVSSIGYFFSPVRVDISARNPGYIQAALTETRRVLNELVLEPLKEEQYYEVREPFSVMSLLKSPMGLMVGFMVLMVFVMPKMMENIDPEEMKQAQEQMRNNPVSFSGLLARAQG

SEQ ID NO: 274459 - protein, 49 aa, Zea mays
  Clone ID: MRT4577_181898C.1.pep
ALACTPLLPDGARRGLHGLEREAHPAGARFDPPVLNKYFHLATRHQERC

SEQ ID NO: 274460 - protein, 162 aa, Zea mays
  unsure (1)..(162): unsure at all Xaa locations
  Clone ID: MRT4577_181899C.1.pep
LQTNCSCRFRHRQGEQQHLRRRFHPRQNLAQPQTATRAEGSPPRRRTPAPRSGPXRPGSPQGPRPERTPRLAAPSPQPXPXGPQPGSWPRQRDSGVGPTRGXPGRAPVAAAAPPRPGKPHAPGPTKPLFEPTPPLSTPTLLPPASAHRRAAEGPPRGGVVPE

SEQ ID NO: 274461 - protein, 63 aa, Zea mays
  Clone ID: MRT4577_18189C.1.pep
VPLHITSQDIPGERTWASAYPLLPSFSSSSSCHQALSLGYPQPNLALLLTLTGSSLCHPDAQP

SEQ ID NO: 274462 - protein, 146 aa, Zea mays
  unsure (1)..(146): unsure at all Xaa locations
  Clone ID: MRT4577_1818C.1.pep
GGGPPRGFSPGGPVPXLCPGGMGPLAPAPVGVSFACGPTPPVAXSRTRTQSPSPEAFPPXFKGPPXNCFXAPPGPCPFGLPPKVPGGGGGGGFFSPPSQVPPQRGGGFRPPPPLSPVLALGRCRVGLVVVASVPAGAGKNFFFFGP

SEQ ID NO: 274463 - protein, 207 aa, Zea mays
  Clone ID: MRT4577_181900C.1.pep
NSARGASLPSLEEGKTCGFWLLTGVGDASLYRSQQNEASQHWNLVTEFCQAHYLPLSTKYLALLANDNDWVGFLTEAQIAGFSIEAVIEVAAKEIRDSRLRAHILTVLKNMISLRRKSSGNVPSGSSDPSFSSVDGNNPMELFCILGVCEKQKNPGEALLIKAKQMQWSLLAMIASCFPDVTPLTCLSVWLEITAAREMSSIKVDDV

SEQ ID NO: 274464 - protein, 104 aa, Zea mays
  unsure (1)..(104): unsure at all Xaa locations
  Clone ID: MRT4577_181901C.1.pep
GKKKMRTILNKDVGYYKRSRQVQVCEYSQPLCREGVINIHRARTNPFWGRQVLVRAXCXXXPPSLRGGCXXXXPCPCRGRLXFPASCXXLFSLFFLXXXXXGAA

SEQ ID NO: 274465 - protein, 60 aa, Zea mays
  unsure (1)..(60): unsure at all Xaa locations
  Clone ID: MRT4577_181902C.1.pep
AFREGNPKGGAIAFGHPLGCTGARQIATLLPELKRQGKKIGVTSMCIGSGMGMAAVFXSE

SEQ ID NO: 274466 - protein, 94 aa, Zea mays
  unsure (1)..(94): unsure at all Xaa locations
  Clone ID: MRT4577_181903C.1.pep
GEAKDLLFLGRMALKKVFPEKKIGKVIETSLSANQKGPPMEKKRFKXKAQGFPPNQKVVRGGPGDPSKLVVYLGPKEIPPFIVRFDPPSAKQQL

SEQ ID NO: 274467 - protein, 85 aa, Zea mays
  Clone ID: MRT4577_181904C.1.pep
GNQITNVVTLFAKTMVYFSQFPRKCSSLQVISAIFRNRMCPMLKRAKIQRINTLSAGFFPQKVVSLEKPPSVRCPKTKSAPPSFD

SEQ ID NO: 274468 - protein, 56 aa, Zea mays
  Clone ID: MRT4577_181905C.1.pep
VMAPLNAQSQSPCRGYNSWKELQLRPSPILHHLLKPVCPPRSSSRATHRLPQSLAC

SEQ ID NO: 274469 - protein, 165 aa, Zea mays
  unsure (1)..(165): unsure at all Xaa locations
  Clone ID: MRT4577_181906C.1.pep
PGDHHPDRTLHNNVPPRLGSPRAPAFVFSSASLRAEPAPTAVALPADKEGIMEQSASNXRMLCAHATYNVKLITPQAEVELQVPDHVYILHHAEXEDGIXVPYSXARGPXSSRDGKGVSGSEDQSXDRAYLDHGQIAVEXVVTCHAYPTSDXTIQTHKEEELTAA

SEQ ID NO: 274470 - protein, 41 aa, Zea mays
  Clone ID: MRT4577_181907C.1.pep
IMTVLPSVVSRSAHEDEKFRQHKLRPHNAAEGLCEGNHSPE

SEQ ID NO: 274471 - protein, 57 aa, Zea mays
  Clone ID: MRT4577_181908C.1.pep
FCVLRPEDEGDRQEIYRVITCPRRTTIIMRKTLASQELVIFYHKSEPFNFTLFQFFG

SEQ ID NO: 274472 - protein, 67 aa, Zea mays
  Clone ID: MRT4577_181909C.1.pep
FRRSQWRWVPRTTAMLHNTRPDAGTQMNLRVLVSYILLSRSSITIIYTSPFLFYSGMNKHVHSTMSS

SEQ ID NO: 274473 - protein, 35 aa, Zea mays
  Clone ID: MRT4577_18190C.1.pep
FIILIIYMIIISLIISHIFSTSKFSQLHVVNTAII

SEQ ID NO: 274474 - protein, 86 aa, Zea mays
  Clone ID: MRT4577_181910C.1.pep
SPWRRVRWPEVVGITSTAATGTMASSNSNCCFNDKRARALSRLKRSYHVVHCISPFIFLFLRPCEMRLFVRRVEWWESHRGIRDLC

SEQ ID NO: 274475 - protein, 129 aa, Zea mays
  Clone ID: MRT4577_181911C.1.pep
MAPKVALFLALGLLFAAAAHGCEPYCRGPVVPTPPVMPTPSSHSHGRCPIDALKLKVCANVLGLVKVGLPQHEQCCPLLEGLVDLDAALCLCTAIKANILGIHLNVPLSLNLILNNCGKICPKDFTCPN

SEQ ID NO: 274476 - protein, 311 aa, Zea mays
  unsure (1)..(311): unsure at all Xaa locations
  Clone ID: MRT4577_181912C.1.pep
MQPPRDPITARAIPGVDASSTAVVATAPTEVPLAWPPTSSLSVGARSRPSAPPRRDPPTLLTRAPRPLPSTLTPARRSATSAAYARSVVPPLRPYSSRSSSASSSAFPAMPPRVIAHQRHRVGLTRDRHGSGLGVWFSLQQLEANRKTLXRHSRALFNXEVASRGTDGGNTLSQRVAERQCRSDLANRIGETDMISMQENMSARTLTLSSSAQRTIVRFVKLPLVDKIPPHTAWISLEKLLVFLCSYVLQLANHGHYFVIFMVILRRXLYASWVXSTLAFICXLIRDIDEEIPDPEEXKHFFTKGEDHLVW

SEQ ID NO: 274477 - protein, 60 aa, Zea mays
  Clone ID: MRT4577_181913C.1.pep
GELTVECVILSGPPSCRCRLLPGWQNYRRSRCMWLSIVFWSRRRGPSLTGTPWSSPSPPP

SEQ ID NO: 274478 - protein, 86 aa, Zea mays
  Clone ID: MRT4577_181914C.1.pep
PPGEGLPKVYPGGPFDPLGLPDDPDPPPGLKVKGPKTAPPPMFPMLGFFVQPIVPAKGPLETLFAPVPDPVPNNAWAYPPNLVPGT

SEQ ID NO: 274479 - protein, 154 aa, Zea mays
  Clone ID: MRT4577_181915C.1.pep
VKTSRNIYVPRKFTLPETSFQLLGSFGELEDLLPPFSQDIQENICTKKFTLPETSFQLAPPNPLRPAPHPTIPFCRFKEVKNGCHSSVVEMKHYDLCTMNLNEVLSRVEEMSQEEASVCGLMDMDEPSPPSCDDSVEVEDDSCYEGLTDAEWAA

SEQ ID NO: 274480 - protein, 56 aa, Zea mays
  Clone ID: MRT4577_181916C.1.pep
IRHEARYHFIRDCVDRGEVDIEHVSTAEQLADILTKALGRVRFAELRQKLGVIEGG

SEQ ID NO: 274481 - protein, 279 aa, Zea mays
  Clone ID: MRT4577_181917C.1.pep
MPPPSASASRLATHWIADALADDESLDFSVLKALFGDSSKSLAGAPEATRERVALRCIQEVSSVIASGGDAAAPAGVPRVDGAWSCEDVLFRLIRDVGSSGELEKDLLPPLSQDIQEYICTKKFTLPETSFQLLGSFGELEDLLPPFSQDIQENICTKKFTLPETSFQLAPPNPLRPAPHPTIPFCRFKEVKNGCHSSVVEMKHYDLCTMNLNEVLSRVEEMSQEEASVCGLMDMDEPSPPSCDDSVEVEDDSCYEGLTDAEWAAENYADWEELYNRSM

SEQ ID NO: 274482 - protein, 117 aa, Zea mays
  unsure (1)..(117): unsure at all Xaa locations
  Clone ID: MRT4577_181918C.1.pep
IPVVLTYAVNDSPYVDDMTAILDSDGVXVDNEKMELLLYQVSAKDISELIAALRXKFASIPCGDGYVNDAAAAPDADGSAAACEVKREENVEEKEESDDDMGFSLFDYAGQSITVLF

SEQ ID NO: 274483 - protein, 234 aa, Zea mays
  Clone ID: MRT4577_181919C.1.pep
MHQESLCKGYVVYPWPFTSVVKIGSVQPRLERDHDSWVKWLVLGALHVSPVTWRDCIIACTRSRSADARSRTRSRSSRTLPLASAGGGVWEGVEAFSEHYSITERGTAEAAMQDAARRALSQYCSLFSGVADDLDLKYYPRRSTDSAGGVIVSPVGEGNPRLNSMVNLAIVLNIELDHVLDELGKVRAKVAKLRAECATHHYLDGGSPAPVGIQHPYRSPPRGRFDYGTPDYRT

SEQ ID NO: 274484 - protein, 135 aa, Zea mays
  Clone ID: MRT4577_18191C.1.pep
MASTACFVIVSKNDIPIYDAEVGSAPKKEDQAYQHQFILHAALDVVQDLAWATSTMFLKSVDRFNDLVVSVYVTAGHTRFMLLHDSRSEDGIKSFFQEVHELYIKIFLNPLYLPGSRITSSHFSTKVRSLARKYL

SEQ ID NO: 274485 - protein, 202 aa, Zea mays
  unsure (1)..(202): unsure at all Xaa locations
  Clone ID: MRT4577_181920C.1.pep
MDPNTRHRLTHDDSPVINEGLQPTKTSRRTHLLRKLMLIFNKFPNHAPSFNHKPNPVXELKLVRXDYYDHAVAFSGKLHHPDRPXQDFCHLKPYHLHTXGIIPPSPEEHPILELKLLRLVNQTRIPEVHNDLEILPGKGLQHPYNKDAVQLEQSLIXGGYDRESSARQDVTHESYGYLMDLLAKTAKDEIAGCTQQGYDSLS

SEQ ID NO: 274486 - protein, 110 aa, Zea mays
  unsure (1)..(110): unsure at all Xaa locations
  Clone ID: MRT4577_181921C.1.pep
AVQPQDAAKLSNRWSFHYTQVNDLSINDYLNETVAKNATFLANSVARYSKKCFQKGQRRMQXRLTKWLMIYVLINGQKVMARAMMKHTLEITLLITDAITIQVAMDAIMN

SEQ ID NO: 274487 - protein, 92 aa, Zea mays
  Clone ID: MRT4577_181922C.1.pep
TKETVKIKKKKKKKKGLPFFSFHTFVSVLATSFFFFRVSLFLFIGFSFYNFVTWKTLPFPIFIPLVPLFPFCHPQLYMPLGLNPFSLPTFFS

SEQ ID NO: 274488 - protein, 58 aa, Zea mays
  Clone ID: MRT4577_181923C.1.pep
VVDKVLLGNKWLRKASGIQPKFPYVVDSFEERCRCNCLCLVSLFHNSCLLDCVGRLTY

SEQ ID NO: 274489 - protein, 94 aa, Zea mays
  unsure (1)..(94): unsure at all Xaa locations
  Clone ID: MRT4577_181924C.1.pep
RGGAGGKGPPPGAPPPHRRRGQGXRRGXAPPPPPRRQXEKAQRAGEGEAARTXXPXSYTVVERSKKKHESACSSFATRAQASFASSLWACCHAR

SEQ ID NO: 274490 - protein, 146 aa, Zea mays
  unsure (1)..(146): unsure at all Xaa locations
  Clone ID: MRT4577_181925C.1.pep
RPPTVSCGVAARATSRAPPSPPLSLEGGGGDAWVPRARLTLPRVPRQGGRVRTSGLRWAPGYGVLSPCACPGRGSAPGTFERALPGAATXTGSGXHXTSAFLFWERYSSALPRGXSGPTPGRAAXVSLFNGPLPSFTPVTVWGPYT

SEQ ID NO: 274491 - protein, 186 aa, Zea mays
  unsure (1)..(186): unsure at all Xaa locations
  Clone ID: MRT4577_181926C.1.pep
MDPSGPGPSSAAGAGGXRARARAAAAAPDPXLAQAQAQPQQLSRYESQKRRDWNTFLQYLQNHRPPLTLARCSGAHVIEFLKYLDQFGKTKVHAAGCAHFFQPSPPAPCPCPLRQAWGSLDALIGRLRAAYEESXHAPESNPFAARPGRIYLXRDVRDAQAKARGIPYEKKSRKRKKXAAAAAPGE

SEQ ID NO: 274492 - protein, 50 aa, Zea mays
  Clone ID: MRT4577_181927C.1.pep
YQSLVHQETLPSTQITIQISWNQELLSALLHNCELAQHFWEKKKKVVRLR

SEQ ID NO: 274493 - protein, 50 aa, Zea mays
  Clone ID: MRT4577_181928C.1.pep
PGQELAAELSLDEHLADGARLARAATDERIDAAAHAESLLARRRVYDETR

SEQ ID NO: 274494 - protein, 69 aa, Zea mays
  unsure (1)..(69): unsure at all Xaa locations
  Clone ID: MRT4577_181929C.1.pep
KIRGEYXXIAKXLYNFIVIHYQDIFNFXXEKLFDXXSLIDALSCIFYEIWLVIFDHFVNDLSIXVFXXC

SEQ ID NO: 274495 - protein, 283 aa, Zea mays
  Clone ID: MRT4577_18192C.1.pep
MLPSPPVLLRPCAARASPLPPPRPRAANPNTESATTTTAATSADRAATMGAAAWWRRALGQRFNPAGVAAVAAVAASKPRLALPHVSVQDIRWLDWAELRRAGFRGVVFDKDNTLTAPYAPALWPPLAAAFDQCRATFPPGALAIYSNSAGLTEYDPDGVDARAIEAVIEGVHVIRHDIKKPGGLATEIESYFGCSASNLVLVGDRYFTDVVYGNKNGFLTVLTEPLNITDESYIVKRVRKLEAYIISYWYKKGHKPIEHPLLPDARRIVKFDPYDDSVSTRI

SEQ ID NO: 274496 - protein, 64 aa, Zea mays
  Clone ID: MRT4577_181930C.1.pep
EKGRGPELLGSHETALFSVAVDSRLQLHLLPSRRSVPVWLLLLLCVGLIIVTILLLQSAFPGFL

SEQ ID NO: 274497 - protein, 69 aa, Zea mays
  Clone ID: MRT4577_181931C.1.pep
RRMDYIVSTVVMLCVDVVGVHDQRAPHHALVVVVGSVAVVLLPLTFELLQRSIIVQVARRSDALRVASL

SEQ ID NO: 274498 - protein, 269 aa, Zea mays
  Clone ID: MRT4577_181932C.1.pep
MAGDRQPEPDRPAASPLRPRALQEDFVAMDMMDVLLELADDPSQLEVPITRDNVKGFTLDLMGGGTDTSAVTVEWAMSELLRNPEVLAKATEELDRVVGRDRLVAEGDIPSLPYLDAVVKETLRLHPVAPLLTPRLCREDVSVGGYDIPAGARVFVNAWAIGRDPAVWEAPLEFRPERFAGSSVDVKGQHFELLPFGSGRRMCPGMGLALRMVPTILGNLLHAFAWRLPDGVAAEELGMEETFGLTVPRLVPLQAVAEPKLPARLYAAL

SEQ ID NO: 274499 - protein, 60 aa, Zea mays
  Clone ID: MRT4577_181933C.1.pep
GSSYMYASFLLLAFSLTSPIINGVWSRCCESKIGREYRKPLRPPMSSVQSPVHYLTCHST

SEQ ID NO: 274500 - protein, 524 aa, Zea mays
  unsure (1)..(524): unsure at all Xaa locations
  Clone ID: MRT4577_181934C.1.pep
MELPAPSSASFFLVAVVAGATLFLVTVLRLRARSTRKYRLPPGPRPWPVIGNLNLIGPLPHHSVHELSKRYGPLMSLRFGSFPVVVASSVDTARLILKTHDLAFIDRPQTAAGRYTTYNCAGLFYQPYGAYWRQARRLCQAELFSARRLMSLEHVRSDEVRAMLSDLRAAXGAGRXHDAVTLREHLYMVNLSVVSRMLLGKKYVVEGSSSPATPEEFRWLIDEHFFLNGVLNVADMIPWLSPLDPQGYVKRMKRSAKMLDRFLEHVVDEHNERRRREGEDFVAMDMMDVLLELADDPSQLEVPITRDNVKGFTLDLMGGGTDTSAVTVEWAMSELLRNPEVLAKATEELDRVVGRDRLVAEGDIPSLPYLDAVVKETLRLHPVAPLLTPRLCREDVSVGGYDIPAGARVFVNAWAIGRDPAVWEAPLEFRPERFAGSSVDVKGQHFELLPFGSGPRMCPGMGLALRMVPTILGNLLHAFAWRLPDGVAAEELGMEKTFGLTVPRLVPLQAVAEPKLPARLYAAL

SEQ ID NO: 274501 - protein, 34 aa, Zea mays
  Clone ID: MRT4577_181935C.1.pep
VGRIAWQGPLGCLTPSVPLCSLKAKGGWMNSVLF

SEQ ID NO: 274502 - protein, 60 aa, Zea mays
  Clone ID: MRT4577_181936C.1.pep
TRISGLIYEETRHVLKIFLENVIRDAITYTQHARRNTDTAMHVEYAHKRQHRTLLRSRRS

SEQ ID NO: 274503 - protein, 118 aa, Zea mays
  Clone ID: MRT4577_181937C.1.pep
ACDDAHGRSGTFFFFCGWIVQTASSSECGIFVPSVSCWVECSCRLARHTSILLCYQRSVEGWNGYPDCLGLVVMQIQPVTSMNFSSGVVGLLKTAGLSKGTLRLCVKQQSNLCVCVCD

SEQ ID NO: 274504 - protein, 73 aa, Zea mays
  Clone ID: MRT4577_181938C.1.pep
MRGLRTNELSRGSHVEAMVLLHAANRFVSRSTRLLSGRLEVKHLPDELRVERRYPFQRAVGDVRGGAHGQHPV

SEQ ID NO: 274505 - protein, 75 aa, Zea mays
  unsure (1)..(75): unsure at all Xaa locations
  Clone ID: MRT4577_181939C.1.pep
MHTKGASSDAIRVSTSSAPSTSSHGSAQDDYDSXGDVYVWGXEVICDNTXRSGPDTVIRSTAKADXLLPKPLESS

SEQ ID NO: 274506 - protein, 221 aa, Zea mays
  unsure (1)..(221): unsure at all Xaa locations
  Clone ID: MRT4577_18193C.1.pep
MSLVAAPMAIVDVANAQLQQAAAAAAKKDEDGHEQQESSYDYGALMKGVRHLSDSGITRLPDRYVLPASDRPGVLAVSSSVAGSGRVKLPVVNLAGLRDPCQRAAVLATLDAACREYGFFQVVNHGFGSDVSGGMLDVAQRFFELPLAERARHMSXXVRAPVRYGTSFNQAKDDVLCWRDFLKLVCQPLQAVLPYWPQQPADLRDVATRYATASHRLVMGV

SEQ ID NO: 274507 - protein, 102 aa, Zea mays
  unsure (1)..(102): unsure at all Xaa locations
  Clone ID: MRT4577_181940C.1.pep
MTSAGEDRSRVISSVSLRSRTSAGERGSRRNSLGSLRCIWNRKLRVTSHHPFKLRTDQRXKFREQSFVQKEHDMLCKDEYKRIYIAQGLPWTTDEPECLIKP

SEQ ID NO: 274508 - protein, 63 aa, Zea mays
  Clone ID: MRT4577_181941C.1.pep
SDHGPKKKKKKKKKKKKKKKKKKKKKKKKKKKKKKKKKNRCDIAGALRGASESESKRTGGAVG

SEQ ID NO: 274509 - protein, 76 aa, Zea mays
  Clone ID: MRT4577_181942C.1.pep
MPELAVQKVVVHPLVLLSVVDHFNRIGKVGNQKRVVGVLLGSWQKKVLDVSNSFAAPFDEDDKDDSVWFLDHDYLE

SEQ ID NO: 274510 - protein, 38 aa, Zea mays
  Clone ID: MRT4577_181943C.1.pep
WTRSATGRCNVISYVIPLPIGNAGTRGLGDSLWDGRMG

SEQ ID NO: 274511 - protein, 78 aa, Zea mays
  Clone ID: MRT4577_181944C.1.pep
MGLWTLLEGFLLLANALAILNEDRFLGPRGWSMSEVSGNGQTKSFKGQIVGLIYATQFLRMPLIALNVLIIVVKLVSG

SEQ ID NO: 274512 - protein, 74 aa, Zea mays
  Clone ID: MRT4577_181945C.1.pep
RGDLKRGGKITGKKLDLIAGKGETLAKNFASPKPGLKFNPKKRGNPKGPNLGGLPGFPNRGETKKPLQKKDRGG

SEQ ID NO: 274513 - protein, 172 aa, Zea mays
  unsure (1)..(172): unsure at all Xaa locations
  Clone ID: MRT4577_181946C.1.pep
MIWVLFIMQLASHGTQTEETMQFVPHCDHAEVSDSQSTSSQLNLIERSTEHLASCEINPVSVDDDNDNEHIDANEETHLVIQDVPQCRICLDSEGDDLIAPCRCKGTQKYVHRSCLDNWRSTKEGFAFSHCTECRAAFFLRANXPPDRWWLRLKFQLLVVRDHTLIFLLCTG

SEQ ID NO: 274514 - protein, 83 aa, Zea mays
  Clone ID: MRT4577_181947C.1.pep
TGATTHPYSTQPHTASCCRSHCQPCSWVRDQQGHLGTSMVQAFVCCMTPTVQWILLLLLGHMSELLSTRENPASCPYPVCKTP

SEQ ID NO: 274515 - protein, 87 aa, Zea mays
  Clone ID: MRT4577_181948C.1.pep
TPFPFPNKLLWGSKGISNGLFIAVFFYLKHHFGNNAQQFFAQRFASHSLSLTLCPGKFIFIPNFYHSTLFHLYLVGAPLPGSPMFFN

SEQ ID NO: 274516 - protein, 106 aa, Zea mays
  Clone ID: MRT4577_181949C.1.pep
CLAMIWVLFIMQLASHGTQTEEAMQFVPHCDHAEVSDSQPTSSQLNLIERSTEHLASCEINPVSVDDDNDNEHIDANEETHLVIQDVPQCRICLDSEGLLFDYQCS

SEQ ID NO: 274517 - protein, 70 aa, Zea mays
  Clone ID: MRT4577_18194C.1.pep
IKSLCEHRTDMCLAKLFNKCSKKNPENVRTLHFRLFNIGNTIVLDKIIFHNYSPNKGPPESKSALSQQSL

SEQ ID NO: 274518 - protein, 60 aa, Zea mays
  Clone ID: MRT4577_181950C.1.pep
RKGRGNQSQFPLKTLFLFSFEGHIKFTFTTSLYRGGFLIAFPRKRGGVKPFILGREPVKK

SEQ ID NO: 274519 - protein, 57 aa, Zea mays
  Clone ID: MRT4577_181951C.1.pep
MKMRSPTHSVYPTKNSQANGIKNSISTQISRQIICYVLQLKSSFLNRMIMHSFFTLP

SEQ ID NO: 274520 - protein, 107 aa, Zea mays
  Clone ID: MRT4577_181952C.1.pep
MPMPTFNHSALPLKRRPRVQSLGITSKMPMPTFNHSALPLKRRPRVQSLGITSKMPTPTFNHSACPLTRRPRVQSLGITSKNADADLQSLGVVSKTPTLYSVARHYF

SEQ ID NO: 274521 - protein, 95 aa, Zea mays
  Clone ID: MRT4577_181953C.1.pep
GYNPATWALEVSSPLSEARLNMNFAEIYANSVLYRKNQELIKELSVPSPDYQDLSFPTKYSQNFYNQCAANFWKQYRSYWKNPPYNAMRYLMTFL

SEQ ID NO: 274522 - protein, 52 aa, Zea mays
  Clone ID: MRT4577_181954C.1.pep
WSCEQRLAIGPWSCHANVYIRLPMDPIRVSKPNIHACFSAWIDSVVRRSEGP

SEQ ID NO: 274523 - protein, 49 aa, Zea mays
  Clone ID: MRT4577_181955C.1.pep
VFIQIGMGRVSYLGMVLNILKKRITNRDSLPILYSNNKKEIKKTHLFNE

SEQ ID NO: 274524 - protein, 119 aa, Zea mays
  Clone ID: MRT4577_181956C.1.pep
PPPPITVLFEGGWNFSGVGGPPLGQVEAPPAFLGFFQAPGQTPPPLLGGVHLGNPPFLLAFAKKQLGFPPFLQPKGVFRHRLQFPLFNKFAPPGILFRHHLFPRCFQKKKKKGEKFFVA

SEQ ID NO: 274525 - protein, 70 aa, Zea mays
  unsure (1)..(70): unsure at all Xaa locations
  Clone ID: MRT4577_181957C.1.pep
DVIEICVYLFSTVDTYVSKLNYLGSGGAILEWIGLXGHFYKPNIPIMRTILDKLSTLCLPILFTEIDIIN

SEQ ID NO: 274526 - protein, 195 aa, Zea mays
  unsure (1)..(195): unsure at all Xaa locations
  Clone ID: MRT4577_181958C.1.pep
MEGSKASSSTMQVSFVCQRCSQPLKLDTSFKILDRVTIQELTAPLLTTAQAKPGETQEEEANSGEEPFIETRQDGVSRRFIPPARMMSTESANSFTLIGEASDGGTMENLSRRLKVTGDLFDIMSGQTDVDHPLCEECTDTLLDQLDTQLNVTENECQNYKRCLEILEQMNEDDSEQLQRELKELALGXERLIRS

SEQ ID NO: 274527 - protein, 82 aa, Zea mays
  Clone ID: MRT4577_181959C.1.pep
RLEICIDLRHLKMRHWRELNLVLCVQLETWFPPTLTFSFQILQTGLILLHCHSNPCRSTPLDFAVAATDSGSFLQPLASELS

SEQ ID NO: 274528 - protein, 88 aa, Zea mays
  Clone ID: MRT4577_18195C.1.pep
SEGPILFRKQKGRLFPGPLVEAHIGSKVKLGGETGAQNIQDFGLTGDTKSFFSFSLSLSGHGLNLGRLAGLRAPKGGVGGPRDVEGGP

SEQ ID NO: 274529 - protein, 41 aa, Zea mays
  Clone ID: MRT4577_181960C.1.pep
WMRLSFIEFSGGGINSIVYRRILFIREFKREWLVYVSNLGT

SEQ ID NO: 274530 - protein, 93 aa, Zea mays
  Clone ID: MRT4577_181961C.1.pep
ENWRKPSIAFSFSIKFGSIHFSNSIAQVLARSSLLGQAKYLTLIHVGVLRLILQWRLLIAAVFYNPWLQSLANRCLGSDAWADAWADAWADAG

SEQ ID NO: 274531 - protein, 92 aa, Zea mays
  Clone ID: MRT4577_181962C.1.pep
AIFYFKLPTSSRTLWSFSSSLELWLLQMCSMSLLAIVLTIGKSKAFGICFVSIGYSNLYVCACSAFGRRNKFTTWLLFFSKKKKKKKKKKKK

SEQ ID NO: 274532 - protein, 32 aa, Zea mays
  Clone ID: MRT4577_181963C.1.pep
LVLPSSPTLEGLLIPFLLRDLRSIHLRWFNLL

SEQ ID NO: 274533 - protein, 79 aa, Zea mays
  Clone ID: MRT4577_181964C.1.pep
RWQPQSQGLAQIAQPVQKKTGAKNVRLKKQLEPGVIAGFPVQYGPDGSNLIDISVRKQIQEIASQFQLPPVPLQVLGRL

SEQ ID NO: 274534 - protein, 83 aa, Zea mays
  Clone ID: MRT4577_181966C.1.pep
KKKKKKNKIKKQIKKKKRKKNTTSFKIPKNKKTTKKGLPFYMIQPSLLLHPLYYLPYIFTKLKFISPYLTISSLTKPLISPTK

SEQ ID NO: 274535 - protein, 71 aa, Zea mays
  Clone ID: MRT4577_181967C.1.pep
MRSSRGRRWRWRWVLRREGSVTGGVYRRLLSGDSSRAWPPLPPHPLSLSDTLSNCKLFRLALAVPMAQWWS

SEQ ID NO: 274536 - protein, 110 aa, Zea mays
  Clone ID: MRT4577_181968C.1.pep
RSPLPLLKNLYVLRPAHEPTSAYLIIQLVVVSAQAGQATNKHRQLFVTLNMQCKKQPFFSSFFFFFFHPPLIAFPCIHACMHAHRTTVLVPCKLKEKCMQQYRLICVCTL

SEQ ID NO: 274537 - protein, 148 aa, Zea mays
  Clone ID: MRT4577_181969C.1.pep
MDGADIPSHSAADGDRPPENADDGGVEDERAAAPPPERCEALASAIAGVLSGALREHEERAAATARSQDEVAAAIDRLNGELDRLLENAPTMVIMHHSARISSIRKRISAMNMLLKSIQRRIDSMDRIISTDHSSPVQKASNEVGTRF

SEQ ID NO: 274538 - protein, 170 aa, Zea mays
  Clone ID: MRT4577_18196C.1.pep
SSSSSSLSCSWSSSSSSTPSSSSSAAISSSSSSSSSLSSSSSSSSSSSPPPPSCSSCSSSSSSPFSSPSPICFFLASLALGLSYSSPSEISSSPSAKSPSSSPSSSSPSSSPASVGTDSSPLFPPILKSGIPQIMPSVSVPVPTVSRSARTSSSPAAGCMAVSICRGLLL

SEQ ID NO: 274539 - protein, 98 aa, Zea mays
  Clone ID: MRT4577_181970C.1.pep
TEALYRRPTGRRHPTHQAQRLCGYRVPAQPVPRKRNPGDRAVLSQGRSLPWVSSSATACWSCCSATPPAACPGRMPSSAYTVKPHARACSYVAWSSGP

SEQ ID NO: 274540 - protein, 145 aa, Zea mays
  unsure (1)..(145): unsure at all Xaa locations
  Clone ID: MRT4577_181971C.1.pep
VRFQLKGHEGGPVFQKKALSHALSFPSVXERVVYSTCSIHQAENEDVINSVLPLATSLGFELATPFPQWHRRGLPVFQGSEHLLRTDPEDGLEGFFIALFVRKAGPTSEEPSEDATVEVRTKQVRGRRNGVRAFSSLRLSRMILW

SEQ ID NO: 274541 - protein, 66 aa, Zea mays
  Clone ID: MRT4577_181972C.1.pep
NHPYLMGHTQKGKGGGVPRTFTFLGRKRRYGGISQSFGSNEGGKGSGNPTGVGAEAGQMEPARGGV

SEQ ID NO: 274542 - protein, 129 aa, Zea mays
  Clone ID: MRT4577_181973C.1.pep
SPQGGNSEGVWDSIHVFEAIERGRSTHYKLTSTVILTLSTAGGNLGEMDLSGNMTRQVEQDLPVDNDDSHIANVGRLVEDMELKMRNLLQEVYFGKAKDVVGDLRSIGSLSEGARDREAQRELIGSMRR

SEQ ID NO: 274543 - protein, 70 aa, Zea mays
  Clone ID: MRT4577_181974C.1.pep
YLGKLYMSLGCSFFKSYPCKLGKASNEMLEAFVYCNDFPCFVMATSFLFEHLFLEELVCFLVLLCFFWRT

SEQ ID NO: 274544 - protein, 64 aa, Zea mays
  Clone ID: MRT4577_181975C.1.pep
VKNSKESMQHNIKGIAQKRVYSRMFVVKPITCPNSIIWNTSCYRNNGGWLQKGVRKQHNLPNIP

SEQ ID NO: 274545 - protein, 171 aa, Zea mays
  Clone ID: MRT4577_181976C.1.pep
MAPLMSYILALGALASTALATPTYPAEPVKYQNNTLYTYREQGCTGHSFRFVDFQPNVCAVTITRPGLNISEAIAAKLTLVKSGRLVRTEVGYTNPTFVAWNEGPASNSDGPLQCGTVRDSEVVKGNTLCLSTPDNENDHGYSYFRDDSTDSSSGVQKRDAPRCTGEQYPD

SEQ ID NO: 274546 - protein, 58 aa, Zea mays
  Clone ID: MRT4577_181977C.1.pep
KQQFLTFNQLAELNSADYLQHQLPFSQLADAYPQQFLSFNQLAGLNSAAYLQHLQLPP

SEQ ID NO: 274547 - protein, 81 aa, Zea mays
  unsure (1)..(81): unsure at all Xaa locations
  Clone ID: MRT4577_181978C.1.pep
QRTPTHPPTQXNGTNASSRKPPKTKPXHQQTHKNQXILRXPTPTPPRNLXXDTXXQXXXXSXRKMVRXYNLKTNVTHYLXI

SEQ ID NO: 274548 - protein, 114 aa, Zea mays
  unsure (1)..(114): unsure at all Xaa locations
  Clone ID: MRT4577_181979C.1.pep
MFMKNTHYQLSPVPFTFRYLESKPTHWHPTHTVNLKDILDVNKINMSLSVQHTMNFQNIRXEEHQXRSELVMEXLKKIFEXEMSIXRYHLXLPQKVELTYVDSKPLPMGPSHTR

SEQ ID NO: 274549 - protein, 206 aa, Zea mays
  unsure (1)..(206): unsure at all Xaa locations
  Clone ID: MRT4577_18197C.1.pep
PPPPIDCGFVAVVVDPCRSATHRSTGRRRCVLPPLPQINLQIPWQRPVSSNVSASTSTEASGSEDWLEGMVTEYLVETFADYFGDVKMYIEERPFRRFVEACIEETIVVYVDHLLSQKNYIKEETIERMRLDEEKLMDFFREHVNVTKVESRVRILADMRDLASAGSLDSFTLIXTNILEHQPDCPPEVVEKLVAMREDIPRKEPR

SEQ ID NO: 274550 - protein, 68 aa, Zea mays
  Clone ID: MRT4577_181980C.1.pep
RTRPKKKKKKKKKKKKKKKKKKKKKKKKKKKKKKKKKKKKKKVFPWPQTPQGQILEKSKKTPGGGALI

SEQ ID NO: 274551 - protein, 383 aa, Zea mays
  unsure (1)..(383): unsure at all Xaa locations
  Clone ID: MRT4577_181981C.1.pep
MFMKNTHYQLSRFPLLGQEKVSAWTMRGLITAIRSSRLSTISNTIESFDDVDGMEQKDKEINSEWEAKAAAYAIFKNVAKPSYKHIEEVDLLRFFTKEEVHLVIPMFEGAPETGKIKKSALKNXVVKAYLDRKSLAHSLNDTKTAVMQLHDLISVIVIXIVIIVTLLFMGIATTKILVVISSQLLVAGFIFGNACKTVFEALIFVFIMHPFEVADRCVIDETQMIVEEINIXLTTVLFKNDNEKIYYPNSVLSTKPISNFYRSPNMYXTIAFAIDVSTSVESIGALRSKIKGYLESKPTHWHPVHTVNLKDILDVNKINMSLSVQHTMNFQNIREKNIRRSELVMELKKIFEEMSIRYHLLPQKVELTYVGSNPLPMGPSHTR

SEQ ID NO: 274552 - protein, 143 aa, Zea mays
  unsure (1)..(143): unsure at all Xaa locations
  Clone ID: MRT4577_181982C.1.pep
DAWRAGFETHVSYAIHAXTVEXGCRPSSRTRSTXNAEVTTAPGGXYKMEIRGDHXDDICYARLFMSPEAVCTHIDHSHDHXRVRLTRCYSIKLSCVRYANPIAFLRKEPVRICGELLCAYDLYNETCDNSYACTHKLCRSLFF

SEQ ID NO: 274553 - protein, 204 aa, Zea mays
  unsure (1)..(204): unsure at all Xaa locations
  Clone ID: MRT4577_181983C.1.pep
MADGKCGEAEVEVAQPLGRWPVLSYGVGHMLNDITSACWFTYLLLFLQEIGLAPRDAAIVMLSGQVADGLMTIVAGEMIDRFGRFKLWHIGGSVLVGISFSSVFGGCLLCTILGTDSYLVRTVGYSFFAAVFNIGWAATQVSHMSMVNCMTSNPTSRVALASCRNASTMVANLGLYGIALAVFXIVKAKTCADIVVQYKWIAYV

SEQ ID NO: 274554 - protein, 127 aa, Zea mays
  unsure (1)..(127): unsure at all Xaa locations
  Clone ID: MRT4577_181984C.1.pep
DQGKVVLVECSLLGSVXSILMLVIATLVFFGGLTNHGTDQLCDKFHVXVSTGLLILGVLYKSVLLMLRYAVSYGEHAEFYRDSGLELSRACSIVMLLAYVIYRFLQLITHKQLFQRQPQEVEDGDAS

SEQ ID NO: 274555 - protein, 81 aa, Zea mays
  Clone ID: MRT4577_181985C.1.pep
AAGKDNDEIAPEAVGLLFFLTIVLGIYLMLATTVRAPALNLPTKYLDVLLICLLLSTLIATVMTFSGANWTGKQSSTGGST

SEQ ID NO: 274556 - protein, 83 aa, Zea mays
  Clone ID: MRT4577_181986C.1.pep
RMGKKKVEKERGWIKVVKAVIRLNAKDHAPLVIVGFEVFLFMCFFFFLKFKNFPFPFFFFFFFFFNSTRPRTRGRTRGGNPEP

SEQ ID NO: 274557 - protein, 48 aa, Zea mays
  Clone ID: MRT4577_181987C.1.pep
LVHCRIQIPLGAPFHLPLGPQYCLISQKWFLSQPVPIDCFTQENFCIY

SEQ ID NO: 274558 - protein, 52 aa, Zea mays
  Clone ID: MRT4577_181988C.1.pep
QQLLHTNHSAREPLDQYGAITDDGHTADACTTHSATRVPTHTGGVQTLPSQT

SEQ ID NO: 274559 - protein, 75 aa, Zea mays
  Clone ID: MRT4577_181989C.1.pep
LKAWPSQVPKAAFHFMEKSKDGSQGVVLLINLRLPSRTVLGHCYTSQDSLVIFFSPKGSRDLFNPPRGDLRKQFV

SEQ ID NO: 274560 - protein, 51 aa, Zea mays
  Clone ID: MRT4577_18198C.1.pep
SSVRRRCRLDRTASRQCLSADKAYLLPDRILVGLPYPYTRCLVLGHFFASE

SEQ ID NO: 274561 - protein, 64 aa, Zea mays
  Clone ID: MRT4577_181990C.1.pep
AMHTICSMDGVTVGSGIGLSGQGIYRMIPERTLQAIPDNCYGPGTRSRVGSHKSPSTQRGCSAI

SEQ ID NO: 274562 - protein, 63 aa, Zea mays
  Clone ID: MRT4577_181991C.1.pep
MARAGALCLVLLCLVAAHSAAAHKSTTAPADAPADVTTPPATPTKKTPEPPKRPDTTHTNPDP

SEQ ID NO: 274563 - protein, 66 aa, Zea mays
  Clone ID: MRT4577_181992C.1.pep
IGNLQGMGGGITLLGGSSFSSHFSFSKLSVNVARCASRANTRRERSYESRSGIVNEPTEAALLAPG

SEQ ID NO: 274564 - protein, 119 aa, Zea mays
  unsure (1)..(119): unsure at all Xaa locations
  Clone ID: MRT4577_181994C.1.pep
ILSSSMXTRKPXTXPEEKEEICFCYPPVELXSHXXAKXQLKRKKTPYGSVQFKAKRGGXKRRFHTVALRSRHGKANPFDPPTXQPTNQPXXXQGKKKPLTXRATKQRNPXKPKXSGARK

SEQ ID NO: 274565 - protein, 110 aa, Zea mays
  unsure (1)..(110): unsure at all Xaa locations
  Clone ID: MRT4577_181995C.1.pep
MDANRRQSGIQQLLAAEQEAQQIVNAARAAKSARLRQAKEEAEREIAEYRAQMEAEFQRKVAESSGDSGANVKRLGEETAAKIEQLTQQAASISPDVIQMLLRHVXTVKN

SEQ ID NO: 274566 - protein, 68 aa, Zea mays
  Clone ID: MRT4577_181996C.1.pep
RDSTLVITISHPYRSRPSQPTIQRISCILNIVTQPASQPTTELNNPYRSLNWLLDYSVADLDRAATAD

SEQ ID NO: 274567 - protein, 101 aa, Zea mays
  Clone ID: MRT4577_181997C.1.pep
ELTEQTLIVNTEHECFLCPIAKSARLRQAKEEAEREIAEYRAQMEAEFQRKVAESSGDSGANVKRLEEETAAKIEQLTQQAASISPDVIQMLLRHVTTVKN

SEQ ID NO: 274568 - protein, 35 aa, Zea mays
  Clone ID: MRT4577_181998C.1.pep
FSVRFVRRVIGRPYSGNGTAVPPRLTGSRNLEESG

SEQ ID NO: 274569 - protein, 110 aa, Zea mays
  Clone ID: MRT4577_181999C.1.pep
MDANRRQSGIQQLLAAEQEAQQIVNAARAAKSARLRQAKEEAEREIAEYRAQMEAEFQRKVAESSGDSGANVKRLEEETASKIEQLTQQAASISPDVIQMLLRHVTTVKN

SEQ ID NO: 274570 - protein, 139 aa, Zea mays
  Clone ID: MRT4577_18199C.1.pep
IPRAHVSHSHCPKPPLCLLLRVPSHRSSPVCGRLRRSSPVCGRLPPLQFADLWPPPPSPVSRRLEQPPARREVCDRQPASRRCAVRSVAISLPAADWSRHREVCGRRSLIGAAARRAVGSWPMPPSICGHQSLIGVVAR

SEQ ID NO: 274571 - protein, 451 aa, Zea mays
  Clone ID: MRT4577_1819C.1.pep
MASDPDVSGGEQAEPPDDVDDPDVDEVDPTGRYFRYKEVVGSGAFKTVYKGFDVVEGIEVAWAKVEINGRTMGSPKELQRLKTEIQLLRSLHHKHILKLYTSWVDNKKRAVNIITELFTSGNLREYRTKHKKVDMKAMRRWAKQILTGLAYLHSQKPPIIHRDLKCDNIFINGNHGKVKIGDFGLAMVMQQRKTQSIQGTLEFMAPELFGENYNELVDIYSFGMCMLEMVTGECPYSECQGFVQIYKKISEGVKPVALSKVKDAEVRSFIESCLASAADRLPASELLKSPFLMKDDIIINDKTSNPVQEPIAFPPNLDLDLEATPIFVSLLPNGTVDNGKGSFSLVLRRGGFVLEGDMSGSNPVNLLLRIPVPNDKCKNIEFAFDLENDTSLLVATEMVQELELPSWSMPIVAKLVDAFLLKTVRGWRPCVQVGQMIQAVQNTASVNGKSI

SEQ ID NO: 274572 - protein, 143 aa, Zea mays
  Clone ID: MRT4577_181C.1.pep
WHATPVHRYFSTRLSSRRITRTSVERRGLADLGAVGPSGDQSDPSFTLAWSAATRCPMQIAAYCYGHGMESHVPFPCLFGSPRRPIRKLGRQFRRTALVLSELMHSIGTAAKHLFRRIWFLSPSVGAMVGWSRGHACVIWAKP

SEQ ID NO: 274573 - protein, 133 aa, Zea mays
  unsure (1)..(133): unsure at all Xaa locations
  Clone ID: MRT4577_182000C.1.pep
MDANRRQSGIQQLLAAEQEAQQIVNAARAAKSARLRQAKEEAEREIAEYRAQMEAEFQRKVAEVCTPCPIFPHWTTGPHFCVLVXQSSGDSGANVKRLEEETAAKIEQLTQQAASISPDVIQMLLRHVTTVKN

SEQ ID NO: 274574 - protein, 55 aa, Zea mays
  unsure (1)..(55): unsure at all Xaa locations
  Clone ID: MRT4577_182001C.1.pep
HVRFVIRYCTYIADRYKLQCLILXYIYSRRNLEDCGRICVCKLSYAMYEDLEHEI

SEQ ID NO: 274575 - protein, 98 aa, Zea mays
  Clone ID: MRT4577_182002C.1.pep
EVGGPSAGMSQGGLHVTDELEMVMAANCGLHVLTAYQAVRMYPYLAAYHESACALVSAAGSPYNILQEKRAMIQEYIPVTNLRLHPHAWLKHHLGQEL

SEQ ID NO: 274576 - protein, 79 aa, Zea mays
  Clone ID: MRT4577_182003C.1.pep
RVGGRVGGRVGLNRFVDFEVKKKKKKKKKKKKKKKKKKKKKKKKKKKKKKKKKKKNKKKKREGKKKKKKKKFFYKNTKL

SEQ ID NO: 274577 - protein, 108 aa, Zea mays
  Clone ID: MRT4577_182004C.1.pep
MMGGGLLMDQGMAFSGVHNFVDLLQQNGADKNLGFGSLMPQTSSGDQCVMGEGDLVDPPTDNFPDAGEDDSDDDVDDIEELERRMWRDRMKLKRLKELQQSRGKEQAA

SEQ ID NO: 274578 - protein, 137 aa, Zea mays
  Clone ID: MRT4577_182005C.1.pep
LNLMRMQFVFMCWMKIRCNARLPTGLPNQKNLVVLLSKKSFFKFWHTYSEGLFPGGVAKLLLNLEKSILSRIQTAYYFEGLADFGKIFWKVCQSLLSSTFPVRGRRGRSFLLLIPAIGTETIVVPLAVAFNASFLLL

SEQ ID NO: 274579 - protein, 85 aa, Zea mays
  unsure (1)..(85): unsure at all Xaa locations
  Clone ID: MRT4577_182006C.1.pep
EMQHLCIFLPLVAAPRWVLSQLPLQDSSPRLVKPSETLPLSGSASGGSFXRSSFYGGXIGNSLGKRLQWIRSIYYSGTTYYTPSL

SEQ ID NO: 274580 - protein, 86 aa, Zea mays
  unsure (1)..(86): unsure at all Xaa locations
  Clone ID: MRT4577_182007C.1.pep
PTHPLTLHNVYDQMPDPKWALAICSCCNGCPYYHYSYSAVRGCHRIVXVDIYVPGCPPTGDALVYGVLQLQKKINTRNDFLHWWTK

SEQ ID NO: 274581 - protein, 40 aa, Zea mays
  Clone ID: MRT4577_182008C.1.pep
HCSSFNGLCFRPWPRSRLNWEVIRLPHYVSRSMMHMFCPS

SEQ ID NO: 274582 - protein, 414 aa, Zea mays
  Clone ID: MRT4577_182009C.1.pep
ILSQTLQPIQLSHRADRHGRPQQRPRRHKFWETQPVGQFGDVADVSLPDGAIEPPSPLFEVRADPYPLPAAFEWFTCDLDDDALLADLYALLAHNYVEDDENMFRFNYSPAFLRWALRPPSFFRAWHIGVRAKESKKLVAFISGVPARIRARDDVVRMAEINFLCVHKKLRSKRLAPVLIREVTRRVHQENIWQAAYTAGVVLPTPITTCRYWHRSLNPKKLIDVGFSRLGPRMTMSRTVRLYKLPDAPLTPGFRRMELRDVAAVTRLLRAYLARFVVAPDFDEVDVEHWLLPQEDVVDSYLVESPETHEVTDFCSFYTLPSSVLNNANYATLKAAYSYYNVSTKTALQQLMNDALIVAKQKNYDVFNALDVMENESFLKELKFGPGDGQLHYYLYNYRIRNGIKPSELGLVLL

SEQ ID NO: 274583 - protein, 209 aa, Zea mays
  Clone ID: MRT4577_18200C.1.pep
IPWQRPVSSNVSASTSTEASGSEDWLEGMVTEYLVETFADYFGDVKMYIEERPFRRFVEACIEETIVVYVDHLLSQKNYIKEETIERMRLDEEVLMDFFREHINVTKVESRVRILADMRELASAESLDSFTLIFTNILEHQPDCPPEVVEKLVAMREDIPRKEAKEIVQECKEIYENSLVDGNPRKSGFVFGKLKCLTAKKGIWRKLGQ

SEQ ID NO: 274584 - protein, 59 aa, Zea mays
  Clone ID: MRT4577_182010C.1.pep
PGGGRAGVGSDGGGLRYFGGGYGGGVGNGGVGGYGGGGGGYDGGHRTAGSGNSDGNWRY

SEQ ID NO: 274585 - protein, 42 aa, Zea mays
  Clone ID: MRT4577_182011C.1.pep
SIKRGSQQQMFLKKRNFYMAPISNTDLPKLDRGTSRDFGSFL

SEQ ID NO: 274586 - protein, 433 aa, Zea mays
  Clone ID: MRT4577_182012C.1.pep
MAAPNSNDAASASGTGPAGEEDISIEALARRVQEHMTLNSNPAARRHKFWETQPVGQFRDAADASLPNGPIEPPTPLSEVRADPYPLPAAFEWLTCDLDDDALLADLYSLLAHNYVEDDENMFRFNYSPAFLRWALKPPSFFRAWHIGVRAKESKKLVAFISGVPARIRARDDVVRMAEINFLCVHKKLRSKRLAPVLIREVTRRVHQENIWQAAYTAGIVLPTPITTCRYWHRSLNPKKLIDVGFSRLGPRMTMSRTVRLYKLPDAPLTPGFRRMELRDVAAVTRLLRAYLARFVVAPDFDEVDVEHWLLPQEDVVDSYLVESPETHEVTDFCSFYTLPSSVLNNANYATLKAAYSYYNVSTKTPLQQLMNDALIVAKRNNYDVFNALDVMENESFLKELKFGPGDGQLHYYLYNYRIRNGIKPSELGLVLL

SEQ ID NO: 274587 - protein, 134 aa, Zea mays
  Clone ID: MRT4577_182013C.1.pep
PRVRVDVEHWLLPQEDVVDSYLVESPETHEVTDFCSFYTLPSSVLNNANYATLKAAYSYYNVSTKTPLQQLMNDALIVAKQKNYDVFNALDVMENESFLKELKFGPGDGQLHYYLYNYRIRNGIKPSELGLVLL

SEQ ID NO: 274588 - protein, 53 aa, Zea mays
  Clone ID: MRT4577_182014C.1.pep
LDTSKFTNPKRGGKTNICLRLKDPRANSLPRNSFLYLFLFKNLNQLPPWIQTL

SEQ ID NO: 274589 - protein, 87 aa, Zea mays
  Clone ID: MRT4577_182015C.1.pep
ANYATLKAAYSYYNVSTKTALQQLMNDALIVAKQKNYDVFNALDVMENESFLKELKFGPGDGQLHYYLYNYRIRNGIKPSELGLVLL

SEQ ID NO: 274590 - protein, 79 aa, Zea mays
  unsure (1)..(79): unsure at all Xaa locations
  Clone ID: MRT4577_182016C.1.pep
AYSYXNVSTXTALQQLMNDALIVAKQKNYDVFNALDVMENESFLKELKFGPGDGQLHYYLYNYRIRNGIKPSELGLVLL

SEQ ID NO: 274591 - protein, 61 aa, Zea mays
  Clone ID: MRT4577_182017C.1.pep
LLKVQANWILRLCLHISPICGRHMRTALFPDRHMNILIYYYRKVGIYRNTSSFCVDLIFRN

SEQ ID NO: 274592 - protein, 213 aa, Zea mays
  Clone ID: MRT4577_182018C.1.pep
MAAPNSNDAASASGTGPAGEEDISIEALARRVQEHMTLSSNPAARRHKFWETQPVGQFRDVDDTSLPDGPIEPPTPLSEVRADPYPLPAAFEWLTCDLDDDALLADLYSLLAHNYVEDDENMFRFNYSPAFLRWALKPPSFFRAWHIGVRAKESKKLVAFISGVPARIRARDDVVRMAEINFLCVHKKLRSKRLAPVLIREVTRRVHQEKFWQ

SEQ ID NO: 274593 - protein, 81 aa, Zea mays
  Clone ID: MRT4577_182019C.1.pep
RKMDFPSVLLLRYPQRFHTVLCVSVQDTVFYVGPTKQDITWSMSSGVTLDPIHPHPPTRPHILFILHHPDHFVNDLKMQSS

SEQ ID NO: 274594 - protein, 75 aa, Zea mays
  Clone ID: MRT4577_18201C.1.pep
RSAVAGTPFLGGGPGRRYGYPPGSRRESVATRALNNGVWSTCKKKKGHKQKKKKRGGVSQGFNPYMCAHDSAHSP

SEQ ID NO: 274595 - protein, 77 aa, Zea mays
  Clone ID: MRT4577_182020C.1.pep
IRRSTDAFADASADAWSDSWARNCFPREMSIYPGACFSPYCLQFRFFLNGLHLDTYYLWLHNILIIYIHYSNSKIIL

SEQ ID NO: 274596 - protein, 144 aa, Zea mays
  Clone ID: MRT4577_182021C.1.pep
FKDINNNHIGFDINSMTSVQGNPAGFFHDQDGTFENLTLSSKEAMRVWVEYDRENTQIDVTMAPLAIVKPKRPTVSTIQNLSDVLTDVAYVGFSSSTGKIHTQHYVLGWSFAMNGPAPSIDLSMLPKLPRHHHKSRRSWVLETV

SEQ ID NO: 274597 - protein, 188 aa, Zea mays
  Clone ID: MRT4577_182022C.1.pep
MAGFPLGGGGHSRDAPASSVPPVHPSDAASFLYAARAGAGLQLWQQHEQQQQQHPFYTSNIIRFSDDPPGAPPSLTGAASSSSSRGTRGGAGSGGGGGGGGVSCHVCGNQAKKDCVHQRCRTCCKSRGFTCSTHVKSTCGPAGERLVLQQEIDVCPESVRRTNAVVGALLDPNNERTDGLYGTSQARY

SEQ ID NO: 274598 - protein, 117 aa, Zea mays
  Clone ID: MRT4577_182023C.1.pep
INACFTLVYADPVFQECSIHNTTNPAVQQLSLKAIQTATSNYKTMIGEGGFGAVYRGALANGQEVAVKVRSSSSTQGTREFNNEVQINPTHIRIVFFSSKENYTSIFFFSFFFFFFR

SEQ ID NO: 274599 - protein, 81 aa, Zea mays
  Clone ID: MRT4577_182024C.1.pep
ALYGTGLYINLSPLAKQVRTGFVRISPGPGRTGPARPVWPSLLYKYEKPVSVSAFVPIQAKPSQVNVYKCWDIPYMYPYYI

SEQ ID NO: 274600 - protein, 260 aa, Zea mays
  unsure (1)..(260): unsure at all Xaa locations
  Clone ID: MRT4577_182025C.1.pep
RRRRQPRKGEEGGGRKKYALVSYHELPEYMKENEFILNYYRSEWPVLNAVLSLFSWHNETINVWTHLLGFMLFFGLTLVHLGQYFPQVADLIGHLSWPISKVAENVSSNIGDXIRRGHVHPDEPEPGXHGTAVASQTTRWPFFVFLAGAMFCLLSSSACHLLSCHSHRLNLLLIRLDYTGIAVMIVVSFFPPIYYIFQCEPRWRAAYLSAITAAGAGTVYALMSPRLSAPRYRARRALLFVGMGLSGVVPAAHAAADSEL

SEQ ID NO: 274601 - protein, 96 aa, Zea mays
  unsure (1)..(96): unsure at all Xaa locations
  Clone ID: MRT4577_182026C.1.pep
LTSLIPPILXTLVNXXKKXSYXHYVKXIXASTFIISXFXXXXXVRLDQEVXISNXXXATTQTTQLSLSFKLDYSPXIFIPVALFVTXXIIEXSCDI

SEQ ID NO: 274602 - protein, 57 aa, Zea mays
  Clone ID: MRT4577_182027C.1.pep
DLFILHTSYFKKKKKKGQTGAQHLVQEQMGPHSRLTAEGPPLSCQPLACSDSMPTRP

SEQ ID NO: 274603 - protein, 65 aa, Zea mays
  Clone ID: MRT4577_182028C.1.pep
RQAPPTGTVGHGQERACNCVNAPWPYERIRPQRRRVPSRGRCRPTTPPSPAPLADSDHVYLAAGC

SEQ ID NO: 274604 - protein, 162 aa, Zea mays
  unsure (1)..(162): unsure at all Xaa locations
  Clone ID: MRT4577_182029C.1.pep
MAIPRSSVAVNDQCMLTIGALQAKRLHRFLPSKTDDTSKEIAVHHVGDRATSYKDFTNSLPETDCRYSTYDCDFVSAENVRNTRICYILWSLSTATVKSXMLYASSNQIFLTGLYVIHVELHATDACDTTLXDELQDRCSLDIIMSMSHGRGLLLWICMPLS

SEQ ID NO: 274605 - protein, 133 aa, Zea mays
  Clone ID: MRT4577_18202C.1.pep
DGLPSQDWPSRGDIDVKDLKVRYRQNTPLILKGITVSIKGGEKVGVVGRTGSGKSTLVQALFRIVEPADGHIIIDGVNICTLGLRDLRSRFGVIPQEPVLFEGTVRSNIDPARRYSEAEIWQALECCQLKDIV

SEQ ID NO: 274606 - protein, 61 aa, Zea mays
  Clone ID: MRT4577_182030C.1.pep
RVRANSLGVVRPWPYLGEMINNGTKPICVSYSPLVYGGRTVGNPEDALPLDKEMQGKGHSA

SEQ ID NO: 274607 - protein, 52 aa, Zea mays
  Clone ID: MRT4577_182031C.1.pep
ASSMFRHFLFVRFFTDFESSFGVLNKDRHVGRKHAGVKEKVPGASLAYCSSY

SEQ ID NO: 274608 - protein, 163 aa, Zea mays
  Clone ID: MRT4577_182032C.1.pep
CPQAVFNTFCHIPRVKSLAWGPCSHAFHGPSFNQILVVSSDAFIPVHAFCHFRKSPLTVNSMSDAKELHGEWKEWRPTECSVLEDGESGPENWFCSFLTTVPVSVFNGKYQARLPMKSLLPNSAEVVSFSIYDITLSFLKYWYSQKKKKKKKKKKKKKKLERG

SEQ ID NO: 274609 - protein, 101 aa, Zea mays
  Clone ID: MRT4577_182033C.1.pep
VNDVTSGVPSVLMITLFHITRSSQNGTDSASPPISTSWISTYVLAVWCFVVCMPGSKNFRLELFQLPLLPPSTLFLPLLQVPSTERQKNRKKDRKRCARAE

SEQ ID NO: 274610 - protein, 89 aa, Zea mays
  Clone ID: MRT4577_182034C.1.pep
QLCLLQGAAERNEQRTRENSCPWTRNPSPIAPDGRPKAASRQVHPFIHPTLDLDMLLLHTKPSETIYQPSYMHLGREDKLNNVCCTTIA

SEQ ID NO: 274611 - protein, 167 aa, Zea mays
  unsure (1)..(167): unsure at all Xaa locations
  Clone ID: MRT4577_182035C.1.pep
DLIQAVITAGIIGPLVHLLQTAEFDIKKEAAWAISNATSGGSHDQIKYLVSEGCIKPLCDLLLCPDPRIVTVCLEGLENILKVXETDKNLGASGEGNVYAQMIDEAEGLEKIENLQSHDNNEIYEKAVKILEAYWMEEEDDAMGATMEAPTGVAFDFGQGGNPDLNL

SEQ ID NO: 274612 - protein, 89 aa, Zea mays
  Clone ID: MRT4577_182036C.1.pep
IRLETWTGVLLAKGGEWNNTYERTSPAVGAAALNGDNEPKDKESHQKNHRPHPQDLNADLTDDGTGPPIKLTTGHAGSEDLWILWCQLM

SEQ ID NO: 274613 - protein, 548 aa, Zea mays
  unsure (1)..(548): unsure at all Xaa locations
  Clone ID: MRT4577_182037C.1.pep
MSASTEPEKDAAAAAATEGDEKTEAKDSGSGWELLYCGGTSFDAMGRKVVGGAQGNLVSPTRLRPLVGVDIRFVASGCTACHCVALDAGGKCYTWGRNEKGQLGHGDTLLRNLPTVVSQLSKYKIIKASVGRNHTVVVTDDGKSLSFGHNKHGQLGTGSLRNEIESSPVSCIVAEATNAACGADFTAWLSSVEGSSILTAGLPQYGQLGHGTDNEYNAKESSVKLTYEPQPRPRAIAAFSGKTVVKVACGTNHTVAVDSNGFVYTWGFGGYGRLGHREQKDEWQPRLVEVFQKHNVLPPNAIVSAGSVSSACTAGGKLLSKLHXTNHTVAVDSNGFVYXPGVSVDMEGWGIENRRMNGNLALLKSSRSTMFCLLXIGSAGSVSSACTAGGGQLYMWGKMKNTGGYWLSLIVVDRASGGDRLXRLEIYDGDTGAEVEKVEVQVTKKASASTNSRANKRKKTKDVSESESEEDDDDEGXESGDDENGGVEESKGRRGRKPANRGRGRGGKKATPEAKPSGRGRGRPKKTESSAQKAGGTSGRGKRGRPRK

SEQ ID NO: 274614 - protein, 203 aa, Zea mays
  unsure (1)..(203): unsure at all Xaa locations
  Clone ID: MRT4577_182038C.1.pep
GYLEAGRDAPIVGADDSCISWGVAQNGELGYGPNGQKSSANPKKVDILEGMNVTSVGCGFGLSLIVVDRANVGDRLGQLEIYDGDTGAEVEKVEVQVTKKASASTNSRANKRKKTKDVSESESEEDDDEEDESGDDENGGVEESKGRRGRKPSDRGRGRGGKKATPEAKXSGRGRGRPKKTEGSAQKAGGTSGRGKRGRPRKM

SEQ ID NO: 274615 - protein, 117 aa, Zea mays
  Clone ID: MRT4577_182039C.1.pep
RSLAPFIRQARWPVPPSARHHPLVLAVDSFTPWQLPGRCSPATSLVRPKPHQPPLLALRPHAQLFCRVPSSLIVPPPPSVGCRHLCPAPPRWRCSTTALPCRCSRLDCARRVLRRRF

SEQ ID NO: 274616 - protein, 123 aa, Zea mays
  Clone ID: MRT4577_18203C.1.pep
YRDAYAICVHTIRMSHAACVNIAWIFCMSLICRSGVLVHVIRAYHNILSWVPAQLCLVRFPQVCAVGFHPTGLYIGLVSVSLLLCRIIQCDQIGRSVCGGDWWLPLDWCMPSQNKICTLPSSR

SEQ ID NO: 274617 - protein, 248 aa, Zea mays
  Clone ID: MRT4577_182040C.1.pep
TRYNAKESSVKLTYEPQPRPRAIAAFSGKTVVKVACGSNHTVAVDSNGFVYTWGFGGYGRLGHREQKDEWQPRLVEVFQKHNVLPPNAIVSAGSVSSACTAGGGQLYMWGKMKNTGDDWMYPKPVMDLSGWNIRCMASGNMHHIVGADDSCISWGVAQNGELGYGPNGQKSSANPKKVDILEGMHVTSVGCGFGLSLIVVDRANVGDRLGQLEIYDGDTGAEVEKVEVQVTKKASASTNSRANKRKKT

SEQ ID NO: 274618 - protein, 98 aa, Zea mays
  Clone ID: MRT4577_182041C.1.pep
FLKLIKIGHCSWCMASITVGNNHIHEQSHSRQNTGWTAVTGICDPTARFHLFSRAYYLEAESKGASLVLVVPGMPFTYGYCTYYHHTQQRPKLALGHP

SEQ ID NO: 274619 - protein, 173 aa, Zea mays
  Clone ID: MRT4577_182042C.1.pep
MSASTEPEKDAAAAAATEGDEKTEAKDSGSGWELLYCGGTSFDAMGRKVVGGAQGNLVSPTRLRPLVGVDIRFVASGCTACHCVALDAGGKCYTWGRNEKGQLGHGDTLLRNLPTVVSQLSKYKIIKASVGRNHTVVVTDDGKSLSFGHNKHGQLGTGSLRNGWYLSLLIACE

SEQ ID NO: 274620 - protein, 68 aa, Zea mays
  Clone ID: MRT4577_182043C.1.pep
GSKLQAPSRWRAEPRMPRTSGGGLIDVRRCGRELARALARPRGRVGVVSLTFSASRSLGDLGWEGLGL

SEQ ID NO: 274621 - protein, 242 aa, Zea mays
  unsure (1)..(242): unsure at all Xaa locations
  Clone ID: MRT4577_182044C.1.pep
FFSELLSYAIHKEITILQAKAIEHPQQMFYTPMSVTAFPQYQLLITHLQGQPTIGQTNTWSYXGKSEIFVTKTYKHMIAEELAHPAYMWLWASKCQPKQKVFFWLLLEAGLNTRSLLRRKNMDLELFTCENCIRQREEKTVHLFLRCSFVRRCWQIIGVTPPRTSDXPCDAMNXGFNXNPWKIEVIITMTWCIXNTGTAXIFENIPPTIAACKDMFRREMILICHRLKPLLAEQVQNWLQQL

SEQ ID NO: 274622 - protein, 48 aa, Zea mays
  Clone ID: MRT4577_182045C.1.pep
RKMRKIASGAPAQVLEWRSAMEIRRRREGGEPQGRSLAGAPRINREEV

SEQ ID NO: 274623 - protein, 71 aa, Zea mays
  Clone ID: MRT4577_182046C.1.pep
HSYAHASAHIVRPRVRPRVRPRVLPHVRTRVREPQAFRFYIRYLSSAYMHSKSYATTLYISDLSHLVWDCA

SEQ ID NO: 274624 - protein, 88 aa, Zea mays
  Clone ID: MRT4577_182047C.1.pep
EISLDPIRGSCAGVDRIKLLARSRMMPKAQVNTYTFTDWLMPTDAIRRLTVYLAISGRALVSPTDYYDIFMDREARRAIDKSPYDKAA

SEQ ID NO: 274625 - protein, 86 aa, Zea mays
  Clone ID: MRT4577_182048C.1.pep
INSMPPMVENTNSNTLEVQGSFALTYMVGFISLNLRNQNMDKVVSHTRPQQRSGRAGRCVARRSEARHACKLTGGRGVVVSIFSTH

SEQ ID NO: 274626 - protein, 68 aa, Zea mays
  Clone ID: MRT4577_182049C.1.pep
SSLHTRAGARNGCLGTTTLIVAHCRSAKPAALLKSPAERGGCALPSVYVLASVERYIRRSFTDRIRNL

SEQ ID NO: 274627 - protein, 342 aa, Zea mays
  unsure (1)..(342): unsure at all Xaa locations
  Clone ID: MRT4577_18204C.1.pep
PGMSLSYGISLNSLVFYXISISCMIGNDMVAIERVHQYSTLPSEAAWEVADGLPSQDWPSRGDIDVKDLKVXPFFLICITSYYSTLTSAKMNEXEQSANICXRYRQNTPLILKGITVSIKGGEKVGVVGRTGSGKSTLVQALFRIVEPADGHIIIDGVNICTLGLRDLRSRFGVIPQEPVLFEGTVRSNIDPARRYSEAEIWQALECCQLKDIVASKPEKLDALVADMGENWSVGQKQLLCFGRVILKRSRILFMDEATASVDSQTDAAIQKIIREEFTECTVISVAHRIPTVMDSDRVLVLDAGLVAEFDAPSKLMRRPSLFGAMVQEYASRSSSVKETVG

SEQ ID NO: 274628 - protein, 76 aa, Zea mays
  Clone ID: MRT4577_182050C.1.pep
CETKPTQSHRHDAKIVCECDCARVSVSLVLSTAREEDDDGWTLGQTALSCTLSFSPPTVPLDSKSPAPHDILRAAG

SEQ ID NO: 274629 - protein, 82 aa, Zea mays
  Clone ID: MRT4577_182051C.1.pep
LRNDTATHFSHDAIVGEDVILYAMLRSDPVAKGTITSTNPNTVLGGENLGTQFCEVVVNVVLKRDADLPRPYDHMETMGDAY

SEQ ID NO: 274630 - protein, 302 aa, Zea mays
  unsure (1)..(302): unsure at all Xaa locations
  Clone ID: MRT4577_182052C.1.pep
SRPAGFLISRPAGRPVPPWCRSTAQLASTSTSYRHLSPFRHPSLSSAIASAAPPPSAPKLKCGLRYLSPRRSQSPLTPALWKPKVRDPWSSAXTLFSTDDNPTPLQTATSLLLTGAISVFLFRALRRRARRAKELRVRSSGLKKPNNLTEEALERLRLMSASPIETEKATSPIQALLGGIAAGVIALILYKFSTTVEAALNRQTISDSFSVRQITITIRTIVTGLCYLATSVFGINAVGLVLYSLQLTLQSIMDDDSSSSTGKISEQSNTLASSDSSTSSRESDSSDMQVTDKSKNSAEKQS

SEQ ID NO: 274631 - protein, 66 aa, Zea mays
  Clone ID: MRT4577_182053C.1.pep
QKFFPTLYLPSLFTSHKLWSHNDRQASLKYNPHSKNGEQRYILKTKKATKLAFYLVKSFTPPSPIF

SEQ ID NO: 274632 - protein, 79 aa, Zea mays
  Clone ID: MRT4577_182054C.1.pep
KPFIFIYINKQTIWYKKLSIRIATTSPAMTKLLGMPAWRTLSVFGKTCFPTDILGFNDIRVKQVGTKSKKNNGGDFHFL

SEQ ID NO: 274633 - protein, 73 aa, Zea mays
  Clone ID: MRT4577_182055C.1.pep
NLSPVVLKTHCICPIVPIPGPPSPVWGGENVAKHFWPWSRLAPVLTWGPPKSFLYFMDPFCSCGLEPLSPLFV

SEQ ID NO: 274634 - protein, 83 aa, Zea mays
  Clone ID: MRT4577_182056C.1.pep
GPTRKDPGGFPLNIYIAPFNGQKKTRGGLQKAKCWHFGNIQPKSHQDRGPRQKRQGLFAPSIAQRFYWGESPKTYFLTPRGPT

SEQ ID NO: 274635 - protein, 76 aa, Zea mays
  unsure (1)..(76): unsure at all Xaa locations
  Clone ID: MRT4577_182057C.1.pep
QPRREGXRTTNXQSDKGGETKRRXXHKXXRRTGRGEXVFFSKXXTGQQETNTIESRRLSTCFLSQKKLWAYGPFGY

SEQ ID NO: 274636 - protein, 50 aa, Zea mays
  Clone ID: MRT4577_182058C.1.pep
TLSMKITHKHQAIFLSIQNFKSYLMDPPILVFVKQIEDPVNEVQIRVDQN

SEQ ID NO: 274637 - protein, 38 aa, Zea mays
  Clone ID: MRT4577_182059C.1.pep
QQTKMNIKNYIYECRLYVCRYLLSFIRIWTENGLKTIF

SEQ ID NO: 274638 - protein, 41 aa, Zea mays
  unsure (1)..(41): unsure at all Xaa locations
  Clone ID: MRT4577_18205C.1.pep
VHARPXXPXGVGGVXSDVGHXIHIPRIDERASRMFLYFWLL

SEQ ID NO: 274639 - protein, 271 aa, Zea mays
  unsure (1)..(271): unsure at all Xaa locations
  Clone ID: MRT4577_182060C.1.pep
MASTAYSRSSSNKLPGGERRLPPRLMRGLTSKFEPKKLGVGLVAGCCLALLTYVSLAKLFAVYSPVFASTANTSALMQQNAPLASSKPSVPETETIPPEETLDDGDGADTGDLRGTEPGLPEAAVMRNDMAAGSDEPGLPTRKDGGGNAEAEPTNKPSEDGNGGQQGGKMTCDENSVDERFPYARPTVCELSGDVRVSPKQRTVYLVNPSGGGGGGFDESVEKRLRPYARKDDSSMPHITVKXVASGAAAPECTKRHAVPAGVFFRGGSNT

SEQ ID NO: 274640 - protein, 66 aa, Zea mays
  Clone ID: MRT4577_182061C.1.pep
VPVSFNMSGTFNRRLRSRASVSACRFSVHPGVKRCTAARPGPCTLYQWRSQFHIEAFDHRISGARK

SEQ ID NO: 274641 - protein, 563 aa, Zea mays
  unsure (1)..(563): unsure at all Xaa locations
  Clone ID: MRT4577_182062C.1.pep
MTSTAYSRSSKLPGGERRLPPRLMRGLASKIEPKKLGVGLIAGCCLALLTYVSLAKLFAIYSPVFASSANTSALMQQNAPPTSSKPSVPETETIPPQETLGGGGDSADPVDLREGATGSEEPGLPEAALTRKDMAAGSDEPGLPTRKDDGEDAAAEPTTKPSEDGKGNGSGGGQGVGKMICDENGVDEGFPYARPTVCELSGDVRVSPKQRTVYLVNPSGGGGGGXRERRERLRPYARXDDSSMPHITVKSVASGAAAPECTKRHAVPAVVFSVGGYNTDNNLFDDDMTDALVPLFLTTAHLDGEVQLVVADYKPRWVRKYAPLLRKLSRHGVVSLDGDAEGEEEGPLDGVHCFPAGAFVVGLLYRDRDRDLDLSPHPARNRNPRNVTMADFARFLRGALALPRDRPAVLGGAPGMRPRLLVVSPRRLLNLEEVAAAADALGFDVASAEACADDVAEFAARVNAADVLVGVRGAGLTNQVFLPTEAVLVQIVPWGKKIEWVTTSSYGRAAAGMGLRYLEYYVGEEETRLRDKYPRETVMEQDVVVNLTRFRPVLLQALDKLQQ

SEQ ID NO: 274642 - protein, 571 aa, Zea mays
  Clone ID: MRT4577_182063C.1.pep
MTSTAYSRSSKLPGGERRLPPRLMRGFASKIEPKKLGVGLIAGCCLALLTYVSLAKLFAIYSPVFASSANTSALMQQNAPPTSSKPSVPETETIPPQETLGGGGDSADPVDLREGATGSEEPGLPEAALTRKDMAAGSDEPGLPTRKDDGEDAAAEPTTKPSEDGKGNGSGGGQGVGKMICDENGVDEGFPYARPTVCELSGDVRVSPKQRTVYLVNPSGGGGFDERGEKRVRPYARKDDFLLPGVTEVTVKSVPSAAVAPKCTRQHTAPAVVFSVAGYTDNFFHDMADALIPLFLTTAHLDGDVQLLVTNYKPWWVQKYTPVLRKLSRHDVMSFDAADEDDAVHCFPAGAFLGLYRDRDLILSPHPTRNPRNLTMVDFARFLRGALALPRDRPAALGEQPGARPRMLIVSRAGTRRLLNLDEVAAAADELGFNVTAAEAGADVPAFAAQVNAADVLVGVHGAGLTNQVFLPTEAVVVQIVPWGKMDWMATNFYARPAAGLGLRYLEYYVGAEETSLKDKYPREHVVFSDPMALHKQGWQALAQTVMKQDVTVNLTMFRPVLLQALDKLQQ

SEQ ID NO: 274643 - protein, 53 aa, Zea mays
  Clone ID: MRT4577_182064C.1.pep
YAADQNLTVFQDDPDDDNSLIASLSNQASTHAEYEQHLEVPLPPRSPTQSHSN

SEQ ID NO: 274644 - protein, 37 aa, Zea mays
  Clone ID: MRT4577_182065C.1.pep
MAKSAAIGIDLGTTYSCVGVFQHGKVEIIANDQGNCT

SEQ ID NO: 274645 - protein, 58 aa, Zea mays
  Clone ID: MRT4577_182066C.1.pep
AGFLTGLKFSFPPNNDPFVTPLKSGGNSPRFDNGLIMQVWEAPPSVRFYSTSCAPHGS

SEQ ID NO: 274646 - protein, 78 aa, Zea mays
  unsure (1)..(78): unsure at all Xaa locations
  Clone ID: MRT4577_182067C.1.pep
LNPGSLECXRRVTPMAPRFWALYAGDSLDPALPGPLLRYPVPVPKEGPVPKLPGAKFFPDPQALVLGALSNPPPIFPP

SEQ ID NO: 274647 - protein, 90 aa, Zea mays
  Clone ID: MRT4577_182068C.1.pep
PKAEVASPRNEPFQLGRGVHDKPRVAFSNRKSMDRRARGLPRLAEGVGRARLVLVGFAYPAQILVEINKSIPEGPERATHDDGKRDLHNH

SEQ ID NO: 274648 - protein, 54 aa, Zea mays
  Clone ID: MRT4577_182069C.1.pep
LGGLCKTCIPRSDEINLIDLPPPSAWVFFASYIGQASHDPQQHYDGGILVLRIF

SEQ ID NO: 274649 - protein, 63 aa, Zea mays
  Clone ID: MRT4577_18206C.1.pep
QKLGENRILAESGEKLEPVPKTTKKGGPKKKGKTQGCPKSESTHINWVAPTARLKKWKTSRAR

SEQ ID NO: 274650 - protein, 99 aa, Zea mays
  Clone ID: MRT4577_182070C.1.pep
DGPPQPNSPPDTVCRPDRTGEAAPWSQHEGGTEPKRPHNAGEPSTLHLTSSNHKRTYKVTTTTKGDQKTPELRARSWSDRVHIGRSPLGLHGCPECGGD

SEQ ID NO: 274651 - protein, 66 aa, Zea mays
  Clone ID: MRT4577_182071C.1.pep
PVALTRTRSRSTSGTGSIYHKLTLHVRCECDSYIYSDTLHLKLLALRRTTTTTVTTITLPISILMD

SEQ ID NO: 274652 - protein, 157 aa, Zea mays
  Clone ID: MRT4577_182072C.1.pep
LGKKKTHPGGQYANPPPPGGGRFFYSTGPTGFPPGKGAVGPPPLMWGRPPLRAPRLFPFCFRVVFFVELLTGNHFPQGTALALFSPSFYSPPHKENWVPPRVRAGISGGTPGAGFFFFFFFFFLESRELPSSFQKPFINSKTQNIFCFGLPIWKPGG

SEQ ID NO: 274653 - protein, 91 aa, Zea mays
  unsure (1)..(91): unsure at all Xaa locations
  Clone ID: MRT4577_182073C.1.pep
SGXDPXVTVHGSWVXAVVPLMKLLCLAVIGLLLATRGSGRAQGPLSSEQLVSRFLPAYLVTGADITATGDRRYNCWALAGCAARREEDVTG

SEQ ID NO: 274654 - protein, 114 aa, Zea mays
  unsure (1)..(114): unsure at all Xaa locations
  Clone ID: MRT4577_182074C.1.pep
GDDSXXKTRDNIMNCDTNGWHPTWXLSTSIWPPFTXLSTLGLLTNLRDLGIVLLAYFTLAXLSCTYPSTTPYPLAGALHWRSLGTDRLCVCAYPHQQYTYTYLRWHRSIPCPQY

SEQ ID NO: 274655 - protein, 70 aa, Zea mays
  Clone ID: MRT4577_182075C.1.pep
KHHRTSALQRKTTGLTTFLGHFRESAGVFYSLGCLGAPKPNEIKGPESIFNNKEILTSNPFDFVAFKLAL

SEQ ID NO: 274656 - protein, 156 aa, Zea mays
  unsure (1)..(156): unsure at all Xaa locations
  Clone ID: MRT4577_182076C.1.pep
MTIVKGMFMLISNTCPDIQSQSMQAGATAPTTRPNHKRXKNXSGQDDEVXVLAWLYISLDHVVGKYKKVGRYWSRIYEYLNEHKPCQSQRTFNSLMHRWETIQKCVNKFCGCLSRIELRRQSGSTMQDMVAQACSLCKTLDRLQNSGQDAKSLFAV

SEQ ID NO: 274657 - protein, 55 aa, Zea mays
  Clone ID: MRT4577_182077C.1.pep
IPGGSHSSLNSSIHITHLYFLSSHFHAPSLLRRRWISFIRLINVFYPFSMDLFYL

SEQ ID NO: 274658 - protein, 87 aa, Zea mays
  Clone ID: MRT4577_182078C.1.pep
RLYISLDHVVGKYKKVGRYWSRIYEYLNEHKPCQSQRTFNSLMHRWETIQKCVNKFCGCLSRIELRRQSGSTMQDMVITNHYEVSYL

SEQ ID NO: 274659 - protein, 72 aa, Zea mays
  Clone ID: MRT4577_182079C.1.pep
GSSPTPTTFLSSHPRRELRGPACTEAKGPSFLLQAAPTPYRPPSSSMPRGHRPRRVPSAVARDTDRRGGAVP

SEQ ID NO: 274660 - protein, 72 aa, Zea mays
  Clone ID: MRT4577_18207C.1.pep
AEGDMRILFPWLMEDTYEAARYIFVLHSNRMTCECKNEGGLPAPQGFPLGGLFIKIGSPVFGYCTSPSKYRV

SEQ ID NO: 274661 - protein, 58 aa, Zea mays
  Clone ID: MRT4577_182080C.1.pep
HKNVLILEQLEYWIQEPARLRRRISYHDLGITQEENLNSFSAGKPSSKSMVQHLLEIG

SEQ ID NO: 274662 - protein, 79 aa, Zea mays
  Clone ID: MRT4577_182081C.1.pep
MSYQAGYPPPGQQAYGAPPPAYVAPPPAYPPTAQDGGAAYYGQQQQTTTTTTTTSRGGDGFWKGCCAAICCCCVLDMCF

SEQ ID NO: 274663 - protein, 64 aa, Zea mays
  Clone ID: MRT4577_182082C.1.pep
MGLVLFFCLLHKKQKTGKSMVFLITPSHLTLGEPVYIYIKLLTENHHATLGTIYTRMMAAHSPI

SEQ ID NO: 274664 - protein, 30 aa, Zea mays
  Clone ID: MRT4577_182083C.1.pep
MMRSDHLLHAWLCSCSCAAICCCCVLDMCF

SEQ ID NO: 274665 - protein, 150 aa, Zea mays
  Clone ID: MRT4577_182084C.1.pep
FVRNFSPSKRAGLGWDPRGFWWGFFSWACCLKSGPPKTLWRGSPPFWFLGRSFFPRGSRFLRASSPTRLPSLLTFFGFPPPFSPIFGVPFFFSPLKPRHPFFFQSWFLWGFSNPKKKKKKKKKKKKKKKKKKKKKKKKKKKKKKKKKKAA

SEQ ID NO: 274666 - protein, 158 aa, Zea mays
  Clone ID: MRT4577_182085C.1.pep
FPYKSTAVSAPYTPLYGCMIARASNYVPNSDPVELLQDILSPLTPLLWSDRHRSLCRAIIVAHISCIPHVYELFSCALETSLLMPDLVNTHSPGRYAESVSHHDLAEVPEMTLLRMLADVQFFDLPERPPWEQRPDMSSPSSAWSSAPFRRTSRSDTP

SEQ ID NO: 274667 - protein, 52 aa, Zea mays
  Clone ID: MRT4577_182086C.1.pep
KPEDQLNGPFMFAEYRGRLIYQIPSPWMACSNFVIILDCVSSHSPVPSEPCR

SEQ ID NO: 274668 - protein, 111 aa, Zea mays
  unsure (1)..(111): unsure at all Xaa locations
  Clone ID: MRT4577_182087C.1.pep
SKGSTSAKAGLRRAGXYGRLRATNYLPPXVTRGXVPLXEDRTLLALHALLGXRRSXXXPPLPXRPAPXIXHYWXTHLQKRLAPMGIXPLXHIARAXLPGGSSGAGGTSGAR

SEQ ID NO: 274669 - protein, 85 aa, Zea mays
  Clone ID: MRT4577_182088C.1.pep
LTQMVLGPNRAIPMGSPRGTTLGISPLLFEEAYFLFTLTVAGKFCSGWGSNSHPWGCVKKQLLFPCLWIKPFGLKNEMKFYLFGP

SEQ ID NO: 274670 - protein, 72 aa, Zea mays
  Clone ID: MRT4577_182089C.1.pep
PPRAISSTTQKGIRFTVLRVAPCTMNPIMGATWWLLALIHLKMDIVINHVSERHWLAHGGTPFRNGRAAHPS

SEQ ID NO: 274671 - protein, 158 aa, Zea mays
  Clone ID: MRT4577_18208C.1.pep
SCYSTRQWSDRVDCWASSHILQVVSGIQPGDVYKKGEASCIECKPVYKSGFTSADEKILGSSSLRKQWDGGRGGDRIEAYAGGVELVTKLSTQCTASQPIHEPPRWVGGKRRMSPIRHPSVPAVRGAEVRESGHHLLSVYPLCCVREAVGSGTRQLHV

SEQ ID NO: 274672 - protein, 111 aa, Zea mays
  unsure (1)..(111): unsure at all Xaa locations
  Clone ID: MRT4577_182090C.1.pep
DAXEKGQTPTQKGGQRRDQDGNPQDKSATXNKNHRTHKAQGTAPETPEEQNTHKKKAEAKRXKHRERNRKDKDPNTRPRRGESRTHRQARNDKRTKKQPPTGKDETTTAST

SEQ ID NO: 274673 - protein, 78 aa, Zea mays
  Clone ID: MRT4577_182091C.1.pep
HMLANALLPIWSQCTPTLNFKKILWVTRRPLIAHVALSRWSHTASTTTRAMEMGKWPSGVAAGSGLLKKSPLIRRVMS

SEQ ID NO: 274674 - protein, 51 aa, Zea mays
  Clone ID: MRT4577_182092C.1.pep
VIKPNHGSALVHSHNIRFYQSGNTTHARKISFVNYQNGTALLTGALHLLSF

SEQ ID NO: 274675 - protein, 50 aa, Zea mays
  Clone ID: MRT4577_182093C.1.pep
RASYYFCDPLLFFFFHYIVSFLIYVFLFFFFFLYLYFFFYFFILFFYYFF

SEQ ID NO: 274676 - protein, 45 aa, Zea mays
  Clone ID: MRT4577_182094C.1.pep
PSGIVLCCESIIYYSHWIHNLAIDICKACPSIQAIHYPKFGVLRL

SEQ ID NO: 274677 - protein, 66 aa, Zea mays
  Clone ID: MRT4577_182095C.1.pep
KAKNWGTKENCGIQTFTMSKHPIGLAFLYEKGRNAAIITHINSIGMLGAMHDVDCILSTCLNNYRA

SEQ ID NO: 274678 - protein, 67 aa, Zea mays
  Clone ID: MRT4577_182096C.1.pep
KTCSPNNPPIQQWKQLLSDDCKKLILRMLDSSPTLLRNSGTIIKIIQTHISATAHHLITIDINTARA

SEQ ID NO: 274679 - protein, 83 aa, Zea mays
  Clone ID: MRT4577_182097C.1.pep
LFASLDRRGRCGEQIGIEVQFKHFIEHISSVELGVLLRVILQGFYYIELASPHIRLRDSRLLTRLVNQQKDLYISRGATEVAG

SEQ ID NO: 274680 - protein, 97 aa, Zea mays
  Clone ID: MRT4577_182098C.1.pep
DASPANLNPMQSGHSRYIIGHKPEREPYVILWVPTAKQDFSRGYVRYWPGQTRFHNLTGQLTALSPMLETECDIFLLPGIGHGRIQGPNCRDHLGTR

SEQ ID NO: 274681 - protein, 47 aa, Zea mays
  Clone ID: MRT4577_182099C.1.pep
ILKRVLMSLFWLTEALIGSWKFYLLRGRWTHSHKGFLLTTHGTRFYI

SEQ ID NO: 274682 - protein, 84 aa, Zea mays
  Clone ID: MRT4577_18209C.1.pep
MALSSRRMAAAPFFVVVLLVLVAAERTMGRVVVEETLCLSQSHAFKGVCLSNTNCDNVCKTEKFTGGECKMDGVMRKCYCKKVC

SEQ ID NO: 274683 - protein, 42 aa, Zea mays
  unsure (1)..(42): unsure at all Xaa locations
  Clone ID: MRT4577_1820C.1.pep
VTSIPPRVRVDGLFGFILLIFSCYEQHXGYQVGHVWIHVANS

SEQ ID NO: 274684 - protein, 79 aa, Zea mays
  Clone ID: MRT4577_182100C.1.pep
KSLLWLAYLEKKISLQKFPTWVSPGGGTGAPVWQFLNPQFFKRPLLRLRSLNKPLGSFWAFNYPDYRVLFPPRPGKKFP

SEQ ID NO: 274685 - protein, 126 aa, Zea mays
  unsure (1)..(126): unsure at all Xaa locations
  Clone ID: MRT4577_182101C.1.pep
SYANFAIEAVAYTNMHRHLFPALAPVLRARTYCRPGLSGHVTSAMRCSGXVPYSSASGGGGGIGTCVQDFCRDESDRAYPWSRYFTCCERFIQNALKNDVDSAPIATRISRQASHCQEVYRCLSTP

SEQ ID NO: 274686 - protein, 396 aa, Zea mays
  unsure (1)..(396): unsure at all Xaa locations
  Clone ID: MRT4577_182102C.1.pep
MEAQNGYSPLLAVDDHEAAAAAAIHATGAGDEGDDVKLRLLGYKQQLKRDLSFNGVGQWAVTTIVDYSLAQLIQVIILLATGGKNGGGYLASKYMVIGFHAXILLIHAVINSLPITFLSFFGQFAAAWNMLCVFVLMVAVPTVATSRPAGIVFTHQTTEXAYLQRRGVLCPDXALTRSSXQTEETKNADKNGPIGIISAIGISILVGWGYILGVTFAVKDIPYLLSPDNDAGGYAIAEVFYLAFKSRYGSGAGGIVCLGVVAVAVYFCGMSSVTSNSRMAYAFSRDGAMPFSSVWHKVNKQEVPINAVWLSALVALCMALPSLGSLVAFQAMVSIATIGLYISYALPILFRVTLARKYFVPGPFNLGRYGVLGGXVAVLWVATITVLFSLPDTYPG

SEQ ID NO: 274687 - protein, 171 aa, Zea mays
  Clone ID: MRT4577_182103C.1.pep
FGSSSSRIFSSVNVLREFDVLIPEEARQLRRKALSRIEWLQKADVPTIAQIEEFHSMQRMMNAPDSNDNIDLLLSIDLLGLQGAGKAFPNKIVFDDKLVLANTQEFFDGNFPVDSWLPIFVNCLYPVSQLPSEAVVVNVTCGSGRGGLPTTAWISSAVNNRSSDINKRIRT

SEQ ID NO: 274688 - protein, 100 aa, Zea mays
  Clone ID: MRT4577_182104C.1.pep
GMAGYMTGRALPCGGQPLSSNSQLLPAMVAAICSLGSSAPWHGIRLPARSRSASRSRGPPMGAPHTPWSSLDGNTDIRALEFISTPSSYVSRDLALSPMA

SEQ ID NO: 274689 - protein, 145 aa, Zea mays
  unsure (1)..(145): unsure at all Xaa locations
  Clone ID: MRT4577_182105C.1.pep
MEAKNGYSYSPLAGDDHEAAAXGGGGDQHXGAGFGGDDVKLRLLGYKQQLKRDLSVVANFSVSFSIISVITGVTTLYGTGLQFGGPVTMVYGWPIAGAFTVAVGLAMAEICSAYPTSGGLYFWSARLCTHRRWGPFAAWLTGWVN

SEQ ID NO: 274690 - protein, 52 aa, Zea mays
  Clone ID: MRT4577_182106C.1.pep
PACVNSCLLVSSTNWVLPQQLVCSQWGILPHGASYFQQHHMVRLKSCCGICF

SEQ ID NO: 274691 - protein, 555 aa, Zea mays
  unsure (1)..(555): unsure at all Xaa locations
  Clone ID: MRT4577_182107C.1.pep
MTWNRSXPTAVAAAPGXAGDDTGLARLRELGYKQELKRDLSVLSNFAFSFSIISVLTGITTLYNTGLNFGGPATMTFGWFVAGAFTMAVGASMAEICSSFPTSGGLYYWSARLSGKRWAPFASWITGWFNVVGQWAVTTSVDYSLAQLIQVIILLATGGKNGGGYLASKYMVIGFHAAILLSHAVINSLPITFLSFFGQFAAAWNMLGVFVLMVAVPTVATERASAEFVFTHFNTDNGAGIRSNLYIFVLGLLMSQYTLTGYDASAHMTEETKNADKNGPIGIISAIGISILVGWGYILGVTFAVKDIPYLLSPDNDAGGYAIAEVFYLAFKSRYGSGAGGIVCLGVVAVAVYFCGMSSVTSNSRMAYAFSRDGAMPFSSVWHKVNKQEVPINAVWLSALVALCMALPSLGSLVAFQAMVSIATIGLYISYALPILFRVTLARKYFVPGPFNLGRYGVLVGWVAVLWVATITVLFSLPVTYPVTKDTLNYTPVAVARPPLPRPRVLAAQRQALVQGPCHQSGRMNMYNWTCIVERLAETEELLPTTCCNYFVPKN

SEQ ID NO: 274692 - protein, 218 aa, Zea mays
  Clone ID: MRT4577_182108C.1.pep
MEAQNGYSPLLAGDDHEASEAAIHATGAGDEGDDVKLRLLGYKQQLKRDLSVVANFSVSFSIVSVVTGVTTLFGTGLQFGGPATMVYGWPIAGAFTAAVGLAMAEICSAYPTSGGLYFWSARLCTHRRWGPFAAWLTGWFNVVGQWAVTTSVDYSLAQLIQVIILLATGGKNGGGYLASKYMVIGFHAAILLSHAVINSLPITFLSFFGQFAAAWNMA

SEQ ID NO: 274693 - protein, 90 aa, Zea mays
  unsure (1)..(90): unsure at all Xaa locations
  Clone ID: MRT4577_182109C.1.pep
PETARPRPATESASARCQAPCLAXSPHXHVTLLPPPPRHEGAAHQPRQARHQQGRPTRLRRHDPCESSQAEESLAAPSKLGWKRLDQGCR

SEQ ID NO: 274694 - protein, 66 aa, Zea mays
  Clone ID: MRT4577_18210C.1.pep
QKQKTDYLFKRRTTSSQHLHELEQHASCDHTISPTKDKDYQPNLLLKPSPLLNNMHPLPTSQIIGH

SEQ ID NO: 274695 - protein, 39 aa, Zea mays
  Clone ID: MRT4577_182110C.1.pep
IFPLSSQFCYTFYASQDRLLSIVPQTHRLVRAMHFLPVS

SEQ ID NO: 274696 - protein, 89 aa, Zea mays
  Clone ID: MRT4577_182111C.1.pep
VVVVTLFGLVSDPLFLQRISSPVVLFLPTLSLGSAATAALGPAYPRSPWTRGPPAESWDPMCGACVVVVARRPPVPLSLPHLARHGRPG

SEQ ID NO: 274697 - protein, 64 aa, Zea mays
  Clone ID: MRT4577_182112C.1.pep
DGTSYYDSRVIMQGSGKHVHGRVTLSRRVNSSAVVDGGLKFSRVNINGASRLLQCPASQAIKHP

SEQ ID NO: 274698 - protein, 86 aa, Zea mays
  Clone ID: MRT4577_182113C.1.pep
WEQTKQSRFVTRPMLERFTEKAIKAIMLAQKKPRPLAHNFVETDQILLGLMGKGTGIAAKGLKPMEINLKDARVEVEKIIGRGNGF

SEQ ID NO: 274699 - protein, 47 aa, Zea mays
  unsure (1)..(47): unsure at all Xaa locations
  Clone ID: MRT4577_182114C.1.pep
YQPTQFFFFFFCVVXXFFFFFFFFFSFFFFLTYHMTLLNTNISSRRE

SEQ ID NO: 274700 - protein, 139 aa, Zea mays
  Clone ID: MRT4577_182115C.1.pep
RCQYGPELPGRPTPSDQRRSDHTTFSRLLPSTTLYNAIYPATIGPDETGKPPVTDALAREDGELSGPIAVDAYEDQGVLPDVRRVEQGHPRVQPQLHQHPRPQELLRRRHAPLRAAQGRRQPHSLRQGDLQHQLQLIQL

SEQ ID NO: 274701 - protein, 115 aa, Zea mays
  unsure (1)..(115): unsure at all Xaa locations
  Clone ID: MRT4577_182116C.1.pep
PGSPPTGRPGGHGGARATVSGLIRGSTERLAVWGASEVKSQPTYWGRGPGAQVESLGEDVQGACPEEGGAPETACLPADAAGAGQQGRPAEARLSAYRPXRSCSDPIVIRARGDF

SEQ ID NO: 274702 - protein, 450 aa, Zea mays
  Clone ID: MRT4577_182117C.1.pep
VDIKPFAAVLMKLLHSAVLEERSSAAKKAFASSCATVLKYASPPQAQKLIEDTTSLHSGGKNDQLSGAILIKAYLSNASDILGGYNAVVIPVIFVSRFDDDKDTSALYEELWEDIPSSERVTLTLYLPEIVSLLCDGMSLSSWAGKRKSAKAIKKLCDVLGEPLSAHYQNILKSLLKELPGRFWEGKDAILDALASLCACCHVAITAEDSCLPSVILNCVCAACSRKSKLYREAAFLCLHKVITAFRDPGFFNSVFPMLFEVSNQSAISKTKGSAELDESEGASVSLDKVLNCATSCISVAFPQDIINQKKNVVELILNSLLPEESWQVKLSSFLCIKELCLKFDNSGDSNTWPQDTAYLVEELFHLVSPKLVDSIRLVKIAQVHVAASECLLDLSKLYRDFPLSNRTEAKFEDELTELCESEKSEQAKAILKECLAILKALPGVTMTTD

SEQ ID NO: 274703 - protein, 50 aa, Zea mays
  Clone ID: MRT4577_182118C.1.pep
RLQSSSLLKIRSEPCRKRLRGCTCSRCTRRMRSCCSWLCWLRYPGHPGDL

SEQ ID NO: 274704 - protein, 91 aa, Zea mays
  Clone ID: MRT4577_182119C.1.pep
SRVPRVVSKGFPVLDGKLTFFALQFFFFFYKDRSPRWIRFPFCFFKIKGGGKPVGDLWGFVLIIKKFAQVRVLLLKNSGIFSPVFSLWGFP

SEQ ID NO: 274705 - protein, 106 aa, Zea mays
  Clone ID: MRT4577_18211C.1.pep
KKKKKKKKKKKKKKKKKKKKKKKKKKKKKKKKKKKKKKQKKKKKGGAPPPPLFFPPKGGKMGPGEKKEKKFSRGKNFSPPKSPKKKGPGKKKENPGGPKGGENPLK

SEQ ID NO: 274706 - protein, 124 aa, Zea mays
  unsure (1)..(124): unsure at all Xaa locations
  Clone ID: MRT4577_182120C.1.pep
RLGLAKAIGVSNFTTSHLDXSLAVTTVPPDENQVELNPQWHHTDSIRXYCTRQGXIHINGYSPVRGHNCNCHVITELDSEVLAEIAKASGKTVQQVALRWIHEQGVTCIVKSYSKERLMQHLGI

SEQ ID NO: 274707 - protein, 109 aa, Zea mays
  Clone ID: MRT4577_182121C.1.pep
SADSGTPATFSVLLLLPCLLLPYIGKPGILPAAHSHSAAPQLSTSSQPVTSCGGSCSSKCMPTLTYLTTHIVIHAMQKDLHVLPDSCTVSSNLYEDMQRCSLQERRLMI

SEQ ID NO: 274708 - protein, 64 aa, Zea mays
  Clone ID: MRT4577_182122C.1.pep
FSPSCLPYIGIVSCVCESDFIRVFQFISLTACLASVFCSCMSVSCFLVKPIEYTVPYINWSTII

SEQ ID NO: 274709 - protein, 50 aa, Zea mays
  Clone ID: MRT4577_182123C.1.pep
DPKARGRASVVVIEIYACTIFQWLVYGGVENTITPVLRLLYSTHAAKLYV

SEQ ID NO: 274710 - protein, 68 aa, Zea mays
  Clone ID: MRT4577_182124C.1.pep
CPPHKKVSSPLPESMSTRRWVGSCIPVIKGCIRPANIHREYVAPPTLSQWHVIKKKSGLVNHKGDLSI

SEQ ID NO: 274711 - protein, 35 aa, Zea mays
  Clone ID: MRT4577_182125C.1.pep
GVYLIIKLFYLGYYFLFSSKPLLGIILFLAILLGV

SEQ ID NO: 274712 - protein, 62 aa, Zea mays
  Clone ID: MRT4577_182126C.1.pep
IAFALTSFALDIYSCKKVCESHLKPLCAPHSLKTPVAAIYVDDQRKDFEHGAHSRQEIQQET

SEQ ID NO: 274713 - protein, 104 aa, Zea mays
  Clone ID: MRT4577_182127C.1.pep
KKGGAPPLAFFKKKRGGGGLKQKKGGGPQNPPFLVKTFRGGNPGGLFKNPTPLWGGEGPFQKNFGGGTSRFFPKTPKRPRPRGGILCPKGFPRGPFLFPARGPK

SEQ ID NO: 274714 - protein, 38 aa, Zea mays
  Clone ID: MRT4577_182128C.1.pep
FFFFFFYKNTVSIKHVVSIPYVRLTRLSKISVTEDWIC

SEQ ID NO: 274715 - protein, 98 aa, Zea mays
  unsure (1)..(98): unsure at all Xaa locations
  Clone ID: MRT4577_182129C.1.pep
ATWFLITPQXPKPSCHTVMSGEWSPSATYRDAGRXPGYGLTRNIICGGLECVESRSSMGPKAAKDRVGFSKRLFGIPYWGTGXNMAFWSQNPSGGLFH

SEQ ID NO: 274716 - protein, 200 aa, Zea mays
  Clone ID: MRT4577_18212C.1.pep
MDSEVVHVVESSFVVPSEPTPSEGLSLSPLDLVLPSRGHTPTVYLYSPSDVAAADGFFDVARLKEAMAKTLVAFYPLAGRLGVNNDGRVEITCTGEGALFVVAHADLSVGDIEDDFRPSPELRRLFVPCIEPASIILAIQVTFLKFGGVVLGTALHHADSDASSAFHFFQTWTALCKYGDRATVELPCHDRTLLGGRSPP

SEQ ID NO: 274717 - protein, 96 aa, Zea mays
  unsure (1)..(96): unsure at all Xaa locations
  Clone ID: MRT4577_182130C.1.pep
IRLEVAMFQNLCXTRRGRLYPLGVXDKVRQLLKXYAINRHKMTVLTPSYHAGSYPPEDDRVDLGQLCYNXRRPYQFGQIKELEQEMDKDGKGKTGC

SEQ ID NO: 274718 - protein, 94 aa, Zea mays
  Clone ID: MRT4577_182131C.1.pep
MASAAARSGLRSLAARAAPLRRRMSSSVHDDAYETAKWEKITYAGIVTCTLLAAYNLSKGHPHFDEPPAYPYLHIRNKEFPWGPDGLFETKDHH

SEQ ID NO: 274719 - protein, 94 aa, Zea mays; identical to SEQ ID NO: 274718
  Clone ID: MRT4577_182132C.1.pep

SEQ ID NO: 274720 - protein, 121 aa, Zea mays
  Clone ID: MRT4577_182133C.1.pep
MPARPGATLPVTNDAAQPVPTKPAAPPMASAAARSGLRSLAVRAAPLRRRMSSSVHDDAYETAKWEKITYAGIVTCTLLAAYNLSKGHPHFDEPPAYPYLHIRNKEFPWGPDGLFEKKDHH

SEQ ID NO: 274721 - protein, 94 aa, Zea mays
  Clone ID: MRT4577_182134C.1.pep
MASAAARSGLRSLAVRAGPLRRRMSSSVHDDAYETAKWEKITYAGIVTCTLLAAYNLSKGHPHFDEPPAYPYLHIRNKEFPWGPDGLFETKDHH

SEQ ID NO: 274722 - protein, 119 aa, Zea mays
  unsure (1)..(119): unsure at all Xaa locations
  Clone ID: MRT4577_182135C.1.pep
PKVFQHYIXSNIKYGCIINIKQEDVEWAANLAHAHDFITLLPNGYNTLVDDDLLTGGQKHRIAIARAILIDPTILILDESTSALYAXSEHNVKAVLRSVKSDLSSITTVIVIAHRLSTI

SEQ ID NO: 274723 - protein, 211 aa, Zea mays
  Clone ID: MRT4577_182136C.1.pep
SSSPSAPCSFPSAPSLPWLSSSRARPSLHFSSRCFPLRAVFSVVFNLQQPWHSAPLLQASSRLPAPRAPPAMASCFLPWRRRCPSELPSLPHGSSSSFLMALPPYPWRRSSSLPWTPRKIPHADAPSFPLLVLPRATAAGCSSSPCCPRRAANRELSSISPSWRGTAAARPASPHRRSPLPWRAAVDAVEHSLHALRLGFLPACVLLRLRC

SEQ ID NO: 274724 - protein, 94 aa, Zea mays; identical to SEQ ID NO: 189027
  Clone ID: MRT4577_182137C.1.pep

SEQ ID NO: 274725 - protein, 104 aa, Zea mays
  unsure (1)..(104): unsure at all Xaa locations
  Clone ID: MRT4577_182138C.1.pep
RPENPSKLTDEWNSMKLSWVAIWRMHTGNALNGPFSIHLTIESGKNVIAKDSIPXNCRPDAVYTYNVQFYYTLNSLIFIPDNGLWTFTNKLIKMPACTANLIYY

SEQ ID NO: 274726 - protein, 96 aa, Zea mays
  unsure (1)..(96): unsure at all Xaa locations
  Clone ID: MRT4577_182139C.1.pep
PAGVRIIRLXXXKILQKKKKKKKKKKKKKKKKKKKKKKKKKKKKKKKKKKSKKKKKKGPWGGGGFKILDPPGLRNLNLKFLIPATPRGGAGAPFPL

SEQ ID NO: 274727 - protein, 51 aa, Zea mays
  Clone ID: MRT4577_18213C.1.pep
QRHAVLALEEGVDAYLVGLHEDTNLCAMHANRVTIMPNDIHLERRIRRERA

SEQ ID NO: 274728 - protein, 66 aa, Zea mays
  Clone ID: MRT4577_182140C.1.pep
MRQELCKKKKKKKKKKKKKKKKKKKKKKKKKKKKKKKKNRPRGSNRENSGTGPGRGEQAFPKRESD

SEQ ID NO: 274729 - protein, 94 aa, Zea mays
  unsure (1)..(94): unsure at all Xaa locations
  Clone ID: MRT4577_182141C.1.pep
PGAXGRGARXSLLKSAAAYCSGSRASLFRPAEADALAPPNQASCRATRRRAPCSRALCASRAHCPAPASARAASPIRTERAESMRAAAPCSYVH

SEQ ID NO: 274730 - protein, 59 aa, Zea mays
  unsure (1)..(59): unsure at all Xaa locations
  Clone ID: MRT4577_182142C.1.pep
APVRMPTMELHIANRIPPCGECTYSXDRFEMRSRKRMIDLVNTPEFVKQITSITIEPYA

SEQ ID NO: 274731 - protein, 297 aa, Zea mays
  unsure (1)..(297): unsure at all Xaa locations
  Clone ID: MRT4577_182143C.1.pep
RPRVRPRVXVNGLELRFCQQCSRFHNLAEFDQQKKSCRKRLAGHNERRRRPPPGPLASRYGRLAAPLGEEPGGRFRSFMLDFSYPRVPSAMRDGFPAVRPGGERVPGSNIQWQAASLDPPPPHHQSAAAGYGAHSYGSPGSSSSSRPPVFPAGPELPPGGGCLAGVPTDSSCALSLLSTQPWDAAGHSAGHGHGHAASLPATAGFDGNPVAMASSYIAPPSPWTDSRAHEGGRRNVPQLPPDVPLGDVHSGPGTHHGQFSGELELALQGNRPAPAPRNGQGSAGAFDQAGSTTEWSL

SEQ ID NO: 274732 - protein, 37 aa, Zea mays
  Clone ID: MRT4577_182144C.1.pep
INISLVCSETYINFILDLFYGSFYILKLNSLIEMCLL

SEQ ID NO: 274733 - protein, 205 aa, Zea mays
  Clone ID: MRT4577_182145C.1.pep
MDGGYYGGRDQRYSGGYYGGGGIATPGYAPAVPYGMSQVNIEGNGCGRALPPQPTVKVYCRANPNYAMSVRDGKVVLAPANPKDEYQHWIKDMRWSTSIKDEEGYPAFALVNKATGEAIKHSLGQSHPVRLVPYNPDFLDESVLWTESRDVGNGFRCVRMVNNIYLNFDALHGDKWHGGVRDGTNVVLWKWCEGDNQRWKIQPYY

SEQ ID NO: 274734 - protein, 150 aa, Zea mays
  unsure (1)..(150): unsure at all Xaa locations
  Clone ID: MRT4577_182146C.1.pep
MPGKILSVVVALXVCASSTGADPIAGCLSTTLPLXTMNPCNQPCMMXQALASLMTYANLILNQLMALPVKTMPAVMPQVMTANIMSPLMMPCIIRPMLLPRMMAQIMIPQCNCNAVXQINAATPXPFMSNPMAMTITPMXLQKPFASARC

SEQ ID NO: 274735 - protein, 72 aa, Zea mays
  Clone ID: MRT4577_182147C.1.pep
VFLIQSLFACSLRLTQYTKNWRHRRTVPNLTSIQINYLMQKQRSERICCLSTLPSLGCQIITTLNLRSLPNA

SEQ ID NO: 274736 - protein, 137 aa, Zea mays
  Clone ID: MRT4577_182148C.1.pep
SCWATLNRKSRLSRRQVAMRVQSWRSRAMYNQSVVNTLKNKLMQVVAQNTNLARQGMGDSEDVASSQSPDAGGDALGGLRGTATVGLGACRCCGRKEASVLVMACRHLCLCADCDKVSDVCPVCRFPKSGSVEINMS

SEQ ID NO: 274737 - protein, 147 aa, Zea mays
  Clone ID: MRT4577_182149C.1.pep
YFRFIQDEAVQKVVEFMDTYSLSQEDFDTIVEVSKFKGHPSPMDGIQPAVKSALTKAYKQGSSSRVVRAADLINIPGMKKPLKKRVAAILEPVEESLPEENGLASAEDDEDGSSDAENNGACSPFPRNKHKKSGRCLFVWLMCQALG

SEQ ID NO: 274738 - protein, 91 aa, Zea mays
  Clone ID: MRT4577_18214C.1.pep
TSLHQERPFWAIPFKLWARISVYILYAPPVGLEVSLRGGKATGVTMKCGSAHTAHVFLDPASQSISGSRKSQVGAEPVYVSTPPPCVKAHQ

SEQ ID NO: 274739 - protein, 142 aa, Zea mays
  unsure (1)..(142): unsure at all Xaa locations
  Clone ID: MRT4577_182150C.1.pep
PSLPVPLLLHFRPDDERLGGRSHIIVPGXLGAAAVVLLVAAALPYQASGVDVTTVLSVYPNFADFARMMAYTHVVSELSWRSXMTLLSVPNANLPXHPXAFIASASADIADVLKYHVLLEYLYACDLDRLYPSGKLVTTLFQ

SEQ ID NO: 274740 - protein, 100 aa, Zea mays
  unsure (1)..(100): unsure at all Xaa locations
  Clone ID: MRT4577_182151C.1.pep
PTFTRKNTQEITGNPRALRRLRTVCARTTRTLSFTVHTTTEIDSLIEAIDLYSTMTRARDADLNIDLISKPMLPVMKRLXDANIATSTVHVVRPGGRCTT

SEQ ID NO: 274741 - protein, 75 aa, Zea mays
  Clone ID: MRT4577_182152C.1.pep
GLDDVLYLPQGKLSMMVYNRHMRGRGSSSSSSRRTKQEASCDDYLGTSLPRQDEGSVYELKGSRIQLAMWDLCSV

SEQ ID NO: 274742 - protein, 204 aa, Zea mays
  Clone ID: MRT4577_182153C.1.pep
STQRPSRVRSNFVQWCDLDIHNNSLNGSLPAALSNLSLLYLDVSMNDFSGAIPCGMCNLSNITFVDFSGKNTGMHSFADCAASGICAADITSTNHVEVHTPHGMVITMTICAAILIVVLLVVFVKWMVLRNSSLPLVSGLESKATIEPASSKELLGKKSREPLSINLSTFEHALLRVTMDDILKATNNFSEVHIIGHGGFGTVY

SEQ ID NO: 274743 - protein, 230 aa, Zea mays
  unsure (1)..(230): unsure at all Xaa locations
  Clone ID: MRT4577_182154C.1.pep
MAKKGAKRKQQLPPAPTAKNGSKAVLPLKAAKRAPKKQKVLESSDDSDTEQQQQLQEEDSDLDVSSDSDAEELSGSDAEADELSGSDADADGGSTRGDDMDDDDDDEDGESDDDSLADDFLAGSDEGSEGGDSGLESDGSDDLEAKSRAIDEQKLKAEEDAEEELQTNIRSESDEFRLPTTEELEEEAHRPXNLPNLKRRISEIVRVLSNFSKLRQKDVPRKDYIHQLET

SEQ ID NO: 274744 - protein, 35 aa, Zea mays
  Clone ID: MRT4577_182155C.1.pep
SAIPSELDIILLSFDIRPYKFLLASHSLSLHHRPS

SEQ ID NO: 274745 - protein, 327 aa, Zea mays
  unsure (1)..(327): unsure at all Xaa locations
  Clone ID: MRT4577_182156C.1.pep
LDLAASCPPPPLPLPAPVLSFPRWTPTAGAEEGGXAAAAIPTVDEASMERSKSFIKALQELKNLRPQLYTASEYCEKSYLHSEQKQKVLDNLKDYALRAVVNAVDHLGTVAYKLTDLFEQQASEVSTYELKVARLNQQIFTCQVYTDKEGLRQQQMMGANIKHHKHYILPPTGYKRSLANGHLQADTDQESKPRPYPSAKTLSWHLSSENSTKANAHKPTFALVDTAPSKPSSGKERFASPMRRPLQFNRSPSSDTTQKVGAKNISGVKELSTFHSFDTPKGGAIQKAPVGPKSMLGALFIRHKSSKAKRIPVPCQPGAGWGAAPPL

SEQ ID NO: 274746 - protein, 432 aa, Zea mays
  unsure (1)..(432): unsure at all Xaa locations
  Clone ID: MRT4577_182157C.1.pep
ARHQAKQIHSRPDRRRRPRVRRHQSHRCGRSSGTPPPPRTTASARQQHAHAHARRVNRRETGGGGTGSRISLRRVGVGEASLASPPPHSAHRAPVERLLDLTSPPPALPLPSPCRRPFFPPLAGRPPPERKRGECSRRSNTRRRPAPGAGSRGPGPAPXTVDEASMERSKSFIKALQELKNLRPQLYTASEYCEKSYLHSEQKQKVLDNLKDYALRAVVNAVDHLGTVAYKLTDLFEQQASEVSTYELKVARLNQQIFTCQVYTDKEGLRQQQMMGANIKHHKHYILPPTGYKRSLANGHLQADTDQESKPRPYPSAKTLSWHLSSENSTKANAHKPTFALVDTAPSKPSSGKERSASPMRRPLQFNRSTSSDTTQKVGAKNISGVKELSTFHSFDNPKGRAIQKAPVGTKSMLAALFIRHKSSKAKRIAVR

SEQ ID NO: 274747 - protein, 67 aa, Zea mays
  Clone ID: MRT4577_182158C.1.pep
GSFMKGARVGWLAPPSPKNKLRGSKRPRGNSFSITRPPPPFNPPGIKIRGKGAGATKNCSIQHLNRF

SEQ ID NO: 274748 - protein, 101 aa, Zea mays
  Clone ID: MRT4577_182159C.1.pep
LIELEPNNSGNYILLSNIFAEQERWGDVSKLPKAMRERGLRNVPGASSIEVDGMVHEFTSRDWSHPFIHTICEVLCEIDTNMKSVGFASVFPEVLHVIEEG

SEQ ID NO: 274749 - protein, 96 aa, Zea mays
  Clone ID: MRT4577_18215C.1.pep
PFTIRYLCSVGTAVLPPTYWRTFTFALAICCLICIVYELSRSMVHISHRSQSPHSGFFDSMLTLWLSTSSVHRWRSCSLSLASVSIHIISAVRRTR

SEQ ID NO: 274750 - protein, 135 aa, Zea mays
  unsure (1)..(135): unsure at all Xaa locations
  Clone ID: MRT4577_182160C.1.pep
GSTHSPDPEGGAARRTKKHTDGKTPTGKTHTHEAEXPPDTRDNGKAKNQDKEGTPPDQQRHSRRGQXYEDGRTPADHNMQKESTLHRETRPRESRQIVVKTRTGKTITTEDGDYDTKANDKATTQDKEGIXPTDQ

SEQ ID NO: 274751 - protein, 94 aa, Zea mays
  Clone ID: MRT4577_182161C.1.pep
KKAPAVVLPGGIKSGFHLYGPFRIQKTMFVFDVVFIKREGIVPVLAATVSGFCLFVTLRQRRLILLVKKFRPGEKGEVPVPVLAANCIGQLFIC

SEQ ID NO: 274752 - protein, 45 aa, Zea mays
  Clone ID: MRT4577_182162C.1.pep
MIISKKNRREICKYIFHEGVLYAKKDYNLAKHPKLDVAHLEVIKL

SEQ ID NO: 274753 - protein, 119 aa, Zea mays
  Clone ID: MRT4577_182163C.1.pep
AQRVLVVVPRRRRRRRRVGRSRRRRHQRRSQQSRDGENLTEPARPEPQAGGGRRAAPARGPLHRRLSSQPETIDDDDTGAADDTTGRRIEMMPEDDDVELARFACPIVVGSGVARWTGS

SEQ ID NO: 274754 - protein, 36 aa, Zea mays
  Clone ID: MRT4577_182164C.1.pep
RSRWGVYFRMAFLMYQCSPLVIAFFFQITVSYTIQC

SEQ ID NO: 274755 - protein, 80 aa, Zea mays
  Clone ID: MRT4577_182165C.1.pep
TVVTARKKVSVLSQIVHPQNTRGSKTLRMSPQTNAKKPATANQQANLDLCCACALLVCRWPMVIYLACWIFIEQIGAGFL

SEQ ID NO: 274756 - protein, 83 aa, Zea mays
  Clone ID: MRT4577_182166C.1.pep
PPFCLPQSPFFRPQFSPQLRRVGPQPRFQGFLGLVFQSFLQQQPKKGPFPGFLGGQIAHPLPGLLGLHQPIPCPFGVAGGVPP

SEQ ID NO: 274757 - protein, 98 aa, Zea mays
  Clone ID: MRT4577_182167C.1.pep
QRLVGAITPALCSGAGPGSCVLTQVCFPCAHCCMIWGPPPCAGGLWAASRGVRAGLVLMALPPCSHPWQQGRALPDNTQLYVNILQLLLRKPGEGRVP

SEQ ID NO: 274758 - protein, 84 aa, Zea mays
  Clone ID: MRT4577_182168C.1.pep
IGKILLLRVFLNQIQGPTGEPLGLIMSRPRKGRKGSWARAGPTATASAARQQSRASTKPAIRSLARRGASTHLRAHLRGDRGVL

SEQ ID NO: 274759 - protein, 497 aa, Zea mays
  Clone ID: MRT4577_182169C.1.pep
MFSHGADSAHDAGTVGVSSGVGATVPARFVWPYGGKRVFVSGSFTRWSEHLPMSPVEGCPTVFQAICSLSPGIHEYKFYVDGEWRHDERQPTISGEFGIVNTLYLTREFNQINALLNPSTPGSRMNMDVDNENFQHTVTLSDGTIPEGTVRVSEAAIQISRCRVSEYLNLHTCYDLLPDSGKVIALDINLPVKQSFHILHEQGIPVAPLWDSFRGQFVGLLSPLDFILILRELETHGSNLTEDQLETHTISAWKEAKRQTCGRNDGQWRAHQHLVHATPYESLRDIAVKLLLNDISTVPVIYSSSSDGSFPQLLHLASLSGILKCIFRYFKNSTGNLPILNQPVCSIPLGSWVPKIGDPNSRPLAMLRPNASLSSALNMLVQAGVSSIPIVDENDSLLDTYSRSDITALAKDKVYTHVRLDEMTIHQALQLGQDANTPFGFFNGQRCQMCLRSDPLLKVMERLANPGVRRVFIVEAGSKRVEGIISLSDIFKFLLSL

SEQ ID NO: 274760 - protein, 35 aa, Zea mays
  Clone ID: MRT4577_18216C.1.pep
LCESSWVLEQFPIVRLMQPSSCAGGHAKASVGPGF

SEQ ID NO: 274761 - protein, 496 aa, Zea mays
  Clone ID: MRT4577_182170C.1.pep
MFSHGADSAHDAGAVGVSSGGATVPTRFVWPYGGKRVFVSGSFTRWSEHLPMSPIEGCPTVFQAICSLSPGIHEYKFFVDGEWRHDERQPTISGEFGIVNTLYLTREYNQINTLSSPSTPGSRMNMDVDNENFQRTVTLSDGTVSEGTLRVSEAAIQISRCRVSEYLSLHTCYDLLPDSGKVIALDINLPVKQSFHILHEQGIPVAPLWDSFRGQFVGLLSPLDFILILRELETHGSNLTEEQLETHTISAWKEAKRQTNGRNDGQWRPQQHLVHATPYESLRDIAVKLLQNGISTVPVIYSSSSDGSFPQLLHLASLSGILKCICRYFKNSTGNLPILNQPVCSIPLGSWVPKIGDLNSRPLAMLRPNASLSSALNMLVQAGVSSIPIVDDNDSLLDTYSRSDITALAKDKVYTHVRLDEMTIHQALQLGQDANTPFGFFNGQRCQMCLRSDPLLKVMERLANPGVRRVFIVEAGSKRVEGIISLSDIFKFLLSL

SEQ ID NO: 274762 - protein, 46 aa, Zea mays
  Clone ID: MRT4577_182171C.1.pep
YLPKILHLSAHTYITSHTSLASSHSFFLNKYIPLTYYSSIFQFTNT

SEQ ID NO: 274763 - protein, 112 aa, Zea mays
  Clone ID: MRT4577_182172C.1.pep
SSFFCTIDSAACLTGLSTHHMELRLVPQLQYLVHCSWSLLIGSKLPSVSGCIDFSYDNRRSIAIIVEGESKPAGTGQMASAASIEGGGNEASSLQLPGESVQSVREELQEVS

SEQ ID NO: 274764 - protein, 68 aa, Zea mays
  Clone ID: MRT4577_182173C.1.pep
VALSSARWRCTNTLRVVSGRPSLRHWSVATGPYTQLFIAYAWESHRHWQASAWIGASLSWAPLMSNRT

SEQ ID NO: 274765 - protein, 128 aa, Zea mays
  unsure (1)..(128): unsure at all Xaa locations
  Clone ID: MRT4577_182174C.1.pep
MVYVDSWYEFVERSEQSSXESPKTSRYVIKYRPWEGKVVLKVTEAPKCFKFKADPAPGAKKMEELASIFFAXLKRRGPDVSISEVSGKVQAEHQRPNKGRGRRQEHGLIPICSRQFTSGTMAVLSFNF

SEQ ID NO: 274766 - protein, 87 aa, Zea mays
  Clone ID: MRT4577_182175C.1.pep
TLTRFYIKKPRCNLYWRGYLHKRKSLLTKNLTDGHKPHVHIIRDTYNSLKKRFLYELLHQNLTSTRKILSTRMMPYSLPKYAQLILY

SEQ ID NO: 274767 - protein, 67 aa, Zea mays
  Clone ID: MRT4577_182176C.1.pep
DICMSSFINNIYSVLGFKKVQYKQGSLVFSKPRRLVITQVKNSTEPHSTRERFEIERSIDWIRRVGV

SEQ ID NO: 274768 - protein, 63 aa, Zea mays
  Clone ID: MRT4577_182177C.1.pep
LLSVRKEIYICVYICTNTGGHKLNMFRASLATSFFYGIFNFQRENKLIFHGKMKTPWAVLLLH

SEQ ID NO: 274769 - protein, 46 aa, Zea mays
  Clone ID: MRT4577_182178C.1.pep
QRRGGSRRPRDGHGASNCCRRWWWRSDSRPPDLDVCAPPLSDAGPV

SEQ ID NO: 274770 - protein, 56 aa, Zea mays
  Clone ID: MRT4577_182179C.1.pep
HYDVPKTPGCWQAFCNPFPWAPKRKKGWGVFFKDLNTSTRGGAPFFFLKGRFLGLG

SEQ ID NO: 274771 - protein, 162 aa, Zea mays
  Clone ID: MRT4577_18217C.1.pep
MHATQNDRLPLRLVVQVLFFQQLRAGSGKELALVDNGEHACTRPTQDQCEPCERRIPKHPESLDKQVTSLSARESRQHHRTSDSEHRGGGRNSFKDQLGGLLPQSRSRRIFDKLWSSKGQGEHGGKGSETSGSSQSPPLSAKPAEVKPSPLPAVRNRRYSVS

SEQ ID NO: 274772 - protein, 409 aa, Zea mays
  Clone ID: MRT4577_182180C.1.pep
HGLLLQRRLLNFVDKTLVEDVIPILEVASHSGLTQVIDKCIQRIARSDLDDISLDKELPPEAVDEIKNLRKKSQTADGDTFISDPVHEKRVRRIHRALDSDDVELVKLLLNESDITLDDANALHYAASYCDPKVVSELLDLAMANLNLKNSRGYTALHLAAMRREPAIIMCLLNKGANVSQLTADGRSAIGICRRLTRAKDYNTKMEQGQESNKDRLCIDILEREMMRNPMAVEDAVTSPLLADDLHMKLLYLENRVAFARLFFPAEAKVAMQIAQADTTEEFGGIVAVAASTSGKLREVDLNETPVTQNKRLRSRVDALMKTVELGRRYFPNCSQVLDKFLEDDLPEGLDQFYLQRGTADEQKVKRMRFCELKEDVLKAFSKDKAEGSVFSGLSSSSSCSPPQKYAQR

SEQ ID NO: 274773 - protein, 196 aa, Zea mays
  unsure (1)..(196): unsure at all Xaa locations
  Clone ID: MRT4577_182181C.1.pep
HWVPRGRPGPSSYSYILAYDRTSSGAIALIFRTLLAWAAVRATAFTSTNQXPFTVXSANMYVSVDLQLNLGENXGIISPAVTMPASMXRGTTSQFDTSRPPSWRTEDCCSLMPCTGYHCGANTMSXYTVNEFNHLDFFYISLIDRFNVTIIFLLDGASRSSRMPFCTENLYSRWTAKLRLDGPCNNSCPLFKNNND

SEQ ID NO: 274774 - protein, 157 aa, Zea mays
  unsure (1)..(157): unsure at all Xaa locations
  Clone ID: MRT4577_182182C.1.pep
KPGQKAQNSQGHSPITNHHPPPHXGPLKGPRGPNPQKKTQKPAPQALKRQRNREREKKKKRKPPPXRQGKKKKQNGARPXKKKGNPRTQKGGEHPGPPEGKCPGRPPGSPGGKTGPWGPENPPSARPRAVAKGPGSGGEEGTGWPPGPPPRGWGPGG

SEQ ID NO: 274775 - protein, 108 aa, Zea mays
  Clone ID: MRT4577_182183C.1.pep
SKHAYIEIFFPKISPASIHALSKTSQGGAGGVYMRTSISPKIGLGQGHTSGIDQSTMQGPWVISSLSWVHGRGMGRSTCLTMIRTHVSLGGAGVSRGRAGRLIRSWRF

SEQ ID NO: 274776 - protein, 39 aa, Zea mays
  Clone ID: MRT4577_182184C.1.pep
IAISPHNALTDGTSLIPVEYQPKAFEFTPPQRTLSPRQT

SEQ ID NO: 274777 - protein, 88 aa, Zea mays
  unsure (1)..(88): unsure at all Xaa locations
  Clone ID: MRT4577_182185C.1.pep
HLSISVQXSGGAAVSGEGTLRLLAAAMEAPRKGGAREPEEARRRYLDFVKRKKGRKESKARREALVDLCCSAASAVVVLTCLAAVALR

SEQ ID NO: 274778 - protein, 38 aa, Zea mays
  Clone ID: MRT4577_182186C.1.pep
KILSAPFHHSISQTGGKMVSTSCSTEFELRRGITRLRQ

SEQ ID NO: 274779 - protein, 87 aa, Zea mays
  Clone ID: MRT4577_182187C.1.pep
DLDRLSLGLVTGLIHLLCTFSFTFLFSFLWRHHMLVLCLYECFNHFHGGRILYLCSCTILFFSARKSVMYEINQSHLFENKSLFWTL

SEQ ID NO: 274780 - protein, 257 aa, Zea mays
  unsure (1)..(257): unsure at all Xaa locations
  Clone ID: MRT4577_182188C.1.pep
GRAEEERKELGEALKPIAEKYKGKINFATIDAKAFGAHAGNLNLKTDKFPSFAIQEVVKNQKFPFDQEKEITHDNIAKFVEQFDAGKIEPSIKSEPIPETQEGPVTVVVAKSYNDIVLDDTKDVLVEFYAPWCGHCKALAPKYDDLASQYAASEFKDKVVIAKVDATLNDVPDEIQGFPTIKLYPAGAKDAPVTYQGSRTVEDLANFVKENGKYKAEISSXEXGTEEAAPAASGGEEGGEEGEKADEDVHDELRIDI

SEQ ID NO: 274781 - protein, 141 aa, Zea mays
  unsure (1)..(141): unsure at all Xaa locations
  Clone ID: MRT4577_18218C.1.pep
MAGRGXAIGSRDAKNDMSSSSIRAGLQFPVGRIARFLKAGKYVERVGAGAPVYLAAVLEYLAAEVLXLAGNAARDNKKSRIVPRHIQLDDRNDEDLYRLLCTGTIDSGXDMPDIHNLVLSKKXPATSDKAAAGDEDYTDHD

SEQ ID NO: 274782 - protein, 107 aa, Zea mays
  Clone ID: MRT4577_182190C.1.pep
NIHPFFFSFFLKQKHHPLYSKNCNQTTHTTYLSIYYKTNIYRLITKLDLFHFLSHIYTNPFIYISIPLNQIPPNYSHNIITNNLPYSSNFFSKSSLNQLTMKLHHLP

SEQ ID NO: 274783 - protein, 127 aa, Zea mays
  unsure (1)..(127): unsure at all Xaa locations
  Clone ID: MRT4577_182191C.1.pep
GSDGGGGAVGDADSRRSLRTRGCLRRPSSRLWGRPPYHPDWCYXSSASIAXRQIYLHSKAIPRRGFSXIYXGRQRNGSRPPHFCKSSGAVARNILQQLQIMGIIDVDPKGVRLFTHHGRLDLDQVTG

SEQ ID NO: 274784 - protein, 151 aa, Zea mays
  unsure (1)..(151): unsure at all Xaa locations
  Clone ID: MRT4577_182192C.1.pep
MEHVVGGKFKLGKKIGSGSFGELYLGVNMQSDEEVAVKLESVKSRHPQLHYESKLYMLLQGGTGIPHLKWFGVEREYNVMVIDLLGPSMEDLFNYCSRKFSLKTVLMLADQMISRVEYMHTRGFLHRDIKPDNFLMGLXRXSNQVFVIDYG

SEQ ID NO: 274785 - protein, 61 aa, Zea mays
  unsure (1)..(61): unsure at all Xaa locations
  Clone ID: MRT4577_182193C.1.pep
VAALERQVFDFLGYQWAPILANFVHIIIVILGLFGTIQYRLRYVMVVSXWARPSLWAGGLR

SEQ ID NO: 274786 - protein, 111 aa, Zea mays
  Clone ID: MRT4577_182194C.1.pep
PPSPMTPLQPVFAADALVTDTSGSPAFGSAWTVRITRCSISRACCLQDCLLASYLSLRSPRHDSLPSYHPHLRTICMRALLPLHGLSPPAICPSPITWGPRGPGCTLQHPL

SEQ ID NO: 274787 - protein, 121 aa, Zea mays
  unsure (1)..(121): unsure at all Xaa locations
  Clone ID: MRT4577_182195C.1.pep
MQAVGIRRRGLTIDPAGEEEAPAARVGRLVRESPVVIFARRGCCMAHVMRRLLAAVGAHATVIELGGGEEEEELAAAEGGGAAXPALFVGGDPVGGLEGLMRLHLSGRLVPRLRELGALCA

SEQ ID NO: 274788 - protein, 109 aa, Zea mays
  Clone ID: MRT4577_182196C.1.pep
LCDYQASFCYNSGLQYRIFVLVVMARLAPLLFVLRKVHRQDVSTVAFLWCFRGILTHGEGAWFPNKVSAGFACSAHFVQAWHVFSGVQGPSYVPLLGFKLQHPPPEVRK

SEQ ID NO: 274789 - protein, 62 aa, Zea mays
  Clone ID: MRT4577_182197C.1.pep
GRPTTCRPKRRAWPATNKALFFLLTGASDNVLTCVRSRSCRCLCCSIRSLGGEGRRRRGAES

SEQ ID NO: 274790 - protein, 494 aa, Zea mays
  unsure (1)..(494): unsure at all Xaa locations
  Clone ID: MRT4577_182198C.1.pep
MAVVDRWAGLGSALASFLFLWSMVQRHVPVTISHRVATWANKLVSYFNPYVEITISEYGAERFRRSDFFLAAEAYLSDACAPRARKLKAELGRDSSNLQVSVGDNDEVTDAFQGATVWWYVVKKVPRSNVISLYANQDDPRTYRVVFHRRHRDLVVGKYLPHVLKEGRAVTVRNRQRRLFTNNPSGGGRGRGDVWSHVPFEHPSTFDTLAMDPDDKEAVVDDLEAFREAKDYYTKVGKAWKRGYLLYGPPGTGKSTMIAAMANLLDYDVYDLELTAVNNNTDLRKLFIETTGKSIIVVEDIDCSVDLTGKRKDKKSEREADDKPKLPMEPEKDEGSKITLSGMLNFIDGLWSACGGERIIIFTTNHKDKLEPALIRRGRMDRHIEMSYCRFPAFKVLAKNYLDVEEXHELFDQIGQLLEETDMSPADVAENLMSMSKKKKRDANACLESLAKALKQAKEEEAKAKVEAEAKKKVEAAAEAAKSKEEDEAKEGSG

SEQ ID NO: 274791 - protein, 91 aa, Zea mays
  Clone ID: MRT4577_182199C.1.pep
GKKHRHATDRLFLQVQTSIGGAAAPPASSPPSVESDPASDVDTGEGSPPQRKMSALRLSHRCHTRFWKVNRMRTMYVPGSEIHVHNNYIND

SEQ ID NO: 274792 - protein, 45 aa, Zea mays
  Clone ID: MRT4577_18219C.1.pep
FSEGWLDYFFNPSLVHSQRIRAIWSCHEVLMGAIKGYRVSYILVD

SEQ ID NO: 274793 - protein, 102 aa, Zea mays
  unsure (1)..(102): unsure at all Xaa locations
  Clone ID: MRT4577_1821C.1.pep
VAKLGVQEHESDGHGQGNPGGEERDDLGAGGDVSFRAQAAASAAVPAPQPGESTKKLLGIDVKTLKKIVGLTGTLXSKFFNXTNPRDTKERGGGTAKGSSAE

SEQ ID NO: 274794 - protein, 609 aa, Zea mays
  Clone ID: MRT4577_182200C.1.pep
IGYLAGRDSIMTSYYIGVDVGSGSARAALVSDQGDIVAESTHETLTRRDDHDSNIFEQSTGQIWDCISKACKAVLKSSGITKEQVKGIGFDATCSLAVANMETGKPVSVSPKSWQQGADGSAQTEGGHVWDVILWADHRAFKEAKLINSTGSMVLKYVGGTMSLEMEAPKMLWLKNNMPADVFSSSMFFDLPDFLTYKATGDLARSNCSLACKCSYVPPGVEGSKGWNDDFFTQIGLGEFVKTEYKQVGGTPGKSGLILTAGQPVGKGISAEAAEELGLLEGTPVGSGVIDAYAGWVGTVAAPMEGQETTSLEDSKHRLAAIAGTSTCHIVQSPEAVFVPGVWGPYKHAIFPGYWMNEGGQSSTGQLLDFMIDTHPASKRLKELAKEKGTNHFSLLTEILQNMVQEKGVPFMSYLTKDIQLYPDLHGNRSPLADNDMRGIMIGMRLDKNLSDLALRYYATGEAIALQTRQIIDEMNRCGHDVRSIFMSGGLVKNGFLMSLIADICNVPVQLPYSHSASVVLGAAMLGAAAAAEAQNGVIDSQEKAEKGSHDMKERLWDIMVKMSRPGTTVRPSASEKELKLLKVKYETFLECIELQRKWRKKVSDALDE

SEQ ID NO: 274795 - protein, 606 aa, Zea mays
  unsure (1)..(606): unsure at all Xaa locations
  Clone ID: MRT4577_182201C.1.pep
LLHVSHFPHFSALTSARNELSPASAAAGPDAEPERETHGLAAASAGAGQLGGAGRQRXRRCRLGLAVAASAAPSWMEEAGVAVLEEGGRRNPSVSDSYRPAGLPRPNATVLEAQARVCTGPAQTRPLGEEQAMRVLDTILRSAMGELKEEPVSSAQLGAFFAGMTIRSNSFPEATQWSEGERRAMSIFWPRLVQILPPEVKFIADPEGTIMGANGLTGPRYVGQGTGEMRLVGALREVLAGGHLGYEEVQCVLKDILPIGPSSDLTVTSEALLAAFLIGQRMNRETDRELKAYCLAFDDELGPPLVADVKSLTHYGEPYDGNTRFFRSTLFVAAVRACYSESCLLHGVQWMPPKGGITEGQMLKFMGANIHLSPTQAKILLEDETAGFAYLNLQEACPPLYSIIGLREHIKKRPPLATSEKVQQFVRARGRESMVAGFYHEGYEDPLLMLMRRRTVHAGLVVKGEEGALSLTTKERSAHASKGLPVNHCSGFRTPNSINSSKTDGIPRESFRVIVNAQELGFESTETPRTDRSILKNLELGLAALGGEKGAAYDRIVLNAAMADHLLGCSGAEDIDAALDRAREAIDSGEALRRLMSYIKISHRVS

SEQ ID NO: 274796 - protein, 120 aa, Zea mays
  unsure (1)..(120): unsure at all Xaa locations
  Clone ID: MRT4577_182202C.1.pep
PGQGFFSQIKRGFLTXLFYFGKVFKNPPGENFKKIGLPNFPFXERVGNFLLGKNFLDLSGFXKTXGTGFFFFPREKISKVFLNPPGAQFIFPPPHPFFGALLVGKTPPHLTPNPLVSPFF

SEQ ID NO: 274797 - protein, 236 aa, Zea mays
  unsure (1)..(236): unsure at all Xaa locations
  Clone ID: MRT4577_182203C.1.pep
MAVRDEPLHILFFPFLASGHLIPIADMAALFAGRGVRCTILTTPVNAAIIRSAVDRANDAFAGTGSPAIDIAVVPFPDVGLPPGAENGTALSSQDDRDKFYQAVRLLREPFDRFLANHRTDAVVSDSFFDWSVDAAAERGVPRIAFLGSSMFARACSDSMLRHNPLENAPDDPDALVLLPELPHRVELRRSQMLDPAKRPWHWEFFKSMNAXDQRSXXGEVFNSFHDLERDYVEHF

SEQ ID NO: 274798 - protein, 35 aa, Zea mays
  Clone ID: MRT4577_182204C.1.pep
TKSRWMWTNCCFVTTLKRSSECSGHLPTTAATSAV

SEQ ID NO: 274799 - protein, 47 aa, Zea mays
  Clone ID: MRT4577_182205C.1.pep
GAWSDGRLGQHVSIVEKWCSVAGTSKKTTQPNKAKSGSATDVALVFF

SEQ ID NO: 274800 - protein, 56 aa, Zea mays
  Clone ID: MRT4577_182207C.1.pep
AFFLKSLGNQTSRRAHHTMDVFCLNYKGVFDHKKECERKECDPSARAQMNTTNHSF

SEQ ID NO: 274801 - protein, 63 aa, Zea mays
  unsure (1)..(63): unsure at all Xaa locations
  Clone ID: MRT4577_182208C.1.pep
DLHDKGEVGLRSRXMHRAEXILMHAGLAFRQLVVIIQYIDEGWPDIGQVVDKDHPYARAQEQL

SEQ ID NO: 274802 - protein, 69 aa, Zea mays
  unsure (1)..(69): unsure at all Xaa locations
  Clone ID: MRT4577_182209C.1.pep
RFQATYGLVLQSFMQQQLQGXLAALMAAQVEQHLSSMSGFXLQQPGSCPFNAAAVGVYGSVLLCAVVIM

SEQ ID NO: 274803 - protein, 70 aa, Zea mays
  Clone ID: MRT4577_182210C.1.pep
AHQPSSIHHQCVTLQIVPVVIQYTRIDGRMHLQFLCIVLLQVQSVIIQYTGIEDACVHQSLKTLLVVDTV

SEQ ID NO: 274804 - protein, 241 aa, Zea mays
  unsure (1)..(241): unsure at all Xaa locations
  Clone ID: MRT4577_182211C.1.pep
MAGVSSNAIALVALLSVLFTGVRSAVNYDTAVARSYNSGWLPAKATWYGAPNGAGPDDNGGACGFKNVNQYPISSMGACGNEPIFAGGEGCGMCYEIKCDYSNNPSCSGQPRRIVITDMNYYPVARYHLDLSGTAFGSMARYGLNDRLRHAGIIDMQFRRVPCNFPGMKVTFHVQRGSNPNYLAVLVEYANVDGTVVRMELMQTINXRPTGYYQDMRRSWGSXIWRMDXNRPLQGXFAIRI

SEQ ID NO: 274805 - protein, 27 aa, Zea mays
  Clone ID: MRT4577_182212C.1.pep
TLLPLTPVYIITRTDTREPVNLCRLPT

SEQ ID NO: 274806 - protein, 65 aa, Zea mays
  Clone ID: MRT4577_182213C.1.pep
SRKHGSSPSASSTAPSAIRPTSDFSSIHTCTSHTRNVQLIECIANGDSLSGSIVPRSLSLSPRTE

SEQ ID NO: 274807 - protein, 134 aa, Zea mays
  Clone ID: MRT4577_182214C.1.pep
DPPVMGVGPAVAIPAAVKFAGLEIGAIDLFELKEAFPPQFVYCGNKLGGGRFKVNVKGGGVALGPPLGATGARGGGTFLKKKKRRGKDSKFGVVPLGIGFGKGAPPVFERGNPGDGLSHVRGMQAHNFLFKDGK

SEQ ID NO: 274808 - protein, 51 aa, Zea mays
  Clone ID: MRT4577_182215C.1.pep
FSIPLVLPHIYSIPILRPTLTFFVPSNVCDPLTHYYLKHLLLTLVHPSSNI

SEQ ID NO: 274809 - protein, 74 aa, Zea mays
  unsure (1)..(74): unsure at all Xaa locations
  Clone ID: MRT4577_182216C.1.pep
MSMDEALGASAADAVVTLLWVLRVSTLGASTTAVTFYLKLQGVHFSLLVTDCLISMLLFKFNILXDAILGASLN

SEQ ID NO: 274810 - protein, 67 aa, Zea mays
  unsure (1)..(67): unsure at all Xaa locations
  Clone ID: MRT4577_182217C.1.pep
YLSSALFFGWEQNKIGWCLLQPSFFNYPIKSKHPEIISNMSTFHPPCTXLTPKKKAYSLIPRSILTT

SEQ ID NO: 274811 - protein, 79 aa, Zea mays
  Clone ID: MRT4577_182218C.1.pep
VSLPAADAMMPKKQLARHGPCFYTGRPWSAVSLGQHAVDYGRSISRHSTIDLSHDAFNTHVLQRDCFQQACPQSHLRRP

SEQ ID NO: 274812 - protein, 70 aa, Zea mays
  unsure (1)..(70): unsure at all Xaa locations
  Clone ID: MRT4577_182219C.1.pep
MVVKTSSLRKLLGHSASAATATIIPQCSQAPIASLVAPYLXTAVTSVCXENPNVQPYRIQHDHRDSISTL

SEQ ID NO: 274813 - protein, 101 aa, Zea mays
  Clone ID: MRT4577_18221C.1.pep
TFLNFLEVWKKLLPQVTFLIKRFKKFTKPNKNHTKVKPGKTTGNKPLLWDFLTRITPTKKRLLKVFLIWEFKERFNQKQLKNLWKKKLTKWSPSFNFFTPK

SEQ ID NO: 274814 - protein, 165 aa, Zea mays
  Clone ID: MRT4577_182220C.1.pep
PAGMFSLLSVCRIWNLLPPRQWLTMVEVRHRPRVVTTGQAATPSSSHGQHLPAISLPHPTPCSMGTSSLRPPASERPFPFQFGHGHTGPTLLCSLLPWTLDAPAPLRSSAPRSHGRASGVHRAPRGLAPLPYCEPATPLGRSSSYCVGRGSSSPATIERPHVPWF

SEQ ID NO: 274815 - protein, 89 aa, Zea mays
  Clone ID: MRT4577_182221C.1.pep
TGSSDDSSSDSSSDDEASKKPIAGSKKPRASSTTSDHTSATDDTSSDDERTNERARSFRRIPLPVHNNLSQQSLIVHNRLTLIATPLTL

SEQ ID NO: 274816 - protein, 171 aa, Zea mays
  unsure (1)..(171): unsure at all Xaa locations
  Clone ID: MRT4577_182222C.1.pep
RQGTENDGTXAATRAXTTXXTRSKESXXXXQGPAXAXXXKPRXGRSGGXEXXRRAXXASXGXNXXPGXPAGRDPREPXPKXXRAADNGDXAXASXAPPXPGSRPPGRRXGRGSEEEEAEGRRQQEAAAAGRXEPEEGQXQERQPAPAXRRXSGAXAGAXTRTPAAPAETNR

SEQ ID NO: 274817 - protein, 310 aa, Zea mays
  unsure (1)..(310): unsure at all Xaa locations
  Clone ID: MRT4577_182223C.1.pep
PAGQKPKRAQFGTRRLLNLRILPPPLLHPSPXPRRPPRRSXPAALRRSTNRAPIPPRSQPRGPVHGARGAAASPHAFPPPXRPAKRRXSSPRALLPLSXPKSTPPRXSWALRPTPPPPARGLPSSPTPERRRRHRXASYQMGPGAAVGXVGRHGGRVAPSQERRGPAPSQERRRPAPSQERRRPAPSQERRRPSESSSQXTSSRNGSGTGRRXEFPGTAADGGGGGGRRPALGNRHSXPGSFPGRTASAPPPRRRRXEAALEGRRXRAPPPPPVRGRRGLPSRTSRSGWTPARTLRRGRAPSPRPSRTAS

SEQ ID NO: 274818 - protein, 163 aa, Zea mays
  Clone ID: MRT4577_182224C.1.pep
SRPAGNLATNERCGASRHWLYRLDAAARTFLDTRLRETYASERADHAPAVDGVSEHETPGPNNERTSPAALMGSCASLSTGGHTTWICRCRGYYGQDPEGVWNDDEQLERPVDSWEPNLDKNDGRAIIRNGEEESEEPPPPLQHHSDQRRHERPLQCHLLHCR

SEQ ID NO: 274819 - protein, 40 aa, Zea mays
  Clone ID: MRT4577_182225C.1.pep
MITMAPSEDPYLDSDRIESPGYRAVWYTVPPGNTDQQLEC

SEQ ID NO: 274820 - protein, 71 aa, Zea mays
  Clone ID: MRT4577_182226C.1.pep
SKLYNSYIILLYQKNQLTLPPLIYPNYPSFNSNSKPQDQLTFPKLTLITPCLNHHHTFSLFKIFTPPQFHT

SEQ ID NO: 274821 - protein, 101 aa, Zea mays
  unsure (1)..(101): unsure at all Xaa locations
  Clone ID: MRT4577_182227C.1.pep
YSETQHTTSDTHYLPPIDTGILYIIALFALCAITAHDNIIHHCSLVTSSNIQHFIPPATKMFNEHPTVKASRLQHTTTASVXQHTTAQWPHQSSIHVTFQT

SEQ ID NO: 274822 - protein, 190 aa, Zea mays
  unsure (1)..(190): unsure at all Xaa locations
  Clone ID: MRT4577_182228C.1.pep
RERESASDLGQSVSVLGVSFSYPRPRRWVCAYRLIDVPMSNCINSGINKVYILTQFNSQSLNRHLSRAYDFSNGVAIGDGFVEVLAATQRPGTEGKRWFQGTADAVRQFDWLFDDAKSKDIEDVLILSGDHLYRMDYMDFVQSHRQRGAGISICCLPIDGSRASDFGLMKIDDTGRVISFSEKPKGXQLK

SEQ ID NO: 274823 - protein, 69 aa, Zea mays
  Clone ID: MRT4577_182229C.1.pep
ALDASPCMELPFFQQVVVLLAEVRNLALVRLDQDVFLGQHPQHLGVPVFAIAAAGVPVKNMPKYPPPDG

SEQ ID NO: 274824 - protein, 39 aa, Zea mays
  Clone ID: MRT4577_18222C.1.pep
KKPPLLGLLFSYGVEFTLLANRRSSLQRMSGRVGPFHSQ

SEQ ID NO: 274825 - protein, 505 aa, Zea mays
  Clone ID: MRT4577_182230C.1.pep
MGLRVAATAPAPAGVRVLGRGAARVTPRPWAAVGGRRRFSVRMSVATTEATTTIAVGASEDQALEARNSKTVVAVILGGGAGTRLFPLTRRRAKPAVPIGGAYRLIDVPMSNCINSGINKVYILTQFNSQSLNRHLSRAYDFSNGVAIGDGFVEVLAATQRPGTEGKRWFQGTADAVRQFDWLFDDAKSKDIEDVLILSGDHLYRMDYMDFVQSHRQRGAGISICCLPIDGSRASDFGLMKIDDTGRVISFSEKPKGDELKAMQVDTTVLGLSKEEAENKPYIASMGIYIFKKDILLNLLRWRFPTANDFGSEIIPASAKEIDVKAYLFNDYWEDIGTIKSFFEANLALAEQPPRFSFYDADKPMYTSRRNLPPSMVNNSKITDSIISHGCFLDNCRIEHSVVGVRSRIGSNVHLKDTVMLGADYYETAVERGELLAEGKVPIGIGENTTIQKCIIDKNARIGKKVVISNSEGVDEADRTSEGFYIRSGITVVLKNAIIADGLVI

SEQ ID NO: 274826 - protein, 138 aa, Zea mays
  unsure (1)..(138): unsure at all Xaa locations
  Clone ID: MRT4577_182231C.1.pep
CIPTPIVYYHASYHSSSIVSTQPSCREEKHHHFFNHHXKDYEQAAGEYGYSETEVVSATGDGQYERYEMEDNEHKHXQHLXGSAGAIADGAFALYDXHERDRWTXYAYMLKISEEVSVVACVPTDSYDFHLHHETNSD

SEQ ID NO: 274827 - protein, 99 aa, Zea mays
  unsure (1)..(99): unsure at all Xaa locations
  Clone ID: MRT4577_182232C.1.pep
MRQICCIEAVYVRDATMDAIDFKGSHINAACLDIFKTWIDAXNRATLAIYDPGLEDVATYCXRARHLYFSTDVEKALAEADIIIASTTTTARNCGLASA

SEQ ID NO: 274828 - protein, 125 aa, Zea mays
  unsure (1)..(125): unsure at all Xaa locations
  Clone ID: MRT4577_182233C.1.pep
SCWTRAAVDFELVDPFFCRNSARGGRGTWNLLIXASGAPGRENFKADRILYIPFLXGTFSPQDSNIMTSVSTQLSLVLMSLLLVLPVVEAVEAGDAIALLLGVVLSITGICACLGVYARKRNGQM

SEQ ID NO: 274829 - protein, 63 aa, Zea mays
  Clone ID: MRT4577_182234C.1.pep
PVHPLVRPHTTFPTYLLTVVITHLLLLARFRAPSSPISVSTDEPPAFIQAVIDHSTSFVPGRT

SEQ ID NO: 274830 - protein, 37 aa, Zea mays
  Clone ID: MRT4577_182235C.1.pep
TPSEKLQLRWNWPPSLSSHSGVGLDLVGPLPPPKLLA

SEQ ID NO: 274831 - protein, 46 aa, Zea mays
  Clone ID: MRT4577_182236C.1.pep
PPTLPKFCLGGRHCRFKFCKRFLLLCGSDWPHQTKRAPIQPAARPP

SEQ ID NO: 274832 - protein, 36 aa, Zea mays
  Clone ID: MRT4577_182237C.1.pep
QSFRVCMIFVHKFNYTVALRQKAIRVYKSFESHAFA

SEQ ID NO: 274833 - protein, 74 aa, Zea mays
  Clone ID: MRT4577_182238C.1.pep
VLQVCVGDLFGRSVSLQGVELAPGVDPEALEVAKDCLESIFSVNSTATGDAIQPGLLFELFASLEANERDQARA

SEQ ID NO: 274834 - protein, 219 aa, Zea mays
  Clone ID: MRT4577_182239C.1.pep
GYMSNTAEIWSALGTPARAAARILLAPRYLINGFSRLREWNDNAWARTRYGPSYRYRLWLLFDARDLEVLEHIINEGTDKEVLELREAKLEQFRLVALVGALLATLALQAMSLPQLSDTTFIVRSCFTQGTMLSLLATFFTCIQQRELGFVRTASSLRIWLSNGVQYRDSREHLVWQSSLASLTLMEAPYELISLAVTNFVCGMSAYMWSAWKDNLPVQ

SEQ ID NO: 274835 - protein, 89 aa, Zea mays
  Clone ID: MRT4577_18223C.1.pep
KLSFKNSYRVWCTKFTRCFPRVEQMCEDLTASVLTFGSWPNNHRKGASWQVLAMSWEFGGAKQVSVNFLETHVPLLLQRVYGPRRPVTL

SEQ ID NO: 274836 - protein, 89 aa, Zea mays
  Clone ID: MRT4577_182240C.1.pep
CSHTSHDAKLFWGTPNQPLLSCRQIHRCTPLLLCATTLRLSLNRVPPIQSSATALLIRTMAHLSSELTARQTLLSPPTRGKFLAPKPFP

SEQ ID NO: 274837 - protein, 100 aa, Zea mays
  Clone ID: MRT4577_182241C.1.pep
MNAEKLKKMAGAVLTAGKGSVRRKKTAVHRTTATDDIRLLSTLKRIGVNSIPGIEEGNISKDDDVIQFANTRVHATIGANTWVVRGTPQTKKLPDLLTSI

SEQ ID NO: 274838 - protein, 94 aa, Zea mays
  Clone ID: MRT4577_182242C.1.pep
HNGVQNRQMCFLTATNETPHLRDGSARCRPRCTLDRPAAFPTMPRMPCNHLSSSASRDRGAVPDTEGKGLLEKETITWHHQVMECCRDPGLPSN

SEQ ID NO: 274839 - protein, 100 aa, Zea mays
  Clone ID: MRT4577_182243C.1.pep
VPLTAVGCSTVLAALHRDLEDEPKGALNHRVGSSVVCAAVENLCGDVLPTGPAYHSVQGGQGVPHMLSVAGVSSSCVPTASTEVFLFGMVCYALVTRSAR

SEQ ID NO: 274840 - protein, 82 aa, Zea mays
  unsure (1)..(82): unsure at all Xaa locations
  Clone ID: MRT4577_182244C.1.pep
TPVAYMLPFXLXXXIXXXVXXTHTHTRHTLYTLDPRCFFSLARNANFLIRWRVFFFSTRRGRCPSVSHRRTPLHTLSPVLGY

SEQ ID NO: 274841 - protein, 63 aa, Zea mays
  Clone ID: MRT4577_182245C.1.pep
RNQPTWASLKPTLGRVLPGAHPGRDGSHRTPVEGAHPYHPGRTPHLVHGGNYGGPWVPFGADA

SEQ ID NO: 274842 - protein, 95 aa, Zea mays
  Clone ID: MRT4577_182246C.1.pep
LYLHLQHHQQRFQLVFFRLEKSSPTDSPHCYYFFLTRDLWMDCSLSVLCRPSLPSDSKTSNLVTRSRKPFHVCGNGVKKKKKKKKTEKKKKKICG

SEQ ID NO: 274843 - protein, 709 aa, Zea mays
  unsure (1)..(709): unsure at all Xaa locations
  Clone ID: MRT4577_182247C.1.pep
FWLSVLGVFEWSGNNPVPPEVWLLPYLLPFHPGRMWCHCRMVYLPMCYIYGKRFVGRITPLLLELRKELFKDPYSKIDWDKARNLCAKEDLYYPHPFVQDVLWATLHKFVEPVMMHWPGSKLREKALETVMQHVHYEDENTRYICIGPVNKVLNMLACWIEDPNSEAFKLHIPRVYDYLWLAEDGMKMQGYNGSQLWDTAFTVQAIVATNLIEEFGPTLKLAHNYIKNSQVLDDCPGDLNDWYRHTSKGAWPFSTADHGWPISDCTAEGLKVNAVISITNKEIYFRRLNCLLRSRILCSFSISNSSHINYEXCSHSXKFSLFLHIYVPAFXERDLWVLAGAKNLDLLTAPIPGLXCSVVSSLAMDCFLYFRFWPPXVPCFCTCLVHFGPFIFLIXHVQLSCAFEKKNVPTFLTVXVWHIVIISXICFNKXIAYFLLLQASLLLSRISPKIVGEPMEANRFYDAVSCLMSYMNDNGGFATYELTRSYPWLELINPAETFGDIVIDYPYVECTSAAIQALTSFKKLYPGHRRKEVDNCISKASNFIESIQKSDGSWYGSWAVCFTYGTWFGVKGLIAAGRTFENSPAIRKACDFLLSKELPSGGWGESYLSSQDQVYTNLKGNRPHAVNTSWAMLALIDAGQAERDPTPLHRAAKVLINLQSHDGEFPQQEIIGVFNKNCMISYSQYRNIFPIWALGEYRCRVLGAGKSWR

SEQ ID NO: 274844 - protein, 61 aa, Zea mays
  Clone ID: MRT4577_182248C.1.pep
EKLLAHCQFPFKKKKKKKKKKKKKKKKKIGAPSTVGAFDYREIYFRPLTSSLSLLPYKISL

SEQ ID NO: 274845 - protein, 759 aa, Zea mays
  Clone ID: MRT4577_182249C.1.pep
MWRLRIAEGGGDPWLRTKNAHVGRQVWEFDAAADPDPAVDAARRAFVATRGHLKHSADLLMRIQFAKENSIELHLPGIKLGEHEDVTEEAVLTTLKRAISRFSTLQAHDGHWPGDYGGPMFLMPGLIITLYVTGALNTVLSLEHQKEIRRYLYNHQNEDGGWGLHIEGPSTMFGSALTYVILRLLGEGPDSGDGAMEKGRNWILDHGGATYITSWGKFWLSVLGVFEWSGNNPVPPEVWLLPYLLPFHPGRMWCHCRMVYLPMCYIYGKRFVGRITPLLLELRKELFKDPYSKIDWDKARNLCAKEDLYYPHPFVQDVLWATLHKFVEPVMMHWPGSKLREKALETVMQHVHYEDENTRYICIGPVNKVLNMLACWIEDPNSEAFKLHIPRVYDYLWLAEDGMKMQGYNGSQLWDTAFTVQAIVATNLIEEFGPTLKLAHNYIKNSQVLDDCPGDLNDWYRHTSKGAWPFSTADHGWPISDCTAEGLKASLLLSRISPKIVGEPMEANRFYDAVSCLMSYMNDNGGFATYELTRSYPWLELINPAETFGDIVIDYPYVECTSAAIQALTSFKKLYPGHRRKEVDNCISKASNFIESIQKSDGSWYGSWAVCFTYGTWFGVKGLIAAGRTFENSPAIRKACDFLLSKELPSGGWGESYLSSQDQVYTNLKGNRPHAVNTSWAMLALIDAGQAERDPTPLHRAAKVLINLQSHDGEFPQQEIIGVFNKNCMISYSQYRNIFPIWALGEYRCRVLGAGKSWR

SEQ ID NO: 274846 - protein, 130 aa, Zea mays
  unsure (1)..(130): unsure at all Xaa locations
  Clone ID: MRT4577_18224C.1.pep
LGQSVTDSDTVXVPYLQAEGKEELLLHPPSPLLYWARLDTSYVHIGRYLVPMGTIGMVNMLAITHDPMLWTEPMEIKPERYMGPAVKDDPIMGSDLRFAPFAFHRHEXPRTSLTAATAGFWGVTLLYEFK

SEQ ID NO: 274847 - protein, 202 aa, Zea mays
  Clone ID: MRT4577_182250C.1.pep
MPSPPRPLASLCRARLVLFLVPALLLLLPSTARSAGDESARALSVGEELVAETMPLRHGRRVYRIHGLRPSAWYEVKISYPASIPSSFSIRLVDDWGSKNRRLLNTEKIIFKAESSSPVYVLVTVEPEGVVAKPNVPERELALFNIVCDELMLGIPHFAWWAGIAALLCIVLAALAPLVLPLHKLLSCEGTQLSESDAAKMS

SEQ ID NO: 274848 - protein, 85 aa, Zea mays
  Clone ID: MRT4577_182251C.1.pep
IFLLFFLFGGFFLILFWAIPLILPPKSKKHGQITPHQKKAPFLKKHHFTLKKEEMPTKNPNKKPSPTLAPTHRKKKFIPDVKTPK

SEQ ID NO: 274849 - protein, 59 aa, Zea mays
  Clone ID: MRT4577_182252C.1.pep
LINVSSEDVLYMLASGIFRSVNGVTSVIDNCDSSLSLSCLMVIKILCAASADVTCYTLS

SEQ ID NO: 274850 - protein, 68 aa, Zea mays
  Clone ID: MRT4577_182253C.1.pep
NHTVKRCTSIIEEQTKCVESHFGSMRTVERIEIIGIGPPSSCKISMRHEQHERAKKYIFMDVVHIIGR

SEQ ID NO: 274851 - protein, 42 aa, Zea mays
  Clone ID: MRT4577_182254C.1.pep
MVTAAEFPGLNTLGLSIGRTDIGPYGVVLHHSHPRASEMMFV

SEQ ID NO: 274852 - protein, 99 aa, Zea mays
  Clone ID: MRT4577_182255C.1.pep
GARRGAGRAGAAAQPRGRRGGRQRPHARARPVRDRRRQEQAILPAGVLLARGHRPPSPVVVCAAVPKRAVRRRHLVRQHDRHACMHAWGPRVRIESLAS

SEQ ID NO: 274853 - protein, 320 aa, Zea mays
  unsure (1)..(320): unsure at all Xaa locations
  Clone ID: MRT4577_182256C.1.pep
ASSTSAVTKLTFGNLYIRRAGPGSREITEEGRCDLDRRYVSDFPVYDGRGPDASLVARVQGITSEIGNAHQLFVVVFXRQLFVSPCICVSLPARLKGSTLVTNGVITAGSDEWAIYGGTGVFAMARGVIRRRYLADRAGGNTDELNMDVFCRPFGSQSQLQDKMQVQGQGQGSSVTKIGLWGGPGGSAQDITAERPPQRLHSVTVRAGVAVDSIEFTYTDSAGQRRAAGRWGGLGGNVRTIDLGNAEDVREVSGTYGAFEGATTLTSLRLVTSSRTWGPWGVENGTRFSVTAPIGSSIVGFYARAGTRLVDAIGVYLRQI

SEQ ID NO: 274854 - protein, 53 aa, Zea mays
  Clone ID: MRT4577_182257C.1.pep
TGQTWPLHYKCPYSIAVALDEVGPSGSEWSQLHFNVRPSLNTNARSYERMQHL

SEQ ID NO: 274855 - protein, 203 aa, Zea mays
  unsure (1)..(203): unsure at all Xaa locations
  Clone ID: MRT4577_182258C.1.pep
RAGVLVLPAQFTKLTFRNLYIRRAGPGSREITEEGRCDLDKRYVSDFPVYDGRGPDASLVARVQGITSEIGNAHQLFVVVFDTDSXRLALHMRLSAARLKGSTLVTNGVITAGSDEWAIYGGTGVFAMARGVIRRRYLADRAGGNTDELNMDVFCRPFGSQSELQDKMQVQGQGSSVTKIGLWGGPGGSAQDITAERPPKRKL

SEQ ID NO: 274856 - protein, 135 aa, Zea mays
  Clone ID: MRT4577_182259C.1.pep
AWQTQKPPVLSSILPVPAVDAPPRKYGIASLAIEIVAYLAVACLYICNSVRQEKLISAGFLLLLLLVFLLSSIGVRTSRFRVDFVFGANIVAVSSYCVWKFSYTSWVNKRRCNTATHSVGSLRRHRLPIHLQLLQ

SEQ ID NO: 274857 - protein, 64 aa, Zea mays
  Clone ID: MRT4577_18225C.1.pep
HQTNKHVHTYEYLYRIYLIPIDALTQAADTLSQYHATSRSRSLFLFQYYRQKLSGLQYAVQQIK

SEQ ID NO: 274858 - protein, 242 aa, Zea mays
  Clone ID: MRT4577_182260C.1.pep
LLFQLFVSPCICVSLPARLKGSTLVTNGVITAGSDEWAIYGGTGVFAMARGVIRRRYLADRAGGNTDELNMDVFCRPWGSQSQLQDKVQGQGQGSSVTKIGLWGGPGGSAQDITAERPPQRLHSVTVRAGVAVDSIEFTYTDSAGQRRAAGRWGGLGGNVRTIDLGNAEDVREVSGTYGAFEGATTLTSLRLVTSSRTWGPWGVENGTRFSVTAPIGSSIVGFYARAGTRLVDAIGVYLRQI

SEQ ID NO: 274859 - protein, 399 aa, Zea mays
  unsure (1)..(399): unsure at all Xaa locations
  Clone ID: MRT4577_182261C.1.pep
HWLGSNDGFLKKKKQLPPWPQANDWQHGEXDEEAGLLKPLDLDLVESGPRQFSYSELAAATKNFSDDRRLGSGGFGSVYRGILTTDGRNRCVAVKRVSKTARQGWKEFVSEVVIISRLRHRNLVQLIGWCQGSGNKLLLVYELMPNGSLDDHLHRPDSVLMWPVRYGIALGVGAALLYLHDDAEQRVVHRDVKPSNVMLDASFNAKLGDFGLARLIDDGRRSHTTGVAGTFGYMDPESMLAGKASVESDVYSFGVFLLEITCGRRPAVLVREEDYVHLVQWVWDSYGGGSILDAADPWLGNNFNSQEMACAMLVGLWCAHPDRSLRPTIRQAVNVLRFEAPPPRLPAKMPVATFGPPAAHASGSTTSSAEALMTWGSSLPTMAMAASSLDIEHSSTKTS

SEQ ID NO: 274860 - protein, 139 aa, Zea mays
  Clone ID: MRT4577_182262C.1.pep
MRLSAARLKGSTLVTNGVITAGSDEWAIYGGTGVFAMARGVIRRRYLADRAGGNTDELNMDVFCRPFGSQSELQDKVVHHTNNQRRPFCRLELNMFCWIYNILLMNLCAYRCRCRGRALASPRLDYGVDREGRHRTSRR

SEQ ID NO: 274861 - protein, 48 aa, Zea mays
  Clone ID: MRT4577_182263C.1.pep
SFFPGRTPRGIFRGSFQLPAGIVCTNKVKARAYQPLPVPETRVRSPTW

SEQ ID NO: 274862 - protein, 73 aa, Zea mays
  unsure (1)..(73): unsure at all Xaa locations
  Clone ID: MRT4577_182264C.1.pep
MFRPWWSCCXTGPLTPGQWRRGHXTTKSYRQKLGATEEIPLDTDLVREPPGYKAPHQEHIRRWDHKGLAQIEF

SEQ ID NO: 274863 - protein, 191 aa, Zea mays
  Clone ID: MRT4577_182265C.1.pep
MENPASVLVLPAQFTKLTFGNLYIRRAGPGSREITEEGRCDLDKRYVSDFPVYDGRGPDASLVARVQGITSEIGNAHQLFVVVFDTDRLKGSTLVTNGVITAGSDEWAIYGGTGVFAMARGVIRRRYLADRAGGNTDELNMDVFCRPFGSQSELQDKVVHHTNNQRRPFCRLELNMFCWIYNILLYESLRI

SEQ ID NO: 274864 - protein, 312 aa, Zea mays
  Clone ID: MRT4577_182266C.1.pep
MENPASVLVLPAQFTKLTFRNLYIRRAGPGSREITEEGRCDLDKRYVSDFPVYDGRGPDASLVARVQGITSEIGNAHQLFVVVFDTDRLKGSTLVTNGVITAGSDEWAIYGGTGVFAMARGVIRRRYLADRAGGNTDELNMDVFCRPFGSQSELQDKMQVQGQGSSVTKIGLWGGPGGSAQDITAERPPQRLHSVTVRAGVAVDSIEFTYTDSAGQRRAAGRWGGLGGNVRTIDLGDAEDVREVSGTYGAFEGATTLTSLRLVTSSRTWGPWGVENGTRFSVTAPIGSSIVGFYARAGTRLVDAIGVYLRQI

SEQ ID NO: 274865 - protein, 101 aa, Zea mays
  Clone ID: MRT4577_182267C.1.pep
CVTLMCPFSVPFPLLMVASPPLSSLIWRAFLCSSGFGAPLLVSLLFVHPDGAPPSLSLFEESQCGSISVCLFLPRQRSIYCATSTVLQWRRLRTPKNSTFP

SEQ ID NO: 274866 - protein, 42 aa, Zea mays
  Clone ID: MRT4577_182268C.1.pep
RLKFHNERTSPRSQQLLSDRFGMQAQICLTVKPSSRFRMRRV

SEQ ID NO: 274867 - protein, 110 aa, Zea mays
  unsure (1)..(110): unsure at all Xaa locations
  Clone ID: MRT4577_182269C.1.pep
MGRRPARCYRQIKNKPYPKSRDXRGVPDPKIRIXYDVGMKRKGADEFPYWAHLVSXEKENGSSEALEAARIGCNKSMTKXAGKDAFHLRAQGKPFHVLRVNEMLARTGAD

SEQ ID NO: 274868 - protein, 391 aa, Zea mays
  unsure (1)..(391): unsure at all Xaa locations
  Clone ID: MRT4577_18226C.1.pep
MAPPPLFPLPPLLILLVIVPLFPTAAPTATTLPLYRHLPHVAEAVASHHHPLSRLAAASLARALHLKRRDPNHHSQKGSGGHPSVPATAALYPHSYGGYAFTASLGTPPQPLPVLLDTGSHLTWVPCTSSYECRNCSSPSASAVPVFHPKNSSSSRLVGCRNPSCQWVHSAANLATKCRRAPCSPGAANCPAAASNVCPPYAVVYGSGSTAGLLIADTLRAPGRAVPGFVLGCSLVSVQRGXGGTIVDSGTTFTYLDPTVFQPVADAVVAAVGGRYKRSKDAEDGLGLHPCFALPQGARSMALPELSFHFEGGAVMQLPVENYFVVAGRGAVEAICLAVVTDFGGGSGAGNEGSGPAIILGSFQQQNYLVEYDLEKERLGFRRQSCTSSPS

SEQ ID NO: 274869 - protein, 81 aa, Zea mays
  Clone ID: MRT4577_182270C.1.pep
INFYFPCLFYFFVFKNPIFYKKPHFLSKNISNKYNQPIPIYTQHPIQKNTNYLYLLLAPIKPHPILFIRLLSIHTPHSHII

SEQ ID NO: 274870 - protein, 47 aa, Zea mays
  Clone ID: MRT4577_182271C.1.pep
LICSRFFFLLFFFFFLMFGLFNQGTEVFLIKKKIPEFLVTNNLSVSG

SEQ ID NO: 274871 - protein, 148 aa, Zea mays
  Clone ID: MRT4577_182272C.1.pep
MALSNPLHGIRKEGTVGKPLPRIEAKIIMEDGAETTTGVGELCIRSPSLFKEYWKRPEHDAVLECAVLGLPDEAYGEVICAIIVPKEDAKKKAGQDSKPALTLEALTSWSKDKLAPYKIPTRLYLWDSLPRNAMGKVNKKELKKLLGA

SEQ ID NO: 274872 - protein, 627 aa, Zea mays
  unsure (1)..(627): unsure at all Xaa locations
  Clone ID: MRT4577_182273C.1.pep
MRTQAWGRGAVARLMTPFNRRAAHASSPHLLRACSSASYTIALARLRRHFTSSASFSPAYSARQDTHTFMEVVQEVLRHGSADSVRAVIRANKKSYSLVQLIAASFDVYNILCSKNMTPNGMQDSSSKGRNGTGFLHGARVGIVAKPSPEFVAGVFGTWLSGGVAVPLALSYPEAELLHVMNDSDISMVLSTKEHHEIMENLSIKCSAYCSILPSVTSIPSEINPQEPSSNEAISSVSTLITETNSSKKIKGDDPALILYTSGTTGKPKGVVHTHEGILSQVQILSEAWGYRSEDQFLHCLPLHHVHGLFNALFAPLYSGSVVEFIPKFSVSGIWQRWRESYPNDASKSTEAITVFTGVPTMYTRLLQGYDSMDPDQKXGSSYAAKHLRLMMCGSSALPSPLMKRWEEVTGHRLLERYGMTEFVMALSNPLHGIRKEGTGGKPLPRIEAKIIMEDGAETTTGVGELCIRSPSLFKEYWKRPEVTAESFIDGGFFKTGDTVTVDEEGYFIILGRTNADIMKFGGYKLSALEIEAVLLEHDAVLECAVLGLPDEAYGEVICAIIVPKEDAKKKAGQDSKPALTLEALTSWSKDKLAPYKIPTRLYLWDSLPRNAMGKVNKKELKKLLGA

SEQ ID NO: 274873 - protein, 243 aa, Zea mays
  unsure (1)..(243): unsure at all Xaa locations
  Clone ID: MRT4577_182274C.1.pep
MDYERIXTTRPTASXGGFSPAKLRAMLLGLEKHQHSGEDTSPEANDSGELDDRRSLECSTSTEMSSNSGHRSRNRAPEDDSFDSESSSSGPTTVKRAAAVSALLPPFSRPTPSKWDDAEKWISSPTANRTGRVMTAAGFAPKKTAFALPEHGACLPAAAKVVAEVPRNTGTLTDNSVGSTQPDSIKPAETAPIVDEPEHVIRSVSMRDMGTEMTPIASQEPSRTGTPIIASSPTSTRTTPNGS

SEQ ID NO: 274874 - protein, 94 aa, Zea mays
  Clone ID: MRT4577_182275C.1.pep
TLKSPKVLLVPIHSGTLTPNRPKRRTTTLPRQHETRHQQHHNNPLPAEHHHDPTLPNEHHTADTILSQDQRNQPLLREHHPLNIRIRQAHKSAQ

SEQ ID NO: 274875 - protein, 101 aa, Zea mays
  unsure (1)..(101): unsure at all Xaa locations
  Clone ID: MRT4577_182276C.1.pep
MRMARTELKMEHELDKWQTESDRIRDKYPDRVAETGETAGQTDVHKIDQKNDHVTADLTVCQVGYIVRLRIKLGPXKAMYDTVKNTVAPTXASMMSAIYDE

SEQ ID NO: 274876 - protein, 292 aa, Zea mays
  Clone ID: MRT4577_182277C.1.pep
VGAQSRGPAPHLQQLRMPAPFAMVHRDGQHPPSIMNPGVIPSRQSVHGNFESSASGNALAGISFASMAPSSGHQAMSSTSDSHPVFPASSLLPGSGPGSMANFVRSSTRIPVVMASEQAPRLNPYVHHIGGGPLNAAPAGIQKARAHIGHTPQAASDQSQDVLHRLLLQLPEVMAPSLAQPTASSSHPAPMAARQQAGLLNPAPDNVACPLNAVAGVGRPGARIGSQSYQVSASLLEWEATLRVGLIRGHQGTYPLGQGCSDLAGGPPGTSAAQGCGSGASREVVCLSDDEE

SEQ ID NO: 274877 - protein, 141 aa, Zea mays
  Clone ID: MRT4577_182278C.1.pep
MASAEELCEREVLWPETAHDEGDGDDATPSCSSSPPVAPRSRTPAPAPRPRGGVPGSERPTTTTRAGSRPVDIQRPASSARRRGHEDGDRDRDWSAATMVPPHVLVSRRRQEAPCALLRPGARELSHLRDSVLRVTGFIEG

SEQ ID NO: 274878 - protein, 44 aa, Zea mays
  Clone ID: MRT4577_182279C.1.pep
SRYTAGRHTKDVITVRYPYLKRCLNIARFELGVSSPHINPPNHA

SEQ ID NO: 274879 - protein, 46 aa, Zea mays
  Clone ID: MRT4577_18227C.1.pep
LHSLTLFHHATVDTMAKSTAMLVADLDLLVVMVTTSTGGGWAAAAC

SEQ ID NO: 274880 - protein, 201 aa, Zea mays
  Clone ID: MRT4577_182280C.1.pep
MAMHPLAQGHPQAWPWGVAMYTNIHYHHQYEREHLFEKSLTPSDVGKLNRLVIPKQHAERYFPLNGGDSPGDKDLLLSFEDEAGKPWRFRYSYWTSSQSYVLTKGWSRYVKEKQLDAGDIVHFERVRGLGTGDRLFIHCRRRGESAPPPPVRVPPPALNAGEQQPWSPMCYSTSGSYPTSPANSHAYRRSVEQDHSEMLHA

SEQ ID NO: 274881 - protein, 103 aa, Zea mays
  unsure (1)..(103): unsure at all Xaa locations
  Clone ID: MRT4577_182281C.1.pep
LQLSGARSRRWVPRQQRASAYSALDRPRGLRGSGDGVGSVLPPPPPRRPPPAAPRXPPXPRPTPPPPPPPPXPPPPXPXPPXPTPRPPPPPPPPPPPPXPPTP

SEQ ID NO: 274882 - protein, 191 aa, Zea mays
  unsure (1)..(191): unsure at all Xaa locations
  Clone ID: MRT4577_182282C.1.pep
MSELLRKPSVLXXXAEELDREVGRGRWVTEKDVAHLXXLQAIVKETTRVHPIAPLLPPHVTREDASIGGYDIPKGTHVLINVWAIGRDPALWDAPEEFRPERFVGSKTDVKGRDFELLPFGSGRRMCPGYSLGLQEIQLSLANLLHGFTWTLPEGMAKEDLRMDELFGLSTTRKFPLEVVVRPRLASELYA

SEQ ID NO: 274883 - protein, 73 aa, Zea mays
  Clone ID: MRT4577_182283C.1.pep
SAKVPGVKSTIKVQLKKVLCMGVPVGPVEMTNKELVGNVMLSIKYPGPPPKKGWQNVGPPPPKGSMGPPKGFY

SEQ ID NO: 274884 - protein, 160 aa, Zea mays
  Clone ID: MRT4577_182284C.1.pep
MRSNNSGELAAGYCSPRVVDSYSCRQMYLRSYTFSKRKETVPERTMACLGRVRDRGAAVFPLFHPQRHGGGSAAAAAALDAASVGSASHRTEDDGVLGLRRGSKQQQRRRRRKKNKKKGCAVVRRLHEASCGAVRAIFRRLLACTTSVDVADGVAAAPRS

SEQ ID NO: 274885 - protein, 81 aa, Zea mays
  Clone ID: MRT4577_182285C.1.pep
KNKYCIWKELPPIRIYFSVSLMLRLSNCICRFLSRFSFKLPTRCCSPVSAPIVLDFYPLKNKTGEKSTTKAYVVLKNFSFF

SEQ ID NO: 274886 - protein, 1075 aa, Zea mays
  unsure (1)..(1075): unsure at all Xaa locations
  Clone ID: MRT4577_182286C.1.pep
MAAVLDSFVKRCTASLEDFADQEACAALGIVDDVRGLLATLLRIDAIISHEERRRVLSAKTDAWVVQVKDAMYEIDDVLDVCMIEGAKILAAGGPPTPKVRCFFCFKLSGPRKFRHEIGFTIRDIDLRLREVEEEMPRLPAGSAHSDDAKRDWFSRDVCKNCSDAMKPQAVGSQVQKAVGGLVPRMLREGKKKVDVFAIVGAVGIGKTTLAREIYNDDRMTENFPICVWVDMSKNLSELDFLKTIIRGAGANVGVTENKEELLILLASALSKRFLLVLDDLESPSIWDNLLKDSLGDGVVRGRILITTRNEEVATSMKATIHHVDKMDPESAWALLCNQVDAECNSEELATLKDVGIKIAEKCDGHPLAIKVIAGILRSRGNSKAEWEMVLNNDSWSMCPILPEVPQAVYVSYVDLSSQLKECFLHCSLYPEEFPIQRFALVRRWIAEGIVNARDKKLLEESAQEYYVELISRNLLQPDPESVERCWITHHLLRSLARALIADESILIYGQQKLNTSLSKPRHLTLCSMENSLDGPISLKQQMGLRSLMLFKSPNVRAIDLLMESASCLRVLDLSKTAVEAIPKSIGNLVHLRYLNLDGAQVRDIPSSIGFLINLQTLSLQGCQSLQRLPRSIRALLELRCLCLYGTSLSYVPKGVGKLKHLNHLDGLIIGHDNNAPEGCDLDDLKALSELRHLHIESLDRATSGASALANKPFLEDLYLSEQAPAIENQEDLEDKDETEKEEKEGQERSNGQCRGDESTKASEKIWNELTPPQSIKKLVIKNYKGVKFPKWIKGPKLGDSFPSLVFLDLENCMSCTKLPSLGLLSQLQSLQISNADSVITIGSEFLGTTVLSSATPFPKLEVLKLRNMKKLEEWSLTVEESQVVLPCLKSLQIQWCPKLKALPEGLKHVALCELHVEGAHSLTEIKDLPKXLSDELHLKDNKVLQRISXNLPMLRSLIIDACSKLKHVAGLDALQHLRLVFPPSTETFYFEELVIFWSVAFPRWLELLIQKCKGLRRFELQCGLSLLRSCLDGGKNWHLVQQIPEVRIISCDGKRYFRYNKSRRIYETNAQSEE

SEQ ID NO: 274887 - protein, 96 aa, Zea mays
  Clone ID: MRT4577_182287C.1.pep
PTRPPTRPPTRPVKGAKASGAKAVAVPSLQNQRNHYYIADVILYSLLDFQPEMWGLPPLEDRIQGVLPIDPLLSNARIGGKILNNIHWVISACTFS

SEQ ID NO: 274888 - protein, 288 aa, Zea mays
  Clone ID: MRT4577_182288C.1.pep
MSIHGLILEVRVTGCRKLRDTEFFTRQDPYVVVEYATTKLRTRTCTDGGRNPTFDEKFHIPLIEGLRELNVIVWNSNTLTHDDFIGSGRVYLHKVLTNGYDDSSWPLQTRHMRSAGEVKLIMHVDVSAMKNKMGRSVAASSAHPVPALSMPAPSPASAPTPAPAPALASAIPYTGVSPSYPPVSAYPGATAYPAYPTSSHAPYTTAEYPPPPQQPYQPPPAGYPPSYPPQPYEQSYPPQPYERSYPPQPYERSYPPQPYGQQPYPPPPAAESPYPPAPYPGTYPPRPY

SEQ ID NO: 274889 - protein, 58 aa, Zea mays
  Clone ID: MRT4577_182289C.1.pep
LVTSGSSKVQKHDDASCVFFYEDFIWNALLARRRLEKRRAEGMKLVFHLEVHRCYRML

SEQ ID NO: 274890 - protein, 173 aa, Zea mays
  Clone ID: MRT4577_18228C.1.pep
PRPWHRTTTTRCPAWPPRRWPARCTSSAETPTTTFTYLDPTVFQPVADAVVAAVGGRYKRSMDAEDGLGLHPCFALPQGARSMALPELSFHFEGGAVMQLPVENYFVVAGRGAVEAICLAVVTDFGGGSGAGNEGSGPAIILGSFQQQNYLVEYDLEKERLGFRRQSCTSSPS

SEQ ID NO: 274891 - protein, 286 aa, Zea mays
  unsure (1)..(286): unsure at all Xaa locations
  Clone ID: MRT4577_182290C.1.pep
MSIHGLILEVRVTGCRKLRDTEFFTRQDPYVVVEYATTKLRTRTCTDGGRNPTFDEKFHIPLIEGLRELNVIVWNSNTLTHDDFIGSGRVYLHKVLTNGYDDSSWPLQTRHMRSAGEVKLIMHVDVSAMKNKMGRSVAASSAHPVXFFQCQPPFSNPXPAPSPASAATPAPAPALASAIPYTGVSPSYPPVSAYPGATAYPXPTSSHAPYTTAEYPPPPQQPYQPPPAGYPPSYPPQPYEQSYPPQPYERSYPPQPYGQQPYPPPPAAQSPYPPAPYPGTYPPRPY

SEQ ID NO: 274892 - protein, 320 aa, Zea mays
  unsure (1)..(320): unsure at all Xaa locations
  Clone ID: MRT4577_182291C.1.pep
MRGRRRRGWGRCIWNPLPGSSETTACRSRSTSTPRRCRQKAKPLPGVKRLVKHLHKNGVPLALASNSIRRNVDHKLPXTDAWXKCFSVILGGDQVPNGKPSPDIFLEAAKRLGANPSSCLVIEDSVVGVKGAKASGAKAVAVPSLQNQRNHYYIADVILYSLLDFQPEMWGLPPFEDRIQGVLPIDPLLSNARIGGKILNNIHWVISDDCAYEYIPDQISGIFLGWAKSKVHGFSKVIVATGWDFSQQTVERVMHVHFLDCSGTVETEPVKLLIIGYIRKLQSADDILQALSVTDEDRRIARDALDLPTFSEYANDLHLA

SEQ ID NO: 274893 - protein, 71 aa, Zea mays
  Clone ID: MRT4577_182292C.1.pep
MPSYIITCKDDASDEQVQSVKQHAKDQGGKITHEYSLIKGFAVEFPEDSIQTLESHEHIKTVEADGEMRTQ

SEQ ID NO: 274894 - protein, 238 aa, Zea mays
  unsure (1)..(238): unsure at all Xaa locations
  Clone ID: MRT4577_182293C.1.pep
MPTFTVFKGSKEGKIVKGQTTKPDLQDDQVLIKVTASGLCGTDEHYKHADMALGHEGVGVVEDIGPNVKVLKKGDRVGWGYEHNSCGHCEKCLTGRETYCPERQMYGFANLDQGSFASHAVWCEAFLFKVPDELTDAEAAPLMCGGTTVFNALHAYNVRPTQRVGVMGIGGLGHLAIQYASXMGCDVVVFSGSDSKKDEAMRLGAKEFVMKGATELSVSRKVDVLLVTASVTPDWKLL

SEQ ID NO: 274895 - protein, 36 aa, Zea mays
  Clone ID: MRT4577_182294C.1.pep
FVGKCNQEECLFLEDLKVIFNHGNYVVRSFMFACDS

SEQ ID NO: 274896 - protein, 56 aa, Zea mays
  Clone ID: MRT4577_182295C.1.pep
GGPIGFPPFKTKVFFPFGERKETVLSFLIRYGVPISRGNHFRQEFFRNKNLAGPLY

SEQ ID NO: 274897 - protein, 89 aa, Zea mays
  unsure (1)..(89): unsure at all Xaa locations
  Clone ID: MRT4577_182296C.1.pep
PRLLTEGKLRLHSRLLNRTEPAQTKRKTTKEKPNATPPSXPAXEIISESLFNEMXLXRNDVARPATGFYTYDAFIAVANAFPGFGTTGG

SEQ ID NO: 274898 - protein, 135 aa, Zea mays
  Clone ID: MRT4577_182297C.1.pep
PRVRPRVRPRVRIYTKAGPVLVAVNPFKKVSLYGNEYIDAYRNKSMDSPHVYAIADAALCEMKRDEVNQSIIISGESGAGKTETAKIAMQYLASLGGGSGIEYEILQTNPILEAFGNAKTLRNDNSSRFGKLIKI

SEQ ID NO: 274899 - protein, 97 aa, Zea mays
  Clone ID: MRT4577_182298C.1.pep
VDLNPMFFIKGNGLNSIFVSVSLVRVPNKGGDSVRSRAVNFQSVSVQFERIDAATILIGFVPSSIFKFNLLPFLLFLVKELEDVGVGTEIQNWYPQA

SEQ ID NO: 274900 - protein, 810 aa, Zea mays
  unsure (1)..(810): unsure at all Xaa locations
  Clone ID: MRT4577_182299C.1.pep
NNPAPAVPLVALGTQNGTIEGVHGVANAVSASFSVHSSTVRGLRWLGNSRLVSFTYNQVNDKTGGYNNKLVITCLRSGLNRSFRVLQKPERAPIRALRASSSGRYLLILFRDAPVEVWAMTKNPMMXTSLALPFTVLEWTLPAAPRPGQNASSKQSSTSKERSAEASGAESSDETCESFAFALVNGALGVFEVHGRRIRDFRPKWPSSSFASSDGLVTAMAYRLPHVVMGDRSGNIRWWDVTSGLSSSFSTHREGIRRIKFSPVVHGDRSRGRIAVLFYDNTFSIFDLDSPDPLANALLQPQSPGTLVLELDWLSTRTRKDEPLMLCIAGADSSFRLIEVNIDAKGSSISKPVATKERFRPMPFCLPVLFPTAHALXALRMILQLGVKPSWFECNNSDKLTGDSFKVAPTFGDLRSYMIETTLPPIGDAVVAELLLKVLEPYRKEGCILDDGRASLYSAIVNKGACARFAFAAAIFGDFQEALFWLQLPQALRHFLGKSTSRSREKISQSSLHPDSEQSSRFNRIASRERSASEKFTKNAANYGQLSSMAFNQEQLWFNASERIPWHDKLDGEDALQKHVHELVSLGNLEAAVSLLLSTPPEGSNFYPNALRAVVLSSAVSQSLHELAVKVVAANMVRTDKSLSGTHLLCAVGRYQEACSQLQDAGCWNDAATLAASHLHGSDYARVLQRWADYVLXVVSTICGEXSILYVAAGALPEALDTLRKSQRPDTAAMFLLACHETYSQALSESEPEDDTSXSTDADADAGADGEPPVPFQECGXEDLIAVSEVFGQYQQKLVHLCMDAEPTSD

SEQ ID NO: 274901 - protein, 546 aa, Zea mays
  Clone ID: MRT4577_18229C.1.pep
MTQADQVHDSGPTGDGEEHRPPPCPPLQPKQGTYTPVPSYTNHRQSTSGGSWPATMAPPPLFPLPPLLILLVIVPLFPTAARTATTLPLYRHLPHVAEAVASHHHPLSRLAAASLARALHLKRRDPNHHSQKGSGGHPSVPATAALYPHSYGGYAFTASLGTPPQPLPVLLDTGSHLTWVPCTSSYECRNCSSPSASAVPVFHPKNSSSSRLVGCRNPSCQWVHSAANLATKCRRAPCSPGAANCPAAASNVCPPYAVVYGSGSTAGLLIADTLRAPGRAVPGFVLGCSLVSVHQPPSGLAGFGRGAPSVPAQLGLPKFSYCLLSRRFDDNAAVSGSLVLGGTGGGEGMQYVPLVKSAAGDKLPYGVYYYLALRGVTVGGKAVRLPARAFAGNAAGSGGTIVDSGTTFTYLDPTVFQPVADAVVAAVGGRYKRSKDAEDELGLHPCFALPQGARSMALPELSFHFEGGAVMQLPVENYFVVAGRGAVEAICLAVVTDFSGGSGAGNEGSGPAIILGSFQQQNYLVEYDLEKERLGFRRQSCTSSPS

SEQ ID NO: 274902 - protein, 42 aa, Zea mays
  unsure (1)..(42): unsure at all Xaa locations
  Clone ID: MRT4577_1822C.1.pep
PWLRPEEKTQETXEYRNEGGDMDPIRVHTVIIPTQRRQRQRT

SEQ ID NO: 274903 - protein, 275 aa, Zea mays
  Clone ID: MRT4577_182300C.1.pep
IRSSIFVQNYGQLSSMAFNQEQLWFNASERIPWHDKLDGEDALQKHVHELVSLGNLEAAVSLLLSTPPEGSNFYPNALRAVVLSSAVSQSLHELAVKVVAANMVRTDKSLSGTHLLCAVGRYQEACSQLQDAGCWNDAATLAASHLHGSDYARVLQRWADYVLRGEHNMWRALILYVAAGALPEALDTLRKSQRPDTAAMFLLACHETYSQALSESEPEDDTSVLALTPTPEQTEKLRFPSKNVADEDLIAVSEVFGQYQQKLVHLCMDAEPTSD

SEQ ID NO: 274904 - protein, 102 aa, Zea mays
  Clone ID: MRT4577_182301C.1.pep
SGIHMMIIHPPYGRRFKENNSALYYLRFIDILLCVHDMRASIVVQMCYLSYAWLASVLASINGCVPTGILSCANSCPWYQILIGPVIFHFMPYIRQIRLSYY

SEQ ID NO: 274905 - protein, 70 aa, Zea mays
  Clone ID: MRT4577_182302C.1.pep
NDLWRVFLKNTLLHIFYKKKKHHGGTILWSHYPSFIYAGAMTQSIGGWGKPNYPQVLFYYSAAMMHSIGC

SEQ ID NO: 274906 - protein, 497 aa, Zea mays
  unsure (1)..(497): unsure at all Xaa locations
  Clone ID: MRT4577_182303C.1.pep
MGNGESGVYQNDNLHKSSVLHTGLIDTDPSVNLHGNGGLSVSSSQNPVVDCVSRREDPLRDWGNIACSEGIIGCDHTTTDNEHIKLAHRLHDNVQMNVPVIVEDVTDNVPSGIPSSRPVVPQVVMAAEEHQEVILSSQKDDDSRTNRPELANEDHDGVADGSISDAVVAELEASMYGLQIIKNGDLEELRELGSGTFGTVYYGKWRGTDVAIKRIKKSCFAGRSSEQEKLTNDFWREAKILSKLHHPNVVAFYGVVPDGTGGTLATVTEFMVNGSLRNVLLRKDRMLDRRRKLTIAMEAAFGMEYLHSKSIVHFDLKCDNLLVNLRDPQRPICKVGDFGLSRIKRNTLVSGGVRGTLPWMAPELLNGSSSKVSEKXVFFLTMLLIALCIWNYDRLIRNEYLVXTXVDVFSFGIVLWEILTGEEPYANMHCGAIIGGIVNNTLRPPIPEKCDPDWQKLMEQCWSANPDARPSFTEVTDRLRAMPPVIQARGGQAPATR

SEQ ID NO: 274907 - protein, 52 aa, Zea mays
  Clone ID: MRT4577_182304C.1.pep
GSSGFVLNGTPYSIINYFFIFPFPLLVTFTAFPPTTFSAFTSSSVVEIFLFV

SEQ ID NO: 274908 - protein, 111 aa, Zea mays
  unsure (1)..(111): unsure at all Xaa locations
  Clone ID: MRT4577_182305C.1.pep
LAYHVXAAXVCHELKTPDTEHRPGLERLLETLPIWSLTGSCSSTRSRPLPGAPTVGVSTPGVPGPTSKLSLRVPAQMGRRETGHKGGRTVRGNHGLRVVLRPRRMDALAKG

SEQ ID NO: 274909 - protein, 319 aa, Zea mays
  unsure (1)..(319): unsure at all Xaa locations
  Clone ID: MRT4577_182306C.1.pep
AALLARSGVYVVDGDIADAELLAKLFDVVPFTHVLHLAAQAGVRHALVDPMSYVRANVAGLVALLEAARSANPQPAIVWASSSSVYGLNSHVPFSEHDRTDRPASLYAATKKAGEEIAHVDNHIYALVRPRVRXVYGPWGRPDMAYFFFTKDILAGRPITVYESAGGGSHQTTISRDFTYVDDIVKGCVAALDTAGRSTGSGGKKRGTAPFRTYNLGNTSPVPVTQLVDLLEKLLKVKAVRKVVKMPRNGDVPYTHANVSLAQRELGYRPSTDLQTGLKKFVRWYLEYYHPELAEKHKLRTSSNGKGSRGRNGSSSSAR

SEQ ID NO: 274910 - protein, 77 aa, Zea mays
  Clone ID: MRT4577_182307C.1.pep
VCARSLDDCIPFGLSIGFILHKIGCHSIWLIESPEARFWYFNFWTNQLSLLFVSKITFSWHIFQHYKIIQNMHTHGI

SEQ ID NO: 274911 - protein, 106 aa, Zea mays
  Clone ID: MRT4577_182308C.1.pep
KEKKKKKKKNIKKKKKKKKKKKNFTKTTIQPNSPLLYCHLTPIYSPLIYNLLPIISTVAPHQNPLVTHLTLPDSLNHFHPYSYISSNPSTILSHHYYTLYLQSLSP

SEQ ID NO: 274912 - protein, 245 aa, Zea mays
  Clone ID: MRT4577_182309C.1.pep
SDIGRGGTGWGESISGSSSLSRRAGSDGGASPPSPSPMAGSSSGPAPGQAAKDKKMASAEQLVLELCDPELRENALLELSKKREIFQDLAPLLWHSFGTIAALLQEIISIYPSLSPPTLSPGASNRVCNALALLQCVASHPETRILFLNAHIPLYLYPFLNTTSKTRPFEYLRLTSLGVIGALVKVDDTEVISFLLQTEIIPLCLRTMEMGSELSKTVATFIVQKILLDDVGLRYICATAERFFA

SEQ ID NO: 274913 - protein, 177 aa, Zea mays
  unsure (1)..(177): unsure at all Xaa locations
  Clone ID: MRT4577_18230C.1.pep
MDKIQSDCPYPGCFFCVMKEANPSKRRASVLKFFRELPSQDDDGQVLPVSGLWNTAMAHPNDPEFINLGIFECMAALIWKGLKNRRWLAHDQNIYVPYYAAHIIGSYTMNMEEFAECAVRAGVIPPLVELLRGRLTWVEQRVAVRALGHLATYPSTFPAVADXGEVLGLATQLAQAP

SEQ ID NO: 274914 - protein, 126 aa, Zea mays
  unsure (1)..(126): unsure at all Xaa locations
  Clone ID: MRT4577_182310C.1.pep
VRPRVRLEMHGESDPTMXWGHGILXMFGDPDWGFGILSTLVKLEESDHIRHGSHTCSICRYPIIGSRFKETKHSFSLCNRCYSEGKVPSAFKLEEYRFKEYGNESEALIDKCMCFNLHSKKLETDA

SEQ ID NO: 274915 - protein, 148 aa, Zea mays
  unsure (1)..(148): unsure at all Xaa locations
  Clone ID: MRT4577_182311C.1.pep
ESVSRPYKETIRAFLVYFHTCKCLCLFGFLHVQGFPLLFQVVYRCRYRPQPPPAHKEXHVSSPPLALPPPNPSTSPTTPSXARSPTTLRASLSQXRDNSKCGVIYRLFSGILVPLKKDPRAPFYHXQMPSFKHGPINSLDQNTMLYGP

SEQ ID NO: 274916 - protein, 64 aa, Zea mays
  Clone ID: MRT4577_182312C.1.pep
RSLPKSPSERGSGSPERFAVAEVGEPWRPKSSSERGSGSPGTVAMARFGEPRGAGRGARGEREG

SEQ ID NO: 274917 - protein, 62 aa, Zea mays
  Clone ID: MRT4577_182313C.1.pep
KMQHIIFFFYLYSTRGVICTPPPPGFGHYIHDPNLKLHQEPACSSSPVPKTTQGKQFDQNPN

SEQ ID NO: 274918 - protein, 199 aa, Zea mays
  Clone ID: MRT4577_182314C.1.pep
MANIPHSFAGASPPSPSPMAGSSSGPAPGQAAKDKKMASAEQLVLELCDPELRENALLELSKKREIFQDLAPLLWHSFGTIAALLQEIISIYPSLSPPTLSPGASNRVCNALALLQCVASHPETRILFLNAHIPLYLYPFLNTTSKTRPFEYLRLTSLGVIGALVKVDDTEVISFLLQTEIIHLCLRTMEMGSELSKTA

SEQ ID NO: 274919 - protein, 124 aa, Zea mays
  Clone ID: MRT4577_182315C.1.pep
PTRPPTRPAFMAYEENVAGVLARTMAAVSPYATMHDDVTSAAEEQHSALILLPFHKHRSVDGGLEVFHPEIQALNQSIQRFSPCTVGILVDRGLGGVPGAGCRVAALFFGGRDDREVAALAIRM

SEQ ID NO: 274920 - protein, 105 aa, Zea mays
  Clone ID: MRT4577_182316C.1.pep
VKFIIQVEVVESKLLKARIKMQQKYIDQFHMLYDDFNITKLPLLSEEVCGVQALQNFSHRFLTPYKSARKRGTIEELEERITILKSALQEAEAELDRIRKGKQSA

SEQ ID NO: 274921 - protein, 363 aa, Zea mays
  Clone ID: MRT4577_182317C.1.pep
MASAVVVDAGDAPEPTVRNLLDQESLKWVFVGGKGGVGKTTCSSILSVLLAGVRPSVLVISTDPAHNLSDAFQQRFTKFPTLVRGFTNLYAMEIDPKVENDDLSNEGMEGFLSELTNAIPGVDEAMSFAEMLKLVQTMDYSVVVFDTAPTGHTLRLLQFPATLEKGLEKMMELKNRFGGLLNQASRLFGLGDELNEDAMLGKLEGMKDVIEQVNRQFKDPDLTTFVCVCIPEFLSLYETERLVQELAKFEIDSHNIIINQVIFDEEAVESKLLKARMKMQQKYIDQFHMLYDDFNITKLPLLSEEVCGVQALQNFSQHFLTPYKSTLKRGTVEELEQRITILKSALQEAETELDRVRKGKQSV

SEQ ID NO: 274922 - protein, 363 aa, Zea mays
  Clone ID: MRT4577_182318C.1.pep
MASAAAVDAGDAPEPTVRNLLDQESLKWVFVGGKGGVGKTTCSSILSVLLAGVRQSVLVISTDPAHNLSDAFQQRFTKFPTLVRGFTNLYAMEIDPKVENDDLANEGMEGFLSELTNAIPGVDEAMSFAEMLKLVQTMDYSVVVFDTAPTGHTLRLLQFPATLEKGLEKMMELKNRFGGLLNQASRLFGLGDELNEDAMLGKLEGMKDVIEQVNRQFKDPDLTTFVCVCIPEFLSLYETERLVQELAKFEIDSHNIIINQVIFDEEAVESKLLKARIKMQQKYIDQFHMLYDDFNISKLPLLSEEVCGVQALQNFSQHFLTPYKSNLKRGTIEELEQRITLLKSALQEAEAELDRVRKGKQSA

SEQ ID NO: 274923 - protein, 50 aa, Zea mays
  Clone ID: MRT4577_182319C.1.pep
LEHPLVPLRPLGLPISTLSTLAYCIASNFSIYNTSSSKKLLAASDGPTRE

SEQ ID NO: 274924 - protein, 230 aa, Zea mays
  Clone ID: MRT4577_18231C.1.pep
MASRIASRLLRRSSPTLGLLRSYTHVRNYSSQLSGLIPVGPQSSKLTRRNNYFPNASPYQLWSRSFASDNGDKFEAVVPFMGESVTDGTLANFLKKPGDRVEADEAIAQIETDKVTIDVSSPEAGVIEKFIASEGDTVTPGTIVAIVSKSAAPAETHVAPSEEAPQKESPPVKAEEKSPKAEEKPTKVEPPKKQAPKPTPSKTSPTEPQLPPKERERRVPMARLRKRIAN

SEQ ID NO: 274925 - protein, 117 aa, Zea mays
  Clone ID: MRT4577_182320C.1.pep
LSGSQHNDPFYVTPNGKFGSVSIYRGGIQGGISNGGNPPFRVAFEPAPTIGTDPPTVDFEEKKVTLAPGGRHDPCVVPRAVAIVGPMAALVIAAGAMFPLARESPMVSYLKKEKDTL

SEQ ID NO: 274926 - protein, 38 aa, Zea mays
  Clone ID: MRT4577_182321C.1.pep
RPGPARRFYPAEEYHQQYLEKGGQSANKGCSDPIRCYG

SEQ ID NO: 274927 - protein, 93 aa, Zea mays
  Clone ID: MRT4577_182322C.1.pep
LSFRLTASITPFPSSPVTPPTALGIYICIAVAGGEYLLLSLQASPSQLQWPYQILSQNLPTIRCLLGTATGDGLRWSCTTRMSSEMRVRSLAD

SEQ ID NO: 274928 - protein, 31 aa, Zea mays
  Clone ID: MRT4577_182323C.1.pep
GHLNSIYWPSFYNLFTGKTSLFTQLNCSSPH

SEQ ID NO: 274929 - protein, 88 aa, Zea mays
  unsure (1)..(88): unsure at all Xaa locations
  Clone ID: MRT4577_182324C.1.pep
PGRSGGDYGESKRREAELASSRLLDPEFKPSKLSQDRFDKSKESHMKRVLITEKPKXKRKPIGTTERSIKVSSNXYFTDKDASDDSSA

SEQ ID NO: 274930 - protein, 119 aa, Zea mays
  Clone ID: MRT4577_182325C.1.pep
MVGLGRLGGRPAPHLQCLLCVASPAHVLAGRVRVRVREKRDSLYVRARGRKAARGTRRRRVVDFGRDRDRDRDGDGDCFVRSSFDPTKVNVTITIHSPPAPEIGLVLYYTGGATASHHH

SEQ ID NO: 274931 - protein, 238 aa, Zea mays
  Clone ID: MRT4577_182326C.1.pep
MAPLSSKAVALVALSSLLVTYASAGAGNFNDSAFTADPNWEDARATWYGAPTGAGPDDDGGACGFKNTNQYPFSSMTSCGNEPIFKDGKGCGSCYQIRCTNDQSCSGNPETVVITDMNYYPVAKYHFDLSGTAFGAMAKPGLSEKLRHSGIIDIQFKRVPCEFPGLKVTFHVEQGSNPVYFAVLVEYEDGDGDVVQVDLMEANSGTWTPMRESWGSIWRLDSGHRLQAPFSMRITNES

SEQ ID NO: 274932 - protein, 207 aa, Zea mays
  Clone ID: MRT4577_182327C.1.pep
VTSQIYVHSKLMIVDDRITLIGSANINDRSLLGSRDSEIAVVIEDKEVVNSKMDGRPWEAGKSSLSLRLSLWVEHLGLHPGEVSHIMDPIDDSTFKNIWMATAKTNTMIYQDVFGCVPNDLIHSRVQFRQSFAHLRDKIGHTTIDLGVAQEKLEAYQEGDLKSINPMDRLQLVRGHLVSFPLDFMCQEDLRPYFSESEYYTSPQVFH

SEQ ID NO: 274933 - protein, 152 aa, Zea mays
  Clone ID: MRT4577_182328C.1.pep
TPKKRSGGWLTSSRKRRYLIKIWPPKTIWKGFFPKYPQKPNPNPEPGGTPYFKTAPPGGGPLFFFPLRGGKCPPGGNKGKTGSRGKMVSPHNSPQKTNRKQKGESPGGPKGEPTHINWGGPTGPFPSGKPGRPTALKNPPTPRERGVGYWAL

SEQ ID NO: 274934 - protein, 56 aa, Zea mays
  Clone ID: MRT4577_182329C.1.pep
FWRALINFGVIKVSVFYFTKTTVRGLLKMFTKSFFGKGSAQKCLFGLDGPTKCGYV

SEQ ID NO: 274935 - protein, 608 aa, Zea mays
  Clone ID: MRT4577_18232C.1.pep
MDKIQSDCPYPGCFFCVMKEANPSKRRASVLKYFRELPSQDDDGQVLPISGLWNTAMAHPNDPEFINLGIFECMASLIWKGLKNRRWLAHDQNIYIPYYAAHIIGSYTMNMEEFAERAVRAGVIPPLVELLRGRLTWVEQRVAVRALGHLATYPSTFPAVADHGEVLELAIQLASSSLEIVYSHFYQFVDRRLGYHCDLLTRGMGGVEMESRKAEEWASQLQCWSLQLINCFAFKPEFLHDICKPDFLVKLPGMWGGLVNENSPAGVGLLRTICQSKVGRGHVANIPATIDALCNIARSSDDWQYMAVDCLIWLMQDASTCHKVKDIVAPTLIDLSDISALGDYKKLGDTIVTVLQECMQQSGNSRGAIGVQTKAEIDELLRSKQSLKLEKSMPKEDLHIKQAAALVVKLEGNSLFSSGNIAGAAEKYSEALALCPMKSKKERVVLYSNRAQCYLLLQQPLAAISDATRALCLHSPVNRHAKSLWRRAQAYDMLGLAKESLLDAILFINECSQSNDPDLSLKQNKVPDYAERLVKKQMRSAWLFREAALKHGGVHCEGDASDAFGQDADDSEWETASESDAENDDTGEADDGTEWKNDGHREDICEKS

SEQ ID NO: 274936 - protein, 77 aa, Zea mays
  Clone ID: MRT4577_182330C.1.pep
CFCSTSVSPLPKHHRLQMHIISTIVYAGSIISKDGLAGRVHQTQMMEYLLHVLFFFVGSLQARILPCPLSCQRTNAL

SEQ ID NO: 274937 - protein, 231 aa, Zea mays
  unsure (1)..(231): unsure at all Xaa locations
  Clone ID: MRT4577_182331C.1.pep
MACRLRSASMPSSPHSRETNVEEQILCLKAAISLPSVTVETVFDDLSKLGSIYNHIDALTCLPRSQRKAVEEEVEHSLVLLDLCSIVQESFVELKACVQEIQLALKRGDHTAAHTKIQCYVRSAKKAQKLFKKVNKXLSLTSKDAGXINLVAGAREIAALILESTLHLLSKQIVVTSSSKWSLVSKSFRKKCVICEAEQLQGLELDIVELESRVGTLFRKLIQAECLFLCS

SEQ ID NO: 274938 - protein, 221 aa, Zea mays
  Clone ID: MRT4577_182332C.1.pep
MALPNQNTVDYPSFKLVIVGDGGTGKTTFVKRHLTGEFEKKYEPTIGVEVHPLDFTTNCGKIRFYCWDTAGQEKFGGLRDGYYIHGQCAIIMFDVTSRLTYKNVPTWHRDLCRVCENIPIVLCGNKVDVKNRQVKAKQVTFHRKKNLQYYEISAKSNYNFEKPFLYLARKLAGDPNIHFVEAVALKPPEVTFDLAMQQQHEAELAAAAAQPLPDDDDDLIE

SEQ ID NO: 274939 - protein, 98 aa, Zea mays
  Clone ID: MRT4577_182333C.1.pep
GSEMSQAKQISLVTLALVPYKEMVLQEHQTTVELAFGERQCGCRIFQLYGEASLALSPLSQRAPSVIPSSCRGMATGIPVGSNLFWRFVSCMLDGRRI

SEQ ID NO: 274940 - protein, 93 aa, Zea mays
  unsure (1)..(93): unsure at all Xaa locations
  Clone ID: MRT4577_182334C.1.pep
GPWRRAALCECRRWRGFSTSAVLGRRTPPLGPMPNSDIDLSNLERLEKYRRFDRYRRRAEQEAXGPHWWRTYREYFGEKTDPKEKMILGCLHP

SEQ ID NO: 274941 - protein, 490 aa, Zea mays
  unsure (1)..(490): unsure at all Xaa locations
  Clone ID: MRT4577_182335C.1.pep
MGRTEAADGAESGGLGVGETVRELREAYEGGRTRSLAWRQAQLRGLLRLLEEKEVEAFQALHKDLGKHHAEAYRDEVGVLIKSANGALQQLGKWMAPEKVRVPLIAWPATAQVVPEPLGVVLVFSCWNVPLGLSLEPLIGAIAAGNAVALKPSELSPCTARFLGDNIGRYMDSSAVKVVQGGPDVGVQLMXSTAGXQVLFTGSPRIARAVMAAASRHLTPVALELGGKCPCIFDAMGSARDLQISVNRMIAGKWSSCAGQACIAIDYVLVEERFAPILIKVLKSTLKRFFPEADHMARIVNERHFERLSNLLKDRSVAPSVLHGGSMDSKNLYIEPTILLNPPLDSAIMTEEIFGPLLPIITVKNIEDSIAFVKAMPKPLAIYAFTRDAALRRRIVDETSSGSVTFNDAVVQYAIDGLPFGGVGQSGFGQYHGKYSFEMFSHKKAVMKRGYLVELTLRYPPWDESKVTLMRYLYRFNYFAFVLSFLGLRR

SEQ ID NO: 274942 - protein, 65 aa, Zea mays
  Clone ID: MRT4577_182336C.1.pep
RGLVPNSARGSFEMFSHKKAVMKRGYLVELTLRYPPWDESKVTLMRYLYRFNYFAFVLSFLGLRR

SEQ ID NO: 274943 - protein, 83 aa, Zea mays
  Clone ID: MRT4577_182337C.1.pep
GLLQCVVDGEHQVIVVVVAVDDELVFAVVLEGEEAEQGVESVPKIGVASVGPQDHHSEAGCSSHDNDDGQASLVYCASRAWTS

SEQ ID NO: 274944 - protein, 78 aa, Zea mays
  unsure (1)..(78): unsure at all Xaa locations
  Clone ID: MRT4577_182338C.1.pep
NIINCSTWPPPXPEPPPTAPPADPTPLPAPPPALPLAPPYPPPLPTALPERPTPLPPPXPPPPSPAPAPPPPPPPASR

SEQ ID NO: 274945 - protein, 197 aa, Zea mays
  unsure (1)..(197): unsure at all Xaa locations
  Clone ID: MRT4577_182339C.1.pep
MKSGVMVLGVGSPEEAPDRNDAEPRRDMGQSQMQVGGPVVLNRSAELGSGDFMAIDDAPVQAPSGQPAAAKHRSPAALTDTIMEVQKQLKRKRASNNPVIAAADKDALAAGCRQELEGLFQFYKEVSDRKVQLDGGNXLSVNGXVGCLLEESSLGLTKLVDGIYXKLKGWMXXVWWLQVRGSVLLVGQRMMYGKSSL

SEQ ID NO: 274946 - protein, 64 aa, Zea mays
  Clone ID: MRT4577_182341C.1.pep
RDRWSICLRGHLAHKLFKSLHASCIKGPYKLMNPESDTLHPAEAKTLYWALCEGLVRHQDMRQP

SEQ ID NO: 274947 - protein, 61 aa, Zea mays
  Clone ID: MRT4577_182342C.1.pep
NAGGNDPICIAAPRCCYDIYNHINPQILERTQRPCPFLPTTLGNHPPSRHKTLRPPNLSRN

SEQ ID NO: 274948 - protein, 514 aa, Zea mays
  unsure (1)..(514): unsure at all Xaa locations
  Clone ID: MRT4577_182343C.1.pep
LEAGRVEALCRFEERPKGHFFWTQRPDFRVPSEEELRRLLTPESVCCYESMQAGLYRLKRLGILKLTQPVGLASAMNQLPDEAIELAAASHIERELQITSWNLTSNFVACTNQDRENIERLEITGVGDPSGRGLGFSYVRVAPKAPASNSVLKKKSAAAKGTTVTGTDADLRRLSMDAARELLLKFGVPEEQIDKLTRWHRIAMVRKLSSEQAASGITIDEIPVSKFARGQRMSFLQLQQQTREKCQEIWDRQVQSLSALDGDDNASDTEAHSDLDSFAGDLENLLDAEEFDDEDTSTADLRIDKADGMRGLKMRRCSTQAQINKEIEDDETEASLAKKLLEDDGNDVKRKKQPVELTNCGTSLVANKMKQSKTGQTIKSSGYAGALTPKENTPREGKEVENSFVEGGLSSKLKPKMALDVNETVLVKKXKVFQERMDLRKXKQGARGDSLVCGACSQVGHMRTNKLCPKYREDPEMSEMDANAGKPNSMDINHLQARTPKRLIQRFPLKLLKL

SEQ ID NO: 274949 - protein, 145 aa, Zea mays
  unsure (1)..(145): unsure at all Xaa locations
  Clone ID: MRT4577_182344C.1.pep
KFARGQRXSFLQLQQQTREKCQEIWDRQVQSLSALDGDDNASDTEAHSDLDSFAGDLENLLDAEEFDDEDTSTADLRIDKADGMRGLKMRRCSTQAQINKEIEDDETEASLAKKLLEGSYFLLCSLQKRSLRHLIYGLLRCRRWQ

SEQ ID NO: 274950 - protein, 65 aa, Zea mays
  Clone ID: MRT4577_182345C.1.pep
PIKHTHIYTHTHTPTHTITHARPIPRHTHTHIEMTTSMCERTGEERTENKETKTTVTALKLERAQ

SEQ ID NO: 274951 - protein, 106 aa, Zea mays
  Clone ID: MRT4577_182346C.1.pep
MKRNNIIKDEIKNAFELKDGNASMEAHNKKNAIEEEDGHIIHSGEFQYIKIVSQLSSMGATLVMTIIQTAAHFQLDRTKTYQLGLVYLITSAIFICLKDLFVLKSL

SEQ ID NO: 274952 - protein, 80 aa, Zea mays
  Clone ID: MRT4577_182347C.1.pep
LCTSLITVIHTSFCTSINKVCNHCLCFYPLNYTDIHSFHKCVLAAEGPLPCSQLYITQYFRNPIQSMFWQASTTLPNCSC

SEQ ID NO: 274953 - protein, 57 aa, Zea mays
  Clone ID: MRT4577_182348C.1.pep
RRRRRRRRGRRIHRHVGGSIRYCSKGLLRDHSIRVYWSLVKRSRRVLSPSSMRLPPS

SEQ ID NO: 274954 - protein, 471 aa, Zea mays
  unsure (1)..(471): unsure at all Xaa locations
  Clone ID: MRT4577_182349C.1.pep
MAPADGESSPPPHVAVVAFPFSSHAAVLLSIARXXXXXXXXXXXXLSFLSTASSLAQLRKASSASAGHGLPGNLRFVEXXXXXXXXXXXVPVPRQMQLFXXXXXXXXXKAWXXXXXXXXXXXXXTCVVGDAFVXXXXXXXXXTGPNRGVRWTAASCALLAHIRTDALREDVGDQAANRVDEPLISHPGLASYRVRDLPDGVVSGDFNYVINLLVHRMGQCLPRSAAAVALNTFPGLDPPDVTAALAEILPNCVPFGPYHLLLGEDDADTAAPADPHGCLAWLGRQPARGVAYVSFGTVACPRPDELRELAAGLEASGAPFLWSLREDSWTLLPPGFXXXXXXXXXGLVVPWAPQVAVLRHPSVGAFVTHAGWASVLEGVSSGVPMACRPFFGDQRMNARSVAHVXXFGAAFEGAMTSAGVAAAVEELXXXXXXXXXRARAKELQALVAEAFGPGGECRKNFDRFVEIVCRA

SEQ ID NO: 274955 - protein, 90 aa, Zea mays
  unsure (1)..(90): unsure at all Xaa locations
  Clone ID: MRT4577_18234C.1.pep
LWFRSARRTGRRRHDAFIGSSFLLLLLHALQCLTLVLGDMTSTTPAADDRGVVDVNTTAFTMHDSAAWASPDGAENLEMYYCXLWTERHP

SEQ ID NO: 274956 - protein, 111 aa, Zea mays
  unsure (1)..(111): unsure at all Xaa locations
  Clone ID: MRT4577_182350C.1.pep
SSSRSLTLXQISPYTFSTIGIAACIDVSVLRAAWGIFITGSSLIGAAIKAPRSTSKNLITVLFCEADAIYGETVASILQTXLVSVPTSQMHYPKSFSPGYATXASGLIAGF

SEQ ID NO: 274957 - protein, 613 aa, Zea mays
  unsure (1)..(613): unsure at all Xaa locations
  Clone ID: MRT4577_182351C.1.pep
PRPPCRASPPPTTRPXPAPPPRRLSSPLPRRAPSSPSPSASSRAKPRKPSPSPAAFPTDADDSLDNPDLGPFLLKQARDAMVSSEGGGAARALEFAERAAMALERRGEGAELELAMSLHVAAAIHCGLGRHADAIPVLERAVAVVTPPPEAPADGEAEAGAAGGDDHQQLQPAEPDQRGEEWSLAAFSGWMQLGDTHAMLGRMDESIACYGKGLEIQMAALGDRDPRVAETCRYLAEAHVQALQFDEAEKLCREALEIHRGHSAPASLEEASDRRLMALILDAKGDYDGALEHLVLASMTMVANGRDIEVATIDVAIGNTYLALARFDEAVFSYQKALTVLKSARGDDHPTVASVYVRLADLYHRTGRLRESKSYCENALRVYAKPAPGAAPDEIGGGLMEIAAIYEALDDLDEALKLLQRALKLLEDAPGQWSTVAGIEAQMGVLYYMVGRYAESRSSFESAVAKLRASGERKSAFFGVLLNQMGLACVQLFKIDEAAQLFEEARAVLEQECGASHPDTLGVYSNLAAIYDAMGRVDDAIEILEHVLKVREEKLGTANPDVEDEKKRLAELLKEAGRSRNRKQKSLENLFGTNSQRAKKEAGRRWSNFGFRS

SEQ ID NO: 274958 - protein, 112 aa, Zea mays
  Clone ID: MRT4577_182352C.1.pep
PQIASGPHFRGIPGGPRQDFGPRFRSWGWGHLTSSLFFLEASFPFDCSSNQCCLALPPFFHPRFEIIFVSCPFFLHKVFPPPKGLLLFCYLYASSFVVPALFGLNLFVYKQS

SEQ ID NO: 274959 - protein, 253 aa, Zea mays
  unsure (1)..(253): unsure at all Xaa locations
  Clone ID: MRT4577_182353C.1.pep
WDPRGRPGPTPRASLLTLLLLLAVQLPPAAAASKHRHASESAPAPPASYFLVSWASNLTLLGSASIQPGATAVALTTPSHDGVGAGRALFSEPVRLFVPSSSAAASFSTRFTFRITPAPTFGDGLAFLLTSSRTFLGASNGFLGPFPSSXLRRGRGRPRRRHXVAIEFDTHRDVALRDPDGNHVALDAGSIFSVASASPGVDLRAGVPITAWVEYRARRRRLSVWLSYSPFRRPENPPSPLMPTFPDSCAHIC

SEQ ID NO: 274960 - protein, 60 aa, Zea mays
  unsure (1)..(60): unsure at all Xaa locations
  Clone ID: MRT4577_182354C.1.pep
QLFNSLPQVGCGVPFIFIGANIGHPFTGIVXIPSISTLFAYFNSFFNNYVTRIPAQPHLC

SEQ ID NO: 274961 - protein, 54 aa, Zea mays
  unsure (1)..(54): unsure at all Xaa locations
  Clone ID: MRT4577_182355C.1.pep
ARCGPGSRTGSSTSVSNNQGTYSFPPGGTAPSFLALVXXSYHAPEIYKIRTDVN

SEQ ID NO: 274962 - protein, 118 aa, Zea mays
  unsure (1)..(118): unsure at all Xaa locations
  Clone ID: MRT4577_182356C.1.pep
RHTHPFEEFKXFADLRRRLEPLSMAIFAYGKLNGLLTKEDLKRAAQHVCGVDLTDRVVDIIFHVFDTNQDGNLSPEEFLRALQRRETDIREPTIPGPLGFLSCWFSGRKCSSLKHVVI

SEQ ID NO: 274963 - protein, 76 aa, Zea mays
  Clone ID: MRT4577_182357C.1.pep
NTTCSKSIWQRPTTTPSNPLAPPSHYTYRIEPPPCLYACVPSCRIVNSKAPTNHDGRLFKAATCLNRRYMVKKKNQ

SEQ ID NO: 274964 - protein, 85 aa, Zea mays
  unsure (1)..(85): unsure at all Xaa locations
  Clone ID: MRT4577_182358C.1.pep
DPEAFPEPKVKEFXNAPPPMFPMFGFFVQAFVPGKGPLKNLPDPIADPVNKNAWAFPPNFVPGKLARALCLHACPVNPPGCPRFF

SEQ ID NO: 274965 - protein, 182 aa, Zea mays
  unsure (1)..(182): unsure at all Xaa locations
  Clone ID: MRT4577_182359C.1.pep
APTRPLCATEKIPVIPIPGPSAXIGALSASGLPSNEFTFXHARSRRDRLEISAREAATQIFYVPPHGIQQFLVDAASSFGDSRHCVVAREITKIHEEFWRGTLGEANEAFATRQPKGEITVLIEGKLISDDEIPSXDFLEHELRELTAKGYTLSAAVKLVTETTSAKKKDVYALALTWLGNK

SEQ ID NO: 274966 - protein, 53 aa, Zea mays
  Clone ID: MRT4577_18235C.1.pep
LSWSLSGCFSGHLSCPEYFPGSSIKMKRLFVFRPASACSMQSDSMLVLLKTVH

SEQ ID NO: 274967 - protein, 362 aa, Zea mays
  unsure (1)..(362): unsure at all Xaa locations
  Clone ID: MRT4577_182360C.1.pep
MSSLLLLQALAPAMTVPRHHFLISPLRLASAVTVPFARRLSNAASSNKPEPLLSEPDLESGLYLVSTPIGNLEDITLRALRVLKCANVILSEDTRHSGKLLQHYNIKTPLLSFHKFNEREREPTILRRLHEGEAVALISDAGTPGISDPGMELARLCATEKIPVIPIPGPSAAIAALSASGLPSNEFTFXIMLILYSFYFSVVRNYWGQFIFSILVGFLPKHARSRRDRLEISAREAATQIFYVPPHGIQQFLVDAASSFGDSRHCVVAREITKIHEEFWRGTLGEANEAFATRQPKGEITVLIEGKLISDDEIPSEDFLEHELRELTAKGYTLSAAVKLVTEATSAKKKDVYALALRLFGK

SEQ ID NO: 274968 - protein, 122 aa, Zea mays
  unsure (1)..(122): unsure at all Xaa locations
  Clone ID: MRT4577_182361C.1.pep
LPDTTSALKLSEIILLGWVYFSLGLAIXTNTDSGSSRXPYHYGQERLRHXTHYRQARFNLLEQLTHXLLEDPGRNYRVHNLKAQPRAFLYTNHYNTDEVITTNECEGDIALINGGKMDSFYF

SEQ ID NO: 274969 - protein, 110 aa, Zea mays
  Clone ID: MRT4577_182362C.1.pep
KKKKKKKKKKKKKKKKKKKKFFPLTQNPSWAKFLVPFLPPCGGCPLSFWGAPVPLFGVPVFHLHWPGFSNSLGLGIPLALPHIYSFLHPSPFSLGGVMLKRPGPSPFPLF

SEQ ID NO: 274970 - protein, 106 aa, Zea mays
  Clone ID: MRT4577_182363C.1.pep
SSHFTRAEREKLCEMDRHQLACVVVDGDDKQITFYTQTAVVTANRDPPSAATAIASTVQRTVVLVAVARPPHQDQALAMSLPPSTPSPTPDPPREARARPQAAAVD

SEQ ID NO: 274971 - protein, 158 aa, Zea mays
  unsure (1)..(158): unsure at all Xaa locations
  Clone ID: MRT4577_182364C.1.pep
MVKHAFDSFRXSPSAVSLQAYVXQFIATLMSXFAGGGCAFAYSLPTNGPALHPPALPAILISHAFALFLDVFMGLNIXAELLNPPGTLXLRARGDIPITTCLLILVSQLLXPXVACFPLPCVAHSQAIPTHARSAISDIXFFLMNIVVTLSLTYTGYA

SEQ ID NO: 274972 - protein, 79 aa, Zea mays
  Clone ID: MRT4577_182365C.1.pep
QPVKTPNGFYIKHTKERLRHKKASVTRTPHCMVTGDAYRPPPKGKRVIPKPSMNMGLAGAVQAGGETVNGQDKLGPPGP

SEQ ID NO: 274973 - protein, 124 aa, Zea mays
  Clone ID: MRT4577_182366C.1.pep
MEERTQGVGPGRPWLLELLPLRAPSREGGKWGAGCSPAGSKRQGGGRHGGERLLQGSSAMAADGDGSRRPWEGKTPARHGQKQGGRKGVVPATRVPSAMAASCSLPWREGREVPCVGVLLLPWD

SEQ ID NO: 274974 - protein, 93 aa, Zea mays
  Clone ID: MRT4577_182367C.1.pep
RRGVNSFANLWVSSQGSFSSTGLTIFFKLPRFSDMYTLTIASADPQSISANKPVHFTKSVTKWFTKEGVLVEGLFWKDVEKLIDDYTSERKSK

SEQ ID NO: 274975 - protein, 109 aa, Zea mays
  Clone ID: MRT4577_182368C.1.pep
VTDVARVHRQGSIHLCTVLTQSTGGGNREVDSVWRSTSACRCRQEVMIVLHRTANLGAQTSTGLTSVSALCQYQRHPKDERLEIHMRSPREMFSLSLVPMPLLGGLIQP

SEQ ID NO: 274976 - protein, 134 aa, Zea mays
  Clone ID: MRT4577_182369C.1.pep
MASDGAAATPVKVTPKKANLLDPHSIKHLLDETISEVVKSKGYTEDTRLGNWKLGIGAAVIAVALLAQFYPKKFPQNRDFLLGCIALYVVLNVVLLILSYTKEKDAILFTHPPMVYKGRSSCGGPVLEGCREAD

SEQ ID NO: 274977 - protein, 342 aa, Zea mays
  Clone ID: MRT4577_18236C.1.pep
AAACSVLNRRPEPFCDSPQWPDDYADDSCQPCPPNGRCVDGELECVQGFKRHGKACIEDGLLIQRANKILLQLRICDQHARALCGHSAEILFQEHEVSNAIDELLSKIPAGLTEDGLQLVKTRVLESAGGFFDTTFTSSKVKVYKCPELVAELHMPMGCRVRQWIFRNTTSVAIFCILFAALLWILWIIYKRRTLSNRAEQIYEQVCEILEDNAVNAEIDNSNSEVWVVTSWLRDHLLVPQERKNAFLWKKVEELIREDSRIDQYPKVIKGESKVVYEWQASGSLSAKIKKVQGARAKSRTGVGVIKFGEEMSASSLGEVREQGSCDLTREERSKDKVTCSD

SEQ ID NO: 274978 - protein, 69 aa, Zea mays
  unsure (1)..(69): unsure at all Xaa locations
  Clone ID: MRT4577_182370C.1.pep
NINQLELGERKISLSVWCTPLCAHTEISLGWTTKGLVLQFLLQKISTLDPLVPVFRVLIWPXSLSMLLD

SEQ ID NO: 274979 - protein, 192 aa, Zea mays
  Clone ID: MRT4577_182371C.1.pep
MASDGAAATPAKVTPKKANLLDPHSIKHLLDETISEVVKSKGYTEDTRLGNWKLGIGAAVIAVALLAQFYPKKFPQNRDFLLGCIALYVVLNVVLLILSYTKEKDAILFTHPPMGSFSSTGLTISSKLPRFSDMYTLTIASADPQSISANKPVHFTKSVTKWFTKEGVLVEGLFWKDVEKLIDDYNSERKSK

SEQ ID NO: 274980 - protein, 69 aa, Zea mays
  Clone ID: MRT4577_182372C.1.pep
YWKKKARYLIPVRVVAATHTIQRSNACPTLHAIARASAYTCMHGARIISRAEFGTSLSLSLSLSLSLSL

SEQ ID NO: 274981 - protein, 235 aa, Zea mays
  Clone ID: MRT4577_182373C.1.pep
MLSRLPATVSLLRRSLREPRGFSSSVLASSKETADGKLVASVLFERLPVVIPKIHPVVYAFQEFSFRWRQQYRRQYPEEVLGKADARGKGDYHIDYVPAPRITEADKTNDRKSLQRALDNKLYLLLYGNAYGAPDGKPVWHFPEKVYENEETMRLCAEAALKSVLGGLDHTYFVGNAPMAHMAVEQTDSSVSSFKRFFFKSQVVGTTKYHVGKCKDFAWVTKDELLEYFPDKIAL

SEQ ID NO: 274982 - protein, 118 aa, Zea mays
  Clone ID: MRT4577_182374C.1.pep
YGNAYGAPDGKPVWHFPEKVYENEETMRLCAEAALKSVLGGLDHTYFVGNAPMAHMAVEQTDSSVSSFKRFFFKSQVVGTTKYHVGKCKDFAWVTKDELLEYFPENKDFFNKMIIHIR

SEQ ID NO: 274983 - protein, 126 aa, Zea mays
  Clone ID: MRT4577_182375C.1.pep
PGPPPLVFFPLVWSRAPFSLGPPSDHPVWPKTTWCFRFTKECVLVPSHPGAYFFSPLGGPFPAGPGGLFGWPPPGFWGSLTRFFVPWGARWKFFFQPPPGSLQRAGAPTGASFGSWAPGASFSLVE

SEQ ID NO: 274984 - protein, 96 aa, Zea mays
  unsure (1)..(96): unsure at all Xaa locations
  Clone ID: MRT4577_182376C.1.pep
TRTRRQRQSPSTARKHRSSASPSAPALARHALSTPCPLRPPIXRDPARAGRRPPRASPPPPHHLPALRLPLHLARALHAPPLPPPPPHPATSPAPR

SEQ ID NO: 274985 - protein, 90 aa, Zea mays
  Clone ID: MRT4577_182377C.1.pep
VPGPGLFQMINFLFWLRFSPGAHLRLGVQFWLVERASKSNGAAAKGNCPLVVLKPAWVFGGLFFPLSRFGAPRYIPLFFSVKFFSFCFGN

SEQ ID NO: 274986 - protein, 84 aa, Zea mays
  Clone ID: MRT4577_182378C.1.pep
LRQSYMIFWFVYLKNSSSELPKCVVSLSSCNGTVDITAWCQWLSYISDNVLCLSSFFSFLLCRINFGLLVYFITLKTLVLIRVW

SEQ ID NO: 274987 - protein, 58 aa, Zea mays
  Clone ID: MRT4577_182379C.1.pep
IGKAETPDATRYRDSAIPHATTHANLSHVLTRRAHSRGLRVPWPPLLSRARSLSRRDP

SEQ ID NO: 274988 - protein, 133 aa, Zea mays
  Clone ID: MRT4577_18237C.1.pep
MCKDLLLNYFTASKTTNCEFHSEQTFQLSRADRETVQRQEYDLQVWCILINDKVQFRMQWPQYAELQVNGIPVRVMTRPGSQLLGINGRDDGPLVTTCSREGINKISLSRVDARTFCFGVRIVRRTVPQVLFI

SEQ ID NO: 274989 - protein, 221 aa, Zea mays
  unsure (1)..(221): unsure at all Xaa locations
  Clone ID: MRT4577_182380C.1.pep
MGRAPCCDRTKGLKKGPWTPEEDKLLVDYIQTNGHGSWRLLPKLAGLNRCGKSCRLRWTNYLRPDIKRGPFTSEEQKSIVQLHAIVGNKWSMIAAQLPGRTDNEIKNYWNTHLKKQLRRMGLDEPPPGPAAGCPSARHMAQWETARLEAEARLSLLATAASSSSCGAIAATSASSSSSTVDLKTACARPADIFXAPVELGHRGLXSAARRPRRPWSRGRTR

SEQ ID NO: 274990 - protein, 42 aa, Zea mays
  Clone ID: MRT4577_182381C.1.pep
ITKANDERYCKYMTYLIEKDLSFFYNPQEGMIHFSAHWVPLT

SEQ ID NO: 274991 - protein, 80 aa, Zea mays
  Clone ID: MRT4577_182382C.1.pep
FRVCSVSSIASVGLVSGEFSSGPACSIAVPVRTSTSTGRCRVEQGVDPQIRLKATLESTPAHSDASRSLVMPRAEFRAYV

SEQ ID NO: 274992 - protein, 50 aa, Zea mays
  Clone ID: MRT4577_182383C.1.pep
CIVVYVNHEIFRFRPCLGIDLVLENLQELVEQFIEALFRRAPLQKFQIYF

SEQ ID NO: 274993 - protein, 43 aa, Zea mays
  Clone ID: MRT4577_182384C.1.pep
THQQDAQALIFPYNATFKFLPCISLHLLSLKHPLKLLSGYCTQ

SEQ ID NO: 274994 - protein, 122 aa, Zea mays
  Clone ID: MRT4577_182385C.1.pep
MAAKLAQLRTQVTRAAEFASKHGCSYYKEVMEKNKQYVVQPPTVEKCQELSKQLFYTRLASLPGRYESFWKELDCVKQVWKNRKDLTVEDLGIASLFGVELYAWFCVGEIVGRGFTLTGYKV

SEQ ID NO: 274995 - protein, 76 aa, Zea mays
  Clone ID: MRT4577_182386C.1.pep
GSPPIIRAISSDCSGRTTEWPSAPLPATEDAGFGPGEAADAAKTFPVWESWFSHRVMTGDRVDPSSTAENKPRQAD

SEQ ID NO: 274996 - protein, 106 aa, Zea mays
  Clone ID: MRT4577_182387C.1.pep
CLRGLLCCRLLLRLSPRLFLVLLVLFPLSCGRLRWVVSPRFVRLSSGVFLSPPPPLLVLPSVGRFGPLLGLGLAVFFVLRLVGGWLRRPWGVVPLAFFCSFAPPPP

SEQ ID NO: 274997 - protein, 122 aa, Zea mays; identical to SEQ ID NO: 273194
  Clone ID: MRT4577_182388C.1.pep

SEQ ID NO: 274998 - protein, 40 aa, Zea mays
  Clone ID: MRT4577_182389C.1.pep
EKRRLVLRIEMAGCADCGCARRAGRKARAAPTLFLTHRLR

SEQ ID NO: 274999 - protein, 102 aa, Zea mays
  unsure (1)..(102): unsure at all Xaa locations
  Clone ID: MRT4577_18238C.1.pep
SGSNTTKKSKLSWSKSLVRKWFNIRSKAHDFHADDVAAIGRTVAGGGDXSXRGSSFTRREPSTVKKSKTERSSRRSNGHSRRLKIVLDAFEATLTLDFRIFV

SEQ ID NO: 275000 - protein, 83 aa, Zea mays
  Clone ID: MRT4577_182390C.1.pep
RETTFACRHLTRLVGVELALMTKGAFLTEVVEEDVCTGRLTSSRSERRAWDTIDQARGHYSNLTFRQRVYIRALAMESIPVVL

SEQ ID NO: 275001 - protein, 85 aa, Zea mays
  Clone ID: MRT4577_182391C.1.pep
HSLEHTMHTTQFIPQKAHWFFLDMQMAPSEFSPISSISPVIVTKFIIKLLLKCTGTSQIYHILSLFRSFSTLHLVSASSFSILSV

SEQ ID NO: 275002 - protein, 100 aa, Zea mays
  Clone ID: MRT4577_182392C.1.pep
LLACRVLRDPRERDALRRQASGLSPGFRLGTFSGLLVVFATLGGGGGYEGAPAPSLDLGRWEGVRERSGGGRSPGEIPGWCRWEGLPLGGVLVGIFFPAR

SEQ ID NO: 275003 - protein, 90 aa, Zea mays
  Clone ID: MRT4577_182393C.1.pep
KKTQKGASSGVFWRPKKPTNFGKFGAYKNQLKALRLLRGVSPLKKKLCCRKTPGNQPSWVFKGRCLGKNVSPTPMGARASLTNPLNDHLK

SEQ ID NO: 275004 - protein, 181 aa, Zea mays
  unsure (1)..(181): unsure at all Xaa locations
  Clone ID: MRT4577_182394C.1.pep
MEGKAKNPAESVAVVAVPSPAQGHLNQLLHLSLELASRGLDVHYAASAPHVRQARARVHGWDEDALRSIQFHDLGISTYVSPPPDPTADPPFPSHLMPLFEAFTAGARAPLAAVLRELSASRRRVVVVYXDLMNAFASEEAAKLPNEEAFGFYSTAVSSFVRRMDAGYRLLCDNGLTHLPT

SEQ ID NO: 275005 - protein, 83 aa, Zea mays
  Clone ID: MRT4577_182395C.1.pep
FPVDNMHFSCCHINRIIPPNKQPDKVVNKVANVMDPIISSSKVEYCDLKFVFFNSSLISFYRSSIKLSLICKKFEPLESPPKR

SEQ ID NO: 275006 - protein, 112 aa, Zea mays
  Clone ID: MRT4577_182396C.1.pep
ESGAFYAPFVPTTVIAVLRVSPRSPPIANVVPSVRSRALRVSRACTTGPESKDAPPQRSEPTRLAESRKSSSDACWRRGACVHRAPAGSERRNCWVAMRSAAAGRSWSTGNP

SEQ ID NO: 275007 - protein, 257 aa, Zea mays
  Clone ID: MRT4577_182397C.1.pep
GRRSFLWNGNDECSGASCLVAWDTVCTPKEDGGLGIKDLKLHNICLLIKLIHRLHSATDSSWAVWVKEHMNMATMEGDLGGPHWDSLRTLLPIYQAVSTSTVGDGCSTNFWHDAWHGEDDLATRLPALFSHCVKQQASVADVMANGLHLVTRLSSQAQLELHQAQNIISGTQLSQQPDERKCMLTSTHGKFQTSALYELLKRPVRSENALAAFVWNNKTPPRVKFFAWLMTQGRIQSKKNLLRKRIVDEDVCERCNQ

SEQ ID NO: 275008 - protein, 244 aa, Zea mays
  unsure (1)..(244): unsure at all Xaa locations
  Clone ID: MRT4577_182398C.1.pep
MAASSSFKPNPLSLSVPDPALDRWLRDSGYLDLLDSTTTTGRPSSSASGPSAPSSAAYSPGAGQASSGVAADVLAFARTLASLLALNPFARLSTADLAAPTPSWSLAFVGPPGAASYSWPPTPTQARLRVQENFRRYARNYAALAILVFACCLYRMPMALLGMLASLAVWEGVRYCRDHWDLTTRAXGVAQALLHCAQIATAVLLYVCNLQFALVYAVXVSYALMLLHASLRELTTPSSLPDAS

SEQ ID NO: 275009 - protein, 112 aa, Zea mays
  Clone ID: MRT4577_182399C.1.pep
FAVVLFRKLLSWFWQILLLWFWLAWYLSKKYMCWSPCLVALVDGPCRTQTAPCRICCRAGGSLCRTLADHQSFLLQPPVVQHRRKQGAARCPWCRKRNGHAEPAGAVHLGGN

SEQ ID NO: 275010 - protein, 83 aa, Zea mays
  Clone ID: MRT4577_18239C.1.pep
TCTSSRRVLFQKKKTKTKKKKTNKKKKKKKKKKTKKKQKKTKLKKKKKNKGAAPFKKPNLTTPSIQRKSFLIGAPKLNPRPPV

SEQ ID NO: 275011 - protein, 63 aa, Zea mays
  unsure (1)..(63): unsure at all Xaa locations
  Clone ID: MRT4577_1823C.1.pep
VFLVCFXXRCVVLCXLLCLXFAVRPASACVLXXVLFXXXLCXCVPAVPPCVPPACSLPXXLGX

SEQ ID NO: 275012 - protein, 68 aa, Zea mays
  Clone ID: MRT4577_182400C.1.pep
GFLQSQAHRAAFFFQHLVLEVDKRGCWAVHVGPPCLVGLGGLFSGWAVDHRHFLFLGELIKKLISEYK

SEQ ID NO: 275013 - protein, 84 aa, Zea mays
  Clone ID: MRT4577_182401C.1.pep
IYYYFFLGRKKRGTNCTAIAAEISRFKNRPKNGPARCWGRTVITSRYWTHKNMGPTNSRRTRTGKKGNAPGFFQKQTPPPEKPH

SEQ ID NO: 275014 - protein, 131 aa, Zea mays
  unsure (1)..(131): unsure at all Xaa locations
  Clone ID: MRT4577_182402C.1.pep
WVPRGRPGRDSHSQFPYELELTAHRSSKASTGKPPSWPPPRYCAPPSSSWPSPCPPSPAPPSPPRPPRRARPPAPRPSPRRSWPPXPLPGRRAPPRQPAPLMTPXPSPRPTRAAVCCRVMLLSSVCVCVCS

SEQ ID NO: 275015 - protein, 108 aa, Zea mays
  unsure (1)..(108): unsure at all Xaa locations
  Clone ID: MRT4577_182403C.1.pep
RRLKNQYRAISXRPWGKWAAGIRDPCKGVHFWLATYRTVHFGRRRPEAHGRGTREMKANLSARHDAAAQSAQNPPFESTTSDITIAYRLAPPPSPPNFRADEVVGNMD

SEQ ID NO: 275016 - protein, 136 aa, Zea mays
  unsure (1)..(136): unsure at all Xaa locations
  Clone ID: MRT4577_182404C.1.pep
SRVRSAGPAALTAVCFCFCWGYSPPESPAGAAAAAARSYPTWGSGGGTGGRKGHTLGRAPNNNDYTKLYEILGVPKDEFQDDLKKAYRKDDIKNHPDKGGDPEKVKELAQAYEAXRGPKKREIYDQAREEALNGGM

SEQ ID NO: 275017 - protein, 68 aa, Zea mays
  Clone ID: MRT4577_182405C.1.pep
MSKQGDGPKTEWPELVGRTIKEAKEKIKADRPDLKVRIVPVGSIVTADLDLNRVRIWVDTVAEVPKIG

SEQ ID NO: 275018 - protein, 96 aa, Zea mays
  Clone ID: MRT4577_182406C.1.pep
SPRGTLPMRLSRGLRLSAPLYEEVPKRRPTFAVFHQKWASCSAKLKILCLLHDKPASPTDPGGRGSSGPPSPRLARTTSRLPARAGGKPPGPQAPG

SEQ ID NO: 275019 - protein, 47 aa, Zea mays
  Clone ID: MRT4577_182407C.1.pep
DGRHDTISLVDAPTPFLGEPMDLITVLHLLMNKSCAHDGLVKGLREA

SEQ ID NO: 275020 - protein, 150 aa, Zea mays
  unsure (1)..(150): unsure at all Xaa locations
  Clone ID: MRT4577_182408C.1.pep
MAQRLMTFRDVAVDFSPEEWECLSLDQRSLYRDVMLESYSHLVSVGLFVYRPHLFSLLEKGQDPWMILRDETRGPYPDIDFSSQNKKFLGKPSTYEELSQREMKEYFRKRSLERFXCFGDXXXDGXNQFQTHXNQEYSKXLAVAYEKVLT

SEQ ID NO: 275021 - protein, 66 aa, Zea mays
  unsure (1)..(66): unsure at all Xaa locations
  Clone ID: MRT4577_182409C.1.pep
VCTITDMKYVVHHCTVSAEPGRGAYQEYYIHHVDGHAIRCEDEQHLLIRXLAAAIYRRTAVRLDLE

SEQ ID NO: 275022 - protein, 280 aa, Zea mays
  Clone ID: MRT4577_18240C.1.pep
MGDKVNPWCHCHWHNPAWKSDTESCAGDLHPPDAGHLTADSVALAPILEFPPPYPSRKRPLVLYQKEKRAPVLPAPLPSKGPPPLDPVPELQGSNETDVTDAGAGEETEEGMHENRDEINALLDTDRQSGGAALSVESVASAGAGAGAAPPPAAKKRRLSSCTDKSVVDTASSAARPPERSMEQEQRVELANDRDAQSCCVGEVESGRRFALGEAEAEAAEGDSPDEQRRRRERIQETVAALRNMVPGGIAKDAAAVLDEAICYLQYLKLKVKTLGAVSL

SEQ ID NO: 275023 - protein, 103 aa, Zea mays
  Clone ID: MRT4577_182410C.1.pep
DACHLPKLDSTPALPLLKRRKPPCQNSNYKQEQTKEHAMAHWWPVRAARSAHMPVTARREPANQQGRRRSNQTAFLHARRAGNTDSHRDPLSEAVSDCWFLNL

SEQ ID NO: 275024 - protein, 124 aa, Zea mays
  Clone ID: MRT4577_182411C.1.pep
PLEAGPPLAPDQWALLVFLGPRGFFEMGSKPGPHVFCPGPLPFLAISPFGALVFFGGPLFFLGGRRFPREKGFFFLFPLFKGNLGPWAPKKKKKKKKKKKKKKKKKKKKKKKKKKKSTLRCYHC

SEQ ID NO: 275025 - protein, 117 aa, Zea mays
  Clone ID: MRT4577_182412C.1.pep
MGETAELAKALWREMRAWFLTFVDEALDVGFHLFEDQQNVAGKGRQHGGGHITMVLSQFKKISDWLDQVGKIAAAEEEEQRTKEKIELLKRKIYGFVISHMGSALESPASVSVSSRS

SEQ ID NO: 275026 - protein, 136 aa, Zea mays
  unsure (1)..(136): unsure at all Xaa locations
  Clone ID: MRT4577_182413C.1.pep
MADHHRGATGGGGGYGDLQRGGGMHGEGQQQQKQDAMMTALKAATAATFGGSXLVLXGLILDGTAMALTEDTPEVMIFXPVLFFMTDLGTGNNNKINWALKDKQEFIDIVETVYRGARKGRGLVIAPKDYSTKYRY

SEQ ID NO: 275027 - protein, 190 aa, Zea mays
  Clone ID: MRT4577_182414C.1.pep
HVFNPLPPALVKKGEEGDADANRRTTLLVRLLRMRGATDATRRTNTQAVPDRRGMALLAGHSDSEPITHHDSEPDQRHARPWPVAVLSEEAAAARRGQQEGDEHQGGDGDEGQRHEDALVDGEQAHLPHGRTPNLGNGGAEGPSAASGQAPERWLDGRPWPWYKWWRISGSLGQLVLQSTSPLVPLERCD

SEQ ID NO: 275028 - protein, 41 aa, Zea mays
  Clone ID: MRT4577_182415C.1.pep
SSHASGNGRTRNGQNREWPTTIAALISSRDYGILNTSLTLS

SEQ ID NO: 275029 - protein, 157 aa, Zea mays
  Clone ID: MRT4577_182416C.1.pep
TVICMMVYRATDATRRTNTQAVPDRRGMALLAGHSDSEPITHHDSEPDQRHARPWPVAVLSEEAAAARRGQQEGDEHQGGDGDEGQRHEDALVDGEQAHLPHGRTRSLGNGGAEGPSAASGQAHPRVRPRVRPRVRGLVGISVSLGHCSRKHFFFFL

SEQ ID NO: 275030 - protein, 59 aa, Zea mays
  unsure (1)..(59): unsure at all Xaa locations
  Clone ID: MRT4577_182417C.1.pep
MMMTWEVKLAASLAGSSLELDCHTSHIAVKFAELITKIDRRSGKELEKEPKSXENGDAV

SEQ ID NO: 275031 - protein, 56 aa, Zea mays
  unsure (1)..(56): unsure at all Xaa locations
  Clone ID: MRT4577_182418C.1.pep
MGKTRGMGAGRKLKTHRRNQRWADKVYKKSHLGNEWXKPFAGSVHAKGIVHEKIGI

SEQ ID NO: 275032 - protein, 64 aa, Zea mays
  Clone ID: MRT4577_182419C.1.pep
KGIQEGSMVATGNKVRDCWPVLGGARTDLGTVGVQRNCGRKDRGKRRCVESREIGIGGKSGSEE

SEQ ID NO: 275033 - protein, 83 aa, Zea mays
  Clone ID: MRT4577_18241C.1.pep
CRLSHFRFFFFTASSGCYGRWVSIFVEVRDLTILLCVIALLLFALLFIVSGRCPLSWPYAPIVSVCGFAYLKIPLPPVSVLWV

SEQ ID NO: 275034 - protein, 68 aa, Zea mays
  unsure (1)..(68): unsure at all Xaa locations
  Clone ID: MRT4577_182420C.1.pep
DFGGQRYPALGFETPNGKVTCYDSGRTADDICYFIKMSKETAGXPHHHHHPGATGMPEGRRXAEPVKD

SEQ ID NO: 275035 - protein, 86 aa, Zea mays
  Clone ID: MRT4577_182421C.1.pep
VYNFRKEKIRPQRKPGNFRNVGNSSSKANRVLKSGIIHIKMPISEIYIFRTHQNSRKFRRFLPEIGNPALESLAFKTRIFTNRFHK

SEQ ID NO: 275036 - protein, 70 aa, Zea mays
  Clone ID: MRT4577_182422C.1.pep
RTGDQQKRKRDAAQSADPPRGEAKTGRDMKNGPSTRQERAPRGTKRRSETREAWRPRAFGQHKERGNAGE

SEQ ID NO: 275037 - protein, 119 aa, Zea mays
  unsure (1)..(119): unsure at all Xaa locations
  Clone ID: MRT4577_182423C.1.pep
ENRVPTGXSATKEADEGNRRKKKGKKSVEASKFYIFKLLKQVHPGIGTSSKPMSIMNSFLSDILEKLVSESHKLARYSKKPAITSREIQTSVRLVLPGELAKHXAVSEGAKSVTKFTSA

SEQ ID NO: 275038 - protein, 116 aa, Zea mays
  unsure (1)..(116): unsure at all Xaa locations
  Clone ID: MRT4577_182424C.1.pep
DIQEASSLGEQWEFIASGHDDGRWIIWEKITXRLIRILSGDGAVVEWIQSHPFDXIRCNNEIDKTIXLWTSDANATSMDSGPXTMMYSVAYXNNQQKICRNRHSVLHAESLERFQM

SEQ ID NO: 275039 - protein, 77 aa, Zea mays
  Clone ID: MRT4577_182425C.1.pep
MAAVLNSRKTPQAVVAVLVAAALLASSASAAITCGQVGSSLAPRIQYATERAPALPESRLSVRKILNSAARHQIAPS

SEQ ID NO: 275040 - protein, 116 aa, Zea mays
  Clone ID: MRT4577_182426C.1.pep
MDFVNKLAGGQSQGQGQSVNEQVVKDQNAGQQSSGSGGFLGGIGNKLNEAAGGGKASEKNEDYLDKGVDFVQEKFLGQGPQDNESALEQAKDEQISDFIRGQYKGATGKDMPFKDK

SEQ ID NO: 275041 - protein, 235 aa, Zea mays
  unsure (1)..(235): unsure at all Xaa locations
  Clone ID: MRT4577_182427C.1.pep
MAPDHGSKVDISFAGRFTASAIAACFAEITTIPLDTAKVRLQLQKKAVAGDLAGPKYRGLLGTAATIAKEEGAAALWKGIVPGLHRQCIYGGLRIGLYEPVKSFYVGENHVGDVPLSKKIAAGFTTGALAIAVANPTDLVKVRLQSEGKLAPGVPRRYTGAMDAYAKIVXXQEGVAALWTGXXGPNVARNAIINAAELASYDQVKQSILKLPGFKXDDVVTHIXLSGLGAGFFAG

SEQ ID NO: 275042 - protein, 56 aa, Zea mays
  Clone ID: MRT4577_182428C.1.pep
SLYSHSKSPLFYSQRRAGSFLVPARSSLQQVPPCLPRTSSALRSATFTPRVCLTIS

SEQ ID NO: 275043 - protein, 78 aa, Zea mays
  Clone ID: MRT4577_182429C.1.pep
MSWSAPDDILLYTSLAGFLDTNVVLQGACERVIVGEQYCDVPLGLYVIRGENVVLIGELDREKDELPAHMTCVSEAEI

SEQ ID NO: 275044 - protein, 65 aa, Zea mays
  Clone ID: MRT4577_18242C.1.pep
RDASSGEWKTGMLYALTDTNVSEPDMMNYGTKIKFDIFIHPGSTLLLLIFIMTKASDSPILSNCL

SEQ ID NO: 275045 - protein, 128 aa, Zea mays
  Clone ID: MRT4577_182431C.1.pep
MSWSAPDDILLSTSLAGFLDKKLIVLLRDGRKLLGTLCSFDQFANVVLQGACERVIVGGQYCDVPLGLYVIRGENVVLIGELDHEKDELPAHMTCVLEAEIRKAEKAEREARDLKGTMRKRMEFLDFD

SEQ ID NO: 275046 - protein, 253 aa, Zea mays
  unsure (1)..(253): unsure at all Xaa locations
  Clone ID: MRT4577_182432C.1.pep
MAPSAAAGPPSLARPSTSSSSHLRRAGSALQPVSVPRALVQGRRRLTGAVRAAPDAPPVVRAAVSAVTELLRALSPNKALRGAATQQQQQGEEPDPDPTCGSVEDVLAVLRDDYRRAYFLTGDFTPGIYTEDCVFEDPTIKFRGLSRYSQNLGLLVPFFDSPSLELENIEKGSRAETKFVKATWKLRXSSSSKRHTTYLRLPWRPLVAIGGSTTYDLDGDFKVTRHSESWDVSALQAIAQIFVSAPEEKLEGS

SEQ ID NO: 275047 - protein, 128 aa, Zea mays
  Clone ID: MRT4577_182433C.1.pep
MSWSAPDDILLSTSLAGFLDKKLIVLLRDGRKLLGTLCSFDQFANVVLQGACERVIVGEQYCDVPLGLYVIRGENVVLIGELDREKDELPAHMTCVSEAEIRKAEKAEREARDLKGTMRKRMEFLDFD

SEQ ID NO: 275048 - protein, 104 aa, Zea mays
  Clone ID: MRT4577_182434C.1.pep
GLPVTPPGKKLSAPAETAKANHSQPPNNSVEERRIQIARFNALKQRQLLKHRRDRELAVATAAAWGTSVAGSHRAAAAAAGGYGAPAPAPAPRVLSSYAWPPLQ

SEQ ID NO: 275049 - protein, 145 aa, Zea mays
  unsure (1)..(145): unsure at all Xaa locations
  Clone ID: MRT4577_182435C.1.pep
KKKKKKKKKKKKKKKKKKKKKKKKKKKKKKKKKKGWAFGRNPPRGEFCKFPSHWGPFDLPFRGPISPFRGSNYNSLAXLLXQPRIWKTPGVPQFKPLGPHPLFPRWVISQGAPPDPPSKQCPRPGWQRAPPCGGPLSAGGGGVTP

SEQ ID NO: 275050 - protein, 53 aa, Zea mays
  Clone ID: MRT4577_182436C.1.pep
YQSIRRYKPLHPTYNQTYDYTFIHIKFCFATQHLTFLNTDTPFKQNKLIKIIL

SEQ ID NO: 275051 - protein, 75 aa, Zea mays
  Clone ID: MRT4577_182437C.1.pep
GLRVILKLVNKVMGTNLALHGDANVEDMVKAQICQTDALRRMEAMSYRLSNTCNRLWMPLKCSRYSLGSGIMALN

SEQ ID NO: 275052 - protein, 44 aa, Zea mays
  Clone ID: MRT4577_182438C.1.pep
TTTWATQLGNSYKREGKRNDYDFHGYLDITENELSLTIQAKPHN

SEQ ID NO: 275053 - protein, 66 aa, Zea mays
  Clone ID: MRT4577_182439C.1.pep
MQNPNAATCEHKEEMDSRLVFGGNVYYTCTPDEVQQYFNFFGTVNKLTILTDNFGQPKVAAYAEFA

SEQ ID NO: 275054 - protein, 187 aa, Zea mays
  Clone ID: MRT4577_18243C.1.pep
WVPRGRPGLISNQNIDMVSYNPTQEQETNEVPAQETQEENVERNEEDPQDDQAGAPFQSPVNSAWVSYAADQAKKGLHVADEQSAKGLETAKNATAQGLTVARSFTAGLLDWGLSYLATRSQNADDDSTRVTVNGYVNKGFDVVERVALGGIDVGAMVTKAGLNVAEFSVEKMDEVLGQPRPQTEAQ

SEQ ID NO: 275055 - protein, 195 aa, Zea mays
  unsure (1)..(195): unsure at all Xaa locations
  Clone ID: MRT4577_182440C.1.pep
KVLVKGEXPTFSYICSRYYRXAPELIFGATEXYTTXAIDVWSAGCVLAELLLGQXLXFPGESGVXXQLVXEIIKVLGTPTREEIKCMNPNYTEFKFPQIKAHPWHKIFHKRMPPEAVDLVSRLLQYSPNLRSAALDTLVHPFFDELRDPNARLPNGRFLPPLFNFKPHELKGVPLEMVAKLVPKQARKQCPWLGL

SEQ ID NO: 275056 - protein, 119 aa, Zea mays
  unsure (1)..(119): unsure at all Xaa locations
  Clone ID: MRT4577_182441C.1.pep
KKDDKQLNADIRRKYIYGGHVAHYMRILSXEKPEKSHSHFSEYIKXQFSXDTLEALSSPVQACQSXDRSVVKSPYQPPKQPFRSNPFTLTFEQSKASLFERFSQLTPSGGTYTFYQNTE

SEQ ID NO: 275057 - protein, 69 aa, Zea mays
  Clone ID: MRT4577_182442C.1.pep
NHPVRYVLHNNPAFPIKLHILPQQLCSVIPTWEKSQEMMLNLFAHTALHTYLLTEALLSPLNTSCPVIK

SEQ ID NO: 275058 - protein, 112 aa, Zea mays
  unsure (1)..(112): unsure at all Xaa locations
  Clone ID: MRT4577_182443C.1.pep
VASPRQSHPACXVHGRCQPGPYGRGCTGPARARTRRASVSSGPGSLPGLHARVRAERPFLAGLARCCFLHPLSLVMQRSETNKMCFEDLWMQFLPRYNQPNTRIGLCNQGQQ

SEQ ID NO: 275059 - protein, 109 aa, Zea mays
  Clone ID: MRT4577_182444C.1.pep
MAKLQPIHVYATTASPQRIYFCVNPVSSQGLQFHLKDSTVASPRQSHRLVYSRATIVQPNKFVTDILLAGTEEAESFLVIVPQKDSSISKTPQLHPQDSHIGLCNQGQQ

SEQ ID NO: 275060 - protein, 55 aa, Zea mays
  unsure (1)..(55): unsure at all Xaa locations
  Clone ID: MRT4577_182445C.1.pep
EEYLAVVDXHVXAVHARXPKSAVQFEYFQIKWSSETLQRYRILFFMFTDDLQVTS

SEQ ID NO: 275061 - protein, 58 aa, Zea mays
  Clone ID: MRT4577_182446C.1.pep
EHILVNGRLFITVLACHPGNGCVPVGKRTLFSYRLLMNFVLLTVQFHFKPFGIQPLFF

SEQ ID NO: 275062 - protein, 71 aa, Zea mays
  unsure (1)..(71): unsure at all Xaa locations
  Clone ID: MRT4577_182447C.1.pep
LNXPLXKXXPQINXTTXNPILSXXXQFLXPXTPPPKXLXFIKITLSFXPXXIFXLYTLYXNXNTXHNQSHS

SEQ ID NO: 275063 - protein, 58 aa, Zea mays
  Clone ID: MRT4577_182448C.1.pep
AHMSAAALLSFACFHKIIGGVYNPFKFNLLGVALQPYFSEILDLTLFKHPCVPLLFIF

SEQ ID NO: 275064 - protein, 50 aa, Zea mays
  Clone ID: MRT4577_182449C.1.pep
AACATRSRRGASGANEAVSGAGRRLAERRRRRTCCWCETQRERPPSNRFP

SEQ ID NO: 275065 - protein, 55 aa, Zea mays
  Clone ID: MRT4577_18244C.1.pep
DLEFELRVQSGSAPQPRRSCGACFWQLVTEPLEPYTRGPLTMAFIIPAIQSEMLT

SEQ ID NO: 275066 - protein, 88 aa, Zea mays
  Clone ID: MRT4577_182450C.1.pep
NELDNATACRDSINPVPAESSSTSVALPRSALATSNRSVSSAALTSSSFATVCMSRMHTSIYRHLIEVAHQEGPVPCQHPRGGQHNRL

SEQ ID NO: 275067 - protein, 46 aa, Zea mays
  Clone ID: MRT4577_182451C.1.pep
NESVYHLQQQLQQFMPALSQLAMVNPAVYLQLLPSSPLAVGNAATY

SEQ ID NO: 275068 - protein, 169 aa, Zea mays
  Clone ID: MRT4577_182452C.1.pep
RFCQKVLHVPSEHNIKIKRQLTDAQEKELMSADGNQVYSLNRIITKTINPLIGDKSKVHGSSRVLLYHILYHILFGKPFDIVDMLEEMENNHMHTSKRMPYAPYIMLLINSATKEKFVPGSGENKCVEHEKYKMESNSNKKRKNRRTSKSESPVPLKKSKSMCVPLMKP

SEQ ID NO: 275069 - protein, 90 aa, Zea mays
  unsure (1)..(90): unsure at all Xaa locations
  Clone ID: MRT4577_182453C.1.pep
MDAAVSLSLPLHHHAHXPLPLPHPXPHHLHCAVPLRDHATSASXVTAPPPKPDVQAPPVGRLSPALAASAPPRSSSSPVAVRSSRAATGY

SEQ ID NO: 275070 - protein, 168 aa, Zea mays
  unsure (1)..(168): unsure at all Xaa locations
  Clone ID: MRT4577_182454C.1.pep
MLTYHDLLSGQYVLSSTFTYKXRERPPVSRLDDRAPPNDLGDAYFAVNPSTKAADHKIDDDTAVKACDIDNTFRLQYLPPFDKKXLVSYIREYVTNLTAXMDTQKADAVTKXSRRLLAMFSLSKLDYLLFFGHDLMIDDAPELFHYYENGVTNPTFHYVSHGHTCIKS

SEQ ID NO: 275071 - protein, 109 aa, Zea mays
  unsure (1)..(109): unsure at all Xaa locations
  Clone ID: MRT4577_182455C.1.pep
TVSAMHGDMREEERDGRRGEFRTGATRELITTDDWARGQDVQQESLDIKNELPNNTELDIHRIGRSGRFGRKGVANNXLRKDDIRVLRDIEQDDRTQXDEKPKKDAELI

SEQ ID NO: 275072 - protein, 36 aa, Zea mays
  Clone ID: MRT4577_182456C.1.pep
HPLTATSPPHFERPQLLKPSSGYFRSHVLSRSRLIS

SEQ ID NO: 275073 - protein, 57 aa, Zea mays
  Clone ID: MRT4577_182457C.1.pep
AYWPDQIAYRWGFELLPTCFKGFPHPNLVKKNDLGLCSTRHLCFVLGVGSCFTLLFF

SEQ ID NO: 275074 - protein, 61 aa, Zea mays
  Clone ID: MRT4577_182458C.1.pep
RTHPCERPFNHGKRPLRALGGRNRTEGGGGTSHTRGPERPLNHHPHALRALSTGRHRNHTA

SEQ ID NO: 275075 - protein, 60 aa, Zea mays
  Clone ID: MRT4577_182459C.1.pep
SSLSSRASDTKVRSLLKRWLATAELIPRVFVANLNPRVTLLYIQDHYRTFAALITPSVPR

SEQ ID NO: 275076 - protein, 48 aa, Zea mays
  Clone ID: MRT4577_18245C.1.pep
NNIHHFMVIPFAAKKSWAHNSRRFLAGCTYLRGVATLIKPINLTQSSP

SEQ ID NO: 275077 - protein, 58 aa, Zea mays
  Clone ID: MRT4577_182460C.1.pep
PAGRPSGGISITSSMLELLLVGCSGVVVLLHGASLFLRALFAPRHSVARPISFLGFVA

SEQ ID NO: 275078 - protein, 114 aa, Zea mays
  unsure (1)..(114): unsure at all Xaa locations
  Clone ID: MRT4577_182461C.1.pep
RQQGRVAAELQAVDQHAKRGAVADGEHADGSEPKPATQACCSPCWVTRILTTSYGIKEGGWSSLLLLPLLGDSSCYTGLLMKRCIDSSPNIGTYPDIXVVLYLELYASCVEYIT

SEQ ID NO: 275079 - protein, 90 aa, Zea mays
  Clone ID: MRT4577_182462C.1.pep
GWGFFVGGFCFFFFLFFIFFFFAAPKNTIFSLGINKKKTLQEKKHPSIHNPCWLMHGSAEPRDKHIHKNCHKATFQLKKQLGHHKPYEPK

SEQ ID NO: 275080 - protein, 99 aa, Zea mays
  unsure (1)..(99): unsure at all Xaa locations
  Clone ID: MRT4577_182463C.1.pep
KANPLLNTFLTEKIIPCRLDKNXNENFPVKLTANATYTLSDFRKPLQLLMKGKIINHPHLMLSTDQLLWSPDGMEQFRSRQRETGTYILYDRHSLNIKI

SEQ ID NO: 275081 - protein, 85 aa, Zea mays
  unsure (1)..(85): unsure at all Xaa locations
  Clone ID: MRT4577_182464C.1.pep
GGRPRGXVAEGTAPVANRIADSRSFPLYRFVREELGCVFLTGERLKSPGEECNKVFVGISQGKLVDPMLECLKEWDGKPLPINIK

SEQ ID NO: 275082 - protein, 96 aa, Zea mays
  unsure (1)..(96): unsure at all Xaa locations
  Clone ID: MRT4577_182465C.1.pep
MQVKVETCAVEAEERAAAVVEAARRHGASLLVLGQRPRXTPWRAGCRXWRCRRRAGGGVVEHCIEHAPCVALAVRRRSSGGYLVSSKHRRDFWLLA

SEQ ID NO: 275083 - protein, 43 aa, Zea mays
  Clone ID: MRT4577_182466C.1.pep
AAPPDHPDIPPVHPPVFSPTAVRVTEHLLMRRSRSSVTRTRSP

SEQ ID NO: 275084 - protein, 98 aa, Zea mays
  Clone ID: MRT4577_182467C.1.pep
CKMLVLRCILEPSTPCFPVVAMCLEFSRVHDLIPCILKAVERWFIPPSRASRELGDIPSDTGRHKARFVHINFKKKKKGRPPTSELVDPGINSGPVPE

SEQ ID NO: 275085 - protein, 60 aa, Zea mays
  unsure (1)..(60): unsure at all Xaa locations
  Clone ID: MRT4577_182468C.1.pep
QQRHCQEHQLTTKCSYNYYRXAXNLTHYQAFLKHRHSPFLMPILQSRQIQPTSCQVLQQQ

SEQ ID NO: 275086 - protein, 92 aa, Zea mays
  Clone ID: MRT4577_182469C.1.pep
SLSEGSLDARAILTDRSRGLALIQRSYRRKDDFARLLQLRSAANAKSASYISTQVYVHVADDPRCWRHKTTHEPIDIRCRQQADAILVICMI

SEQ ID NO: 275087 - protein, 97 aa, Zea mays
  Clone ID: MRT4577_18246C.1.pep
GEGEDTPHKQKLKWRQKKKTNPNTLEATVELKGKGGQKKPILGKNKTKGKRQMFPNQRGKDGRFKTKLRFPNTKKRFLRRKKLVGFAHLKKKKNAPL

SEQ ID NO: 275088 - protein, 40 aa, Zea mays
  Clone ID: MRT4577_182470C.1.pep
FAKAYKRKNIHTSRAGKYKCLYNVCAICVISFSDLANPCY

SEQ ID NO: 275089 - protein, 63 aa, Zea mays
  Clone ID: MRT4577_182471C.1.pep
SFQNIEKNNALQNGTKHFHQWLVSDNRSRKKMFLEHKPVRDARGGSCLHRSLHALISLFILFT

SEQ ID NO: 275090 - protein, 84 aa, Zea mays
  Clone ID: MRT4577_182472C.1.pep
RGAAFLDPPFLPPPSYDLILLFFPHLKFYYPPSFNNLTSKKILSFPKLIFLQILLFSPIAITKKPPPPFSLTNFSPSLINNAPP

SEQ ID NO: 275091 - protein, 63 aa, Zea mays
  Clone ID: MRT4577_182473C.1.pep
YHKIGNPSHKSPRDGSIKPSHAMKPCMIFTMFYKSISLPEKNQTLVKWNKSCKSREYTIWHLF

SEQ ID NO: 275092 - protein, 74 aa, Zea mays
  Clone ID: MRT4577_182474C.1.pep
GKARRLQLQCFCCLSKNMHVVSPGVLKASCSCSFLFEEGDNVLPRAQQVAGVEPLPNLGAGEVVLAGEIKVGGP

SEQ ID NO: 275093 - protein, 67 aa, Zea mays
  Clone ID: MRT4577_182475C.1.pep
NDSIRWPSHFAREAFVQPSALCKFTVLYPISVIVGLPAGHMISVFAYMIGLPTVVSLSFCHEWPHAF

SEQ ID NO: 275094 - protein, 118 aa, Zea mays
  Clone ID: MRT4577_182476C.1.pep
VELNFIVLFINFTSRYVHMGGDREKEKIKRCRYPLKQAGAHGRGQPKNNVETKRRQPHQARGRGPQARSGAEDDRAPKGPNEQTGVRGPFPGGAQKAPRSPFTAGQKPGLKKKGMGKP

SEQ ID NO: 275095 - protein, 66 aa, Zea mays
  Clone ID: MRT4577_182477C.1.pep
VSDVAIFAQTEPVSRWWGLANVLRPAQAVVHRVAYVSYLPHAGTNASSGVGVRVRARRKARQEQCS

SEQ ID NO: 275096 - protein, 41 aa, Zea mays
  Clone ID: MRT4577_182478C.1.pep
TLQGKREGPGYVREADVAGLIRGAHAVNGLGNALVVTCTCW

SEQ ID NO: 275097 - protein, 74 aa, Zea mays
  Clone ID: MRT4577_182479C.1.pep
IHHGCGVNRGYIGVVWVLPPPKWMGHVFKIKKKRIVGALNSSPRGFLFFVSFLWEGVERNQPPHNLSNKKKKEG

SEQ ID NO: 275098 - protein, 82 aa, Zea mays
  unsure (1)..(82): unsure at all Xaa locations
  Clone ID: MRT4577_18247C.1.pep
GTIAPSFPRSLVIIIEKNIERSEKTTKHMNIXLYELRIDAHPYXLQPPLTYCDCSKGKPLTXEQQQPPLTYCDCSHWCLQGY

SEQ ID NO: 275099 - protein, 198 aa, Zea mays
  unsure (1)..(198): unsure at all Xaa locations
  Clone ID: MRT4577_182480C.1.pep
GFCPSTPAPASVTPFPPSPTGIPGGKPGRHPPPPPPFHPSPPLPYSSPHPFHPRPYSSPRPXDTLSSPPPPWLHPPLAIPPCLLRLPPPAPSSAPAXPSRSPLPPSXIMVLPPXDSLPSIEVVVESMERXPPSPVSXAPKSPRXSRISPVHAQPTPPKLPPTPQAPRDLVSSVLPPSPLTAPPSXVSPPPHPSIPPTP

SEQ ID NO: 275100 - protein, 107 aa, Zea mays
  Clone ID: MRT4577_182481C.1.pep
TGPVSRGKEFWFGFPLFFFRGRGDPKFPGPPRGKNQNFFFSLKGLVGAPKKKKNSGGGLNKFKGAEKKKRGLVGGQKKKKKKKKKKKKKKKKKKKKKKKKKKKNSKG

SEQ ID NO: 275101 - protein, 107 aa, Zea mays
  Clone ID: MRT4577_182482C.1.pep
FLFFFFFLFFFWCFFIFFQGDRKNQWEPKHGRYRARGTRHHREKTTPGPGQRPRRDGHRAPQAPQAKAREGGHKYNWTRGPGGLPRTRGHDARHFRDRAQGPEPPGG

SEQ ID NO: 275102 - protein, 246 aa, Zea mays
  unsure (1)..(246): unsure at all Xaa locations
  Clone ID: MRT4577_182483C.1.pep
PGRFVKTVLRTPQLFAARMAQSVLVGAFLGSIFLGTTDLQSRLGFFAFNLTYLLTSTTEALPVFLHERRILERETSRGAYRVSSYVASTXAVFLPFLLAAAVLYAAPVYWLVGLAREPAAFAYFALVVWLVMLTANSFVACLSALAPNYIVGNSIVAGLIGCFFLFSGYFVASKNIPRYWVFMHYASLFKYPFEALVVNEYGGARGARECLASAGGAGGLCVLDGAGLLRQQGMREGMRXSNLGVM

SEQ ID NO: 275103 - protein, 93 aa, Zea mays
  unsure (1)..(93): unsure at all Xaa locations
  Clone ID: MRT4577_182484C.1.pep
EQGVDQHVHPQVTGRMSAQLEALIAQCVALRLCLPSVFFLSCLVDLCTAVKNLADLSGVWTPVNYFIYRVCNSTLFLFTWFSMFXXCAKVHYI

SEQ ID NO: 275104 - protein, 97 aa, Zea mays
  Clone ID: MRT4577_182485C.1.pep
QHYRSGQQRGYWHQQRNQISQRRPCFNSRASIGTMALCKKVCVVTSAMFMKLVARLGTGSASNRFTSAMSSIAVSRQIDLHITNLTRTQDPPHCLIA

SEQ ID NO: 275105 - protein, 62 aa, Zea mays
  Clone ID: MRT4577_182486C.1.pep
GVEISLELLLGVLTKHRLEQGCVMFLFIHNQGYYELVQRFISTQIYQTVPLHPQPTRPRTRG

SEQ ID NO: 275106 - protein, 131 aa, Zea mays
  unsure (1)..(131): unsure at all Xaa locations
  Clone ID: MRT4577_182487C.1.pep
MSSGNNRWDPXYFKDCIVTIDGTHVIATVPRDMEHAFLGTKLYATXNVMVGVDSDLHYTYVYAGCXGTTHDAXIMXDALQRVYGLXFHKVXFYLGDAXYGSKLVLLSAFHGGRYHLNQWGNYSVLNHKEGD

SEQ ID NO: 275107 - protein, 159 aa, Zea mays
  Clone ID: MRT4577_182488C.1.pep
KTHCCPSNIAPFSSPIASRPASTRFGRANLRVAGFPPIAPARAPVASFTRFQHSCLARSSVGGGRQETLERRWTRQRGIGGSAASGAHLWRPVRSTEAMNVWCCSCKMAQPRSLWLRRWTSPWRWPCGAATSSVYGFWIPRCVNELLVLLIIHSTGYIN

SEQ ID NO: 275108 - protein, 120 aa, Zea mays
  Clone ID: MRT4577_182489C.1.pep
QVYVLVLVDASHTIQLRTTTSRCTSLAMTAIHGSHACPPLKMGQVRHQPRRGPAYQEQPQPRQQPPKDPEHARLDRLRKDEVHDAVVRVRDVDGRDAEARGLAAERRPDALGGLHDAQLL

SEQ ID NO: 275109 - protein, 88 aa, Zea mays
  Clone ID: MRT4577_18248C.1.pep
VGHRPRGPKVMSGRRAESPTMAWCHAQLMRSVTYDGSVLGQPRNPLEWLSSIRPTPPSNSNLLDPRLGASGLSGGQVLPRRTFPSSFC

SEQ ID NO: 275110 - protein, 70 aa, Zea mays
  unsure (1)..(70): unsure at all Xaa locations
  Clone ID: MRT4577_182490C.1.pep
MLRKGCAEQEEGWLGWGIAGGQENTFYMHRALGENNLNDALNYWRHMLFELDTXSEYSXHNYCELFMKAF

SEQ ID NO: 275111 - protein, 184 aa, Zea mays
  unsure (1)..(184): unsure at all Xaa locations
  Clone ID: MRT4577_182491C.1.pep
MPGVIWGTIIMRKKLLQXRYFFSVVVTMGCALFILYPXFDGFTSTFQDKLLERGVTXEIHNQIFYTTVCSCLLSLSGLILQNHLIPAVDFMFRHPDCFSDVVILSSVATASQFFISYTIRTFGALTFATIMTTRQLVSILLSCIWFVHPLSWMQWVGAAIVFVALYTKSFLRSKPQKLAVSSPP

SEQ ID NO: 275112 - protein, 349 aa, Zea mays
  Clone ID: MRT4577_182492C.1.pep
MADAAADRERDKGKDDRRRWAARCGFAVLGIMSTLLVYGVLQEKIMRVPYGVEKEFFRYSLFLVFCNRITTSMVSAMVLLASKKSLDPVAPLHKYGVVSISNILTTTCQYEALKYVSFPVQTLAKCAKMIPVMIWGTIIMRKKYVAKDYFFSVVVTMGCALFILYPALMDVSPFNKGRESTIWGVSLMLGYLGFDGFTSTFQDKLFKGYDMEIHNQIFYTTVCSCLLSLSGLILQNHLIPAVDFMFRHPDCFSDVLILSSVATASQFFISYTIRTFGALTFATIMTTRQLVSILLSCIWFVHPLSWMQWVGAAIVFVALYTKSFLRSKPQKLAGSSPPRGSSPNPVSNS

SEQ ID NO: 275113 - protein, 374 aa, Zea mays
  unsure (1)..(374): unsure at all Xaa locations
  Clone ID: MRT4577_182493C.1.pep
MADAAADRERDKGKDDRRRWAARCGFAVLGIMSTLLVYGVLQEKIMRVPYGADKEFFRYSLFLVFCNRITTSMVSAMVLLASKKSLDPVAPLHKYGVVSISNILTTTCQYEVGLVSALLVLLPLCCFVLLCKVPFXALKYVSFPVQTLAKCAKMIPVMIWGTIIMRKKYGGKDYFFAVIVTLGCALFILYPAMMDVSPFNRGRESTIWGVSLMFGYLGFDGFTSTFQDKLFKGYDMEIHNQIFYTTVCSCLLSLSGLILQNHLIPAVDFMFHHPDCFSDVLILSSVATASQFFISYTIRTFGALTFATIMTTRQLVSILLSCIWFAHPLSWMQWVGAAIVFGAIYAKSFLRTKPQKTAVASPSHGSSPNPANSS

SEQ ID NO: 275114 - protein, 109 aa, Zea mays
  unsure (1)..(109): unsure at all Xaa locations
  Clone ID: MRT4577_182494C.1.pep
MAPKKMHLGGSTFLGVGSHTNATKGQVASVNAGQTTDADSTRKNTNAKDGYKGPQVAIKRKNSNGNNXTKAMSENQTNRAFSVPITANLHRADXHTQVHSYANNSPNPG

SEQ ID NO: 275115 - protein, 140 aa, Zea mays
  unsure (1)..(140): unsure at all Xaa locations
  Clone ID: MRT4577_182495C.1.pep
EVRGKEGGGNRALSRRIDLSLQNCVLLVKTGVLXSRCRLVPAANPQHLXELFARLQIGHTKARSQVVDALCREEXKXVLATLGQASVSAILQLPTASTLAVRESAATAVCQVARSAXSTMCCLCXEGVVPLLVRMARDGD

SEQ ID NO: 275116 - protein, 87 aa, Zea mays
  Clone ID: MRT4577_182496C.1.pep
KAQLRFSVATVTLLRVPSPRLLGLPGAIPGVSEGTASVSFDFLVWLKLSLYRRAAIAAAGPPRCEHTSSPGPTLYPGGRLWRLHACP

SEQ ID NO: 275117 - protein, 57 aa, Zea mays
  Clone ID: MRT4577_182497C.1.pep
KTNQFSLSSMGPLSMLALPQGLLPSPSLGIKSPWLKTGYGCPPLVAKNEPKRVLKMN

SEQ ID NO: 275118 - protein, 57 aa, Zea mays
  Clone ID: MRT4577_182498C.1.pep
IWGICAGLLHVHTFSVLLYLHFNLDVISHFTEFFSQLFLSRVCGGTHVDREIVVRKT

SEQ ID NO: 275119 - protein, 237 aa, Zea mays
  unsure (1)..(237): unsure at all Xaa locations
  Clone ID: MRT4577_182499C.1.pep
MALRRLLQGIVLPRTTGRHVGASFSTEAGETIRATLFPGDGIGPEIAESVKQVFNVAGVPIEWEEHYVGTEVDPRTESFLTWESLESVRRNKVGLKGPMATPIGKGHRSLNLTLRKELGLYANVRPCNSLPGYKTRYDDVNLVTIRENTEGEYSGLEHQVVRGVVESLKIITRQASLRVAEYAFHYAKANGRERVSAIHKANIMRKTDGLFLKCCRGVAEKYPEXTYEEALLXQCCM

SEQ ID NO: 275120 - protein, 68 aa, Zea mays
  Clone ID: MRT4577_18249C.1.pep
VIACYIVYVQRIEFSDVALKGRHGHQPTDQAIHVDTDLDIGYEDERLQNAQREYGFITYGIEMEFASV

SEQ ID NO: 275121 - protein, 58 aa, Zea mays
  Clone ID: MRT4577_1824C.1.pep
QLKGNKIVVPSTGVEPTIKPGNSSKTRKLELVLKLRKRGHLFLETLPLADIQHQLSSL

SEQ ID NO: 275122 - protein, 74 aa, Zea mays
  Clone ID: MRT4577_182500C.1.pep
NKKKRGKEGKGRGQQLKRGSKPNQTGLKGPTPKTRGNTEALPGRILYGGPPNFRDKSKNTVKRVQPKKPGSKKN

SEQ ID NO: 275123 - protein, 90 aa, Zea mays
  Clone ID: MRT4577_182501C.1.pep
MSAASQAVKKAPTFFQTWFRVEVIPIYAVLGVACGGAAWYVTRLARGPDVTWDRKNNPHPWLNIDQETQLKLMTVKENQGFTKTYSRDRL

SEQ ID NO: 275124 - protein, 51 aa, Zea mays
  Clone ID: MRT4577_182502C.1.pep
RNLFVLPGVLVWYCHAFSRSYFCLASVWLLSACFSTPLLFLACPRDFETIL

SEQ ID NO: 275125 - protein, 185 aa, Zea mays
  Clone ID: MRT4577_182503C.1.pep
VDACGSGPEFPGRPTRPLCGLLLAVLGCVCASGPRTLVLLDNLNVRDTHSLFFRSLKDRGFELTFKTADDPSLSLIKYGEFLYDNLIIFSPSVEDFGGNINVETISAFIDGGGSVLVAASSDIGDPLRELGSECGIEFDEEKTAVIDHHNYDVSDLGQHTLIVADTENLLKAPTIGGDSSLNPIL

SEQ ID NO: 275126 - protein, 72 aa, Zea mays
  Clone ID: MRT4577_182504C.1.pep
ENKGVSFGQSFPRGAGNGGVWARPQPNLTKTRWPLWVTRKIPVRIFGSYSEAKDPAPELICFNCETPFPLDF

SEQ ID NO: 275127 - protein, 218 aa, Zea mays
  unsure (1)..(218): unsure at all Xaa locations
  Clone ID: MRT4577_182505C.1.pep
MSAPAPLRLGSTAPNFQAETTKGNIDFHEFIGDNWVILFSHPEDYTPVCTTELGAFAKLQPEFTKRNVKLIGLSANTIQSHEGWIKDIGEVTGGNVEFPIIGDKERKVSLLYDMIDQQDATNVDEKGIAFTIRSVFIIDPKKTIRTIFSYPASTGRNAAEVLRVIDSLQTGDKYRITTPINWXLGEDVIVHPSVKNEEGQTLFPEFRIVKPYLRFTPL

SEQ ID NO: 275128 - protein, 1460 aa, Zea mays
  unsure (1)..(1460): unsure at all Xaa locations
  Clone ID: MRT4577_182506C.1.pep
MNPPNPPPGGVDPLVAAQMAVMQQMADTMADMRAQMQQERQEMRQEREDIRQELRQERDEIRQERRAQQQQLQQQLQQQQQQQQVPLPPPPPPVPPHDKHREFMSHKPPTFASSPDPLDADDWLKSIEKMLNIAQCTDREKVLYASGRLTGPAADWWDSYTAAHDAADTITWAEFSTQFRNYHIPAGMIKIKKKEFLSLKQGNMSVSEYRDKFIQLSRYAPEEVAEDERKQEHFIEGLNGPLQYALVAHTFPSFQRLLDKALAIEHKRVQLSDLKRKAISQGQGSSSVRPRYVPPQGTPTRPGGPRPVQQSPLRIPPPRQATPTGTPTRPXRTEDRPXTCFKCSQVGHYANACPMGNSGTPAKNKQQTRGKGYSIARVNQVSVDDTPDGGDLVIGMFYVNAIPATILFDSGATHSFMSARYANTNEIPLLNMRKPMIVITPKGPVEANQMTRRLTLTIMGREFGATAIILESSSIDLILGMSWLRKAKAVIACGRGTVELTTTKGERFQVNIAVTSSSMRAMFFMPEEFVGDNIRVVRDFPDVFPEELPGMPPDREVEFVIDLLPGTAPISKRPYKMSVEELKELKKQLINDVTVKNKYLLPRIEDLFDQMRGARVFSKIDLRSGYHQMRIRPSDIPKTTFSNRYGLYEFTVMSFGLTNAPAYFMNLMNKVFMEYLDRFVVVFIDDILIYSKNESDHEQHLRLVLQKLRDNQLYAKFSKCEFWIDKVPFLGHIISNGGIAVDPSKVKEIMEWRVPTTVTEIRSFLGLAGYYRRFIEGLSKIAKPMTSLLEKGREFKWDEKCQESFDQLKERLMSPPVLVMPDLQKGFDIYCDACGQGLGCVLMQDGHVIAYASRQLRRHELNYPTHDLELAAVVHALKIWRHYIMGTKCQVYTDHKSLKYIFTQKDLNLRQRRWLELIKDYDLEIHYHPGKANLVADALSRKEHVHSAFVVQLPDELAKDFERLNLGIVTHTEGVTIELEPTLEQEIRKGQIGDAKIQEIKDLITEGRGPEFTEDEQGTIWFKNRICVPEIDSLRETILKEAHDSVYSIHPGSTKMYQGLKQKYWWYGLKRDVAAHVAMCDVCQRVKAEHQRPAGLLHPLKIPEWKWEEIGMDFIVGLPRTSAGYDSIWVIGDRLTKVAHFIPVKTTYSGAKLAELYMARIVCLHGVPKKIVSDRGSQFTSRYWKKLHESLDTRLNFSSAYHPQTDGQTERTNQVLEDMLRACALKHGGSWDKSLPYAEFSYNNSYQASLKMSPFEALYGRKCRAPLYWDQTDERQLFGPEIIQEAEDQVQQIRENLRTAQSRQKSYADTRRRLLEFKEGDYVYLKVSPLRGMRRFKVKGKLSPRFIGPFLILKRVGEVAYQLELPDHLADVHDVFHVSQLKKCLRVPEEQLPMEDLSVQDDLTYAEYPIKILDTLTRVTRNKVIKMCKVQWSHHGEDEATWEREEELRVDFPHLFPRSS

SEQ ID NO: 275129 - protein, 83 aa, Zea mays
  Clone ID: MRT4577_182507C.1.pep
FETSAHSSAASSKVNSITTAQDSGRREGLAALIAGAHGQGWQDTAGALRRATQPASGSAVRDSREEEARSGGDDCTRDLGWPK

SEQ ID NO: 275130 - protein, 61 aa, Zea mays
  Clone ID: MRT4577_182508C.1.pep
RRRRPRRRHRAPARRSACSAATPGTAARPAPATRWTGARRAPAVLRNASRTRSRNCSAPAR

SEQ ID NO: 275131 - protein, 1469 aa, Zea mays
  Clone ID: MRT4577_182509C.1.pep
MNPPNPPPGGVDPLVAAQMAVMQQMTDTMADMRAQMQQERQEMRQEREDIRQELRQEREEIRQERRAQQQQLQQQMQQQQQQQQQQQVPLPPPPPPVPPRDKHREFMSHKPPTFASSPDPLDADDWLKSIEKMLNIAQCTDREKVLYASGRLTGPAADWWDSYTAAHDAADTITWAEFSTQFRNYHIPAGMIKIKKKEFLSLKQGNMSVSEYRDKFIQLSRYAPEEVAEDERKQEHFIEGLNGPLQYALVAHTFPSFQRLLDKALAIEHKRVQLSDLKRKAISQGQGSSSVRPRYVPPQGTPTRPGGPRPVQYAPQGSPRTPTRQATPTGTPTRSTGQKTSPTCFKCSQIGHYANACPMGNSARVNQVSVDDTPDGGDIVLGMFYVNAIPATILFDSGATHSFMSARYANTNEIPLLNMRKLLIVITPKGPVEANQMTRRLTLTIMGREFGATAIILESSSIDLILGMSWLRKANAVIACGRGIVELTTTKGERFQVNIAVTSSSMRAMFFMPEEFVGDNIRVVRDFPDVFPEELPGMPPDREVEFVIDLLPGTAPISKRPYRMAVEELKELKKQLTELQEAGYIRPSSSPWGAPVLFVQKKDGSQRMCVDYRSLNDVTVKNKYPLPRIEDLFDQMRGARVFSKIDLRSGYHQMKIRPSDIPKTTFSTRYGLYEFTVMSFGLTNAPAYFMNLMNKVFMEYLDRFVVVFIDDILIYSRNESDHVQHLRLVLQKLRDNQLYAKFSKCEFWIDKVSFLGHIISNGGIAVDPAKVKEIMEWIVPTTVTEIRSFLGLAGYYRRFIEGFSKIAKPMTSLLEKGREFKWDEKCQESFDQLKERLMSPPVLIMPDLQKGFDIYCDACGQGLGCVLMQEGHVIAYASRQLRKHELNYPTHDLELAAVVHALKIWRHYVMGTKCQVYTDHKSLKYIFTQKDLNLRQRRWLELIKDYDLEIHYHPGKANLVADALSRKEHVHSAFVVQLPDELAKDFERLNLGIVTHTEGVTIELEPTLEQEIRKEGRGPEFTEDEQGTIWFKNRICVPDIDSLRETILKDAHDSVYSIHPGSTKIYQDLKQKYWWYGLKRDVAAHVAMCDVCQRVKAEHQRPAGLLHPLKIPEWKWEEIDMDFIVGLPRTSAGYDSIWVIVDRLTKVAHFIPVKTTYSGAKLAELYMARIVCLHGVPKKIVSDRGSQFTSRYWKKLHESLDTRLNFSSAYHPQTDGQTERTNQVLEDMLRACALKHGGSWDKSLSYAEFSYNNSYQASLKMSPFEALYGRKCRTPLYWDQTGERQLFGPEIIQEAEEQVQQIRENLRTAQSRQKSYADTRRRLLEFKEGDYVYLKVSPLRGMRRFKVKGKLSPRFIGPFLILKRVGEVAYQLELPDHLADVHDVFHVSQLKKCLRVPEEQLPMEDLSVQEDLTYAEYPIKILDTLTRVTRNKVIKMCKVQWSHHGEDEATWEREEELRIDFPHLFPRSS

SEQ ID NO: 275132 - protein, 175 aa, Zea mays
  unsure (1)..(175): unsure at all Xaa locations
  Clone ID: MRT4577_18250C.1.pep
MSCSHLSTAWSSSALASSASTTRRRSPPRSALLARRSLRELRXRIDSVRNTHKIREAMKLLAAAKVRXRAQEGVRSSLPFSQALVEVLYNMNQQIQTEDIDLPLTRTRXPVNKVRLXCMNGEMGLCWTFQNXMFSKAETRIDDLKTXLGLQYTAAXVTNKEKDNFQLHTYIPLEL

SEQ ID NO: 275133 - protein, 770 aa, Zea mays
  unsure (1)..(770): unsure at all Xaa locations
  Clone ID: MRT4577_182510C.1.pep
MPPDREVEFVIDLLPGTAPISKRPYRMFVEELKELKKQLTELQEAGYIRPSSSPWGAPVLFVQKKDGSQRMCVDYRSLNDVTVKNKYLLPRIEDLFDQMRGARVFSKIDLRSGYHQMKIRPSDIPKTAFSTRYGLYEFTIMSFGLTNAPAYFMDLKNKSESEHEEHLRMVLQKLRDNQLYAKFSKCEFWIDKVPFLGHIISNGGIAVDPAKVKEIMEWRVPTTVTEIRSFLGLAGYYRRFIEGFTKIAKPMTSLLEKGREFKWDDKYLQKGFDIYCDACGQGLRCVLMQEGHVIAYASRQLRKHELNYPTHDLELATFVHALKIWRHYIMGTKCQVYTDHKSLKYIFAQKDLNLRQRRWLELIKDYDLEIHYHPGKANLVADALSRKEHVHSAFVVQLPDELAKDFEKLNLGIVTHSEGVTIELEPTLEQEIRKGQVGDAKIQEIKDLITDGRVPEFTEDEQGTIWFKDRICVPEIDSLRETILKEAHDSDYSIHPGSTKMYQDLKQKYWWYGLKRDVAAHVAKCDVCQRVKAEHQRQAGLLYPLKIPEWKWEEIGMDFITGLPHTSKGYDSIWVIMDSLTKVAHFIPVKTTYKGXEEQVRIIWEDLRXAQTRQKSYVDNRRRPLEFEEGDHVYHKVSPLRGMRRFKVKGKLSPRFIGPFLILKRVGEVAYQLELPDHLSDVHDVFHVSQLKKCLRVPEEQLPMEDLSVQDDLTYAEYPIKILDTLTRVTRNKVIKMCKVQWSHHGEDEATWEREEELRIDFPHLFPRSS

SEQ ID NO: 275134 - protein, 402 aa, Zea mays
  Clone ID: MRT4577_182511C.1.pep
MGYPYSVRREHYRHDPCFKGERFEVEIAVTTTIRLVAFLVDEKFVGANIRAVTDFPDVFPEELPGMPPDREVEFVIDLLPGTAPISKRPYRMSVEELKELKKQLTELQEAGYIRPSSSPWGAPVLFVQKKDGSQQIKCKFWIGKVPYLGHIISNGGISVDPAKVKEIMEWIVPTTVTEIRSFLGLAGYYRRFIEGFSKIAKPMTSILEKGREFKWDEKCQESFDQLKERLMSPPVLIMPDLQKGFDIYCDACGQGLGCVLMQEGHVIAYASRQWRKHELKYPTHDLERAAVVHALKIWRHYIMGTKCQVYTDHKSLKYIFTQKDLNLRQRRWLELIKDYDLEIHYHPGKTNLVADALSRKEHVHSAFVVQLPDELAKDFERLNLGIVTHMEGITIELEPTLE

SEQ ID NO: 275135 - protein, 44 aa, Zea mays
  Clone ID: MRT4577_182512C.1.pep
NIFPFCQDCCLIPESPFYLEGEGGLFRYIEKRLKDNGHMVIRVA

SEQ ID NO: 275136 - protein, 627 aa, Zea mays
  Clone ID: MRT4577_182513C.1.pep
MFFIPEKFVGDNICVVKDFPDVFPEELPGMPPDREVEFVIDLLPGTAPISKRPYRMSVEELKELKKQLTELQEAGYIRPSSSPWGAPVLFVQKKDGSQRMCVDYRSLNDVTVKNKYLLPRIEDLFDQMRGARVFSKIDLRSGYHQMRIRPSDIPKTAFSTRYGLYEFTVMSFGLTNAPTYFMNLMNKVFMEYLDRFVVVFIDDILIYSKNESDHELHLRLVLQKLRDNQLYAKFSKCEFWIDKVPFLGHIISNGGIAVDPAKVKEIMEWRVPTTVTEIRSFLGLAGYYRRFIKGFSKIAKPMTSLLEKGREFKWDEKCQESFDQLKERLMSPPVLIMPDLQKGFDIYCDACGQGLGCRGPEFTKDEQGTVWFKDRICVPDIESLRETILKEAHDLDYSVHLGSTKMYQDLKQKYWWYGLKRDVAAHVAMCDVCQRVKAKHQRLAGLLHPLKIPEWKWEEIGMDIITGLPRTQKGYDAIWVIVDRLTKVAHFIPVKTTYKHGSSWEKSLPYAEFSYNNSYQASLKMSPFEALYGRKCRTPLYWDKTRGRQFFRPELIQEVEEQVRIIRENLRVAQTRQKSYADNRRRPMEFEEGDYVYLKVSPLRGLRRVKVKGKLSPRFIGPFRVFR

SEQ ID NO: 275137 - protein, 1512 aa, Zea mays
  Clone ID: MRT4577_182514C.1.pep
MVNTRRGGGIDLPPNRHTRRIFRQPQPQPVEMDPPPPPPPAGVDPLVAAQMRMMQQMADTMTDMRAQMQQERQEMRQEREDIRRELRQEREEIRQERRAQQQQLQQQMQQQQQQVPLPPPPPPVPPRDKHREFMSHKPPTFASSPDPLDADDWLKSVEKMLNIAQCTDREKVLYASGRLTGPAADWWDSYTAAHDAADTITWAEFSTQFRNYHIPAGLMKIKKKEFLSLKQGSMTVSEYRDKFIQLSRYAPDEVAEDERKQEHFIEGLNGPLQYALVAHTFPSFQRLLDKALAIEHKRVQLGDLKRKAISQGQGSSSVRPRYSSPQGTPARTGGGQRPIQQSPLRTPPPRQATPTGTPTKFSGQSPGTTCYKCGKTGHYANVCPQRIATTPVQNRQQTPGSSKGYSIARVNQVSVDDTPDGGDLVIGMFYVNAIPATILFDSGATHSFMSARYANTNEIPLLNMRKPMIVITPKGPVEANQMTRRLTLTIMGREFGATAIILESSSIDLILGMSWLRKAKAVIACGRGTVELTTAKGERFQVNIAVTSSSMRAMFFMPEEFVGNNIRVVRDFPDVFPEELPGMPPDREVEFVIDLLPGTAPISKRPYRMSVEELKELKKQLTELQEAGYIRPSSSPWGAPVLFVQKKDGSQRMCVDYRSLNDVTVKNKYPLPRIEDLFDQMRGARVFSKIDLRSGYHQMRIRPSDIPKTAFSTRYGLYEFTVMSFGLTNAPAYFMNLMNKVFMEYLDRFVVVFIDDILIYSKNESDHEQHLRLVLQKLRDNQLYAKFSKCEFWIDKVPFLGHIISNGGIAVDPAKVKEIMEWRVPTTVTEIRSFLGLAGYYRRFIEGFSKIAKPMTSLLEKGREFKWDEKCQESFDQLKERLMSPPILIMPDLQKGFDIYCDACGQGLGCVLMQEGHVIAYASRQLRKHELNYPTHDLELAAVVHALKIWRHYIMGTKCQVYTDHKSLKYIFTQKDLNLRQRRWLELIKDYDLEIHYHPGKANLLPDELAKDFERLNLGIVTHTEGVTIELEPTLEQEIRKGQVGDAKIQEIKDLITEGRVPEFTEDEQGTIWFKDRICVLEIDSLRETILKEAHDSDYSIHPGSTKMYQDLKQKYWWYGLKRDVAAHVAKCDVCQRVKAEHQRPAGLLHPLKIPEWKWEKIGMDFTVGLPRTPAGYDSIWVIVDRLTKVAHFIPVRTNYTGAKLAELYMTRIVCLHGVPKKIVSDRGSQFTSRFWKKLHESLDTKLNFSSAYHPQTDGQTERTNQVLEDMLRACALKHGGSWEKSLPYAEFSYNNSYQASLKMSPFEALYGRKCRTPLYWDQTGERQFFGPELIQEAEEQVQMIRENSRIAQSRQKSYADNRRRLLEFKEGDHVYLKVSPLRGMRRFKVKGKLSPRFIGPFLILKRVGEVAYQLELPNHLSDVHDVFHVSQLKKCLRVPEEQLPMEDLSVQDDLTYAEYPIKILDTLTRVTRNKVIKMCKVQWSHHGEDEATWEREEELRIDFPHLFPRSS

SEQ ID NO: 275138 - protein, 61 aa, Zea mays
  Clone ID: MRT4577_182515C.1.pep
SFSYSTVGYNQVAPQMVTRGGTLSQDLDCMVERGYGVLLTFMPLCFVSRFTPVIIHKPILL

SEQ ID NO: 275139 - protein, 629 aa, Zea mays
  Clone ID: MRT4577_182516C.1.pep
MSPPVLIMPDLQKGIDIYCDACGQGLGCVLMQEGHVIAYASRQLRKHELNYPTHDLELATVVHALKIWRHYIMGTKCQVYTDHKSLKYIFTQKDLNLRQRRWLELIKDYDLEIHYHPGKANLVADTLSRKEHVHSAFVVQLPDELAKDFERLNLGIVTHTEGVTIELEPTLEQEIRKGQVGDAKIQEIKDLITEGRGPEFTEDEQGTIWFKNRICVPDIDSLRETILKEAHDSVYSIHPGSTKMYQDLKQKYWWYGLKRDVAAHVAMCDVCQRVKAEHQRPAGLLHPLKIPEWKWEEIGMDFIVGLPRTSAGYDSIWVIVDRLTKVAHFIPVKTTYSGAKLAELYMARIVCLHGVPRKIVSDRGSQFTSRYWKKLHESLDTRLNFSSAYHPQTDGQTERTNQVLEDMLRACALKHGGSWDKSLPYAEFSYNNSYQASLKMSPFEALYGRKCRTPLYWDPTGERRLFGPEIIQEAEEQVQQIRENLRTAQSRQKSYADTRRRLLEFKEGDYVYLKVSPLRGMRRFKVKGKLSPRFIGPFLILKRVGEVPYQLELPDHLADVHDVFHVSQLKKCLRVPEEQLPMEDLSVQDDLTYAEYPIKILDTLTRVTRNKVIKMCKVQWSHHGEDEAT

SEQ ID NO: 275140 - protein, 242 aa, Zea mays
  unsure (1)..(242): unsure at all Xaa locations
  Clone ID: MRT4577_182517C.1.pep
MAMLREHLDLIRAHLLDDNHDAVSSDDSAPSPSPSPPGRRPLPALSVSLPPRPAVVXAAAAPEXRRRRRCRFLSRSSTAAXEPEEDDFRRYRGVRQRPWGKYAAEIRDPARKGARVWLGTYDTAVEAARAYDRAAFRLRGSKAILNFPNEVALSTAAWWATPAPPPQPSATVAGNKRARSPQEQDARCMVREVKKERIQEPASGGADYFWEDESLKGAICSLPPLSPLSPHPHLAVPQLYVS

SEQ ID NO: 275141 - protein, 32 aa, Zea mays
  unsure (1)..(32): unsure at all Xaa locations
  Clone ID: MRT4577_182518C.1.pep
MATKFKKNRKKRGHVSAGHXRICKHRKHPGGR

SEQ ID NO: 275142 - protein, 1497 aa, Zea mays
  Clone ID: MRT4577_182519C.1.pep
MNPPNPPPGGVDPLVAAQMAVMQQMADTMADMRAQMQQERQEMRQEREDIRQELRQERDEIRQERRAQQQQLQQQMQQQQQQQQVPLPPPPPPVPPRDKHREFMSHKPPTFASSPDPLDADDWLKSIEKMLNIAQCTDREKVLYASGRLTGPAADWWDSYTAAHDAADTITWAEFSTQFRNYHIPAGMIKIKKKEFLSLKQGNMSVSEYRDKFIQLSRYAPEEVAEDERKQEHFIEGLNGPLQYALVAHTFPSFQRLLDKALAIEHKRIQLGDLKRKAISQGQGSSSVRPRYSSPQGTPTRPGGPRPVQQSPLRTPPPRQATPTGTPTKFAGQSPGTQCFKCGKTGHYANVCPQRIATTPAQNKQQTPGKGYSIARVNQVSIDDTPDGGDLVIGMFYVNAIPATILFDSGATHSFMSARYANTNEIPLLNMRKPMIVITPKGPVEANQMTRRLTLTIMGREFGATAIILESSSIDLILGMSWLRKAKAVIACGRGTVELTTTKGERFQVNIAVTSSSMRAMFFMPEEFVGDNIRVVRDFPDVFPEELPGMPPEREVEFVIDLLPGTAPISKRPYRMSVEELKELKKQLTELQEAGYIRPSSSPWGAPVLFVQKKDGSQRMCVDYRSLNDVTVKNKYPLPRIEDLFDQMRGARVFSKIDLRSGYHQMKIRPSDIPKTAFSTRYGLYEFTVMSFGLTNAPAYFMNLMNKVFMEYLDRFVVVFIDDILIYSKNESDHEQHLRLVLQKLRDNQLYAKFSKCEFWIDRVPFLGHIISNGGIAVDPAKVKEIMEWRVPTTVTEIRSFLGLAGYYRRFIEGFSKIAKPMTSLLEKGREFKWDEKCQESFDQLKERLMSPPVLIMPDLQKGFDIYCDACGQGLGCVLMQDGHVIAYASRQLRKHELNYPTHDLELAAVVHALKIWRHYIMGTKCQVYTDHKSLKYIFTQKDLNLRQRRWLELIKDYDLEIHYHPGKANLVADALSRKEHVHSAFVAQLPDELAKDFERLNLGIVTHTEGVTIKLEPTLEQEIRKGQIGDAKIQEIKDLITEGRGPEFTEDEQGTIWFKNRICVPDIESLRETILKEAHDSVYSIHPGSTKMYQDLKQKYWWYGLKRDVAAHVAMCDVCQRVKAEHQRPAGLLHPLKIPEWKWEEIGMDFIVGLPRTPAGYDSIWVIVDRLTKVAHFIPVRTNYTGAKLAELYMTRIVCLHGVPKKIVSDRGSQFTSRFWKKLHESLDTKLNFSSAYHPQTDGQTERTNQVLEDMLRACALKHGGSWEKSLPYAEFSYNNSYQASLKMSPFEALYGRRCRTPLYWDQTGERQFFGPELIQEAEEQVRMIRENLRIAQSRQKSYADNRRRLLEFKEGDQVYLKVSPLRGMRRFKVKGKLSPRFIGPFLILKRVGEVAYQLELPDHLADVHDVFHVSQLKKCLRVPEEQLPTEDLNVQDDLTYAEYPIKILDTLTRVTRNKVIKMCKVQWSHHSEDEATWEREEELRIDFPHLFPRSP

SEQ ID NO: 275143 - protein, 220 aa, Zea mays
  unsure (1)..(220): unsure at all Xaa locations
  Clone ID: MRT4577_18251C.1.pep
LWFLFTWRVVGTVAGPPLQVTHGRIYGTCTTPAWQALDTDGGTEFIWTWIKSARVFQGXSSLVDVAGGLGGATQTIAKXFPHVECSVLDLPHVVTNAPTHTNVKYIAGDMFESIPSANAVFLKWILHDWGDDECVKILKNCKKAIASQGGKVVILDIVVGAGSSDEKHVEMQILFDLFMMFINGAERDELEWKKIIFEAGFSSYKIIPVLGVRSIIEIYP

SEQ ID NO: 275144 - protein, 42 aa, Zea mays
  Clone ID: MRT4577_182520C.1.pep
SECISSLLKNKYLLQCIMIDQPKEPLGVLVVDGKIAITTHAS

SEQ ID NO: 275145 - protein, 51 aa, Zea mays
  Clone ID: MRT4577_182521C.1.pep
MPLKKKKKKKKKKKKKKKKKKKKKKKKKKKKKKKKKKKGGAHMEVQALGRR

SEQ ID NO: 275146 - protein, 76 aa, Zea mays
  Clone ID: MRT4577_182522C.1.pep
FEPHSRLQPYCYTSKEGIETILPLLKAFYHGRIVNICSHWCHVTLTPNLELKHQLNYIDTLTTERMNSLLDMLIND

SEQ ID NO: 275147 - protein, 101 aa, Zea mays
  Clone ID: MRT4577_182523C.1.pep
FRWRGGALEERAYVFPFCISPCLLCSASEKHPCSHGDSARRVSFSAARAWQACFFAACTHTTDDGGATTSVALTAPSSLPCCSCSSTSYDGSCSSQLRCEW

SEQ ID NO: 275148 - protein, 46 aa, Zea mays
  Clone ID: MRT4577_182524C.1.pep
VKGVEHRDDHPTDDDPHGVLRGKRHAAVAEVTLRLPMSLALEQDLW

SEQ ID NO: 275149 - protein, 141 aa, Zea mays
  Clone ID: MRT4577_182525C.1.pep
GAGGKKPQLVAFTTFSPSHFEGHWNEGAPCKKKADRELGYTETEMRKIVVEAVEEAASTMSSSSNDSAQPLRFAALDVTALANMRPDGHPGPYMRKNPFAAAGGNNTGDHRPVQHDCLHWCMPGPVDTFNQILLQTILRAR

SEQ ID NO: 275150 - protein, 86 aa, Zea mays
  Clone ID: MRT4577_182526C.1.pep
PGNELPPLFILSCTSATQKMGPYLHYKGAAFLKIRWPLKGKIGQGVTKPWFTKSLTKVVVPARGLAQPKTLRNKHFCLKKMGQASN

SEQ ID NO: 275151 - protein, 720 aa, Zea mays
  unsure (1)..(720): unsure at all Xaa locations
  Clone ID: MRT4577_182527C.1.pep
IRHEAAHLPRLPVLLLVLLAAHVVSTSAHAEPPLPSPYNTSAHGEPPLPSTYNPSMCSESFRCGGVEIRYPFYLANATADYSGNYYSCGYTDLSVSCELEVEGPSTTWTPTIRLGGDNYTVKNIYYDYHTISLADRDVLGGGGCPVVRHNVSFDETWLHNASAFDNLTFFFGCHWGPRDTLPXLPATTSAAPGSVLQLSVEAPSCSSLKILTNKRSRSWLHXCDEVFSVPVGSDALRATDTFSLTGYGYGDLLWQGFELEWNRTSEDQCGQCEGSGSGSGSGSGGWCAYSQKREFLGCLCSGGKVGNPFCKPSKSKRKARILAGALGGGAAALLVGAAIFLFVIMRKRKQKKKVINSSSKLLKYSGSGGTPRSRVGDMESGSIEDPPTHHFTYEELEEATNRFDESRELGDGGFGTVYKGYLRDGRVVAVKRLYNNGYRRVEQFQNEAAILSGLRHPNLVMFYGCTSSHSRELLLVYEFVANGTVADHLHGQRAPERALSWPLRLSVAVESAAALTYLHAIEPPVVHRDVKTTNILLDADYHVKVADFGLSRLFPLDVTHVSTAPQGTPGYVDPEYHQCYQLTDKSDVYSFGVVLVELISSKPAVDITRHRSEINLASMAISKIQKCQLEELVDLGLGYDTDPATRKMMTMVAELAFRCLQQNGEMRPPIKEVLEVLRNIQGECLTSGKDGDKSKDGPFSPTTVHAPWDSRSTTPNTSRD

SEQ ID NO: 275152 - protein, 264 aa, Zea mays
  unsure (1)..(264): unsure at all Xaa locations
  Clone ID: MRT4577_182528C.1.pep
MAKTRKPPAPPSPPPPPAETPSPQRRRKKKGRPSLLDLQRRSLRLQAQNPSPAASPTRRDPNPSDDDEDGTGSGRRRQKRLKSVLSGVVKEEQGEGKKDAAKATGKEDAASDGGPTGTPLPDKKLLLFILDRLQKKDTYGVFSEPVDAEELPDYFDIIDHPMDFSTIREKLLNDSYSKLEQFEDDVFLLTSNAMSYNSADTIYFRQARSIEALAKKDFENLRQPSDEEEPXTPARRGRPPKNPKTEGDVSPDLSNVKANKPEDN

SEQ ID NO: 275153 - protein, 167 aa, Zea mays
  Clone ID: MRT4577_182529C.1.pep
IMSIYVHAEPITENTIEKTKSSEHLASAIKMLLMLLCSLYIVPPYAFMIPGWLMRCWMQRIRGLRVSCGLVSNVKSWNFLCEGGWRILGKSPRTTASYTTQSTPTMRSFSDNPMPTHLMLYMADNTTHSTLSSVYGARSCSRRGRTPFITSSVTLDPLPPPPRLGRP

SEQ ID NO: 275154 - protein, 287 aa, Zea mays
  Clone ID: MRT4577_18252C.1.pep
KRDGFFRQLFKEKNDEKKEGSTPSKKEEDDKGHKNADDDNFFRRLFKDKNEEKKGIVHDRNEDDKCEEGDKENFFRKLFKDKHEERRTEGPDKNDDYGKGSSGIEEEDNPEFLSFRRLFRVHPEDSKSGHIESSQSNNLSEGSPGSESFFKRLFRDRDRSLEDSEIFGSKMAKEKHPGTTGINEKQSGKPPLPINAVAELRKGSYYASLELVQALCDTSYGLVDIFPIEDRKIALRESLTEINSQIASAEKNGGVCFPMGKGIYRVVHIPEDESVLLNSREKAPYLI

SEQ ID NO: 275155 - protein, 54 aa, Zea mays
  Clone ID: MRT4577_182530C.1.pep
TILPLMLSFLLYALLSSGGTFLLFSGVYYCDKTLLYNHILLQQATCCMQHTFIA

SEQ ID NO: 275156 - protein, 78 aa, Zea mays
  Clone ID: MRT4577_182531C.1.pep
PFPSPATVEHKQLNVLLLWNLPQASFDRIWNFCSIVKFSYPCYKPLEFCYQCPMEKLKPPMFGVNLGFFDEKDGLVGL

SEQ ID NO: 275157 - protein, 52 aa, Zea mays
  Clone ID: MRT4577_182532C.1.pep
FVCLVVGWSGHPVCVKRYHFIIENDSSHLSGRRRTCCLRCGTPMAAKGFCGP

SEQ ID NO: 275158 - protein, 243 aa, Zea mays
  Clone ID: MRT4577_182533C.1.pep
PPFWPPAHLPPLRNTHGRIDCKQFIKHYDEHALRTPSNPFLLCVRCSIELLDHPKDYTTPPEELVLLPASATLGDLKVQASKAFQETYLMFQSFQTEQLPDFPNFSDTTPVKHVLGSGQLLRVRGRCTGDYRRIVQFRMERGLENWTVDCSCGAKDDDGERMLACDICGVWQHTRCSGISDFEEVPENFICRKCASPRKGDGRGGGGSNGGGTMEVTASGRCKDEIGASVGGAGKYGRMATVG

SEQ ID NO: 275159 - protein, 75 aa, Zea mays
  Clone ID: MRT4577_182534C.1.pep
APTTPPPVLTPQMTSDSSMLTGAPWTDHDTLLRRSDASDGGSTQVPFQDTYSMVHHASSNMINQNYFYHYNYNRM

SEQ ID NO: 275160 - protein, 143 aa, Zea mays
  Clone ID: MRT4577_182535C.1.pep
VPSSPCDDDERIIALSSDCTATDSFRVGSVTDSGSESEPDRAVLWKWSLYTVVQMEATKQFRKLVLLDALKRDRPDAYTVQSVLGACTATGALSLGFCAHVLMLRELRDADHASAVSRDVFNNNLAVLENLLDFRPNLVDKVC

SEQ ID NO: 275161 - protein, 81 aa, Zea mays
  unsure (1)..(81): unsure at all Xaa locations
  Clone ID: MRT4577_182536C.1.pep
IIFLALLATESCLHTVDTAALWFCWGKCRAQCARSSSHRTWAACMSSCSLCCXECNCLPNDIHDCPCYRNIFTTCPNNMPK

SEQ ID NO: 275162 - protein, 197 aa, Zea mays
  unsure (1)..(197): unsure at all Xaa locations
  Clone ID: MRT4577_182537C.1.pep
DDAKVDASGTPWDGPDRMKDLEPFSGEPPSYLTGELPGDDGWDTGGLCADPDTFAKNRELEVIHSRXAMLSAVGXVFPELLSRNGVKFGEGVWFKAGSQIFSEGGLDYLGNPSLIHAHSILAIWACQGVLMVADEGYRIAGEPAXEVVDPLYPDGSFDPLGLGDDPEAFAELQVKELKNGRLAMFSMFGFFVQAIGT

SEQ ID NO: 275163 - protein, 96 aa, Zea mays
  Clone ID: MRT4577_182538C.1.pep
QLRGGAVRPPAVDAGQRRRPPRRRRRHEGAGPALRVLIERRTSRVRQNTYIHPHVNTTTSVTCMSIARSALVPLIISFYSSSIDLEGGRFRFLRCF

SEQ ID NO: 275164 - protein, 73 aa, Zea mays
  Clone ID: MRT4577_182539C.1.pep
MSEGDNGGESVHGKPSVVYRFFTRLGQIYQSWLDKSTPYTAVRWVVTLGLSFVYMIRVYLLQGWYIVTYALGI

SEQ ID NO: 275165 - protein, 32 aa, Zea mays
  Clone ID: MRT4577_18253C.1.pep
RSESGTLGPGLLATVLLSLPSYILGIAIGGTC

SEQ ID NO: 275166 - protein, 405 aa, Zea mays
  Clone ID: MRT4577_182540C.1.pep
NAVSSFAQLRQQGILGAKHGENPGANFQAMNVSHNNANHSGGRVLHGSPAPTNIQQQNYSLLHQMQTSRHMDVDPGSLSGKTTKPDIGSDAAQIDWNSGQRFAHVTNNSTKSSADNIGSPGVPGSFTSDLKMLSFASRNEERNPNIPSRFPSGECPSPGMITTQDDNQNQVQHMGTGAMSNSDERSERPRINPQMAPSWFGHYGNYRNGQSVATLNAATLNAQKPTALPFNFPKASRNNENNSHAENRVEPSQSVRPGHHLPSARMEALVPSNVKVSSMMRRPKKRKTMDSTLVSWHKIIESPRKLRGISTPEMDWAWAANRLIEKDEAETPDDAPLNYLPRKRLILTSQLIQQLLPAIPATILRAQAVSAYGSATYTLSMLTLRDACSMASSSSYNSCSPVEDE

SEQ ID NO: 275167 - protein, 134 aa, Zea mays
  Clone ID: MRT4577_182541C.1.pep
MLPRKREIVAGEVEDLQKKTRAGEGEATREEGDAAMAGRGNEIDEDLHSRQLAVYGRETMKRLFGSNVLVSGLQGLGAEIAKNLVLAGVKSVTLHDDGNVELWDLSSNFFFSENDVGQNRASACVQKLQQLEQR

SEQ ID NO: 275168 - protein, 51 aa, Zea mays
  Clone ID: MRT4577_182542C.1.pep
FPANVLTIGGALAAGPTAGMGGSPLPKRDHRFFCPPPALPPRLMLIFEKKN

SEQ ID NO: 275169 - protein, 319 aa, Zea mays
  Clone ID: MRT4577_182543C.1.pep
NSRHGDIHNNGQTQFPTPFSIGSKRILEDKQVSASGGIAQPSSSRGQIDVFGSIPREGSTAINNVAFNLQESDGKSMTESRTTFGRASGVDNISRVASVSVHPKSSETAFKILKQLDRTIPSPTSKPLGLRQTLAKKNTFSVATYRQIKEPDIIIGNDNKQSSINESGSASSETTYGKKVQQPQSSPISGESSEKVQRSGANSDVYEAGTSQRPLKSNLTPTSVAEVLDNNNTSKGFSFTFPIPKAPSSLLEPPPTPTMASPPRTLPITNEDVPKFTFGSSSMANKLVFSFNSTSSSPGAGGTDPTFKFGSDNKRELVF

SEQ ID NO: 275170 - protein, 40 aa, Zea mays
  Clone ID: MRT4577_182544C.1.pep
FGGFFKKNWGPHHRLKKIYTTPCPQDNIPPHNRSSINVLQ

SEQ ID NO: 275171 - protein, 405 aa, Zea mays
  Clone ID: MRT4577_182545C.1.pep
MVAEAEVMHQSPVPVLEVQYHRRATTKGVDDVVGMSAPAPAEVGVGVGVEVEVEVEVAVEVPRMGLEQPDVAPRVSMDMIQQFVPNIRSGSFADIGPRRYMEDEHIRIDDLSAHLGSMLVCPLPSAFYGVFDGHGGPDAAAYMKRHAMRFLFEESEFPQASQVDEVYLESVESCVRRAFLQADLALADDLDISRSSGTTALTALVFGRQLVVANTGDCRAVLCRKGVAMEMSRDHRANHVEERERVAASGGYIEDGYLNGVLSVTRALGDWDMKAPGASASAALIAEPEFRRATLGEDDEFLVMGCDGIWDVMTSQHAVSLVRRGLRQHDDPARCARELVMEAKRLETADNLTVVVVCFAPEMGSPFTPQQQQEEELPARPRSCKKGLSTEALCSLRSWLDTDHR

SEQ ID NO: 275172 - protein, 228 aa, Zea mays
  unsure (1)..(228): unsure at all Xaa locations
  Clone ID: MRT4577_182546C.1.pep
MVAEAEVMHQAPVPVLEVQYHRRATTKGVDDVVGMSAPAPAEVGVGVGVEVEVEVEVAVEVPRMGLEQPDVAPSLSTDMIQQFVPNIRSGSFADIGPRRYMEDEHIRIDDLSAHLGSMLVCPLPSAFYGVFDGXGGPDAAAYMKRHAMRFLFEESEFPQASQVDEVYLESVESCVRRAFLQADLALADDLDISRSSGTTALTALVFGRYRKEACEAVIDSCIHAYTLI

SEQ ID NO: 275173 - protein, 127 aa, Zea mays
  unsure (1)..(127): unsure at all Xaa locations
  Clone ID: MRT4577_182547C.1.pep
EKGVLKNKGNKGFKIDDWVKNPSWNPPCPHPKRFSLAQILFGRPPPTLRGKNPPPPVPGSXIKHXGGAKPPXNQEPPPXKQGGSPPSPPXPVFWARGDKGGGHPCPTPPRGGPLRIGPPGGATSGGG

SEQ ID NO: 275174 - protein, 74 aa, Zea mays
  Clone ID: MRT4577_182548C.1.pep
LLGGVLLGGGGLLYPLHMLCLDLHICARFTAWPGTFPRRELALNGAWALPRVASALARAHLFGRPPAFLSLSFG

SEQ ID NO: 275175 - protein, 93 aa, Zea mays
  Clone ID: MRT4577_182549C.1.pep
RRQSCSARVGRIGGPGPGYGLGAPCPTFPFLFGPPAQRPSRLGRKGRPKQTAPPLQRLRSLAGPGRVADQGHFGIFFLSSDFFFQKLETQKRN

SEQ ID NO: 275176 - protein, 144 aa, Zea mays
  Clone ID: MRT4577_18254C.1.pep
PRVRLRVPVLENLARYGNSSSNGSPSSEGQGSLLDQYNGVHDASHGLHRKRKKHLDGAGDDDHADAYSNKMMEDHYRAMLSEHVQKYRRSKFKEGAFISDPSQVAIPHIKHKNGGKKVMKHISNFRDIAALNGIGASHEYNWRG

SEQ ID NO: 275177 - protein, 51 aa, Zea mays
  Clone ID: MRT4577_182550C.1.pep
RTLQWVKQCVKRKARSTLEKGHVMSSMRKNHPVWSMYDVFVKKFGLSVYVC

SEQ ID NO: 275178 - protein, 70 aa, Zea mays
  Clone ID: MRT4577_182551C.1.pep
KDLRLDAVIRHIGEASGVRIALTTCSSSPGGLWTEVSALPSGLSSRVHIAPHVGSGCNVQKDGELDLEPN

SEQ ID NO: 275179 - protein, 95 aa, Zea mays
  Clone ID: MRT4577_182552C.1.pep
VSYRGGLSLAPIVAIWEKVLATAQVPAVVSVPLISCKVLCIRPVSMPTKSRCPQNDASAQYSRFEGHVVRPLCWSGVRFVHLNSLCCSVRFPFFL

SEQ ID NO: 275180 - protein, 82 aa, Zea mays
  Clone ID: MRT4577_182553C.1.pep
KKPPAGSVRHHSERLAVALGLLPTPPGATVRVTKNITMCRDCHSSIKFFSLLANREIVVRDSKRLHKFKDGRCSCGDFGALL

SEQ ID NO: 275181 - protein, 56 aa, Zea mays
  Clone ID: MRT4577_182554C.1.pep
KTDSGWGPPLVDGHYMLSYKGDAWLPTRTTITKPITLYSGLILGTKTAKNPRWACP

SEQ ID NO: 275182 - protein, 66 aa, Zea mays
  Clone ID: MRT4577_182555C.1.pep
ELQQSCFQQDLGVTFDQSFPWGLVHGVSRAMRQPGLSGAICLLCVASYIAVSIFGSHSSRMSQLHS

SEQ ID NO: 275183 - protein, 57 aa, Zea mays
  unsure (1)..(57): unsure at all Xaa locations
  Clone ID: MRT4577_182556C.1.pep
MGIDLIAAGRNQKTKRIAPKSDHDYLKLLVKLYRFLARRTXEQLXAVILKRVLLSRT

SEQ ID NO: 275184 - protein, 104 aa, Zea mays
  unsure (1)..(104): unsure at all Xaa locations
  Clone ID: MRT4577_182557C.1.pep
MASPSACSCRNPHQQRPPTNVHHQFQSLPAWMPAPXPXTAFTKALELEGTGTCGTHLXNVNWRRGDLRAYCATYLDPSSQSVTRPVDRRGCRPTWNVRMTLSFA

SEQ ID NO: 275185 - protein, 96 aa, Zea mays
  Clone ID: MRT4577_182558C.1.pep
MIHHFILDRGIHQTKHLINKQWNTFIKKKHITGFGKVVESWRKMMRARFHSVLACKKVTVFSQEDDEIHCSKQGQEFKAQAQSLHIEILQSPWLCS

SEQ ID NO: 275186 - protein, 114 aa, Zea mays
  Clone ID: MRT4577_182559C.1.pep
SHVLVVRNSGQRKHTEKVEGRNEKIIRLGESKWIKYLSPGTPLARWLALLLLGTAHLTTKLQSNFIERNINEDESRIVLATDQNPAHNFPVPKSNKTYCNYRLRRTFCIPYFSV

SEQ ID NO: 275187 - protein, 72 aa, Zea mays
  unsure (1)..(72): unsure at all Xaa locations
  Clone ID: MRT4577_18255C.1.pep
SLFSMARLDRINNYYCLRXLTRRNKLLQELKNLLVVCRDHRYPFNDKAELAXVQXTYVLVEQYNLNGHIRLI

SEQ ID NO: 275188 - protein, 64 aa, Zea mays
  Clone ID: MRT4577_182560C.1.pep
ILGGIYDEEFRVAGAFPFKMHFTVGILTGVLESKGLSYTLSIGGVSKNKPVSMGINLVTLEPKP

SEQ ID NO: 275189 - protein, 144 aa, Zea mays
  Clone ID: MRT4577_182561C.1.pep
MEALILEPSLYTVKAILILDNDGDRLFAKYYDDTYPSVKEQKAFEKNIFNKTHRTDSEIALLEGLTVVYKSSIDLYFYVIGSSYENELMLMAVLNCLFDSLSQMLRKNVEKRALLENMEGLFLAVDEIVDGGVILESDPHHVVH

SEQ ID NO: 275190 - protein, 1737 aa, Zea mays
  unsure (1)..(1737): unsure at all Xaa locations
  Clone ID: MRT4577_182562C.1.pep
DSSIYRSVNAGIKTSRIPIYSGFPEGARVSCDLLPAHNPARITTAPQRRHPGPTKSPPYNLRNLPGRIRSSTNLVSEDSTIMSSSKSPSPGQQTPPASSPPAAPVVSLAAVPASSEAMALGPPGAAINQQAAPALTPAQIAASLADLSHAVRDMQITMNAMLTGHLPFPNPQAARTPQPPHPSLTAQPPPAALPPPTQPPAPLPPLARQPXLTSTACRSXGPSSTASPTTAPIHMIRFPPSPSPIPSWAQGAPTVSPPVYSXTPATXRSRLPYPAAPSVXASXGMLLGGGDDPLFPGRGPLRPXTTRSDSSVVTVPRATSGXDVETAAYGGAEARAPPRYYKLDFATYDGSEDPLNWLNHCEQFFRGQRTPASDRTWLASYHLKGPAQTWYYALEQDEGMPSWDRFAELCRLRFGPAVRGSRLAELGRLPFLSTVQEYSDRFQALLCRARDVSPMQKTELFVGGLPEYLRVDVELRDPQDLQTAMYLARAFERRAAAWPPFQQRGSRPPQRAQGSGRVTPAPPGALPTGTTTPGDSTTPTRPFRRLSPGEQQERRRQGLCFNCDEPYVRGHVCQRLFYLEVDDFLDEASGVGGVDPLEEPAAPDVTGANALVVSLHALAGIRTDKTLLLPVTINGERLLALMDTGSTHNFLNADTMSRLGLAMAGGEHLRVTVANGDRLPCAGIARDVPVIINDESFSITCVGMRLGCFDFILGVDFLETLGTIQWNFRALTLSFQRQGRRIHWQGVRATQQPAPQQLAVAVVDTAQQPLMDVLLQQHGAIFDEPTGLPPARPYDHRIHLLPGTAPVAVRPYRYAQLQKDELERQCEAMLTQGIIRPSTSPFSAPVLLVRKADRSWRFCIDYRALNAKTSKDKFPIPVVDELLDELHGARFFSKLDLRSGYHQVRMHTDDIAKTAFRTHHGHYEFLVMPFGLSNAPATFQALMNDVLRPYLRKFVLVFFDDILIYSASWAEHLQHVGIVLETLQAHHLHLKRSKCSFGATSVAYLGHVISEGGVAMDADKVAAVASWPPPRSARGLRGFLGLAGYYRKFIKDFGLIAAPLTRLLRRDAFAWDDDATTAFHALKHALTTGPVLQMPGFAKLFVVDCDASGAGFGAVLHQGAGPLAYFSKPFAARHLKLAAYERELIGLVQAVRHWRPYLWGRHFSVRTDHYSLKFLLDQRLSTVPQHQWTSKLFGFDFSVEYRPGRLNTVADALSRRDSEAAVEDTAMAALAISGPTFSLLDDIRRALAAAPDGQHLLQQLRDGVLAAPWRLVDGLLLHGTRIFVPNYDDLRHQVLTLAHSAGHEGIQKTLHRLRADFYMPHDRALVQDWVRTCTTCQQNKTLAQQPGGLLQPLEVPSQVWADISMDFIEGLPKVAGKSVILTVVDRFSKYAHFIALGHPYTASSVARAFFDGIVRLHGFPLSIVSDRDPVFTGHVWRDLFRMAGVTLKMSTAFHPQTDGQSEVVNKIIAMYLRCVTGDRPRAWVDWLSWAEYCYNTSYHTALRATPFEVVYGRSPPSMLPYTPGTTRTEAADDMLRSRDEMLAEVRQRLLQAQQLAKKYYDAGHREVQFQVGDWVWLRLLHRTFQSLHPRAKGKLGPRYAGPFRVQERIGSVAYRLQLPDGARIHDVFHVSLLKPHRGDPPATPGTLDPVMDGRLLPVPAKVLRAQLRRGVWQVLVQWRGLAEDDATWEKLEEFRAAYPNLQLEDELFEKAGRDVMYGQAYVRRNRAKAAQVGPKAQ

SEQ ID NO: 275191 - protein, 79 aa, Zea mays
  Clone ID: MRT4577_182563C.1.pep
ISGVADGLSEKEPPPLSGPLLSRTRRAGGRGWGSAPPAGTTGGGMVGSGGRRRERARARRQRRAPAALVLLEDMGKTKE

SEQ ID NO: 275192 - protein, 75 aa, Zea mays
  Clone ID: MRT4577_182564C.1.pep
SNSVLEKCDGPIEWRALARSSQPCIHVYLYDTVWWKEAKITFTVSQSKNQKESGDTCKSATMGGTCSRSTPKMEI

SEQ ID NO: 275193 - protein, 42 aa, Zea mays
  Clone ID: MRT4577_182565C.1.pep
PGYRVGMPSCSVQSWRLITNVVTCTAAINNDPSYAIVDALKK

SEQ ID NO: 275194 - protein, 144 aa, Zea mays
  Clone ID: MRT4577_182566C.1.pep
PCLAKISATKNHRETRPPSVRPRVRVNLLDRKSLKTKDLAMQFLVDITEVGTKPCIERMLASQIVEKLVALEKAGDPFGGAVSRYIQGLNMCKKLQSAERAVMKQHILRKVRSAVRGHKLEAILVASVEASIAEGFKGASSSRK

SEQ ID NO: 275195 - protein, 77 aa, Zea mays
  Clone ID: MRT4577_182567C.1.pep
MRASQIVEKLVALQKAGDPFGGAVSRYIQGLNMCKKLQSADRTVMKQHILRKVRSAVRGHKLEAILVASVEASIAEG

SEQ ID NO: 275196 - protein, 673 aa, Zea mays
  Clone ID: MRT4577_182568C.1.pep
MGKALRKETRVEKWEKAISNLSTYATCAPGPVSYVNEKDVETTLTIFGSFEFSLEAMPENSRIFFMALAAISWEEPVPEACLESIWSALEQCGLFSLVVSKLVEGSLIIKLEDQPLYHMHDMVSLYLENKTNDATRALLSDSISYNVALVAPWLFVFGKECMKRPAEQKMGSFFSLLEFMDIEILLVNTTQALMACRSLSELETNRIGFSKILGPRIAEIISIGSLDLIFAVTAAITVIFSPSDYINLAHSLEIAGSIDKLIDLLGACEDTSTLANLSSVLTKISEHVDATIADEILSRIPMVRIADLLTAENEQWHEIVFTTLASLTKVGKLKAVETMIESGIDNKLLVLLGNGSEISQHHAIITLKTFCELGAPLQGCIGPAVLLHLPWHARISLERFVLSDRNVPQSPKPQQSFEVILHNILQRDNKNIIKGIQGLLSLAETANDTRVQDLLLGSHLFDRLAWLLQRREVEKNQVRSQTAFLVMKLACTGGEPYVHRFLELNIVHELIDMLQCNIDELQDSAYYALHQIVFAKGGSLVLQRFLQLRTIEKLVNLLDRKSSKTKDLAMQFLVDITEVGTKPCIERMLASQIVEKLVALEKAGDPFGGAVSRYIQGLNMCKKLQSAERAVMKQHILRKVRSAVRGHKLEAILVASVEASIAEGFKGASSSRK

SEQ ID NO: 275197 - protein, 43 aa, Zea mays
  Clone ID: MRT4577_182569C.1.pep
LVSDSSRQYGSSTRMPLASCIHLIVLSRSTKRRRRVRGRRAGR

SEQ ID NO: 275198 - protein, 58 aa, Zea mays
  unsure (1)..(58): unsure at all Xaa locations
  Clone ID: MRT4577_18256C.1.pep
GEQCSVCVQEIEEQQFFAXLFLDCLENVIISEGCRTLMVLQCAVXDYPLQCDTWLSLA

SEQ ID NO: 275199 - protein, 72 aa, Zea mays
  Clone ID: MRT4577_182570C.1.pep
IQGWLDLASARHSMGPSHFSSTLFDHEEQSAATKLQVVDHDCLKIYRGYALGWRNVTEHRMKTIPRIHPCQD

SEQ ID NO: 275200 - protein, 102 aa, Zea mays
  Clone ID: MRT4577_182571C.1.pep
KNLLVAIDHILLDIRGWAAVCRYIQDHIGPINFVAMACYHTFYVRKLNFARSYFWIFLWLCNPIRMECCVQSFGGWNLYRPDVLSTVVIECILLATSIEISS

SEQ ID NO: 275201 - protein, 91 aa, Zea mays
  Clone ID: MRT4577_182572C.1.pep
PVPGLFHGVQRAPLSSCQQEPGIRGLLTSFLLFLMRVRYARAFTCSYARCVYARRVLQFLLYYGVGHIDSRIWPARSFLCLQKGKWVFCIS

SEQ ID NO: 275202 - protein, 69 aa, Zea mays
  unsure (1)..(69): unsure at all Xaa locations
  Clone ID: MRT4577_182573C.1.pep
KTYDTRQXSISSRRNLTHDGFRSIGSSLKTTNYTFPLIRQNHRPILGHTIPKRRREAYLKLVRLYVSLF

SEQ ID NO: 275203 - protein, 66 aa, Zea mays
  Clone ID: MRT4577_182574C.1.pep
ILISSTFTSSHFAPENHFCLPFSVQSSGTLGYWLRTKFSIPYTNVSELSPKKKEKGRRSRSRTSSR

SEQ ID NO: 275204 - protein, 175 aa, Zea mays
  unsure (1)..(175): unsure at all Xaa locations
  Clone ID: MRT4577_182575C.1.pep
KKPKRKKKQKQKKKKREQKKKQGKKNKQKKKEKKKAPXKKKHKKKQNKNKKKKKKKKKPKXTTNKKNRKKKKKKPNPTQRRNQNQKPPXNRVHGNPARSQTDKGVKPRQGGHQTVGLVVRRERGVGSGIHHGREPRLRPRGGPGPSHRGPSGPRLADGVLVDCTSSSPSLAKKVT

SEQ ID NO: 275205 - protein, 75 aa, Zea mays
  Clone ID: MRT4577_182576C.1.pep
VLTIIFDTRYASLETKRSFIKKHEGVTNLTQSQLRQDDIEMMHPIGRSSYRFSLSWSRILPSELILRITPTVNDF

SEQ ID NO: 275206 - protein, 121 aa, Zea mays
  Clone ID: MRT4577_182577C.1.pep
KQDAGTLEMCNSNTALFRLQSALLAHQCFRKKMAFDSNCHHMYSFIYPCLLRSDEIKNIVWTGLHHLHPRLSFPGSHSPSSFEKVNQPTARNQIFTILHKMVPDHWHVPTSTLGSTRIWLL

SEQ ID NO: 275207 - protein, 102 aa, Zea mays
  Clone ID: MRT4577_182578C.1.pep
KKKKKKFNSILKKKRAALFKNSKFTSPSIQLHIFFLAPPKFNSLPFFLHLFHCKTLCVPQLIRFETHSLFPTFLITKKPLPIPLSKNFPTLIANLTPPFTAS

SEQ ID NO: 275208 - protein, 99 aa, Zea mays
  unsure (1)..(99): unsure at all Xaa locations
  Clone ID: MRT4577_182579C.1.pep
MAAKMGCLVMLLGLHASATTATIFPQYKQAINVFFLPTYLSLTFSFLIXNPILQLYIIQPIVASDILPSSPLFLQQSSLLLQQLPLLNILAQHMRAQQL

SEQ ID NO: 275209 - protein, 57 aa, Zea mays
  unsure (1)..(57): unsure at all Xaa locations
  Clone ID: MRT4577_18257C.1.pep
EMDSMLLTTGVYVIFQNESGLPMYFCSWCDATIASSRLRDCYXWLAAPIKKKGPPLS

SEQ ID NO: 275210 - protein, 107 aa, Zea mays
  unsure (1)..(107): unsure at all Xaa locations
  Clone ID: MRT4577_182580C.1.pep
VAAQTKAIAAKIKVCINVGVAYYPVXSLGXTGKVAXTPAHAQEVHTSLRYWLNANIIPDXAASTIIIFLSSVTTDNCKELSSHSDEDXINARGASLKPDFIDIINAV

SEQ ID NO: 275211 - protein, 75 aa, Zea mays
  Clone ID: MRT4577_182581C.1.pep
WFHLSSSHPLVWAFEIFWDLFEYLNWAKPINPNTSKLELVAWPSAVDCASARPWRALGPRMTCQCPHRTYPPRWP

SEQ ID NO: 275212 - protein, 71 aa, Zea mays
  Clone ID: MRT4577_182582C.1.pep
MARPAPLAWSMSRETASLASPGADCSSICSRAAWRGAEHALEIRERRKTTEGLEARGSRARCCSTGAAARW

SEQ ID NO: 275213 - protein, 99 aa, Zea mays
  unsure (1)..(99): unsure at all Xaa locations
  Clone ID: MRT4577_182583C.1.pep
AALSDQATQPTVLHKLGGSVPTSWIISEGTRXRYTCCSCXSYERXTSLETSMAQSLCYRMVDXIGGINVPWMXTPSAGIVFMXKGGQNFMNDHMMGGVS

SEQ ID NO: 275214 - protein, 71 aa, Zea mays
  Clone ID: MRT4577_182584C.1.pep
INLNNPATITGVGSSADPTRTRRRHGPVNQPPCSVYAPVRFGYRSTRGHGITLRCILKHVDAQSFCCSEFI

SEQ ID NO: 275215 - protein, 243 aa, Zea mays
  unsure (1)..(243): unsure at all Xaa locations
  Clone ID: MRT4577_182585C.1.pep
DMAPPALXLVSVQMCKTTWSEGAGHAREXVPSVIPRVHDEGKQEGCTAAVTMNRHESQAQLPSEHATGFHAGRRRRCYAASRPGSRAPTPPHPSKQARARGHSPAATSGRAAASRRNHRSSLRAIRMQKKEKEIVVRTGRPSRATTVSRSCRHHISQALPPRRPASRCAGAPPHSLAARVSPPRHLGVRASERIAAASSPCRHAGARDPSCCRHHPGGRQARPPPPPPPVPFAGIRLEERAGR

SEQ ID NO: 275216 - protein, 107 aa, Zea mays
  Clone ID: MRT4577_182586C.1.pep
FKLVPKSPKISPPPGGPPFFFPPGGNRGDSKWFGFFLNSDPNFFFFFFGGKLGCNWSFPPPQNLKTGLSPEFSPFLFPPGGGPPYFSPASPPFFWAGGPVTFFFTPF

SEQ ID NO: 275217 - protein, 90 aa, Zea mays
  Clone ID: MRT4577_182587C.1.pep
AVGELIDQCRSLYTLLFSKMYYTVSIMFYMSRLLQSWTHSCTLQRNSPFTSTEKLCGDGIYTGDFSYQAPVQRKWPAKTQVFKDKALFRC

SEQ ID NO: 275218 - protein, 73 aa, Zea mays
  Clone ID: MRT4577_182588C.1.pep
GGPGLLGQKPAPLVPLDLRPPFQQKVGQEGRGVDPRFFPPPLFRVPKGVFNKALLTPLACQNLTLVVLSNPLG

SEQ ID NO: 275219 - protein, 153 aa, Zea mays
  unsure (1)..(153): unsure at all Xaa locations
  Clone ID: MRT4577_182589C.1.pep
KPVTLGEWWAQKIKXAKQLHQLVLGNLGANXSKQHFFPFNQRVALNSAAYLQQQLPFSQLGAAHPQQFFPFNQLAALNSAAYLQQQQLPPFSQLVDVSPVAFLTQQQLLPFYLHVGPNAGTLLQLQQLLPFNQLVLTNPTTFYQQPIIGGALF

SEQ ID NO: 275220 - protein, 86 aa, Zea mays
  Clone ID: MRT4577_18258C.1.pep
KNGPLAMVALVGFWVQQWGDPGPGPLENLASPLAGPWDNNMGDIIIPGSIPPWAQPSCGVRFPGDDWAPPGQRATPGPSRPEINPP

SEQ ID NO: 275221 - protein, 87 aa, Zea mays
  Clone ID: MRT4577_182590C.1.pep
GHVCWSLWLSQTHACSIIASHHYIYTWVCVLLALVLQAYTAFNSTYVIERAIYVPIHPVYLEEGLVGMCSTGLNTLHMHVLPARYEC

SEQ ID NO: 275222 - protein, 197 aa, Zea mays
  unsure (1)..(197): unsure at all Xaa locations
  Clone ID: MRT4577_182591C.1.pep
MAGVPSVTTTFPVRRGERKLVSPARPTPYEFKMLSDIDDQDVLRFYRSGAFFYRSSASKAGLDPAKVIRSALSEALVHFYPLAGRFRELRPTRKLVVECTGEGIVFVEADADVRMDDLGDSLAPPVPCSDELLCEPESPTADVIDRPLLYVQVTRLRCGGFVFGFQICHCIADGTGIVQFLTTLTEYARXGVPGAPT

SEQ ID NO: 275223 - protein, 81 aa, Zea mays
  unsure (1)..(81): unsure at all Xaa locations
  Clone ID: MRT4577_182592C.1.pep
GASSXEPVXXLQXHPXRXXLXCXXFXXLLGXLLFXLIVLXXRTSHISPIXVXIIFCXPPPFIPPPPPPVTKKGNRALRVST

SEQ ID NO: 275224 - protein, 163 aa, Zea mays; identical to SEQ ID NO: 218843
  Clone ID: MRT4577_182593C.1.pep

SEQ ID NO: 275225 - protein, 65 aa, Zea mays
  Clone ID: MRT4577_182594C.1.pep
GSQAHEVWMGKLYLTDPIPNMATDANITGRKAQNAAPSLALKMTLTTYGTIWPLMSTLNVVRWCI

SEQ ID NO: 275226 - protein, 49 aa, Zea mays
  Clone ID: MRT4577_182595C.1.pep
VQKQRIRLHRLLLLLLLLMMMHLLPLDLPAEQAAQHPVIQLQENQNQSN

SEQ ID NO: 275227 - protein, 87 aa, Zea mays
  Clone ID: MRT4577_182596C.1.pep
ELRIPTNWMLDSGMASKMRLASVSLAKLYTKTVLKELDASGTTGNKAALVAQSVRFTYRVHQFAGGLDCEAMHAFEELRRRVQLLSQ

SEQ ID NO: 275228 - protein, 92 aa, Zea mays
  unsure (1)..(92): unsure at all Xaa locations
  Clone ID: MRT4577_182597C.1.pep
VKVVQVYRPRWVIQVXWISRQKVNGSTLNVGFRPSXVIVTKLKIDKFCKALLNCXDRGCSPPKAKGKFTAADVXAATAAGGAATGPSLQEIP

SEQ ID NO: 275229 - protein, 61 aa, Zea mays
  Clone ID: MRT4577_182598C.1.pep
CLFTTSYPQRGGAGASRAAGLPVGSAAVKMNDSDVSKQREEMVPYIKTGDRITNLLNYAHQ

SEQ ID NO: 275230 - protein, 137 aa, Zea mays
  unsure (1)..(137): unsure at all Xaa locations
  Clone ID: MRT4577_182599C.1.pep
EQKKNFFFFLFRNFFCLTGEFRVSAPGVCLGLPWGYPGPGSALLTFRGFLFFCFCLPGAPPRPVGGVPLFSCGLSLPCFYLCLSGAVGAGPLFPLFSPGKKIFFFLRPGEMAFFFLKGGPPPXFFWGGVFSFFFPPR

SEQ ID NO: 275231 - protein, 115 aa, Zea mays
  unsure (1)..(115): unsure at all Xaa locations
  Clone ID: MRT4577_18259C.1.pep
PFPRPWAPPIPGPRATPVVAKSGAKRVSFFLGDMGPPPGQWALLGFXGPSPSNPLKSNFFKTFRAPFPKKGFLPKFLLLGGGSLLAYVRGWGSPAPLPFKKGPQDPPPPGPPAKI

SEQ ID NO: 275232 - protein, 83 aa, Zea mays
  Clone ID: MRT4577_1825C.1.pep
LLLYILTLGVFYINAGVIPLTEQKKKKAPTCYGPAHCCPTELTNHKLGPGAGRNQKNARPPKPRRNRLTPIVSIRGLPDSTPG

SEQ ID NO: 275233 - protein, 63 aa, Zea mays
  Clone ID: MRT4577_182600C.1.pep
AVTLPVAVHCDFEGRYPRVSSGMHSSRRTAVTTFVMVQGWNRTSTVRRSREDNSGLRLIIHVS

SEQ ID NO: 275234 - protein, 44 aa, Zea mays
  Clone ID: MRT4577_182601C.1.pep
IFYGIYYLNLLDFISTILQRTCFINNLYKIESFFVCSVVALNCV

SEQ ID NO: 275235 - protein, 54 aa, Zea mays
  unsure (1)..(54): unsure at all Xaa locations
  Clone ID: MRT4577_182602C.1.pep
MDTQVKLAVEVKVMGRTGSRGQVTXVRVKFLDDQNLLIMRNVKVSVREDVIFIL

SEQ ID NO: 275236 - protein, 538 aa, Zea mays
  Clone ID: MRT4577_182603C.1.pep
RDSKLTRLLKDSFGGTARTSLVVTIGPSPRHRGETTSTIMFGQRAMKVENMVKLKEEFDYKSLCRKLDIELDKLIAENERQRKHFDDEVERIRAEAQCRIAEAERECKITLENEKMKYHEEYLDSIRILEEKWKVHQQSPKKQNKEAESTSNDTGEVHNLLQNEKMLRQSAEDEASDLKNQISHWKKLEATATAEIIKLQKMLDAEASQKEKLEEEIGVLRSQLLQMSMEADETRSLDKGDGPGKIFPGLDSLVSQTRGSQPREQDNGQKQPIAKLFEQVGLQKILSLLESEEPDVRVHAVKVVANLAAEEANQEKIVEAGGLTSLLMLLRSSEDETIRRVAAGAIANLAMNETNQDLIMAQGGVTLLSMTASDAEDPQTLRMVAGAIANLCGNDKLQTRLRGEGGIKALLGMVRCGHPDVLAQVARGIANFAKCESRAATQGNKMGKSLLIDDGALPWIVKNANNEAAPIRRHIELALCHLAQHEVNSKDIINEGALWELVRISRDCSREDIRNLAYRTLTSSPTLEAEMRRLGIKM

SEQ ID NO: 275237 - protein, 92 aa, Zea mays
  unsure (1)..(92): unsure at all Xaa locations
  Clone ID: MRT4577_182604C.1.pep
GSGKQKRISVITQGADPLGVSXDGKGKTFPGVLLPKEKLVSPPGPGDAFVGGFLSPLVLGKGLXNWVGGGFFSPKVFIQGPGGFFPGKPAFH

SEQ ID NO: 275238 - protein, 119 aa, Zea mays
  unsure (1)..(119): unsure at all Xaa locations
  Clone ID: MRT4577_182605C.1.pep
GVSKIDLRSSYHQIKIRASDIPKTAFSTRYGMYEYLVMSFGLXVYLMNLVFMPELDKFEVVFIDDILVYSRNKEEHASHLHVVLQRMREHRLYAKLSKCDFXLKEIKFLGHTMSQKGIT

SEQ ID NO: 275239 - protein, 93 aa, Zea mays
  Clone ID: MRT4577_182606C.1.pep
FHPSTFSIRHSLFNNVPRPHISLFPCAWRIKISQPCIISSRSPQTPFLPPPYSLLSSSSSMAPTFFFIIDLLPHVASFLQVANILFPFLLSSF

SEQ ID NO: 275240 - protein, 79 aa, Zea mays
  Clone ID: MRT4577_182607C.1.pep
GKPGYKKWASCGLKGPIIAPLFFYNQKTWPKRGFLKGETKFGPLFLGSKSTRGSLGLHWRPVQLANAPYPHHIKHPMAR

SEQ ID NO: 275241 - protein, 29 aa, Zea mays
  Clone ID: MRT4577_182608C.1.pep
NNGGGLNNITLIKKSTMTYLPTTLLKNSF

SEQ ID NO: 275242 - protein, 66 aa, Zea mays
  Clone ID: MRT4577_182609C.1.pep
LCLQVDHGLMDQETCLHIRLHCILVMAQFNTIKRLRSTALAVDCVLGWIDNLKPGVCEKINKEKKT

SEQ ID NO: 275243 - protein, 37 aa, Zea mays
  Clone ID: MRT4577_18260C.1.pep
AAPAGGGGGAPAAEAKKEEKVEEKEESDDDMGFSLFD

SEQ ID NO: 275244 - protein, 89 aa, Zea mays
  Clone ID: MRT4577_182610C.1.pep
PSRFSAGRRSCSFFWQPREPASHTSAPTACSAPISLLPLSLDARLLPSPRAPQLDARCSSMALGFFLLKSLRRHVTFAISISSFSVLSV

SEQ ID NO: 275245 - protein, 119 aa, Zea mays
  unsure (1)..(119): unsure at all Xaa locations
  Clone ID: MRT4577_182611C.1.pep
MEAPSTLLQLSLSSSSSLGLLLLLLLLVQLPSMASCHEEMKSIYVGQRVLPVRLGRPAFGPESLAFDHRGDGPFTGVSNGRILRWRGAQRGWTEFAHXTSTRRWPCARRRRGWWCRRAR

SEQ ID NO: 275246 - protein, 94 aa, Zea mays
  Clone ID: MRT4577_182612C.1.pep
TGTSTHQRVSSVGVPATAEVDPRWRKTSREQLMVLGSGSPHDNMSDDTPTHQRPPWFLISQRNGDCEQPRRPCFTPSRAVSGGRGRQGSPAGLE

SEQ ID NO: 275247 - protein, 62 aa, Zea mays
  Clone ID: MRT4577_182613C.1.pep
PLLVSMLLVRLASVSYNDEDRGGVTKAHVNHGMFKAAPWSNWHATYYSGAQRLADTTDRGAW

SEQ ID NO: 275248 - protein, 90 aa, Zea mays
  unsure (1)..(90): unsure at all Xaa locations
  Clone ID: MRT4577_182614C.1.pep
MDWVQAAGDSASWSLALSLEEMLVVVCTLGTAEGRGGAPVVVIRGAALSARTCDEIYLVVRGDTLLSYQDICSEPLILXRHLHVHDPNEV

SEQ ID NO: 275249 - protein, 399 aa, Zea mays
  Clone ID: MRT4577_182615C.1.pep
RLGTLDVGDFLAIGVIFFATDSVCGLQGLHQDETPFLYSLVFGEGVVNDATSVVLFNALQNFDLNHIDVAVVLNFLGNFCYLFVSSTLLGVFTGLLSAYIIKKLYIGRHSTDREVALMMLMAYLSYMLAELLDLSGILTVFFCGIVMSHYTWHNVTESSRVTTKHAFATLSFIAETFLFLYVGMDALDIEKWEFASDSPGKSIGISSILLGLVLVGRAAFVFPLSFLSNLTKKSPLEKITFRQQIVIWWAGLMRGAVSIALAYNKFTRSGHTELHGNAIMITSTITVVLFSTMVFGMMTKPLIRLLLPACSNTATSEPSSPKSLHSPLLTSMQGSDIETGSAQIVRPSSLRMLLSKPTHTVHYYWRKFDDALMRPMFGGRGFVPFSPGSPTEQSVHDGR

SEQ ID NO: 275250 - protein, 89 aa, Zea mays
  Clone ID: MRT4577_182616C.1.pep
WLKALHMNSGSGFRWSMRLPLKIVYSMAVEEEKGPSWLSAFLAAAEGFDEPQTYVVYLIRSFREKGLTMWGKIKWICYGSGLVISSVCE

SEQ ID NO: 275251 - protein, 106 aa, Zea mays
  Clone ID: MRT4577_182617C.1.pep
TGGALYILFFFGTFIHFFKPQFFFFLSKGGDNQTPLQNIPLFFFPTGKLQTHFYWGPFFLRAPKKGRSPWLDTEPQNKPLNLYDRQPSLFKREKTLRPGLTTHPPQ

SEQ ID NO: 275252 - protein, 63 aa, Zea mays
  unsure (1)..(63): unsure at all Xaa locations
  Clone ID: MRT4577_182618C.1.pep
GXSTSPPGAGRDCKHCACARASVRPSNGPRVSQSRFRLLGSCPAGAQRAAVAPARALGYSPAA

SEQ ID NO: 275253 - protein, 46 aa, Zea mays
  Clone ID: MRT4577_182619C.1.pep
SCRRTRLCMMRRWRNTKHTEGSAGRICNRGLRKHTWPQASMSHDVE

SEQ ID NO: 275254 - protein, 74 aa, Zea mays
  Clone ID: MRT4577_18261C.1.pep
FSTHPSLVPLHKNLRGRPPPHKSIFAFCYKHACLKGNKRVISITTETKSHPGGPTRKKNFEAKNGSWGGAGGFN

SEQ ID NO: 275255 - protein, 96 aa, Zea mays
  unsure (1)..(96): unsure at all Xaa locations
  Clone ID: MRT4577_182620C.1.pep
PVWDFLSKETPARLARLREEHRVSILIDGETSDIYVLQLSPQGPPPAPPNXLYLARKALKGLLKEAEKELKKAQRQGELMGCLALGGGGEHPEMHR

SEQ ID NO: 275256 - protein, 73 aa, Zea mays
  Clone ID: MRT4577_182621C.1.pep
MAAAVTLLRLTLDRLSYHLRSVPFSRMAYTRLRIFAFHRLFYYLDHVFCFAYGFAVVAQVVSQPYAEESVEDE

SEQ ID NO: 275257 - protein, 56 aa, Zea mays
  Clone ID: MRT4577_182622C.1.pep
SKLLGPKNNLRPPYILGAGLKIYFKTIALLGGGSRSPVLNPCPIITRWKVKINNLK

SEQ ID NO: 275258 - protein, 76 aa, Zea mays
  unsure (1)..(76): unsure at all Xaa locations
  Clone ID: MRT4577_182623C.1.pep
LXGRXXXPSLXXLGGFLSRCPLXPPAVGWXFXKXGFFCPSLLXXXRRSPLCCCASXLXAVLCPLVXFRPLXXXGXF

SEQ ID NO: 275259 - protein, 192 aa, Zea mays
  unsure (1)..(192): unsure at all Xaa locations
  Clone ID: MRT4577_182624C.1.pep
QILGNXECFEPYTSNIYSRRVLSGEFVVVNKHLLHDLTEMGIWTPALKNKIIYEDGSIQKMEEIPDDLKAIYKTVWEIKQKTLVDMAVDRGCYIDQSQSLNVHMDQPNFAKLTSLHFHAWSKGLKTGMYYLRTRAAADAIKFTVDTGFLKVNGDANGTNGTNGKLAEEDDEAKMAQVVCSLNNREECLACGS

SEQ ID NO: 275260 - protein, 282 aa, Zea mays
  Clone ID: MRT4577_182625C.1.pep
MAGKHGRNGFDDDNVNPFAGGSVPPATNSRLSPLSHEPADFYNVDIPLDSSKDLKKKEKELQAMEAELNKRERELKRKEEAASRAGVVIEEKNWPPFFPLIHHDISNEIPIHLQRMQYLAFSSFLGLIACLFWNVIATTTAWIKGEGVMIWLLAIIYFISGAPGAYVLWYRPLYNAMRTESALKFGWFFLFYMIHIIFCVWAAVAPPFPFKGKSLAGILPAIDVIGKNAIVGIFYFVGFGLFCLESLMSIGVIQQVYMYFRGSGKAAEIKREAARSALSSAF

SEQ ID NO: 275261 - protein, 282 aa, Zea mays
  Clone ID: MRT4577_182626C.1.pep
MAGKHGRNGFDDDNVNPFAGGSVPPATNSRLSPLSHEPADFYNVDIPLDSSKDLKKKEKELQAMEAELNKRERELKRKEEAASRAGVVIEEKNWPPFFPLIHHDISNEIPIHLQRMQYLAFSSFLGLIACLFWNVIATTTAWIKGEGVMIWLLAIIYFISGAPGAYVLWYRPLYNAMRTESALKFGWFFLFYMIHIIFCVWAAVAPPFPFKGKSLAGILPAIDVISKNAIVGIFYFVGFGLFCLESLLSIGVIQQVYMYFRGSGKAAEMKREAARSALSSAF

SEQ ID NO: 275262 - protein, 170 aa, Zea mays
  unsure (1)..(170): unsure at all Xaa locations
  Clone ID: MRT4577_182627C.1.pep
TPCVTRTGRRCPCFQRLEKVLGTEHCHILRVPFRTENGIVRKWISRFERGPYLEXTITDDVAHEIAGELQANPDLIIGNYSDGNLVACLLAHKMGVTHCTIAHALEKTKYPNSDLYWKKFEDHYHFSCQFTTDLIAMNHADFIITSTFQEIAGNKDTVGQYESHMGFTLP

SEQ ID NO: 275263 - protein, 35 aa, Zea mays
  Clone ID: MRT4577_182628C.1.pep
SSNSSEFHREDQTASTEFSCAYHSSLWPYRSSITR

SEQ ID NO: 275264 - protein, 68 aa, Zea mays
  Clone ID: MRT4577_182629C.1.pep
IPLAKKMCNKTLYHGLPKKSLADHTSGEFSDYHTRHETTAKFHVVGEDKPHAGKFVNNLFLKLGSSKV

SEQ ID NO: 275265 - protein, 63 aa, Zea mays
  Clone ID: MRT4577_18262C.1.pep
SPNMTTIFLPSASSTQKQYPWLQPLRLSLCNSQGYCTDLVEEFEAHVVITFFLLLHLLFFLRL

SEQ ID NO: 275266 - protein, 88 aa, Zea mays
  Clone ID: MRT4577_182630C.1.pep
HIDPYQGDKASALLVDFFDKCQRIEEKYTWKLYSERLMTLTGVYGFWKYVSNLERRETRRYLEMLYALKYRTMASTVPLAVEGEPSSK

SEQ ID NO: 275267 - protein, 86 aa, Zea mays
  unsure (1)..(86): unsure at all Xaa locations
  Clone ID: MRT4577_182631C.1.pep
GGSFIRNKKTHGILNALSWGLTLTMGAILTRYLKTSKQTDPSRTYLXVSRQMLSYWIRVSGWKNXIHLGNAVHGDHVTXHRSIRIT

SEQ ID NO: 275268 - protein, 53 aa, Zea mays
  unsure (1)..(53): unsure at all Xaa locations
  Clone ID: MRT4577_182632C.1.pep
WLPQFLSISRHCAALEPSTPXLFRITVXTIALWHARPDRPLARSPGSCTGIPC

SEQ ID NO: 275269 - protein, 572 aa, Zea mays
  Clone ID: MRT4577_182633C.1.pep
SGQDWPEALQQSHAPRHQCKSPDPSTLEKFLGTIPMVFNVVILSPHGYFAQANVLGYPDTGGQVVYILDQVRAMENEMLLRIKQCGLDITPKILIVTRLLPDATGTTCGQRLEKVLGTEHCHILRVPFRTENGIVRKWISRFEVWPYLETYTDDVAHEIAGELQANPDLIIGNYSDGNLVACLLAHKMGVTHCTIAHALEKTKYPNSDLYWKKFEDHYHFSCQFTTDLIAMNHADFIITSTFQEIAGNKDTVGQYESHMAFTMPGLYRVVHGIDVFDPKFNIVSPGADLSIYFPYTESHKRLTSLHPEIEELLYSQTENTEHKFVLNDRNKPIIFSMARLDRVKNLTGLVELYGRNKRLQELVNLVVVCGDHGNPSKDKEEQAEFKKMFDLIEQYNLNGHIRWISAQMNRVRNGELYRYICDTKGAFVQPAFYEAFGLTVVEAMTCGLPTFATAYGGPAEIIVHGVSGYHIDPYQGDKASALLVDFFDKCQAEPSHWSKISQGGLQRIEEKYTWKLYSERLMTLTGVYGFWKYVSNLERRETRRYLEMLYALKYRTMASTVPLAVEGEPSSK

SEQ ID NO: 275270 - protein, 818 aa, Zea mays
  unsure (1)..(818): unsure at all Xaa locations
  Clone ID: MRT4577_182634C.1.pep
MGEGAGDRVLSRLHSVRERIGDSLSAHPNELVAVFTRLKNLGKGMLQPHQIIAEYNNAIPEAEREKLKDGAFEDVLRAAQEAIVIPPXWVALAIRPRPGVWEYVRVNVSELAVEELRVPEYLQFKEQLVEEGPNNNFVLELDFEPFNASFPRPSLSKSIGNGVQFLNRHLSSKLFHDKESMYPLLNFLRAHNYKGMTMMLNDRIRSLSALQGALRKAEEHLSTLQADTPYSEFHHRFQELGLEKGWGDCAKRAQETIHLLLDLLEAPDPSTLEKFLGTIPMVFNVVILSPHGYFAQANVLGYPDTGGQVVYILDQVRAMENEMLLRIKQCGLDITPKILIVTRLLPDATGTTCGXQRLEKVLGTEHCHILRVPFRTENGIVRKWISRFEVWPYLETYTDDVAHEIAGELQANPDLIIGNYSDGNLVACLLAHKMGVTHCTIAHALEKTKYPNSDLYWKKFEDHYHFSCQFTTDLIAMNHADFIITSTFQEIAGNKDTVGQYESHMAFTMPGLYRVVHGIDVFDPKFNIVSPGADLSIYFPYTESHKRLTSLHPEIEELLYSQTENTEHKFVLNDRNKPIIFSMARLDRVKNLTGLVELYGRNKRLQELVNLVVVCGDHGNPSKDKEEQAEFKKMFDLIEQYNLNGHIRWISAQMNRVRNGELYRYICDTKGAFVQPAFYEAFGLTVVEAMTCGLPTFATAYGGPAEIIVHGVSGYHIDPYQGDKASALLVDFFDKCQAEPSHWSKISQGGLQRIEEKYTWKLYSERLMTLTGVYGFWKYVSNLERRETRRYLEMLYALKYRTMASTVPLAVEGEPSSK

SEQ ID NO: 275271 - protein, 48 aa, Zea mays
  Clone ID: MRT4577_182635C.1.pep
TQVQQERRTGYALKAFLNLLLHSVMTYALITETAVRACRSPALGPRSL

SEQ ID NO: 275272 - protein, 45 aa, Zea mays
  Clone ID: MRT4577_182636C.1.pep
RFMDLVWPWVKMLIHGESLICVEKGFRVLSGIYLANCVGKNERIE

SEQ ID NO: 275273 - protein, 219 aa, Zea mays
  unsure (1)..(219): unsure at all Xaa locations
  Clone ID: MRT4577_182637C.1.pep
ASSSITEDEQLCSVLSFKLXGVFKGSNLXRVLGVLSSISFRSAAFFRFGELPVLPTNRRFLDFFPQSKSAKKPCPLEAGFSPSISPHQLNKPFRGGTAAAAAAAAAGAGTHGAGAEPEANRGAEQSGSSRIGPPRHPRVAWGSSRSSDLFCFPPPTRAHPEQTTAWREGGRRSRSGAARHVRVLAAAGRRRVWWREVAAAAESINAACVRWGGETLVPN

SEQ ID NO: 275274 - protein, 64 aa, Zea mays
  Clone ID: MRT4577_182638C.1.pep
SKGIDAKAFGPGGSLDITKLGASSNGKTDSTTSLQDAWASACSSTGKQTMLISRGDFIVGQLNF

SEQ ID NO: 275275 - protein, 68 aa, Zea mays
  unsure (1)..(68): unsure at all Xaa locations
  Clone ID: MRT4577_182639C.1.pep
GTGFFGAPNRVYIEQYEKDSPKTGKDSQDXAPAPLVKVAPKLPKKQKNTGRFAPPVITKNFKNVLKKI

SEQ ID NO: 275276 - protein, 30 aa, Zea mays
  Clone ID: MRT4577_18263C.1.pep
GGAPAAEAKKEEKVEEKEESDDDMGFSLFD

SEQ ID NO: 275277 - protein, 103 aa, Zea mays
  unsure (1)..(103): unsure at all Xaa locations
  Clone ID: MRT4577_182640C.1.pep
MYGIIHKIEXKLHLGGDHEDHEEEHHKQAKEHHKKDDGEHHRKDSGGHKESIKDKINDKITDEHGDQSGDHDEKKDNEKKDKKNHGQGHDHNGGHSNSNCDSD

SEQ ID NO: 275278 - protein, 50 aa, Zea mays
  Clone ID: MRT4577_182641C.1.pep
PAHRAEAAVNLFFLLMSHPRVLTEFLSANERTQRVALVSCLAIDYRLPPA

SEQ ID NO: 275279 - protein, 95 aa, Zea mays
  unsure (1)..(95): unsure at all Xaa locations
  Clone ID: MRT4577_182642C.1.pep
LPSLPFFYPFPPLPPXXTLAAPMPLPRLLLPSLAPRPFPGHQVRRLLRYPDEILSAVLVSAHGGFPAGPLAPVLFGGPSRGLTYTSGAWPLVPFS

SEQ ID NO: 275280 - protein, 92 aa, Zea mays
  Clone ID: MRT4577_182643C.1.pep
NCYHAPGTWQSLIKGRKPNIHSTVPKLFGNRRIHKRARFSYDVFGSDSLAFFRLSMLVPQYQRRALDSRTLTEAASTAGILQPLASVHRFHL

SEQ ID NO: 275281 - protein, 69 aa, Zea mays
  Clone ID: MRT4577_182644C.1.pep
VKVLRGINLGEALCSTEGEPKIGSVWKGPEEGGLWLYQLLLRLSSPASDLVLTVGSPKESELASKEREA

SEQ ID NO: 275282 - protein, 59 aa, Zea mays
  Clone ID: MRT4577_182645C.1.pep
DLFQKISKICMTIGFVNQKTRWLSWCYLVVVLYSGLFGALGMIGVLGIVIYLTHLTSFF

SEQ ID NO: 275283 - protein, 97 aa, Zea mays
  Clone ID: MRT4577_182646C.1.pep
LKRGGFFAGGPRLHTIQKKTFSRLCGGDRAKHDHLIIPGCTHAKRCPPRSTHETGILAGMPHNTRGDYATRSCGGTGPPTYRRNGPRRRVHTPGDFA

SEQ ID NO: 275284 - protein, 38 aa, Zea mays
  Clone ID: MRT4577_182647C.1.pep
SCFPLLHATQRISKAFDLALRQIDRVTVNVSYATWRLC

SEQ ID NO: 275285 - protein, 47 aa, Zea mays
  Clone ID: MRT4577_182648C.1.pep
MEHHNLRTEEIDSLLDKCLLRALYTSIEEKDLPMPGSTLWANHILPN

SEQ ID NO: 275286 - protein, 93 aa, Zea mays
  unsure (1)..(93): unsure at all Xaa locations
  Clone ID: MRT4577_182649C.1.pep
MKGKEKDFALGPKSFSEPNPIGTAAKGTANRDYREPPRAPLFNPGELMSXSFYRPGIAEFVATFLFLYISILTVMGVSNSTSMCATVGIQGIP

SEQ ID NO: 275287 - protein, 102 aa, Zea mays
  unsure (1)..(102): unsure at all Xaa locations
  Clone ID: MRT4577_18264C.1.pep
ENTSADLGVRXPSAAMKLYSSLWNADDWATRAXREKTDWSNAPFVASTGFHVXGCRPPGARFAXTQGARXWDQPEFRDLDAXQYRRLADLGACHXIYNYCTD

SEQ ID NO: 275288 - protein, 75 aa, Zea mays
  Clone ID: MRT4577_182650C.1.pep
HEEATRTIDFVVNQSDFTIQTQRNVTEYMFFAQTITVAAHYLPSEVQGQIDSLKGDLNKAADTISVKTAENYKMI

SEQ ID NO: 275289 - protein, 94 aa, Zea mays
  unsure (1)..(94): unsure at all Xaa locations
  Clone ID: MRT4577_182651C.1.pep
SSGNNAEYAGNLRLHALHTHYTVRPTLPVIAGRECWTHVETIDSFEGKAGSHRNCQEQISGSFADMPRQTVSDHCPVCSTLLIGQPAHLVXCYS

SEQ ID NO: 275290 - protein, 274 aa, Zea mays
  unsure (1)..(274): unsure at all Xaa locations
  Clone ID: MRT4577_182652C.1.pep
MRMRNANGSSWCSRVAVLQQVLGAQASPHGFGVGAGALHLQRLGAATAPAGVESADDAVMPXAPPLLFRALASLNLLLLVGYLLLVLLAKLFARLHXQGRRRGPGKXGWYDGRRCDHRRRRAEATATDDEEYAAADTVEGQQPDALFWFDEAVFEDSAALLMLGDEGKDHHLYAAASTRCLQQVESTSTFPAEESARISPXHREPQRQQHRCDCGAYAAGAGRGRGQGHRRRPACPDDDGRPGTGTTECPCCSGRRRRTTGACLRRIREQAGKR

SEQ ID NO: 275291 - protein, 43 aa, Zea mays
  Clone ID: MRT4577_182653C.1.pep
GYSWILSDNERIEMASLPVNHYSLAHGLSLPNKHHSLHKSLTT

SEQ ID NO: 275292 - protein, 54 aa, Zea mays
  Clone ID: MRT4577_182654C.1.pep
GRVGAVAVRDVQTQYCEGDHNLEDLDDELLGLVLLELLGLYVLIMSVIKPLFAH

SEQ ID NO: 275293 - protein, 167 aa, Zea mays
  unsure (1)..(167): unsure at all Xaa locations
  Clone ID: MRT4577_182655C.1.pep
FLGFPPILGEPVFPPLGELKPLPPPERPGPPGHLARKGKSPPYPNPPSPGGGGFFNTAGPPGFPPGKGAVGPPPLMGGGPPLGPPRVFPXLPGRIXGELWGGNNFPPGTALPLFSPSLGPGPXPSTGPPGGGISPLSGPPGGVKKKKKKKKKKKKKKKKKKKKKKKK

SEQ ID NO: 275294 - protein, 145 aa, Zea mays
  Clone ID: MRT4577_182656C.1.pep
LYADVAESIVGVIVVIIPLFAQVGGINMLNQQLFNPEIFSVMRFLTSHQSYPKVLAHVDITDQTFCASLRRRDVLRSSRVDAAAAGIGRGDSSSPRRLCRTTAAHPCPHCHSAIATAQRVGRCPRASKGRWAAPLLCSLSRRPSR

SEQ ID NO: 275295 - protein, 97 aa, Zea mays
  Clone ID: MRT4577_182657C.1.pep
VRLYLPGQVHANMMLHSSVNLHGGAFMKHTGASLVFQMYNDYVEREVMVYRNPGAYMLLTEEELDLGLERHARVLHYGIISLISDACRSEHIARDAR

SEQ ID NO: 275296 - protein, 100 aa, Zea mays
  Clone ID: MRT4577_182658C.1.pep
YHHHHHRTPAGANDSKKPTPPAALRDLFRFADGLDCALMLIGTLGALVHGCSLPVFLRFFAAACAVQFSSVVLWVGPFTASLHGIRHSDQCRASCVERLF

SEQ ID NO: 275297 - protein, 176 aa, Zea mays
  Clone ID: MRT4577_182659C.1.pep
MVGKKRGVISPLDHLAGLLEVRVVRGVDLAIRDLRSSDPYVVLRIGKAQKVKTRVVKKSINPEWNEKLTLSIEDPAVPIRLEVFDKDTFVDDAMGNAELDIRPLVEIVKMKLQGVADKTVVKKLVPNRQNCLAEESSIYISEGKVKQDLVVRLRNVECGEIELQLQWVHLPGSKGV

SEQ ID NO: 275298 - protein, 69 aa, Zea mays
  Clone ID: MRT4577_18265C.1.pep
NITGDTNIISLPLTLLTPYTFQVSPHLIFAPPIKKHNFTRITKKKNKNPNTPISKKLPKHPHQLTTQTN

SEQ ID NO: 275299 - protein, 140 aa, Zea mays
  unsure (1)..(140): unsure at all Xaa locations
  Clone ID: MRT4577_182660C.1.pep
HSDSYAFGRIAKPNPKTRLGGGEFNPEWDEELTLSMEDPAVPIRLEXFDKDTLVDDTMGNAEGDIRPLEEIVKVKLQDVAXRTVVKKLVPNRQECLAEESSIYISEGKEKHDLVVRLRNVECGEIELQLQWVHLPGSKGV

SEQ ID NO: 275300 - protein, 69 aa, Zea mays
  unsure (1)..(69): unsure at all Xaa locations
  Clone ID: MRT4577_182661C.1.pep
ICKISFGLDPGCLEPXMPVSELADALTTATXLSCTRGAASAPLLWRAKRLLKINPACVCMPGGRGVVCV

SEQ ID NO: 275301 - protein, 152 aa, Zea mays
  unsure (1)..(152): unsure at all Xaa locations
  Clone ID: MRT4577_182662C.1.pep
MAASAXHXTTSXLGQALVSRXAXRRCRXRITXXRTVKSXPHIIWXGPXRPKYLGPFSEXTPSYLXXEFPGDYXXDTAGLSADPETXXXNXEXEGIHSXWAXLGXXGXXXXEXLAKNGVKFGEAVXFKAGAQIFSEGGLDYLXNPXLVHAQXI

SEQ ID NO: 275302 - protein, 130 aa, Zea mays
  Clone ID: MRT4577_182663C.1.pep
QLTQTHAVSQSCFTSPIGRGQMVALQCHGLQSGFWIGLDWIGERSSWSRPGPRLDVRACRLPLHLSSRSHPCVSFQLQHFSSPVSSLPPEAPDDFFFCAITSQIHLLLQRLRGNTCTASFFFMYVFFFFF

SEQ ID NO: 275303 - protein, 151 aa, Zea mays
  unsure (1)..(151): unsure at all Xaa locations
  Clone ID: MRT4577_182664C.1.pep
LFGFFILFYFPCSELPALLSCLSLFSHLRAPANRDCFFPPNVSQKVKTRVVKKSINPEWNEKLTLSIEDPAVPIRLEVFDKDTFVDDAMGNASWTSARXSRVNXCRSEESSIYISEGKVKQDLVLRLRNVECGEIELQLHWVDLPGSKLTT

SEQ ID NO: 275304 - protein, 156 aa, Zea mays
  Clone ID: MRT4577_182665C.1.pep
IMAFLLFVLAQNILEAEGPWSDSFLINASLVFLCEVLIDAIKHSFLAKFNEIKPVAYSEFLEDLCKQILNDKPDDRQKDLTFIPLAPACVVIRVLTPVYATLLPAGPFIWRIFWILLWSVLTYFMLAIFKIIVGLILRCLANWYVNLRLTRKQHVD

SEQ ID NO: 275305 - protein, 103 aa, Zea mays
  Clone ID: MRT4577_182666C.1.pep
LFLIFFFQEVFDKDTFVDDAMGNAELDIRPLVEIVKMKLQGVADKTVVKKLVPNRQNCLAEESSIYISEGKVKQDLVVRLRNVECGEIELQLQWVHLPGSKGV

SEQ ID NO: 275306 - protein, 60 aa, Zea mays
  Clone ID: MRT4577_182667C.1.pep
GLTNSKCNSPHLRLNFCDIHLMFPLIKVTALSRSKHPNILFAEQYIVVEAATIYMNSIGV

SEQ ID NO: 275307 - protein, 145 aa, Zea mays
  Clone ID: MRT4577_182668C.1.pep
PLERPPFFFFFLCEKRSMWVITLMDVQYTKKNAKWLAGRRYRFYTNRQVTLNTIRESHNLSMQGGVTTPCARFVQVVPDLGIAAAPGGGRDFIRGGKNNNGWCSVSCTNCSACFCCCCRWLFQAHTFFLSAGPTFSLTGLWDSMG

SEQ ID NO: 275308 - protein, 67 aa, Zea mays
  unsure (1)..(67): unsure at all Xaa locations
  Clone ID: MRT4577_182669C.1.pep
TRVGRRTPRRKLTVKLLXSRRTTICTLAMALIADRRVRNRITSTEVTYDLVDLILCMTKGKPIDVTH

SEQ ID NO: 275309 - protein, 113 aa, Zea mays
  Clone ID: MRT4577_18266C.1.pep
MKFVAAYLLAVLAGNSSPSAEDLTAILESVGCEVDNEKMELLLSQLSGKDITELIAAGREKFASVPCGGGGVAVAAAGPAAGGGSAPAAEAKKEEKVEEKEESDDDMGFSLFD

SEQ ID NO: 275310 - protein, 108 aa, Zea mays
  Clone ID: MRT4577_182670C.1.pep
NGHPACGTAFRTLGADPLGITPPPDRGKLGEAHEVGNRGGFPEVAWSNSPRWIDIRRRPRQACGRKHPFGSMDPRDRPPGRRPRPWRGLLLCLLFFFLMQMGLNLLGA

SEQ ID NO: 275311 - protein, 121 aa, Zea mays
  unsure (1)..(121): unsure at all Xaa locations
  Clone ID: MRT4577_182671C.1.pep
MVKLVKAGKGRILLQGXFAGRKAVIVRVFEEGTXRNRPMGPCFAEGLAKSQKKVIPRASPKMTAKKFFVKGLYKLVNFXYLMPTQLTSYVIFKDVATGGPDALFTHNKKVAACKTAKARLE

SEQ ID NO: 275312 - protein, 99 aa, Zea mays
  unsure (1)..(99): unsure at all Xaa locations
  Clone ID: MRT4577_182673C.1.pep
MDPQPRIRIPLSSKRVQNPQKVFGGLVKGPQGKELKVQGPVRMPPQVVPLPPRKSPCGEGAPPWGPFXMRVPQRGVGFVRTPNVVQPVPPIPLXPGVEV

SEQ ID NO: 275313 - protein, 69 aa, Zea mays
  unsure (1)..(69): unsure at all Xaa locations
  Clone ID: MRT4577_182674C.1.pep
MIQIYTFYLHNPSTSAINHTTIGXHHQSPNPSNVLPTPPSPSANRTYICPYHGFNKSYIHXYKLNTHFK

SEQ ID NO: 275314 - protein, 80 aa, Zea mays
  unsure (1)..(80): unsure at all Xaa locations
  Clone ID: MRT4577_182675C.1.pep
LRSFICITIITPSKTXITSVKTSSTCSILSKXQKQSIIYSSPPLIYSTSYTRSLEKLXTIHHHIHNYKIWSVNTTHNTTR

SEQ ID NO: 275315 - protein, 117 aa, Zea mays
  Clone ID: MRT4577_182676C.1.pep
VQSTRAQQVYIERLRHSRRWRYSRVVVLVGGLDDVPGAAHALAEDDKVLAPGSPRADRPGLRGSPSPSSCMQVSQRHAVGREIVCHWELCSLSARLTWATGGLRARRDGTRAGCAPP

SEQ ID NO: 275316 - protein, 40 aa, Zea mays
  Clone ID: MRT4577_182677C.1.pep
MRNSQEGVEQEALDPAELVQVEIVNQVNGAPPNEARHRHN

SEQ ID NO: 275317 - protein, 76 aa, Zea mays
  Clone ID: MRT4577_182678C.1.pep
TIQAQDWLAAITSVLTKVIYSLQIWNLLQLINGHHKQIAVFFNNYLSSTVHMLASEQEITHIVQRWRHKNFHCSHY

SEQ ID NO: 275318 - protein, 69 aa, Zea mays
  unsure (1)..(69): unsure at all Xaa locations
  Clone ID: MRT4577_182679C.1.pep
MYCLHKESAVIESYYTMRSLGCPXHDGEDEHYVIWFWLVKDNTHECLLCSRYFVRKVTRDEGDPDGHDD

SEQ ID NO: 275319 - protein, 85 aa, Zea mays
  unsure (1)..(85): unsure at all Xaa locations
  Clone ID: MRT4577_18267C.1.pep
ARVGCEVDTEQMELLLSQLSGTDITELIAVGREKLASVPCGGXGGVAVAAAGPAAGSAPAAEAKKEENVDEKEESDDDMGFSLLD

SEQ ID NO: 275320 - protein, 81 aa, Zea mays
  Clone ID: MRT4577_182680C.1.pep
PLLIVWLSSLLDEDITMSTTTPAAPPHQAPLPSLAGPITRARARDLNFVMLLKNEGPEEYTTSPTAAHSGRPRVGRPRGCA

SEQ ID NO: 275321 - protein, 37 aa, Zea mays
  unsure (1)..(37): unsure at all Xaa locations
  Clone ID: MRT4577_182681C.1.pep
HQRARMLCSGGETQSDRDASIEIELSIGXFRLKXKXT

SEQ ID NO: 275322 - protein, 78 aa, Zea mays
  Clone ID: MRT4577_182682C.1.pep
GGIRKISKYILGLYWCPPEPGNFYKNWGLPPGDFGPMLGRWPHNALTPRKRKFALNFLGCIMAAPTMECFRIEGVTLR

SEQ ID NO: 275323 - protein, 45 aa, Zea mays
  Clone ID: MRT4577_182683C.1.pep
SAELVNPGEFKSVFKYCSWWLFLVLVYACQNLMNNILCFVAYLAV

SEQ ID NO: 275324 - protein, 94 aa, Zea mays
  Clone ID: MRT4577_182684C.1.pep
RRSGPGIMLRLSCHLRKGHIARGTTRPVLLEAHEGKKARASMSQRCQAPLVSMIEDGRPDKRDERFHDGGYSNCSKKHCRCPHWTTDAAYSGSG

SEQ ID NO: 275325 - protein, 81 aa, Zea mays
  Clone ID: MRT4577_182685C.1.pep
MAGRVGGRVGGRVGSSCRVFKPHQTTLRHTVGEAKERQGGAAGKMFDDQDLGFFANFLGIFIFVLVIAYHFVMADPKYEGN

SEQ ID NO: 275326 - protein, 131 aa, Zea mays
  Clone ID: MRT4577_182686C.1.pep
EWRASKHPATRSGGGVCPHCRGDLLCRLCPSCAHVRPCACAAACASPSSSSAAGDAVGRVHSLIEREHRLARSRPVPRGLLRGARGPLGGARCPGPPAERPGFGGAPRFESPRPGRGPRTQGRTDAWAGRV

SEQ ID NO: 275327 - protein, 362 aa, Zea mays
  Clone ID: MRT4577_182687C.1.pep
MEPALRELWAESRDLLGLPSSSLDAAAVAVPRIDLPPTPLAFLRDHVSPGRPLLVSAAATRHWPAASLWPTASYLTDALRSTAVSLHLTPDGRADALSSHPHPHPHPRRPGSSRCFASAHVRHVDFPTAVRLIRGSDPAAGLVAYAQQQDDCLRGEYTAVAGDVDAHVPWATEALGCLPEAVNLWIGNAHSVTSFHKDHYDNIYAVLSGEKHFLLLPPTEHHRLYVRDYPAARYVATEQSSEGGRQLRLKLEMEVPERIVPWSSVDPCPASPEELAVQASSFPLYFDGPAPIRCTVRAGEMLYLPSMWFHHVSQSPGPNGLTIAVNYWYDMQFDIKYAYFNFLRSLEINGCSSGKPDASEGD

SEQ ID NO: 275328 - protein, 105 aa, Zea mays
  Clone ID: MRT4577_182688C.1.pep
NGAGSQNWAQNLGSLANGAPSLLSVRGPFRPPQKQNMGANYSPVPKRPPQMPNIGKGGKQNFSKRGGGRRPPPFFFKNGLWVLCTKTRGGVGAPKIWGGGFKFFF

SEQ ID NO: 275329 - protein, 87 aa, Zea mays
  Clone ID: MRT4577_182689C.1.pep
VRARLPRPSMGTAHRVAATLLWSLPSHHDASLILRSPSDKTCPTHVTYGRYHRWSTASIPDNSPPLELLQAPIYHDEYTGNVCREKD

SEQ ID NO: 275330 - protein, 319 aa, Zea mays
  unsure (1)..(319): unsure at all Xaa locations
  Clone ID: MRT4577_18268C.1.pep
SALCKGDQRSGDVXDMLRKYMSLVQLLESVDLGGMKNEEKLAFWINVHNAMMMHAHIEYGIPQSNSKRILLTKVSYIVSGQRVNAELIEYQILCCRAHSSGQVRLYSPKSLFQDMEAAEEEHIAVDRARXLVHFALAVATRISGXARRLHQTHTQXRPVXKFQRDAHIHHVRHENSDAFISFNPTLPFQVRLYSPKSLFQQLEAAKEEHIRANVAVGVRGRGQRKIILPRALELYARDAGLGAQEVVAAVACHLPDGLRDAVRRSPPAGRARGGVEWKPHNLAFRYLLAKELVGGSPACGRQQLKKCGPPIGAPLRADR

SEQ ID NO: 275331 - protein, 208 aa, Zea mays
  Clone ID: MRT4577_182690C.1.pep
ASEGVHSMSNTSGARRAARRQSLDGSADKVVVDLDASSPVAGNHHGLSVFPGARTSPIDVEALDDEVQALSPSQVPPPGVNRRTRGQPVTQFSLDEDAVLEENWRIIRQCATPFCLDEDAAMEENRRTRSQFLTPLYLDEDAALEDNAAMPSHNTWNKRQRVAPLICLSPEREEGSSLQSNNAVQISQGLPKGGWFPRNRISLGPGGL

SEQ ID NO: 275332 - protein, 67 aa, Zea mays
  Clone ID: MRT4577_182691C.1.pep
SFPGLQQQVPPELEQFKFHPSPHVGYRPLFSSSEFFRSGVMPLSAVIFFFRNWGGETVLGPQILGGG

SEQ ID NO: 275333 - protein, 42 aa, Zea mays
  Clone ID: MRT4577_182692C.1.pep
CRSHKRGRAPNNTAPGDWGCIAEKKRMRGWMCGRTRGSRRFF

SEQ ID NO: 275334 - protein, 82 aa, Zea mays
  Clone ID: MRT4577_182693C.1.pep
LAQRVLQWHIPSTTPMSNKASQNQPRRNVPPLIQLIRQINHFGGESPPPKLYPAEKREISKVLIHNQVNTRSIHDAAAKYTI

SEQ ID NO: 275335 - protein, 44 aa, Zea mays
  Clone ID: MRT4577_182694C.1.pep
EFPNCGLPRKCLCVGNLFAAITSQAWIILQTIATAYLFHYGSSE

SEQ ID NO: 275336 - protein, 73 aa, Zea mays
  Clone ID: MRT4577_182695C.1.pep
FLVHELRQHSKAADERAAAAKGSFKKKEVGNPTALWMLNHWTIRLVLRTLGKLFIVLQIEGPTLGALKLGPFG

SEQ ID NO: 275337 - protein, 105 aa, Zea mays
  unsure (1)..(105): unsure at all Xaa locations
  Clone ID: MRT4577_182696C.1.pep
TXSVRSVGLGVHPREXEPQTQPTRXGRREGGASPPLRCSPPGSGRSTRARPRWRYGAGQSLSLMGALELKGSMADRLAFAPPRPAAQQPQLAAQKKKSCTVRRFP

SEQ ID NO: 275338 - protein, 63 aa, Zea mays
  Clone ID: MRT4577_182697C.1.pep
FSSKTDGGEVHSHEYRYALVGTLSSNKRPTVAVVSHQECGPQGNDRPQGHQDSVPNTKDATCR

SEQ ID NO: 275339 - protein, 126 aa, Zea mays
  unsure (1)..(126): unsure at all Xaa locations
  Clone ID: MRT4577_182698C.1.pep
WLFLAPVLCCSPXVPSWVFFLXPVPVSVCVVSPWRLFCARRPFARRLWFRGRLRVPRPLRLLVGGSVVWWRWLPVAFVRLFACWCRLPRGPGGRGRRASPSWCRSGSPALWGGWRFGLAPLGGXPA

SEQ ID NO: 275340 - protein, 382 aa, Zea mays
  Clone ID: MRT4577_182699C.1.pep
MRQPTSAGGDAGFLRADQIDLKSLDEQLERHLGHPAERVVGPVSGTGSRRGETAKLGPEELTPLQRCREDWEIDPTKLIIKGVIARGTFGTVHRGVYDGQDVAVKLLDWGEDGHRSEQEIGALRAAFAQEVAVWHKLEHPNVTKFIGAIMGARDLNIQTEHGQLGMPSNICCVVVEYLAGGALKNFLIKNRRRKLAFKVVVQIALDLARGLCYLHSKKIVHRDVKTENMLLDKTRTVKIADFGVARVEASNPSDMTGETGTLGYMAPEVLNGHAYNRKCDVYSFGICLWEIYCCDMPYPDLSFSEVTSAVVRQNLRPEIPRCCPSSLANVMKRCWDANPDKRPEMAEVVSMLEVIDTSKGGGMIPKDQTQGWLSCFRRYRGP

SEQ ID NO: 275341 - protein, 92 aa, Zea mays
  unsure (1)..(92): unsure at all Xaa locations
  Clone ID: MRT4577_18269C.1.pep
LVRHCHAINTTYTHRSTKKPNVYARTCRSDSHINHQKTQQRRSASSTIVPCQPHSRGPSPSYQLRRGLLRQCLQHGGRXCGAHVLQRWPQVL

SEQ ID NO: 275342 - protein, 79 aa, Zea mays
  Clone ID: MRT4577_1826C.1.pep
SELKTYFSSPNEGRAIWTTLAKTQRFFLGTFSWGSNIQEGNLPPPGFGPGNRGGKTRGHGPYFHGVAPQHPEEGRVLLD

SEQ ID NO: 275343 - protein, 99 aa, Zea mays
  Clone ID: MRT4577_182700C.1.pep
FMEPNLGMLTWVSAPLQMRFRLMLLSRNDPLSCGLLLMFGRFVNTTVICLKACVGIAMWGLCDSMETLLSYCTLKSNNLRDCGKKKKKKKKKKKKGGTI

SEQ ID NO: 275344 - protein, 160 aa, Zea mays
  unsure (1)..(160): unsure at all Xaa locations
  Clone ID: MRT4577_182701C.1.pep
HGCLHGARIYAENAIRKRTEXMNYLRLASRLDAVVARLDTQAKMQVIGKSMQSIVKSLDSSLATGNLQKMSETMDNFERQFVNMEVQAEFMEGAMAGSTSLSTPETEVNSLMQQVADDYGLEVSVGLPQAAAHAIPAAKDKEKVDEDDLSRRLAELKARG

SEQ ID NO: 275345 - protein, 142 aa, Zea mays
  unsure (1)..(142): unsure at all Xaa locations
  Clone ID: MRT4577_182702C.1.pep
MASSISAPAPPAAPATAPASGRPKKPSQFNPSTGKTRTPVPARPMRAAAPKWNPLQRLAAAALDALEEGLVAGVLERAHPLPRTADPAVQIAGNYAPVGERPPTGELPVSGRVPACLDGVYVRNGANPLHAPRAXHHLFDGD

SEQ ID NO: 275346 - protein, 80 aa, Zea mays
  Clone ID: MRT4577_182703C.1.pep
IISHGWISSCVIVNELVPFILQPMNVFVLGMMQSCDSELLYPCDGLRWSCDKCAPACAFLSFSVCAGARSRLRVGMSATG

SEQ ID NO: 275347 - protein, 126 aa, Zea mays
  unsure (1)..(126): unsure at all Xaa locations
  Clone ID: MRT4577_182704C.1.pep
ITHIFATXKDHRKAKPFHDHVFVFSIVDGHVWFRNYQISVPHNEIDKVDKGGMDKMTLIEVGPRFCLNPIKIFGGSFGGPTXIRALEKRQKAGKYAKKVKAKVRRKMHEMENTLEPDEFAELWKGE

SEQ ID NO: 275348 - protein, 36 aa, Zea mays
  unsure (1)..(36): unsure at all Xaa locations
  Clone ID: MRT4577_182705C.1.pep
MCXCHISFSSCXVCLXLSKAIVLYKYEXASKTXPPX

SEQ ID NO: 275349 - protein, 87 aa, Zea mays
  Clone ID: MRT4577_182706C.1.pep
MWNFGVCRDANGKLSAFHVWCRRYASLLACGSGRKTCCPCPYHGWTYGWAGSLLRAARISGINSFNQTDGGPIPIRVATCGPFVLIR

SEQ ID NO: 275350 - protein, 322 aa, Zea mays
  Clone ID: MRT4577_182707C.1.pep
MAKKRKHTDAQAETAGAEKPDDSAPARPERTLFGFKDPAPDAVPDSAASRAAVAPFRNREKVLITCSRRITYRYRHLMQDVLSMLPHAKKDSKVESKQSKGNALNEMLELRSCSSCLFFECRKQKDLYLWMVKSPGGPSVKFLVNAVHTMEELKLTGNHLKGSRPLLTFSTNFDEQPHWKLVKEMITHIFATPKDHRKAKPFHDHVFVFSIVDGHVWFRNYQISVPHNEIDKVDKGGMDKMTLIEVGPRFCLNPIKIFGGSFGGPTWYENPYYISPNQIRALEKRQKAGKYAKKVKAKVRRKMHEMENTLEPDEFAELWKGE

SEQ ID NO: 275351 - protein, 180 aa, Zea mays
  unsure (1)..(180): unsure at all Xaa locations
  Clone ID: MRT4577_182708C.1.pep
PCEDSEDDHXESKAXDSAWCKTYPWHCGTGRRNAFIVIKNRTXQGVKCSTSKSGXHGHRXAHFGRXDIFNDKKAFATIFAPSSHECYIPHGQRTDDHVIEISDDGFESLLTXQGNTKDDLRLPTDDDSCGPIXVRGSNSXKDLVATVQXAMWDEQICAIDDAGHQITSLYWKTEPYCIST

SEQ ID NO: 275352 - protein, 346 aa, Zea mays
  unsure (1)..(346): unsure at all Xaa locations
  Clone ID: MRT4577_182709C.1.pep
MAKKRKRTDAPAEATGAEKPDDSAPARPERTLFGFKDPVPDAEPASAGAEAAVAPFRNREKVLITCSRRITYRXAPCFFRLQSCEMGDSVHACVLGXYRHLMQDVLSLLPHAKKDSKVESKQSKGNALNELLELRSCSSCLFFECRKQKDLYLWMVKSPGGPSVKFLVNAVHTMEELKLTGNHLKGSRPLLTFSTNFDEQPHWKLVKEMITQIFATPKDHRKAKPFHDHVFVFSIVDGHVWFRNYQISVPHNEIDKVDKGGLDKMTLIEVGPRFCLNPIKIFGGSFGGPTWYENPYYISPNQIRALEKRQKAGKYAKKVKAKVRRKMHEMENTLEPDEFAELWKGE

SEQ ID NO: 275353 - protein, 113 aa, Zea mays
  unsure (1)..(113): unsure at all Xaa locations
  Clone ID: MRT4577_18270C.1.pep
MKFVAAYLLAVLAGNXSPSAEDLTAILESVGCEVDNEKMELLLSQLSGKDITELIAAGREKFASVPCGGGGVAVVAAAPAAGGGGAPAAEAKKEEKVEEKEESDDDMGFSLFD

SEQ ID NO: 275354 - protein, 374 aa, Zea mays
  Clone ID: MRT4577_182710C.1.pep
PTRPANQAALQSRHEASRLRSLGRRAVRQAYLYTPTAATATSSSPEFGASTSEAWDGRFRLHKPRGQHLLTNPRVLDAIARHAAISPGDAVLEVGPGTGNLTARLLASQAARVTAVEIDPRMVEAVTARAAALGLAHKFKVIAGDAVEVEFPEFDVCVANIPYGISSPLIAKLLFGPYRFRTATLLLQKEFARRLVAAPGDGEYNRLAANVRLVADVRLLMDVSKRDFVPMPRVDSSLVEIRPRGTVPGVDVSEWLAFTRVCFGQKNKTLAAIFKQKRMVVELLRRSLRTERCAGGVSLGPLEVDDSGEDDCGGNDDGSNRVVGFSEEEVAAFKEKVAGALDTAELAGKRPSKVSNDELKRLLRLFNDRGVRFQ

SEQ ID NO: 275355 - protein, 62 aa, Zea mays
  Clone ID: MRT4577_182711C.1.pep
FVRYGISGMLSGSVDWRPFDVSSLPFIEAVLVIVWRPCVYINQPMVRLVCCKSNRFLFLFDS

SEQ ID NO: 275356 - protein, 58 aa, Zea mays
  Clone ID: MRT4577_182712C.1.pep
RSRVRRRLGRENFLNELADNAHVDKVAAVCRDGLLTGTGEKLSPAEPKKPKTIEAKAG

SEQ ID NO: 275357 - protein, 64 aa, Zea mays
  Clone ID: MRT4577_182713C.1.pep
DCIALTLVNIFQWMAFHCRIQSAVRINKTKFQQLDKGAKVVAGSGLIQAGGLAAELDGDGITEG

SEQ ID NO: 275358 - protein, 80 aa, Zea mays
  Clone ID: MRT4577_182714C.1.pep
TCTRNPPLLYTSRALQFLSSNQYPQFSPSPSKNVFVSKNQKIKNKKKYFLKKKKKKKKKKKKKKKKKKKKKKKKKKKKKL

SEQ ID NO: 275359 - protein, 72 aa, Zea mays
  Clone ID: MRT4577_182715C.1.pep
FLWGLLLWSALLPCPALVRSCSSSLSWPPPLAWRLLWFAVSGWCLFCLSGLAAALLCWCAGRWVAPGVPAPP

SEQ ID NO: 275360 - protein, 87 aa, Zea mays
  Clone ID: MRT4577_182716C.1.pep
GLDRRLIPRLVQPSSVQDVGRGSYCAVFDGCCDPVRGTPLVRPALIFTVFCFPARFCMNRSWKRACPIRRNEVLPHDVQCFYTLHLR

SEQ ID NO: 275361 - protein, 131 aa, Zea mays
  Clone ID: MRT4577_182717C.1.pep
NMDALPQEDDGHIVRLSTRHHLQSLLHHPLARTCPAGRLRTCLVLLPHSQLLLATIGGGQGHGVAVWAVAVGSGEAWPAGARRGRARTVRLRRTVRRDGRARARAARAWTADGPAARRAALQRGLGERRGR

SEQ ID NO: 275362 - protein, 183 aa, Zea mays
  Clone ID: MRT4577_182718C.1.pep
FLVRKRNPLSPLTVAAPLCSFHFSPELELNRGTTCRRLGEASAHSKLYSGDDSLVMLVIDTNHFFWAATALPFTDSFARSNSLLLLDHVNRVVISWRESTRVLAPWILATPALRWCGHLGHLRQDKPQGGVLCSGCARQSRYRRRRWRLLPQRTLWLLDSLWRPRFEEKNSWFRRSHTTRSLI

SEQ ID NO: 275363 - protein, 42 aa, Zea mays
  unsure (1)..(42): unsure at all Xaa locations
  Clone ID: MRT4577_182719C.1.pep
LDQGDYGVRVLIKPXPXEVVSFDQRERGLLTSLAFRRTRGRT

SEQ ID NO: 275364 - protein, 111 aa, Zea mays
  Clone ID: MRT4577_18271C.1.pep
MKFVAAYLLAVLAGNSSPSAEDLTAILESVGCEVDNEKMELLLSQLSGKDITELIAAGREKFASVPCGGGGVAVAAAAPAAGGAPAAEAKKEEKVEEKEESDDDMGFSLFD

SEQ ID NO: 275365 - protein, 134 aa, Zea mays
  Clone ID: MRT4577_182720C.1.pep
HRLLLTDIGGPAHLWPKRSLPYDELVPSKNAKHKNGGGAIILLEKKNFSLVGGFKESCQYPMIGVVGCLHRAVWSFSAQGLESFEGRDGTTRAFLSNMTLVHSHKLKHFDAPTGSGGHSHGGLPFPANTGHKLL

SEQ ID NO: 275366 - protein, 99 aa, Zea mays
  Clone ID: MRT4577_182721C.1.pep
KKKEGKNPGEPQKKNPEKKTLFKRGGKKKKAPTKSLSKNLGKRKGQWDPPLNGQKKGGGGGGTPKVTLTFGTALWPVFFFFFPSFFGLSGGFPKKGLNG

SEQ ID NO: 275367 - protein, 84 aa, Zea mays
  Clone ID: MRT4577_182722C.1.pep
PPVPAVGLHHYHKIVLRCLPRSMQRSESGDSMIRQECCLCSSMLCSICSAFRSFFVFYARVGPILWGISMLYELVNALILYLVG

SEQ ID NO: 275368 - protein, 77 aa, Zea mays
  Clone ID: MRT4577_182723C.1.pep
IEPRHERKEVPEPKSGFQQRRTTPKRPKDARDTEQTLTWPQRHVQVPMVQVTKQTPRPGHREYQPMLNERAPWQRVT

SEQ ID NO: 275369 - protein, 118 aa, Zea mays
  Clone ID: MRT4577_182724C.1.pep
DPRSIQKAWEVLRHPTSRADYDKQLQSSRQSIEIIASEIQVGDMIVESAAGALELLYPCRCGDYFSITSGELSGMGIVVTRDGEEVEELQASDSASASVVLGCGSCSLKIRLVIDGSS

SEQ ID NO: 275370 - protein, 1057 aa, Zea mays
  Clone ID: MRT4577_182725C.1.pep
MAAPRATKRPKFASGAAPPQRGEDDYVPGNIVEIELFNFMTYDRLVCCPGPRLNLVVGPNGSGKSSLVCAIALGLAGDPSILGRASSVGAFVKRGEVAGHVKISLRGDTADDKICVTRKIDTKNKSEWLLNGATVTKKEVIDVIKKFNIQVNNLTQFLPQDRVSEFAKLSPIQLLEETEKAVGDPDLPIQHRQLVERSKELKAFEVAIRQNEQTLNNLKALNAEQERDVERVRLRDNLLRKAESMKKKVPWLKYDMMKKEFIEVIQEKEKIAKQEMEEAARVWEDSKGPIDKLKKHKATHTSNIKKISGQVNQNMDNRHKVMDHDLKLNAELKATFDEMDDLKKQEKSRQRRILKTKEDLAAAEKELEDLQPYELPKAEMAQLTDQIARISVEIKNLKAERNAMESQLAREEESLRRCSDRLKEMESKNSKLLQALRSAGADKIIEAYHWVQANKKNLRQEVYGPVLLEVNVQDKLHATYLEDHVPNYLWKSFITLDASDRDYIAREMKQYGIPVLNYLVREGTRRRPLNITPEMEQLGIYSRLDQVFQAPDTVKDVLISQAGLDDSYIGTDETHRRADEVSKLGIYDFWTPDNHYRWSKSRYSGYMSAFVDAIHPSRLFKSNLDVSGIEDLRLQKEDHVTNIEGMREAIKTLHRKQRQLEDEEANIHRQKEEIINAMRYHKKTREEIQRRVDIKKRILKDISREDDVESSTRKLVNQVAKINDERFHAMIKLKDLLTEAVALKWSHTEKNMTLIELDTKIWEMEKGVKKLEKDANQAARNYEDCRRITQEHRRRLSIAKQNAESIAMITKDLEKEFCAMPTTLEELETAIQDTESEANSMLFLNQNVLQEYQNRQHEIESISNKLKDDKGEHEICCSEIETVKGKWLPTLRILVSKINDTFSRNFQEMAVAGEVSLDEHGIDFDHYGILIKVKFRQTSQLQVLSSHHQSGGERSVSTILYLVSLQDLTNCPFRVVDEINQGMDPINERKMFQQLVRAASQINTPQCFLLTPKLLPDLEYSDACSILNIMNGPWIEEPAKAWSSGDCWRTVVSAAGH

SEQ ID NO: 275371 - protein, 131 aa, Zea mays
  Clone ID: MRT4577_182726C.1.pep
MKGAWRQSGVAAVAEHLGHLGGAGLVGRALPVRLCLYGLTLTFAGFAVFLCFAPSLIVPPASSPGVAWFDDGLIASASPYRAQVSGFLSSLFPANSSSTVPPGGVAVSCSRNGSSAVRRGEQLGSVGGVSV

SEQ ID NO: 275372 - protein, 174 aa, Zea mays
  Clone ID: MRT4577_182727C.1.pep
MVLTSNISVQKTLYEVLSVSEDATYDEIRAAYRSAALNTHPDKAQTTLESSSVPSTEQQEFSSVQKAWEVLRHPTSRADYDKQLQSSRQSIEITASEIQVGDMIVESAAGALELLYPCRCGDYFSITSGELSGDGGLSSLGNGEEVEELQASDSASASVVPGCGSCSLKIRLVL

SEQ ID NO: 275373 - protein, 177 aa, Zea mays
  Clone ID: MRT4577_182728C.1.pep
MVLTSNISVQKTLYEVLSVSEDATYDEIRAAYRSAALNTHPDKAQTTLESSSVPSTEQQEFSSVQKAWEVLRHPTSRAYYDKQLQSSRQSIEIIASEIQVGDMIVESAAGALELLYPCRCGDYFSITSGELSGMGIVVTGDGEEVEGLQASDSGSASVVLGCGSCSLKIRLVIDGTS

SEQ ID NO: 275374 - protein, 426 aa, Zea mays
  Clone ID: MRT4577_182729C.1.pep
MPLAGRRDGPLMLRGGGGGKPLSRGSRIAVAVAVGVALGCVCAFLYPNGLFFRPSASALQWTHQVDSTACESSRQVTNLKSQVSSLERENVELRRQINELSMKLQIAGQGENETLYKPGPFGAVKALRTNPTVIPENSVNPRLAKILEEVAVKKELIVALANTNVREMLEVWFSNIKRVSIPNYLVVALDDNIESLCKSKGVPVYRRDPDEGIDNIAKTGGNHAVSGLKFRVLREFLQLGYSILLCDIDIIFLRNPFDHLYRDSDVESMSDGHNNMTAYGFNDVFDEPSMGWARYAHTMRIWVYNSGFFYIRPTVPSIELLDRVAGRLSREPKSWDQAVFNEELFFPSHPGYEGLHASRRTMDFYLFMNSKVLFKTVRKDAGLKKLKPVIVHLNYHPNKLERMKAVIEFYVNGKQDALDHFPDGSE

SEQ ID NO: 275375 - protein, 67 aa, Zea mays
  Clone ID: MRT4577_18272C.1.pep
FWIHSYDHHFIFMLCFIFFFLNINRGALFHKDHNVKCNFVHLLYRGMLKRYISHYALFEHQPRCTLS

SEQ ID NO: 275376 - protein, 271 aa, Zea mays
  unsure (1)..(271): unsure at all Xaa locations
  Clone ID: MRT4577_182730C.1.pep
GRATRPLEAGARGFPSTARAQRPVQASALSLNRRLLLRRDSDTPACVSPGAGRGHWRWEAVAGVRGLWLCAAFLSADEQARLLNAIQREGWFINADNQAMRFGDLPSWVVELSALIREAICVGDAGVGLGAEATNEDEDACPLPSDLLWREPFFDXMIANRYRLGEVRNCLRFTRKTYVSFRKGMHSFLFALVTWITLLLSSXGICAHVDLMRFDDGIAIVSLESACVMRFSRAEPASDTPKQGGSASESTAEVPVLLNPGSLALMSGDTC

SEQ ID NO: 275377 - protein, 43 aa, Zea mays
  unsure (1)..(43): unsure at all Xaa locations
  Clone ID: MRT4577_182731C.1.pep
WAGETPIFSHPCXPSPPSRGGRTLPWLHXTASNXLTMVPSPWP

SEQ ID NO: 275378 - protein, 259 aa, Zea mays
  unsure (1)..(259): unsure at all Xaa locations
  Clone ID: MRT4577_182732C.1.pep
MAAAGDGGESHCREALREAFGDSSSSDSDTPAGVSPGAGRGHWRWEAVAGVRGLWLCAAFLSADEQARLLNAIQREGWFINADNQAMRFGDLPSWAVELSALIREAICVGDASAGLGAEATNEDEDACPLPSDLLWREPFFDQMIANRYRPGXICAHVDLMRFDDGIAIVSLESACVMRFSRAEAASDTPKQGGSASESTAEVPVLLNPGSLALMSGDARYLWMHEINRKPGRQLWDGRELEQRRRTSVTLRKLLPYTD

SEQ ID NO: 275379 - protein, 68 aa, Zea mays
  Clone ID: MRT4577_182733C.1.pep
YFSFQAHSPYRLSRDTIQVFSVQLLSTQTACARSKRKGMEHLASEWTSPAVTRSPRSIHARGTLTSSP

SEQ ID NO: 275380 - protein, 50 aa, Zea mays
  Clone ID: MRT4577_182734C.1.pep
VAECPPSSWWGSVSYSLNVPLVVERYEIKGKRMFGKKKRTKKKKTLGPRS

SEQ ID NO: 275381 - protein, 67 aa, Zea mays
  Clone ID: MRT4577_182735C.1.pep
YPLNSNHTHMWVNFQSLINKHIAARPKPLFLHLTLKDPRISHPEHASVQPISYYGREPDMHGELMIP

SEQ ID NO: 275382 - protein, 75 aa, Zea mays
  Clone ID: MRT4577_182736C.1.pep
SSVSCLSTYSGVHLLSHQAGSLGQLGHMLRYMVDLPMIPSKGCSSDPAGMVDAPQHQDQRLAGGKLTHHACSIGS

SEQ ID NO: 275383 - protein, 73 aa, Zea mays
  Clone ID: MRT4577_182737C.1.pep
GGWWAVNPALSIPVPIVHPNVGVTSPSAVPALGVWRVLHLANSILAEPPAPPRRRAQSTESESDQNRELSIPG

SEQ ID NO: 275384 - protein, 794 aa, Zea mays
  Clone ID: MRT4577_182738C.1.pep
MARVRSTARVTHDGEEAEATETAPISEVMKQSGMVVIEGVTDEGAPAAEAEQADIEEDDVDEEEEDYSTLMPSKPSHLDFGKSTISEADMSMMIKLGYFEEAEKKLIHFGGEETTLTPKKMRWLNVFIWALRSQGIDLNAEAFCRVHELHYQTKAREDGLHENFGCYNFAYRKYMKTLVVSYCTKWPTGWKNEWFYVKADEKKKEKLNTLVLSPLSLSYGLTRPLCRMVPWSPCREVVSEFRVVAEEIGTRDLVQEYLAYKVFPTLSEWNMPKLKGTKEKNELVRLPYKFKFEKQFKGPCQEWLEMIETMCNEILGNYTKKEDQLMTAAFSTRPKRRLNRVMDALNFEYPNYERLNKGAKGQKRKRIVSVLSRHAARMVKEDEEILKRRKSSPEPKVAAPKKRKFAAPKPRTTAIEEEAPSTPSAADMEEILKVMTESLPITLSPLGPHLTKLLQKKGEPSVAKKIAGPKKRRIITVIEAIEETPPPASASKTPAAEDAAATEAAPAEAADAEAETAEDTNLEGTFSNIDKMLLNMAAEEVDAAAEETMVVSAQSMLLSKALRMQQDLEDKKHEVIIEGIESKIKDHEAALEKKDFELQSMEGLLAEAQAKIGRLNSEVLAKTENFEQEKQKFGAKLEAEVEKSSNLQKSLKELQDKCVDFGNRCVQRLKQVFNSVGASSEKFKPSVEDLPGTFELIDGEVDALDEVMAGHDNFCALLASRGTVVAFMKTGCTHEKIVNRPNFNLSPADLNDIPSLARSIGNRFITQIWAKGGRSLAGDEARSHLKPDDEAEEQ

SEQ ID NO: 275385 - protein, 233 aa, Zea mays
  Clone ID: MRT4577_182739C.1.pep
MAKPRRGRSGSRSSSGSSSRSASSGSSRSRSRSRSRSLSSSSSSPARSRGRSPPAAKRSSPGAKKGRSPSPALKKGSPSRKGRSSSPPPKKASPPRKASPPPQSVVLHVDHLSRNVNEAHLKEIFGNFGEVVNVELSMDKFVNLPLGYGYIEFKKRTDAEKALLYMDGGQIDGSVVKLKFTLPPRQRASSPLKPPPPPPKRDAPPNDKVAIGAEKDAQQRAGGSASPRKKPAS

SEQ ID NO: 275386 - protein, 174 aa, Zea mays
  unsure (1)..(174): unsure at all Xaa locations
  Clone ID: MRT4577_18273C.1.pep
MCPSSEIMEKKGKAKEHKRTTSLHAGTTTRKMPLTPPPQPAKAAFDPSRCSVDGGXWAYNRSKELLYTDQTCPFIDRQVSCQRNGRPDSDYLXRWDWHLDDCSLPSSTPVALLETLXXEAXMFVGDXLXNXQWLSMVCXVNSAGLYTARSMERSTXLVVFTXTXYNAXTIEFYW

SEQ ID NO: 275387 - protein, 56 aa, Zea mays
  unsure (1)..(56): unsure at all Xaa locations
  Clone ID: MRT4577_182741C.1.pep
ITFTLLKKKKIKKKKKKKKKKKKINXKKIKKKKKKKNKKKLKKKKKAWGVPPIFYF

SEQ ID NO: 275388 - protein, 209 aa, Zea mays
  unsure (1)..(209): unsure at all Xaa locations
  Clone ID: MRT4577_182742C.1.pep
TGDLNAYKRNWIEIQNVDNLSINGHGTIDGQGALVWNKNECQRSYNCKILPNSLVLDFVTNAQIRGITLLNSKFFHMNIFGSKNVVIDKVTIKXPPGHGISVGSLGRYKDEKDVEDVKVTGCTLAGTTNGLRIKSYEDSKSSLKATKFLYQDVTMDNVSYPIIIDQKYCPNNICVKSGAXQVAVNDVVFRTXTXTXNTPSHTLTGHTCL

SEQ ID NO: 275389 - protein, 94 aa, Zea mays
  Clone ID: MRT4577_182744C.1.pep
LVLDRERPPLGFFFFARTLQLKAANRQRDLFSLDAMRRSRLRYNKPTYIHPRASSTTACSRVPRMYIYQLKKPCGAVTSLPLFQRRAAAASGTW

SEQ ID NO: 275390 - protein, 55 aa, Zea mays
  Clone ID: MRT4577_182745C.1.pep
PAVPSESRSPRVRTPGCHTSVERMLPQLTNTPPSRSRGLPPGDGVRSSCSSSYKD

SEQ ID NO: 275391 - protein, 88 aa, Zea mays
  Clone ID: MRT4577_182746C.1.pep
MRQPACLTRACNSSRSTSSTTGPTPRPCPSAKTPSASPLAWRRSSPASEPTCIHHSLLVTSLFLTLASLFLGLWQSANFLIHSTSVDL

SEQ ID NO: 275392 - protein, 90 aa, Zea mays
  Clone ID: MRT4577_182748C.1.pep
GQLRQQPALPGGAVHQRWTSSAPGPPPRPCPSARTPSASPLAWRRSSPAFEPTCIHHSLLVTSFFFTLASLFLGLWQFANFFIHSTSGDL

SEQ ID NO: 275393 - protein, 114 aa, Zea mays
  unsure (1)..(114): unsure at all Xaa locations
  Clone ID: MRT4577_182749C.1.pep
RCFGPSEXFSVAVTIFGXGRGHAGTWGKALGAEVYDCNNMVEQELPGGGLLVYQSFCAAEDAVATSPKSVFHCFDGENVESAPPPMKKDYKLANLLCWEEEADAMEEKAGVLDE

SEQ ID NO: 275394 - protein, 190 aa, Zea mays
  Clone ID: MRT4577_18274C.1.pep
MVQIAAVKRMKGRAPLSVVVAIIGGLALAGVIFTDDLRSLTEIMEKKGKAKEHKRTTSLHAGTRTRTRKMPLTPPPQPAMAAFDPSRCSVTEGYWAYNRSKELLYTDQTCPFIDRQVSCQRNGRPDSDYLRWDWHLDDCSLPRVDPVALLETLRGKRMMFVGDSLQMGQWLSMGCLVNFGVPYTGRAMER

SEQ ID NO: 275395 - protein, 64 aa, Zea mays
  Clone ID: MRT4577_182750C.1.pep
RGPPPRPPPLPRLRCPRTRPNRLCRWYIGRTRTQPHPLVPYIQTQVDQLPPRATSLLLKVVRGP

SEQ ID NO: 275396 - protein, 55 aa, Zea mays
  Clone ID: MRT4577_182751C.1.pep
SKTWVMGGVLHLVLMVGITLARNYFQGCICDFYFFYNGRGSLCFGRPLTPKGFFF

SEQ ID NO: 275397 - protein, 418 aa, Zea mays
  Clone ID: MRT4577_182752C.1.pep
MAFISSAAMKAAVAALLVFAAVSPAARAVAAEAEAKAKAVGGAPSVPAGSLDIAQLGAKGDGKSDSTPMVLKAWKHACEATGQQKIVIPKGNYLTGALDLVGPCKSSIIIRLDGNLLGTGDLNAYKRNWIEIQNVDNLSINGHGTIDGQGALVWNKNECQRSYNCKILPNSLVLDFVTNAQIRGITLLNSKFFHMNIFGSKNVVIDKVTIKAPGNSPNTDGIHIGDSSNVTISGTTIAVGDDCVSIGPGSKTIRVKGVKCGPGHGISVGSLGRYKDEKDVEDVKVTGCTLAGTTNGLRIKSYEDSKSSLKATKFLYQDVTMDNVSYPIIIDQKYCPNNICVKSGASKVAVNDVVFKNIHGTSNTPEAITLNCANNLPCQGVQLINVDIKYNRSDNKTMSVCKNAIGKSIGMAKELACV

SEQ ID NO: 275398 - protein, 78 aa, Zea mays
  Clone ID: MRT4577_182753C.1.pep
PCRRSFTLLSPHSRCPFPSLGTSTTVNSFPHVIAVDPLPLRIIVLAWIYKSRDCTKLNSEKKKKKKKKKSTLRCYHCF

SEQ ID NO: 275399 - protein, 140 aa, Zea mays
  Clone ID: MRT4577_182754C.1.pep
PAQNSGGSGAVSPSPSSATGQCNHGTASSSSWTGRPASPSPEPASCVPSGTETAVTNADALVVSEACRFSSCDLLLPAALQVKGWNGGGALRSAGPRSHSSSASSSPGPVIRGRCGWPGDRWWRRMERTHADRGRAEPRG

SEQ ID NO: 275400 - protein, 52 aa, Zea mays
  Clone ID: MRT4577_182755C.1.pep
VELYMHVQLPSPQRERRGGPACAASRPQCCWLEDGPPGAPSGHGGTETTKER

SEQ ID NO: 275401 - protein, 135 aa, Zea mays
  Clone ID: MRT4577_182756C.1.pep
ATKQISPRARFLHTKMHFSATVLLAILQSAAADPYHQTYDADVQLVVAPETVVDKAAHIILCRPLTLKFMHRESRDLEIKIHVDVSTQPAATMAEKIPGWDFIEEKRMQGRIHGNTFWRIEGGAHRRLPSRGILV

SEQ ID NO: 275402 - protein, 130 aa, Zea mays
  Clone ID: MRT4577_182757C.1.pep
RTRTWWSRTWALRRLRPCRPPASSRAAASRGPCRRCGARTAALASPAGAAADGGEFRSPVAAAANAPPGRTSCTSRVVEAIRASSPARCPAVDEYDAWTRKHPSALGSFDQIAAAAKGKRVVMFMDYDGT

SEQ ID NO: 275403 - protein, 238 aa, Zea mays
  Clone ID: MRT4577_182758C.1.pep
IDEWMNRNEAAKLDVARKSLTSDSTESDILQALQYVDEICQRSRSNRQAVRRDGLIIMIADLLKNSSTKVRQAALGTLCSIAKDDNDNKVEIAAGDNIRTIVKFLNHGQTQEKEQAVSLLFELSENKALSERIGSVSGAILILVGLSSSKVENSLIVDRAEKTLENLESCEKNVRQMAENGRLQPLLRLLLEGSPDIQLSMAAYLGELVLSNDVKVLVAQKAGSTLVNIMKKRNKEAI

SEQ ID NO: 275404 - protein, 64 aa, Zea mays
  Clone ID: MRT4577_182759C.1.pep
SIHFVEAYIIIWCSQKFKKKKKKKKKKKKKKKKKKKKKKKKKKKKKKKKKKKKKKKKKKKGGPF

SEQ ID NO: 275405 - protein, 170 aa, Zea mays
  unsure (1)..(170): unsure at all Xaa locations
  Clone ID: MRT4577_18275C.1.pep
MTVDELKLQARASGGHGAKDQFPVGMRVLAVDDDPTCLKILENLLLRCQYHXAATALKLLREKKDQFDLVISDVHMPDMDGFKLLELVGLEMDLPVIMLSANGETQTVMKGITHXACDYLLKPVGIGIRKKIKKKKKKKKKCEKKKKKKKQKKKKKKKIKQKKKKKMKHT

SEQ ID NO: 275406 - protein, 213 aa, Zea mays
  unsure (1)..(213): unsure at all Xaa locations
  Clone ID: MRT4577_182760C.1.pep
MASTDRSAPAEDQQQPQRPSLFSPYQMPHFRLAHRVVLAPMTRCRAPDALPGPALAEYYAQRSTEGGLLISEGTIISPAGPGFPRVPGIYNQEQTDAWKKVVDAVHAKGAIFFCQLWHVGRASHQVYQPGGSAPISSTDKPISSRWRILMPDGSYGKYPTPRRLATSEIPEIVEQYRQAAINAIKAGFDGIEXHGAHGYLIDQFLXDGINDRA

SEQ ID NO: 275407 - protein, 45 aa, Zea mays
  Clone ID: MRT4577_182761C.1.pep
YVRGLSEVCELSTSALKLELLCVLHCQVTPTAICRFMAFYGYTWR

SEQ ID NO: 275408 - protein, 58 aa, Zea mays
  Clone ID: MRT4577_182763C.1.pep
KIACSSAGRHPTGLRRRRLSFRLLLGVPPSWARMISSSSSGPPPWGKCRSCALCCKTP

SEQ ID NO: 275409 - protein, 57 aa, Zea mays
  Clone ID: MRT4577_182764C.1.pep
SVMTCYGMVELKFRYARTSIATGIAAYMCRSFGQSVSIRAHTRRCFDGMMSRWSVIT

SEQ ID NO: 275410 - protein, 91 aa, Zea mays
  unsure (1)..(91): unsure at all Xaa locations
  Clone ID: MRT4577_182765C.1.pep
LRRRAHSTXEXDSSTTASGPSTTPGWDASIFFSXHPKXGXKKQQASPDLMKLPPRYPSMNNDKHHKAPHHPLASDQQDGTLLPNTNGRRGR

SEQ ID NO: 275411 - protein, 78 aa, Zea mays
  Clone ID: MRT4577_182766C.1.pep
QPKGPAPTRLDRYFSDKKGGHRVFGSSAHNQNGNAPPPSPKLFGLCTPSSFGYYVSCPHVRSRCTPSPQLENGGDHRV

SEQ ID NO: 275412 - protein, 203 aa, Zea mays
  unsure (1)..(203): unsure at all Xaa locations
  Clone ID: MRT4577_182767C.1.pep
EKCAPRILALERGVPAYIGVLGKFPSRAFDMAHCSXCLIEWXNDGMYMMEVDXVLRPGGYWAGIGWKIYYEGWXRSKEDLQNEQRKIEQFAQLLCWKKISEKDGIAIWRKRLNDKSCSMKQDNPKGVKCGLTSDSDVWYKKMEVCIDPLPNVNSVSKVAGGQLEPFPKRLYAVPPRITHGSVPGFSVQSYEEXNKLWQISWDS

SEQ ID NO: 275413 - protein, 71 aa, Zea mays
  Clone ID: MRT4577_182768C.1.pep
VSTATSTHFPLADRRKEGRKRWLEARPYTSVGGSMSGTPGETPSHSLSAGPDTRCPPSGSSGSLYPPTSRQ

SEQ ID NO: 275414 - protein, 87 aa, Zea mays
  unsure (1)..(87): unsure at all Xaa locations
  Clone ID: MRT4577_182769C.1.pep
NEVGGGQKNPFFFFFPAFPGGRGGVKNLRAETPGMSPGEKQWVVHGAKTXRVKRLVPGPGVGGFFLPLFTLKKXGHLGALNLKPFLG

SEQ ID NO: 275415 - protein, 252 aa, Zea mays
  unsure (1)..(252): unsure at all Xaa locations
  Clone ID: MRT4577_18276C.1.pep
MVQIQIAAVKRMKGRAPLSVVVAIIGGLALAGVIFTDDLRSLTEIMEKKGKAKEHKRTTSLHAGTRTRKMPLTPPPPPQPAKAAFDPSRCSVTEGYWAYNRSKELLYTDQTCPFIDRQVSCQRNGRPDSDYLRWDWHLDDCSLPRFDPVALLETLRGKRMMFVGDSLQMGQWLSMVCLVNSAVPYTARSMERSTTLSVFTATEYNATIEFYWAPYLVEANSDRNIXGGPDGRVLHVDAVELHAKHWKGVDIL

SEQ ID NO: 275416 - protein, 71 aa, Zea mays
  unsure (1)..(71): unsure at all Xaa locations
  Clone ID: MRT4577_182770C.1.pep
MCGLAKECLHQRYFSKEYSEFLDEFMAAVRQNYGQKVLVQFXAGIIAALKSVGGTLADHTFLFFSASYTIK

SEQ ID NO: 275417 - protein, 45 aa, Zea mays
  Clone ID: MRT4577_182771C.1.pep
PWELLALRFPCSSAVRLRFEDGVVEASLLACGRLSPLTYFRFKWV

SEQ ID NO: 275418 - protein, 78 aa, Zea mays
  Clone ID: MRT4577_182772C.1.pep
RQLRCLSRASDLAYCMIHGIQGCFIDLICALLIMRVTKPEIGRPLFNILLLTMIYQTLYAWMSAMHRNLVCSVSLGCC

SEQ ID NO: 275419 - protein, 133 aa, Zea mays
  Clone ID: MRT4577_182773C.1.pep
LGTAAVIVMDKSTDVVRAISRLSHFYRHESCGQCTPCREGSKWTEQIMSRFEKGQGREREIDMLQELTKQVEGHTICALGEAFAWPIQGLIRHFRPELEARMESYAKASGGAALAGGWEHNSRAQGRLVSPGQ

SEQ ID NO: 275420 - protein, 54 aa, Zea mays
  Clone ID: MRT4577_182774C.1.pep
LGPSQPVHHLSKDVISCVVAQTVCEPASPPPNRHCGGVVDPRKGGPTSGRTRWR

SEQ ID NO: 275421 - protein, 120 aa, Zea mays
  Clone ID: MRT4577_182775C.1.pep
HIWRTNRKKLCEGRTNPYFGLQPGKFNFQPRGQILPIGKKTGFNLFGRTTYKICTGALRIQSIQYCAHFKRIHGLYLGMGVGAPMTPIFILVSGPDTGPMSSPAFSFSLAAVPSALPVVL

SEQ ID NO: 275422 - protein, 264 aa, Zea mays
  Clone ID: MRT4577_182776C.1.pep
MMKNYPGPASSSSVAVEVKKGSWSPEEDALLTRLVEQHGPHRWSLISAPIPGRSGKSCRLRWCNQLSPDVHHRPFTPHEDALILAAHARYGNKWATIARLLPGRTDNSIKNHWNSNLRRCRRRAAAAAVASRPQVQDSDDAPAAAAAHDDQPAAVVAAGGLGGGNSSSGLPPAAAGAATAEAEPSLSLSLGLPLPAAEPAEAAADDESRNSQGQASPLLEEGEGNAQLLAVVRRMVREEVQRQTGQLAYSLMAAAAARAKGHHR

SEQ ID NO: 275423 - protein, 100 aa, Zea mays
  Clone ID: MRT4577_182777C.1.pep
MSRRWSRTIYVGNLPGDIREREVEDLFYKYGRIVDIDLKVPPRPPGYAFVEFEDPRDAEDACAGRDGYNFDGNRLRVEPAHGGRGSGGPSHDRSSSFGGG

SEQ ID NO: 275424 - protein, 74 aa, Zea mays
  Clone ID: MRT4577_182778C.1.pep
ADTYTLGAIVRGGLAWGLAPTRRPSGAHRKVSKGRASPPIGDDYATTHKLGVNAVRGRNSGVLRVQLSRAGIPG

SEQ ID NO: 275425 - protein, 128 aa, Zea mays
  Clone ID: MRT4577_182779C.1.pep
IFSRAKTWPAEIRVFLPGSSGLLVEVLILRYSLDIALICLSLKMRILSPSSSMRCSRDDRDVGQHCIVSVAVDRWLVNCIRHRSSVAHYQCTPISVNTTARAKIFVMLSWHMEARCVSWVQTINGYPA

SEQ ID NO: 275426 - protein, 36 aa, Zea mays
  Clone ID: MRT4577_18277C.1.pep
ASTETWDATPAVMDLLLERRRLTGRWQRANASAYCQ

SEQ ID NO: 275427 - protein, 143 aa, Zea mays
  unsure (1)..(143): unsure at all Xaa locations
  Clone ID: MRT4577_182780C.1.pep
MIVEPEQRVPDFIKAGADIVSVHCEQTSTIHLHRTVNQIKSLGAKAGVVLNPATPLTAIDYVLDXSFIESQVKKIAELRRLCAEKGVNPWIEVDGGVGPKNAYKVIEAGANAIVAGSAVFGAPDYAEAIKGIKTSQRPLAVAA

SEQ ID NO: 275428 - protein, 66 aa, Zea mays
  Clone ID: MRT4577_182781C.1.pep
HRWAKQNDCVLTSRVSDPPMHYMPKLTKPANLLLIPPTVACATDPKNKETRSLPVLLQVEGCYDLA

SEQ ID NO: 275429 - protein, 274 aa, Zea mays
  Clone ID: MRT4577_182782C.1.pep
MATPSSSLCSSFASLRTASIGHPRGIASSTPRKAFQVRASARVDKFSKSDIIVSPSILSANFAKLGDQVKAVEVAGCDWIHVDVMDGRFVPNITIGPLVVDALRPVTDLPLDVHLMIVEPEQRVPDFIKAGADIVSVHCEQTSTIHLHRTVNQIKSLGAKAGVVLNPATPLTAIDYILDVVDLVLIMSVNPGFGGQSFIESQVRKIAELRRLCAEKGVNPWIEVDGGVGPKNAYKVIEAGANAIVAGSAVFGAPDYAEAIKGIKTSQRPAAVHA

SEQ ID NO: 275430 - protein, 72 aa, Zea mays
  Clone ID: MRT4577_182783C.1.pep
TPAARLSPTWTLSTRSSGRAGPSTGAAARSPSLPVANYMVVMAAVLCSWTSCVCVAYIGAVFCGGGLHRSSV

SEQ ID NO: 275431 - protein, 274 aa, Zea mays
  Clone ID: MRT4577_182784C.1.pep
MATPSSSLCSSFASLRTASIGHPRGIASSTPRKAFHVRASARVDKFSKSDIIVSPSILSANFAKLGDQVKAVEVAGCDWIHVDVMDGRFVPNITIGPLVVDALRPVTDLPLDVHLMIVEPEQRVPDFIKAGADIVSVHCEQTSTIHLHRTVNQIKSLGAKAGVVLNPATPLTAIDYVLDVVDLVLIMSVNPGFGGQSFIESQVKKIAELRRLCAEKGVNPWIEVDGGVGPKNAYKVIEAGANAIVAGSAVFGAPDYAEAIKGIKTSQRPLAVAA

SEQ ID NO: 275432 - protein, 58 aa, Zea mays
  unsure (1)..(58): unsure at all Xaa locations
  Clone ID: MRT4577_182785C.1.pep
FQPXLAQILFLEFSSSNCRSQRRNSRRCLAAARAGRVWAMAPPMATAKRCVTTSRGSP

SEQ ID NO: 275433 - protein, 323 aa, Zea mays
  Clone ID: MRT4577_182786C.1.pep
MARLLLWWTALLLPSLLAGVGPAAAAAASPPHDACLVPTIAQSVLRTPDTCSTLDRRLGDPVGVIEGDEVTLARAVNLLHANKDDYIAVLFYASWCPFSQECKPNFETLAYLFPAIRHFAFEESAIRPSIISRYGIHGFPTLFLLNSTMRVRYHGPRTVKSLAAFYTDVSGINASVKSTAGEAMVHPLDDIEHKKDAEQENCPFWWARSPENILQQEIRHEVATVFVILRLLYRIFPKIDSFTRWAWRRHNMFAKLMGAHEYFLTYLEQARQKFHRLYPSSSKRGNLQEGAMNATAWASKSLASVSIGEPSAIGRTNSTSELR

SEQ ID NO: 275434 - protein, 52 aa, Zea mays
  Clone ID: MRT4577_182787C.1.pep
TCLPAPAAASWGRSSHYFCANREHEVADGEVSDEQEGQERLQRQLSLYHVPD

SEQ ID NO: 275435 - protein, 77 aa, Zea mays
  unsure (1)..(77): unsure at all Xaa locations
  Clone ID: MRT4577_182788C.1.pep
KKGVLFGLEVRRKDGGRICSSGVRRMVGGLGMLCKFIKVFLVVWVGMEKRTVGGGMKMFIYMCVEVRSVIGLXNCVV

SEQ ID NO: 275436 - protein, 86 aa, Zea mays
  Clone ID: MRT4577_182789C.1.pep
MRRTAALLSTHGGRSIPWALADVLVCPLSKQPLRYCEVNGSLVSDAAGVAFPVLDGIPSLVPKDGKLLDDQEVKSEQEPSTRDSSG

SEQ ID NO: 275437 - protein, 44 aa, Zea mays
  Clone ID: MRT4577_182790C.1.pep
SYKGVCSDFKIDSAVCVVYETSAIRSLSCPCLRGYMVIQQAPAR

SEQ ID NO: 275438 - protein, 213 aa, Zea mays
  Clone ID: MRT4577_182791C.1.pep
MAASSGTPSPAKRPRHSNVASSGGDSGSDSDGDLVSDLREIVCLLRLIKGGANKDGQKICEQVIASVAADIQTMLEETQLKFEEERQNLLKVLSNTSKEQCESSVNEEYSKFQETYDTFCKEKDAHMQTFRDLLSKVEVEKKKLLEKYEHHMKQETNTLSELDETISEKVTHAEHSVRRVNQDGKSFIVFRKSTGLFLDCGSDDDFDLDEWRC

SEQ ID NO: 275439 - protein, 43 aa, Zea mays
  Clone ID: MRT4577_182792C.1.pep
ALTTDANSDYKHDQDLQEAVSVHKVDNNLNNKPRKELKKIYLC

SEQ ID NO: 275440 - protein, 117 aa, Zea mays
  unsure (1)..(117): unsure at all Xaa locations
  Clone ID: MRT4577_182793C.1.pep
AYHQQLLPFNQLTALKSAAYXQQQQLPPFSQLADVSPAALVTQQQLSSFYSHAAPNAGTLLHLQQLPPINHLAXLTTPTAFHQHPLNGGALFYTAYEICFNKDVFRMMFGSSQQIKE

SEQ ID NO: 275441 - protein, 75 aa, Zea mays
  Clone ID: MRT4577_182794C.1.pep
QAFFFFFILFLLGVISTRRPNLASHRTGLPSDAYGPTILGFSFHIWGVRGGSFPVHSLHGGRGGDVYRPHPGLSL

SEQ ID NO: 275442 - protein, 104 aa, Zea mays
  Clone ID: MRT4577_182795C.1.pep
PCFFFFFFFFFFVFFFFFFFFFFCNPGVPQGFYSPNYGHQPNTKRMLFYRGGGGGVLTNKRQRPRVFPSSITRLEARVNRAKHRFQSFPSPGWQGSFFFSFLRG

SEQ ID NO: 275443 - protein, 123 aa, Zea mays
  unsure (1)..(123): unsure at all Xaa locations
  Clone ID: MRT4577_182796C.1.pep
IHVAPWRSRRGGRRTARRTIIGGLAARHHGPPRSHRGQPSCALMASVEPIEGHGGLXVDGSPAATIAPRSTMLLPGSTRRGAVEWPTQEADLDVEWRSVLHFASPRCGPPPLLCYSLPKCCHP

SEQ ID NO: 275444 - protein, 131 aa, Zea mays
  Clone ID: MRT4577_182797C.1.pep
ALVCIHQWRSVLLTIVSLHGLHAGAYDDEDAAARAYDLAALKYWGPDTILNFPASAYEAELKEMEGQSREEYIGSLRRKSSGFSRGVSKYRGVARHHHNGRWEARIGRVFGNKYLYLGTYGTQEEAAMAYD

SEQ ID NO: 275445 - protein, 155 aa, Zea mays
  unsure (1)..(155): unsure at all Xaa locations
  Clone ID: MRT4577_182798C.1.pep
WRGSKCVRPRARDGGXAGGPXXXRXCCAAGPPPLAPAAAEAEGGXXRTRRIASRXLDEXXXCSRRVRNLEXRRRRGVRPGGXAXASGXSRXPQPALASSSTWTPLPXIVARERXPGXSDATTXELRSXKKEEEEXDGRCXCLASGNGKGKEARVA

SEQ ID NO: 275446 - protein, 231 aa, Zea mays
  unsure (1)..(231): unsure at all Xaa locations
  Clone ID: MRT4577_182799C.1.pep
MADGEDIQPLVCDNGTGMVKAGFAGDDAPRAVFPSIVGRPRHTGVMVGMGQKDAYVGDEAQSKRGILTLKYPIEHGIVSNWDDMEKIWHHTFYNELRVAPEEHPVLLTEAPLNPKANREKMTQIMFETFNVPAMYVAIQAVLSLYASGRTTGIVLDSGDGVSHTVPIYEGYALPHAILRLDLAGRDLTDCLMKILTERGYSFXTTAEREIVRDIKEKLAYVALDYEQELEM

SEQ ID NO: 275447 - protein, 219 aa, Zea mays
  unsure (1)..(219): unsure at all Xaa locations
  Clone ID: MRT4577_18279C.1.pep
MSRPTGAWRLGMATCTIPAAPRAHVGRLPGIRQAARPALLLPSFSSSTLLCHRLPPILPLVLQLLRVRANHAMAASAGTVYEADAEAVVRRITPALDRARHKGQAGKIAVIGGCREYTGAPYFAAISALKVGADLSHVFCTKDAATVIKSYSPXLMXQSILEESYSVRLMNEHLFLLRFLRKLQSHLLHCPLQQLPMHWSNIHIESTRIVVIMIEFIVI

SEQ ID NO: 275448 - protein, 97 aa, Zea mays
  Clone ID: MRT4577_1827C.1.pep
SRKAARNQHHRAASRRATESILTRAPTIGCASSSAMPSHRSSASPFRLLCTVPHSVSSRVVRQPRCLHVYYCQASLLLSSRFCRLPSILYPPQSYFP

SEQ ID NO: 275449 - protein, 219 aa, Zea mays
  unsure (1)..(219): unsure at all Xaa locations
  Clone ID: MRT4577_182800C.1.pep
SIMNICINSAIGTYFVESKEVSAESHTGEMIFQFVDNFIEKLDAGKDHLVQVVTDNASNNMAAKDLLYVKRPNLXWTSCATHTINLMLEGIGKMKRFKNVIDSAKGLTIFIYAHHSTLSLMRKFTKKRDIIRPGVTRFASAFLTLQSLYEKKEQLRMMSQSEEWCKISHVKKSAKGVTATATLVKPTFWNGVXLSRPGREPLVKVLRLVDGDIKPSMPW

SEQ ID NO: 275450 - protein, 260 aa, Zea mays
  unsure (1)..(260): unsure at all Xaa locations
  Clone ID: MRT4577_182801C.1.pep
GSCGVLLFVLVAGSLPLYXKSLIDLYKKRDSADFRXPTWFSTHVRRLLLRILDPXPGTRISIEKIMENPXFRQGLLDPANLLLRYNLKTNDAPQVDMDKNEDFDPPSTNITTESKQEDEKKPTNMNAFDIISHLSSGLDLSGLFQESDKKTESKFTSTNTSSAIISKIEDIAKDLRLKLTKKDGGLLKMEASKPGRKGVMRIDAEIFEVSPNFHLVEIKKTNGDTLEYQKVMHQEMRPALKDIVWAWQGEQLKQQQEQQQ

SEQ ID NO: 275451 - protein, 234 aa, Zea mays
  unsure (1)..(234): unsure at all Xaa locations
  Clone ID: MRT4577_182802C.1.pep
MKLNISYPANGSQKLIDIEDERKLRVFMDRRMGQEVPGDSVGDEFKGYVFKITGGNDKQGFPMKQGVMHPTRVRLLLADGHSCYRPRRTGERKRKSVRGCIVAADLAVLALSIVKQGDAELPGLTDTVHPKRLGPKRATKIRKFFGLSKEDDVRKFVIRREVQPKAEGAKPYTKAPRIQRLVTPQRLQHKRHRIALKRRQAEASKDAANEYAQLMHKRVHEEKAKKEXIRKRRA

SEQ ID NO: 275452 - protein, 108 aa, Zea mays
  Clone ID: MRT4577_182803C.1.pep
TTGRRASAGSYSFLRRGPHNSISTGERVLLVARKGPPRLVCGRRRRGASCGIAIGLLKDKQALGILRIERGSSHTYRKRYYQTNWCMQANDKGLLKDIKPLGASYLYP

SEQ ID NO: 275453 - protein, 105 aa, Zea mays
  unsure (1)..(105): unsure at all Xaa locations
  Clone ID: MRT4577_182804C.1.pep
MNVEQLYKMSRAERTGGKGSMRRKKQAHHTTTTTHDKRLHSTLKTIRLHPIPGTAEVHITKDEXATHIANPTAQAPIAATTWLASGTPQTKXLQHLXPPLITHLG

SEQ ID NO: 275454 - protein, 74 aa, Zea mays
  Clone ID: MRT4577_182805C.1.pep
QPPPLNNLQLISNSQDFSSRPPLTLMYQAISLLAIQYEEEQSSRSLHGCKPGFVGLGLGGGPARSQELLPEQWR

SEQ ID NO: 275455 - protein, 48 aa, Zea mays
  Clone ID: MRT4577_182806C.1.pep
VLAQDRSLPDILFVRMSLCFGGISPRHDAVCRLFEAVMLDRLQVLWIC

SEQ ID NO: 275456 - protein, 59 aa, Zea mays
  Clone ID: MRT4577_182807C.1.pep
ITIRKKRGVHAYYVFSAGSKRCCKTMELKSTSKPEYGIVQCRLPCYSSARFFNFHGGWV

SEQ ID NO: 275457 - protein, 110 aa, Zea mays
  unsure (1)..(110): unsure at all Xaa locations
  Clone ID: MRT4577_182808C.1.pep
LVVPVLEEVILVGGAEHHRITNALDLKDKLLPGGPFAPLGLVTFPIQTAVLKVKPIKNGRLPMFSMFPFFIQAYVTGEGPAANLSKRLSDPFGISLLXVIAGSSQRTPSL

SEQ ID NO: 275458 - protein, 53 aa, Zea mays
  Clone ID: MRT4577_182809C.1.pep
NPFNPLQSPSNPSTSTCQTIAQQAHRLAGRAPSLWFCPRVRARVGGRVGGRVG

SEQ ID NO: 275459 - protein, 408 aa, Zea mays
  Clone ID: MRT4577_18280C.1.pep
MSRPTGACLHAWRLGMATCTIPAAAAPRAHVGRHLPGIRQAARPALLLPSFSSSSSTTLLCHRLPPILPLVLQLLRVRANHAMAASAGTVYEADAEAVVRRITPALDRARHKGQAGKIAVIGGCREYTGAPYFAAISALKVGADLSHVFCTKDAATVIKSYSPELIVHPILEESYSVRVDERASVSSKILTEVAKWMERFDCIVVGPGLGRDPFLLECVSNIMRHARQANIPTVVDGDGLFLVNNNLNLVEGNPLAILTPNVYEYKRLVQKVLNCDVDEESASEQLIALCQKIGDVTIMQKGKADVISDGKTVTQVSTFGSPRRCGGQGDILSGSVAVFASWARHFVLTNEEPTEKRVNPMTLGCIAASLLLRKAASHAFEKNKRSTVTSDIIEFLGKSLEDICPAEH

SEQ ID NO: 275460 - protein, 116 aa, Zea mays
  Clone ID: MRT4577_182810C.1.pep
MDWYAWLCRAGLHPDVAFEYALLFARNELGATDVRHLDHDFLLSMGVAVAKHRLEILKLARKETSSHGRAAAITVLPWRATRLLAAAVHRSASSALGRLRASVSRGQDRDRDRARA

SEQ ID NO: 275461 - protein, 181 aa, Zea mays
  unsure (1)..(181): unsure at all Xaa locations
  Clone ID: MRT4577_182811C.1.pep
EPGSTSEKYWGLFDMNGVPAYTLHLTGSGVLLANDTTNQTYCACAEGADPKMLQAALDWACGPGKVDCSVLMQGQPCYDPDTVEAHATYAFNAYYHGMGMGSGTCYFSGVAVVTTTDPSHGSCVYGGKNGTSLMNGTSLAPSSNSTEGGXPARTGRSATSRHSSASSPPRCSSAPSSCCSY

SEQ ID NO: 275462 - protein, 117 aa, Zea mays
  unsure (1)..(117): unsure at all Xaa locations
  Clone ID: MRT4577_182812C.1.pep
MDAVAASDAVLLLAAVAISLLITATFWSRHRRQGEAPSPPSLPLLGHLHQLGNGKPLHHSLAALAIARGXGAPPAPLLSLRLGARRALMVSEHAAAEECFTAHDARLGGRPRLLVRD

SEQ ID NO: 275463 - protein, 83 aa, Zea mays
  unsure (1)..(83): unsure at all Xaa locations
  Clone ID: MRT4577_182813C.1.pep
GYVPRSKSTKRFPSRRAALLTSPXSPIVPPFPAKPCLSPRHRPPPFFLEHARQIPQLAVPCLRRPLPVRSLGLHGRPPAPRVL

SEQ ID NO: 275464 - protein, 69 aa, Zea mays
  Clone ID: MRT4577_182814C.1.pep
PLLPAGGGVDKKSCCCWWWVWSLGISRSSKRMVASLGAGAGRMNGSCEKESTLRTSCGFAMAVCDLGVS

SEQ ID NO: 275465 - protein, 139 aa, Zea mays
  Clone ID: MRT4577_182815C.1.pep
MARSRLSSRSNIITRPFSAGFSRLISTDTTPITIETSLPFTAHLCDPPSRSVESSSQELLDFFRTMALMRRMEIAADSLYKAKLIRGFCHLYDGQEAVAIGMEAAITKKDAIITAYRDHCIFLGRGGSLHEVFSELMGR

SEQ ID NO: 275466 - protein, 344 aa, Zea mays
  unsure (1)..(344): unsure at all Xaa locations
  Clone ID: MRT4577_182816C.1.pep
MEANGAVDLEVDIIGPGAAGSKLTSVDDPDATECSSSFGDTLSGSEDGARPSEISDIEVDSPFCRYPSNCDAAALLDAAASDNSDRXEEEKVTDHWRKYVSPLMWRCQWLELRMKDLQSQVSKYDKELAVLKHEKELQTKMIELDCSSSRSVPFSSLCCRKTMKRRRRKRNEDKIDTSSYISNHTALSYFEKMEADGHSIEDNANLVDDNTKANNDADWLLGIEGGDTTVEQILLSIQAAQDRVFSLRSNLKQAMARKNKGITLKINTSVIGTHSSNCSPGKGKVAGLHERSPQDTSECDMDDSGMPDSALSSYGEASNMDIFESTMSLLSEGPHQMGEIHESS

SEQ ID NO: 275467 - protein, 129 aa, Zea mays
  unsure (1)..(129): unsure at all Xaa locations
  Clone ID: MRT4577_182817C.1.pep
IADPEKQMTDDEKKIYGKVDMARIKYMRLVHRLGYDTNHQVPVQVLFQLSLVESFRCVRMTNHSSEIENAWKRALQREAEGTENLEFSCNVLVLGKTGVGKSATINSIFGEDKSKTNAFLPATSSVKEX

SEQ ID NO: 275468 - protein, 72 aa, Zea mays
  unsure (1)..(72): unsure at all Xaa locations
  Clone ID: MRT4577_182818C.1.pep
RAPEEAEKXAPAXXXGPXXPPKHPXXRXTSPXRXRRPTXXXGANTXXXKPPPQKPGGTXSKRTPGAXXKXRK

SEQ ID NO: 275469 - protein, 54 aa, Zea mays
  Clone ID: MRT4577_182819C.1.pep
KQKQEGWNNPNVVSSLTKPAPELETPSKHKKQKNNIQLPAPNRTKKTQFHRILL

SEQ ID NO: 275470 - protein, 382 aa, Zea mays
  Clone ID: MRT4577_18281C.1.pep
VPRGRPGRGFCHSQSCFYRSHSHSRFLLHPDAPPPPPCDPLSRSMSAPAVTPAAHRTKPPRDLGARPLTMATTTSPTSASSVPLPLLHRRRGILGHVPPEAPAHALRPPRGHQGPTTASPPPCRRAVERRRRSGSGGSCMDRKSHLILFLYSLSDGSEQRSAMRCGVARLPRAPRRWRGKGRTRARARERIAVDGLVSECCCLPLSLCLRSPGAALPLLPCFDLPPFPTVSWISRIQTTALVSLPSCLLPAYVQEGPWVIRVPWLTFRGHSLLLDSGPVQDGGERGAHEDAAQGRAQGPGRHVLPPGRWCTRPPSRCEADRPGRDGTKRKPTIDCTYRGWDLGGSSGSCWVFLWVESEGAQSRASEQSLVQCSAVQCSAAPA

SEQ ID NO: 275471 - protein, 213 aa, Zea mays
  unsure (1)..(213): unsure at all Xaa locations
  Clone ID: MRT4577_182820C.1.pep
MPEEVHHGEEEVETFAFQAEIAQLMSLIINTFYSNKEIFLRELISNASDALDKIRYESLTDPSKLDSGKELKIDIIPNPQERTLTLVDTGIGMTKADLINNLGTIAKSGTKAFMEALQAGADISMIGQFGVGFYSAYLVAEKVVVITKHNDDEQYAWESSAGGSFTVRADHGEPIGRXTKVILHLXEDQTEYLEEKRVKEVVKKXSQFIGYPI

SEQ ID NO: 275472 - protein, 94 aa, Zea mays
  Clone ID: MRT4577_182821C.1.pep
LALLSSVFLLVRLQVPWRSTLLSGLQLASCQPGLTAAVAPGTATRRFFAVASTAHHWSLSFFGARQHASRHQLFARQYLLPHMAPRHGYLLLES

SEQ ID NO: 275473 - protein, 104 aa, Zea mays
  Clone ID: MRT4577_182822C.1.pep
MAGRRVRGNSAVAVAVTMAGVALLALLFAASEADGTCNVDRGTVLRQCASCSSGAPSQGCCDALRNADFGCLCSNYWNKLKNTPYASCAKAIPSACNLPNAKCQ

SEQ ID NO: 275474 - protein, 104 aa, Zea mays
  Clone ID: MRT4577_182823C.1.pep
MAGRRVRGNSAVAVAVAMVGVALLALLFAASEADGTCNVDRGTVLRQCASCSSGAPSQGCCDALRNADFGCLCSNYWNKLKNTPYASCAKAIPSACNLPNAKCQ

SEQ ID NO: 275475 - protein, 96 aa, Zea mays
  Clone ID: MRT4577_182824C.1.pep
SCVQGTPGHECFCILDSAYPAALQLGSPSYAVVSNMCVLILVHGSAYVDPSAHRPLVRPCVISMAAWQLAVDRARVISVPSGCSSRISTNLAAAGG

SEQ ID NO: 275476 - protein, 72 aa, Zea mays
  unsure (1)..(72): unsure at all Xaa locations
  Clone ID: MRT4577_182825C.1.pep
IARLISXTFSKLGRVALPKDIICQVYLRGXSLVSTMFGFMDYKYSKRIKMNHKIRGPKYPIAYILPPIVQLK

SEQ ID NO: 275477 - protein, 111 aa, Zea mays
  unsure (1)..(111): unsure at all Xaa locations
  Clone ID: MRT4577_182826C.1.pep
MGVMLLYGGDWEWDGFLMHVQKSVITVNGIIVSXDMLIGSLASRSYVIIQVLTSXVCQEYHVADKNCCVKKGDACTGVISSEKLVFRGVGWVIFGHXETRALLRESTAFAG

SEQ ID NO: 275478 - protein, 71 aa, Zea mays
  Clone ID: MRT4577_182827C.1.pep
NMYVISAGREKQWCRGNFLVGEVGADTDHTARWAVDVADPSWVKTSLFESPCSVHYLAPVIWEFEHITTRI

SEQ ID NO: 275479 - protein, 59 aa, Zea mays
  Clone ID: MRT4577_182828C.1.pep
FESTKSILLVIPNKWVLLLLGPKEGFLNPFGKHFKERIFYNSTAEHWVSQFYFSRSLPG

SEQ ID NO: 275480 - protein, 123 aa, Zea mays
  Clone ID: MRT4577_182829C.1.pep
RPWSPPISSLQQQQLLSFSPLFVANAPTYLQQELLHQIVPALTQLTVANLVAYLRHLLPFPQLTMSNSAAYPHQFQQSLNPLPVAHPLGGAFLQQQQLMPHNRFFLINPVVSRQQTKKIRCLF

SEQ ID NO: 275481 - protein, 93 aa, Zea mays
  unsure (1)..(93): unsure at all Xaa locations
  Clone ID: MRT4577_18282C.1.pep
AATANAGLLFFLVLLLGLSFLRVSMGGSQVCDSKCALRGSKGRRDDDSVKYCGICCXATCNCVPPGTTGNKNECRCYCDMTTGHRNRTRTNNP

SEQ ID NO: 275482 - protein, 118 aa, Zea mays
  Clone ID: MRT4577_182830C.1.pep
SSSSLHSRTSSLHCHPRPSTARPPHCVVVLVPPQQDCSPSRRLSTPGPTDSPSRRLAIVWSLPSPEPTRVCLPLILFQATSAPRSVVVQASRFIIARDHLAPAPSSSGPPHLRSRPPQ

SEQ ID NO: 275483 - protein, 70 aa, Zea mays
  Clone ID: MRT4577_182831C.1.pep
QNLVLHHNKNNTPDAMDYYLPHVIWDTHLQKFETSHMQGTHSLLNKESYMIIAHNAGAHHHASLPNGRGG

SEQ ID NO: 275484 - protein, 68 aa, Zea mays
  Clone ID: MRT4577_182832C.1.pep
IPLINKLSIFRTKKKKKKKKKKKKKKKKKKKKKKKKKKKKKKKKKKKKKKKKKKGGPLLKDQILRPRA

SEQ ID NO: 275485 - protein, 69 aa, Zea mays
  Clone ID: MRT4577_182833C.1.pep
ERGECSSSYEEGLQAQVYLYAARRDRMPCRRRRECFMSKPGFWGQFASELFILNRRNFVVVDWLFCQAA

SEQ ID NO: 275486 - protein, 185 aa, Zea mays
  Clone ID: MRT4577_182834C.1.pep
ACGSCLARQICQVSVKFGRSFDRIPHPDAALEESISEVWDQSLQRNPYLHSGTKFRYGGNALHYKDDSDHDLEYCVSLHLGLTDYRTFVGTNLNPLWEFFLVPSEDDSVHCQHLSDALGNGAIVETSDKKIIVLQRSYNVADYPGYYVFPGGHSEPQEIGIMGHQTDEEDFASLTERVSQEMFDG

SEQ ID NO: 275487 - protein, 305 aa, Zea mays
  Clone ID: MRT4577_182835C.1.pep
MAASGAYPGTAFKILLSCPDGLPRSRVSVKFGRSFDRIPHPDAALEESISEVWDQSLQRNPYLYSGTKFRYGGNALHYKDDSDHDLEYCVSLHLGLTDYRTFVGTNLNPLWEFFLVPSEDDSVHCQHLSDALGNGAIVETSDKKIIVLQRSYNVADFPGYYVFPGGHSEPQEIGIMGHQTDEEDFASLNERVSQEMFEGVIREVVEETGVPASSLTDPVFIGVSRREVNARPTAFFFTKCNIDSSGVSELYSRAQDGYESTKLYTVSVEELQGMRQRMPGCHNGGIALYELMRNAAKKSEDVIDE

SEQ ID NO: 275488 - protein, 119 aa, Zea mays
  Clone ID: MRT4577_182836C.1.pep
DSLFSMAIETDGLSATTLDINIMDTGCIAQMNELTWNMPVLHDHRRSMKRIYLAVASMVANSDQIDMASICPMMCASLQPIKTSKVSDSSDTKISLWSGLGGTTSDFTRNKPPLHLRSI

SEQ ID NO: 275489 - protein, 262 aa, Zea mays
  Clone ID: MRT4577_182837C.1.pep
MIPAPPASSAGGSITSGWRNLLLLLLTLTLTLARPAAAQPPTSPALQAAYAALQAWKRTAIFSDPSNFTSNWAGPNVCAYNGIYCAPRPSDGALAVAGIDLNHADIAGHIPADLPLGVPDLALLHLNSNRFCGVLPDTLLHLRLLHELDLSNNRFVGAFPAVVLALPSLRYLDLRFNDFEGPIPPPLFDRPLDAILLNSNRLRGPIPANLGNSPASVLVLAHNRLGGCIPPSIGRMAVTLIEIVLIDDDLTGCVPPHPDCSR

SEQ ID NO: 275490 - protein, 299 aa, Zea mays
  Clone ID: MRT4577_182838C.1.pep
MAASGAYPGTAFKILLSCPDGLPRSRVSVKFGRSFDRIPHPDAALEESISEVWDQSLQRNPCLYSGTKFRYGGNALHYKDDSDHDLEYCVSLHLGLTDYRTFVGTNLNPLWEFFLVPSEDDSVHCQHLSDALGNGAIVETSDKKIIVLQRSYNVADFPGYYVFPGGHSEPQEIGIMGHQTDEEDFASLNERVSQEMFEGVIREVVEETGVPASSLTDPVFIGVSRREVNARPTAFFFTKCNIDSSGVSELYSRAQDGYESTKLYTVSVEELQGMRQRMPGCHNGGIALYELMRNAAKKK

SEQ ID NO: 275491 - protein, 81 aa, Zea mays
  unsure (1)..(81): unsure at all Xaa locations
  Clone ID: MRT4577_182839C.1.pep
DTFNPGRDNNCCANLQTLQLLTYKEITGISRATFETQPQRLTHYLHAGSNAVSLLQLXQSLPFNQRAVTNLSRMYHQPIHW

SEQ ID NO: 275492 - protein, 133 aa, Zea mays
  Clone ID: MRT4577_18283C.1.pep
MSYYGDRRAESSIVEAFTLSPLPYPVILVLLMVTLLLGASWFFTYDDFIEEASQQLSWALLGVPIALVLLIRWISSVDSFEGYLGFYPTESRWKGRYERGPAEGSSPWGVALLVLLLLVLASFHSTIHDMWGP

SEQ ID NO: 275493 - protein, 248 aa, Zea mays
  unsure (1)..(248): unsure at all Xaa locations
  Clone ID: MRT4577_182840C.1.pep
MHERSPGPSLAATRLPSSASLLLLLSLSLLAGRSHGWWCREDDEGCSLMGFRGDDSPVTGGGISEKGRFSYGFASCAGKRASMEDFYETRVDDVDGETVGLFGVFDGHGGARAAEYVKKHLFSNLIKHPKFMTDTKAAIAETFNHTDSEFLKADSSHTRDAGSTASTAILVGGRLVVANVGDSRAVVSXGGKAIAVSRDHKPDQTDERQRIEEAGGFVMWAGTWRVGGGLAVSRAFGDKLPKQYVVAD

SEQ ID NO: 275494 - protein, 172 aa, Zea mays
  unsure (1)..(172): unsure at all Xaa locations
  Clone ID: MRT4577_182841C.1.pep
NKYSTNSLISSGKSDPTSVPAPXYTPXTNTSGGGNPGEDPDSAEHTRELRAELVXLHAIDDTVLETEDVSXDPSEPPSYMPTDMADDDDDXMXDMQQAPLHNPGLKTSEETSATRKHYWSKXLKQRLRKGPLNRPELSREVYDMVAELDSSRETSCEPKLEADLTAYVENHE

SEQ ID NO: 275495 - protein, 76 aa, Zea mays
  unsure (1)..(76): unsure at all Xaa locations
  Clone ID: MRT4577_182842C.1.pep
VEGELLETVQFXAEHPEKFQTFFMFSTKGALSYGPSGCAETQIAKGIALECQTTFIRGKGTXLFTMWPKESEAYVL

SEQ ID NO: 275496 - protein, 37 aa, Zea mays
  Clone ID: MRT4577_182843C.1.pep
LSLSCTHFCTFFSLSTLCHILRLALLLKHCRTPLSIK

SEQ ID NO: 275497 - protein, 44 aa, Zea mays
  Clone ID: MRT4577_182844C.1.pep
HLIPLTTTTIDNLCPTYFYIPNPLLPTTHHFINPLLHSLLLIIQ

SEQ ID NO: 275498 - protein, 47 aa, Zea mays
  Clone ID: MRT4577_182845C.1.pep
TTIPYIILSSRLKVHGTIQLLLLPRAVLKHSRKIQSYNILSRKNQTV

SEQ ID NO: 275499 - protein, 109 aa, Zea mays
  unsure (1)..(109): unsure at all Xaa locations
  Clone ID: MRT4577_182846C.1.pep
PTIRAYPSIDQITVAQANNACGNNMQVTCCNKGXNTPAGNAVGNGAGILNNLSLFDQCSKLDVNVLAIANGLLNKECQANAACCQNSGGSATGGLVNVALPCIALSSLL

SEQ ID NO: 275500 - protein, 135 aa, Zea mays
  Clone ID: MRT4577_182847C.1.pep
PYKLSGIIHISPFWTEFLRRISLLLWKANVYRVQQIGDTSSPNKHKRDRLKDIILLQIQQSYFSNIRLQDSARRELLQPIQNLLHHSVVTIGLKQTSFTHLSPQSILYSMGLALYLFLEAYPLLLETFSCGRSRF

SEQ ID NO: 275501 - protein, 82 aa, Zea mays
  Clone ID: MRT4577_182848C.1.pep
FSPERFKDGVSRASKDSPAFFPFGWGPRICVGQNFALVEAKMALSSILQHFSFALSQSYTHAPFPVSTLQPEHGAHLMLKKL

SEQ ID NO: 275502 - protein, 103 aa, Zea mays
  Clone ID: MRT4577_182849C.1.pep
HETHQQWSLVTRGGKLGGCKPKKTVRRPPKVRSFCSSEEGRKNKVNSRVGTKPQGPRGPPPTHYLERSLGGEDIEKKKGGRQGLVENKKNRGGDLRTEHLMRG

SEQ ID NO: 275503 - protein, 79 aa, Zea mays
  Clone ID: MRT4577_18284C.1.pep
QSSANSYRTTDEKGGDTGTESQLIEACLLTRKCYIYLRNSTIISDLIYLLHSQNSGDPQLRSHSKIPTLCLKRDCVNKG

SEQ ID NO: 275504 - protein, 60 aa, Zea mays
  Clone ID: MRT4577_182850C.1.pep
QTLSPGLFTKFYINKVYLLTNQEFHLPSMHMVQGTTTQVDHALSFIEQCKIRNEMANCIF

SEQ ID NO: 275505 - protein, 69 aa, Zea mays
  Clone ID: MRT4577_182852C.1.pep
GKESQMEVWIPHAIPQGGKCSQIIDERLNPLMKCMVSPKLFGELLCKCYRFSPGPHLPPPPPQGGRLED

SEQ ID NO: 275506 - protein, 55 aa, Zea mays
  Clone ID: MRT4577_182853C.1.pep
GGPPPFFFYSRGPGPIGGGHGPTGLQFITQDNWILQQGWRGPGIRRGPQLPPGGS

SEQ ID NO: 275507 - protein, 134 aa, Zea mays
  unsure (1)..(134): unsure at all Xaa locations
  Clone ID: MRT4577_182854C.1.pep
MRLQGKLIKMRSFPHLLLILALLLVLENVRAQPKPLLINCGSGSSADVDGRTWVGDAHPDGGAGFTVTLAGATATRARKPVDEGGGGXDAAYGELYRTARVFNASSAYRFSVAAGSYFLRLTFAGSSAAPQRRR

SEQ ID NO: 275508 - protein, 46 aa, Zea mays
  Clone ID: MRT4577_182855C.1.pep
RSSSRARPEGDEAPPSGGYRDRTSYRPSLALENEPANPGSKLTLIT

SEQ ID NO: 275509 - protein, 127 aa, Zea mays
  Clone ID: MRT4577_182856C.1.pep
LPPRRPGVFFRCHGGTWPLLQRRGVPKTFSSLGLELNPWSLCLFCSPATCVFSSQALAKLFSIADAFAFLFAMVGHRMPKSNLAVSKPDPARELTGPPAAQPWAPSLSSPCSLGLPARRFWQAGCPT

SEQ ID NO: 275510 - protein, 352 aa, Zea mays
  Clone ID: MRT4577_182857C.1.pep
MNRKEPLCARQTPTQLTSAMASAAAVEWEAAARKVLVARKPCFGLPTACPTCLPVLLYLRMAQVPFDIHVDTSFPDADHIPYVEFGDCVAFNNEKGGVIEYLKDEKIVDLNSNHPNISSTTVLDTKAMVSSWLANALLYELWVVSDGSIANDIYFSDLPWPIGKILHWNKTRHVKQLLGITKLNAAEKEEEIYQKASAAYESLSFRLGDQVFLFDNSPTDVDALFLGHALFVLSALPDTSVLRGTLQKHDNLVSFAEHHKVQLLEASSSSSSGLGSSPSPSSSTPRRRPSADHSYKPKPRDKPKPRAKEKRTRRRAKYFLATQLVAVLVFLSLMGGVDSSELDDEYGLDYDD

SEQ ID NO: 275511 - protein, 203 aa, Zea mays
  unsure (1)..(203): unsure at all Xaa locations
  Clone ID: MRT4577_182858C.1.pep
MAKEKTHINIVDIDHVDSDKSTTTGHLIYKLEGIDKRVIERIEKEDAEMNKRTFKYARVLDKLKADRERGITIDIALSKVXTTKYYCTDIDAPXHRDFIKNMITDTSQTDWAVLIIDYTTGGFDAVISKDVQTREYALLDFTLVVKQMICCCNKMDATTPKYSKVRYDXIVKEVSSYLKKDGYIPDKIHFSSISXLEXDNMIE

SEQ ID NO: 275512 - protein, 53 aa, Zea mays
  Clone ID: MRT4577_182859C.1.pep
INYNLIYFLLIFIFYFIQHIINLNYSHLIFSFQINIKHIITLLHHYHLSTYYR

SEQ ID NO: 275513 - protein, 102 aa, Zea mays
  unsure (1)..(102): unsure at all Xaa locations
  Clone ID: MRT4577_18285C.1.pep
SAASSNRRDLVSPTPTFLHCVASSYHSHSSSTSPPRARSRGRTGGPRSGQLWLCEHSVNRQPWYGNPCSSVNRENDDCPCLLACXTVHGPPCRSTVAFARSR

SEQ ID NO: 275514 - protein, 363 aa, Zea mays
  unsure (1)..(363): unsure at all Xaa locations
  Clone ID: MRT4577_182860C.1.pep
MASAAAVEWEAAARKVLVARKPCFGLPTACPTCLPVLLYLRMAQVPFDIHVDTSFPDADHIPYVEFGDCVAFNNEKGGVIEYLKDEKIVDLNSNHPNISSTTVLDTKAMVSSWLANALLYELWVVSDGSIANDIYFSDLPWPIGKILHWNKTRHVKQLLGITKLNAAEKEEEVCYSLPIIVLAFFCFLVDTLVACNAIFXKQIYQKASAAYESLSFRLGDQVFLFDNSPTDVDALFLGHVLFVLSALPDTSVLRGTLQKHDNLVSFAEHHKVQLLEASSSSSSGLGSSPSPSSSTPRRRPSADHSYKPKPRAKKERTEEEKKFRRRAKYFLATQLVAVLVFLSLMGGVDSSELDDEDGLDYDD

SEQ ID NO: 275515 - protein, 79 aa, Zea mays
  Clone ID: MRT4577_182861C.1.pep
IKIFKILKGGPGVPKGFSPKTGEGPIFENLPSTLLKKFGEFPSKIFLQNPYLLNRLRGQILPRQEPLKWGKPIDPGFFN

SEQ ID NO: 275516 - protein, 60 aa, Zea mays
  Clone ID: MRT4577_182862C.1.pep
SMLAQIGKENYVILYRLNSEHVKKARHVHRELLNQQRSFINGMSLCIVATSIWFKFGQIF

SEQ ID NO: 275517 - protein, 117 aa, Zea mays
  Clone ID: MRT4577_182863C.1.pep
GVVGHGGSPVGSGLLVETINGQPFFPRAGFNLCRFPPPGFCFQTVLMPFPWAGLRVVSLQVWSGPPGEACFFCALFARKDISPFWFGFFSPPFGSYRLALMPPVFPHRSPIGGVVEK

SEQ ID NO: 275518 - protein, 145 aa, Zea mays
  unsure (1)..(145): unsure at all Xaa locations
  Clone ID: MRT4577_182864C.1.pep
AAPVCVVGFLVFPLAVFGLLLSCSSGRCRWPVGPFPCAVCLLCVRASLARSLVGVSALRLVCPRRGCLSXRCLPAALRRVCRAGPGGVLAGGLFRGLLASLSRRLGCXLPFLWFSPSSAFFWSSPLAPALVFLLFPVCALCLGFS

SEQ ID NO: 275519 - protein, 104 aa, Zea mays
  unsure (1)..(104): unsure at all Xaa locations
  Clone ID: MRT4577_182865C.1.pep
SRKGSGDPHVRQHRKHNFVSTIATKXRGWLIFRGVSARAATTTILPQCSQASIAFFVLQYLXPALSTICENPILEPYRMQQANAACILPLSALFFQQPWAHIHH

SEQ ID NO: 275520 - protein, 79 aa, Zea mays
  Clone ID: MRT4577_182866C.1.pep
GNSGAVFNVYLFPVRLGIGRLGANFVSLPNSGKRVRSSFQARCRPVPQLQFLIQCGVLWWGNKLGVESPFLKNGMVLCP

SEQ ID NO: 275521 - protein, 54 aa, Zea mays
  Clone ID: MRT4577_182867C.1.pep
SAVLQPRLRTKLGHQIMLKEFMLYRPLRSYEQHTPTLASLDPAGDIIRTLVVGL

SEQ ID NO: 275522 - protein, 67 aa, Zea mays
  Clone ID: MRT4577_182868C.1.pep
KKKKKKKKENKKRKAASDKLKVLCDNIHRITNLCDPYDGLERSGKAHFWTHLPGYPRNAQHLCAERN

SEQ ID NO: 275523 - protein, 42 aa, Zea mays
  Clone ID: MRT4577_182869C.1.pep
LADYLQPQEIDRTPGINKNFKKRLNRHNNITYVARIYLKERQ

SEQ ID NO: 275524 - protein, 133 aa, Zea mays; identical to SEQ ID NO: 275492
  Clone ID: MRT4577_18286C.1.pep

SEQ ID NO: 275525 - protein, 262 aa, Zea mays
  unsure (1)..(262): unsure at all Xaa locations
  Clone ID: MRT4577_182870C.1.pep
AAHLLPLARLSLSLSLEFSSWSLSPSPRARAQPLVESPHRLLLCSDHTPGFQWRARPPCFLCPSSCARPPSSVIFFLAPHRAPASPPWSTPCAQPLPFLISLKLAMELPCRAPTPLPPAAQPSSLATCAPAPASMAVCLAPSPSSRSSLASPRLPSAPCSIPLCRAPGLSXPAGAPSNSSSRLPWLPAPARFPSTRVAAPAHVFLAPRPAPCSCAASSSSDLFPTELLRAPSXLLPRAAVPTPWPXCPVRFPLPRARRAVCR

SEQ ID NO: 275526 - protein, 85 aa, Zea mays
  Clone ID: MRT4577_182871C.1.pep
QRTKLDSLGAREDRTGRCSQGSCKCVIASRSIAMSVSSEMCPSCYWQEERVCGLLCFCFFLLSCPSGFRFRLIGAGSQLPFFICV

SEQ ID NO: 275527 - protein, 161 aa, Zea mays
  unsure (1)..(161): unsure at all Xaa locations
  Clone ID: MRT4577_182872C.1.pep
KVQSKKCTHRQPSRGATRRNPTPPKEEPKGGGKKPGAPPQQNRTSPGGRPGGGAPTHGRAPPGGPGPGPNPAQPGGGQRAARNWPPPTGPHNKPARSEKRKARGAKRGSQPPGTEGGKPGGPQGGNQTRQPPXKPPTPRGRNPGERXNKKPPPPTRRAWAF

SEQ ID NO: 275528 - protein, 79 aa, Zea mays
  Clone ID: MRT4577_182873C.1.pep
PTITLRNRPSKADLPAPGPKPFFLLHHNHPVTHSTHILLHRVHPRPGFCHHPYLPSKLCTPTHHQSTTQLHQHLPPSYL

SEQ ID NO: 275529 - protein, 335 aa, Zea mays
  Clone ID: MRT4577_182874C.1.pep
MAHRVLLLLSLASAAAVAAAVDAEDPLIRQVVPGGYDNDLELNAESHFLSFVQRFGKSYKDADEHGVTKFSDLGLRKSRRALLRELGESAHEAPVLPTDGLPDDFDWRDHGAVGPVKNQGSCGSCWSFSASGALEGAHYLATGKLEVLSEQQFVDCDHECDSSEPDSCDSGCNGGLMTTAFSYLQKAGGLESEKDYPYTGSDGKCKFDKSKIVASVQNFSVVSVDEAQISANLIKHGPLAIGINAAYMQTYIGGVSCPYICGRHLDHGVLLVGYGASGFAPIRLKDKPYWIIKNSWGENWGENGYYKICRGSNVRNKCGVDSMVSTVSAVHASKE

SEQ ID NO: 275530 - protein, 72 aa, Zea mays
  unsure (1)..(72): unsure at all Xaa locations
  Clone ID: MRT4577_182875C.1.pep
LYPLCVQTLQCVYDKMDNDPVQIPAIIIPPLSYLLLRYIYKCSADRFRLQIAGXHPWVGGDEGAVGFSVCRC

SEQ ID NO: 275531 - protein, 371 aa, Zea mays
  Clone ID: MRT4577_182876C.1.pep
MAHRVLLLLSLAAAAAVAAAVDAEDPLIRQVVPGGDDNDLELNAESHFLSFVQRFGKSYKDADEHAYRLSVFKANLRRARRHQLLDPSAEHGITKFSDLTPAEFRRTYLGLRKSRRALLRELGESAHEAPVLPTDGLPDDFDWRDHGAVGPVKNQGSCGSCWSFSASGALEGAHYLATGKLEVLSEQQFVDCDHECDSSEPDSCDSGCNGGLMTTAFSYLQKAGGLESEKDYPYTGSDGKCKFDKSKIVASVQNFSVVSVDEAQISANLIKHGPLAIGINAAYMQTYIGGVSCPYICGRHLDHGVLLVGYGASGFAPIRLKDKPYWIIKNSWGENWGENGYYKICRGSNVRNKCGVDSMVSTVSAVHASKE

SEQ ID NO: 275532 - protein, 54 aa, Zea mays
  Clone ID: MRT4577_182877C.1.pep
LYEYRAGSTSHTNETHRHQFYAYLSLCLTKEQALGKKRKGRPFTLFLTLGRILN

SEQ ID NO: 275533 - protein, 38 aa, Zea mays
  Clone ID: MRT4577_182878C.1.pep
SMSFKPQRSTQIANSAFHLHPYVIHVSSIIQQNRKPVC

SEQ ID NO: 275534 - protein, 131 aa, Zea mays
  Clone ID: MRT4577_182879C.1.pep
MGFAPIPAVTEPSKSLGPPTVVLVQWTSDNPAGAPDHLTSSVSDFLTLPKSVSPVMQTLQYIGDQVHANREHRYITVQPLATEGTRYSRHLSTPIVCYLILSNAKHKKNLFVKQGIKEKYSNPRKEMQQLV

SEQ ID NO: 275535 - protein, 133 aa, Zea mays
  Clone ID: MRT4577_18287C.1.pep
MSYYGDRRAESSIVEAFTLSPLPYPVILVLLMVTLLLGASWFFTYDDFIEEASQQLSWALLGVPIALVLLIRWISSVDSFEGYLGFYPRESRWKGRYERGPAEGSSPWGVALLVLLLLVLASFHSTIHDMWGP

SEQ ID NO: 275536 - protein, 110 aa, Zea mays
  Clone ID: MRT4577_182880C.1.pep
MGSCASKSCCDWCWRKALGATATAAARRGHQGAAAVHPWTPPEVPPGQRVTVRMRASEFRALAAVRSNDRGAGDGDVARLILDGCAAGRWAWSPAPEYVARRIGPTYSTS

SEQ ID NO: 275537 - protein, 67 aa, Zea mays
  Clone ID: MRT4577_182881C.1.pep
PTAAAFGGVCIGALTVLAVLLGGFGPGTGILLAVPIIYPSLETFEKKRAPGLGLFGFSLVAVTLSWL

SEQ ID NO: 275538 - protein, 50 aa, Zea mays
  Clone ID: MRT4577_182882C.1.pep
FFFIFFFFLFNKGGYPASPKSRSSSMADDRRPLYISPYPDFDDANLRRRH

SEQ ID NO: 275539 - protein, 142 aa, Zea mays
  unsure (1)..(142): unsure at all Xaa locations
  Clone ID: MRT4577_182883C.1.pep
PSIRGVHLISLDPRITGNPKVVPSSKIPFAAIEKYAWTEATCPVCMEFPHNAVLLLCSSHGNGYCPYICASSYQHSNCLDQPVESCRKEASEDPDAIELACPLCRGEVKCYTLVDPARKQLNHKKRSSMEDGCXXXXXXXEL

SEQ ID NO: 275540 - protein, 49 aa, Zea mays
  unsure (1)..(49): unsure at all Xaa locations
  Clone ID: MRT4577_182884C.1.pep
CQRTNGPSLYFNRSLXXKLAICNSVPIKPLERKGGFASFIPFNRKHHMF

SEQ ID NO: 275541 - protein, 53 aa, Zea mays
  Clone ID: MRT4577_182885C.1.pep
KFIRPKKIMEFPGNPFLTRYPSPKVLFGQTYFLASNQTPNVLLFKKPIAVAYG

SEQ ID NO: 275542 - protein, 118 aa, Zea mays
  Clone ID: MRT4577_182886C.1.pep
VADRVGLVAPLAHFLHQLNLNVSLCEELVEDRDQGGGGGGGSDGRGLGCRSRWRGSGKRREKFGGEGLPAGEVAEALAAEAEERAAAAAQAGSLGVGARRRLGGGGRGVGVEPSVNLV

SEQ ID NO: 275543 - protein, 115 aa, Zea mays
  Clone ID: MRT4577_182887C.1.pep
NRSGEPTPLWVGCSFLRPPRFYHFWFRFVRWWGFGRKNFFRKEPSFSFIHASFLGPPLRESWVAGGGPAVISGPTPGAGPSFFGYHWFETPQRGGFPPPFGWEGLFFLKGGGPRV

SEQ ID NO: 275544 - protein, 116 aa, Zea mays
  Clone ID: MRT4577_182888C.1.pep
PHLQRHLELELLERLLGGVPAARVPDAVGRRAAQLRLLRLSVQARGLQPQLLAPLPVVQEPLGSRRLTPCSRPTKASSITPPARPITVTSYATARLHIYALMQVHCRTCTYVYRYS

SEQ ID NO: 275545 - protein, 68 aa, Zea mays
  Clone ID: MRT4577_182889C.1.pep
TRLRPSSRRLVNESRAGGYYDGQVEEKAHEEVEEKSLIDDAKILACMMPIANGGVNYRCVTILQCMRL

SEQ ID NO: 275546 - protein, 133 aa, Zea mays; identical to SEQ ID NO: 275535
  Clone ID: MRT4577_18288C.1.pep

SEQ ID NO: 275547 - protein, 116 aa, Zea mays
  Clone ID: MRT4577_182890C.1.pep
MGHEGSCRCELCGAPAAVHCAADEAFLCAACDAKVHGANFLASRHRRTRLRLAAAADPPPDDEAGYGSAASSCVSTADSAPRPRRGARAPARSVRPEGVLEGWGQRMGLGAGGRPR

SEQ ID NO: 275548 - protein, 60 aa, Zea mays
  unsure (1)..(60): unsure at all Xaa locations
  Clone ID: MRT4577_182891C.1.pep
YGNVHVKIGSHMLLVVVISEXVGLVVDPKLLAGFGTNPNGPALAHDIKNPGGHCTYDIWI

SEQ ID NO: 275549 - protein, 54 aa, Zea mays
  Clone ID: MRT4577_182892C.1.pep
LHDKTCPSLMLTTNPRAQRKKQETLHVTKLGPTWGGWVVPDKKTRHAVKETPQV

SEQ ID NO: 275550 - protein, 69 aa, Zea mays
  Clone ID: MRT4577_182893C.1.pep
ALGPLSRRRPELGSACLPCCGWPLWASASAPLPGSGRLALLCLLGLCFYLLMPGIRGASACCSASSAVA

SEQ ID NO: 275551 - protein, 55 aa, Zea mays
  Clone ID: MRT4577_182894C.1.pep
QRQLLGSNPVFAGLTALLLLLLIKHGFGFVVLQKKNQKKKKKKKKKKRAASRSRT

SEQ ID NO: 275552 - protein, 727 aa, Zea mays
  Clone ID: MRT4577_182895C.1.pep
MSQEKKAVTEMKLSLLEEKNLGFLESIAKTNTEKITREILEGLSEDTGESDSYDVESGGHTVFGKSSIKQSHLDNMRGRYFRDMSTVREDDGERTVPTPEDNEVMIFRSFFKDGFRFPLNRFVVEVLKIYQVYLHQLTPEAIIRMRIFVWAVKSQGLEPNAKSFCNMHELLYETKPWDKEQYHNNFGCYSFGACSGSSCPVPTFRKRWPGDWMKEWFYRFGLRKPKVDIDEATEECQRAFGVVCSFIGTRDLVQEHIAFRVWPLVEKWKMPKETITRSDEGGLIRMKFTFRYEGREKKRLNRVFDAIGFMYPDYRYPLRGRKRKDATSGKDTASAAPSEPAPKRKKVKVLTHRPRFIEPAIVPEFVGETSSVAEAKKLTPAQKIDEPAAMPEMEKIEEPKAKETRTSEVLSPSARVEVSMPKAQKDLNTTPKRKRMREAQFYAQKLKYPKGALIFNGSGEEDFFYCLPDSKEISVCREMSKSFGFPTLEDGLSVLSKDELADSLAYNSLKGLILSNALRAQKDAEDEGCTIALNNLRSEVIELRNEEAKREISDQRTKYLEKNIEELRISKEKCFEKAMDCVKRIKISFVNVGTYSSEENFIGPIPYMPLENILISYTKDPSAEASLVGGKFFTDIWENGGREMAQEIIRKSEKDTYDAREVAEAAKKTADLERRIAALSPLPEPVEPLVDPKAKEDDEIIKMAEAIMDKVVDQLLNEAAEVVLKED

SEQ ID NO: 275553 - protein, 185 aa, Zea mays
  unsure (1)..(185): unsure at all Xaa locations
  Clone ID: MRT4577_182896C.1.pep
VRTDTGDKGDGSAIGIDLGTTYSXVGVWQPDTPXIIVNDQGXNWTTPSYDAFTDSDRHIVDAANNQFAMQPIKTDSDATRLIGRRLSDVIVQSALKLWPFEVISGPGEKPMIDVHHQGEEKQFAAEEISSMDLIQMTEIAEAYLGRTIQNAVVTVSAXYNDSRRNATKDAGVNAGLNALRIINRA

SEQ ID NO: 275554 - protein, 84 aa, Zea mays
  Clone ID: MRT4577_182897C.1.pep
KLDSVVEVADGGKDVVVTIPAHRHLVFSLALPPHVFSSPAWDSFLAPRVLVTIQGLLCLKKIPNLLEKEAPYRALDTSCTQRNK

SEQ ID NO: 275555 - protein, 901 aa, Zea mays
  Clone ID: MRT4577_182898C.1.pep
MSKDKKAVAETKLSLLEEKNLGFLESISKTNTEKITREILEGLSEDTGDSDNYDAESGGEDSEDRPWQPSHAVFGKSTIKQSHLANMRGEKTCPTLEENEVVIFRSFFKAGLRFPLSSFVVKVLKIFEICLHQITLEAIIRMGIFVWAVKNQGLEPNAKSFCNMHELLYETKPWGKEQYYNNFGCYSFGARSGSSCPVPTFRKRWPGDWMKEWFYVKNDLKVREDIKDIIMRPIWQRFGLRKPKVEMDESAEECQRAFGIVCSFIGTRDLVQEHVAYRIWPLVANWEMPKETINNPHKGGLVRLKYTFRFVDQFIEPDDDWLKCVEATSDELLGPYSKAEDTALSAAFGGRKKKRLNRVFDAIGFVYPDYRYPIRDQKRKVTAYVKEVASAAPSEQAPKRKKMKVLTHRPRYIEPATVPEFVDGKMEEPRAEETKTSEVLSPSARVEVPMPTPKAQKDLTTTPKRKRMVNVLDVLETIKSSSSTSKIIVEAPKTEIEAEAAKSHVEIETGLSEPAKREFLEIGKETENESVEEILSEKTAIPIPEASSEAPNYVLHHASGKNLTEKEKREAQFYAQKLKYPKGALIFNGSGEEDFLYCLPDSKEISVCREMARNFGFPTLEDGLSVLSKDELADSLAYNNLKGLILSNALRAQKSAEDEGCAMALNNLRSEVIELRNEEKNIEELRASKERCYEKFIECVKKIKTSFANVGAYSSEENSVKGDPEGPIEWTSHEAEAFEEVLNGRGDICAFSGARGVATILESRGCDHVKSLAQAEAALSSEDIKDPSAEASLVGGKFFTDIWENGGREMAQEIIRKSEKGIHDARNVAEAAEKSADLERRIDLFTLCNTAALSSPPEPAEPLADPNAKGDDEIRKMAEAIMDKVVDQLLNEAAEVVLRED

SEQ ID NO: 275556 - protein, 230 aa, Zea mays
  Clone ID: MRT4577_182899C.1.pep
MAAEGEDKKDANSVGGGGGGENTLEAAEEAILQAVGQEPGQELEGEAEESADREGNGDDTGKEDSGCKDLVLVEDPVLVEDPEEAAATAALQEEMRALLASVPEGAGASFTAMQLQELEQQSRVYQYMAARVPVPTHLVFPIWKSVTGASSEGAQNYPTLMGLATLCLDFGKSPEPEPGRCRRTDGKKWRCWRKTIPNEKYCERHMHRGRKRPVQVIVEDDEPDSASGSK

SEQ ID NO: 275557 - protein, 102 aa, Zea mays
  unsure (1)..(102): unsure at all Xaa locations
  Clone ID: MRT4577_18289C.1.pep
GAHGPNKQNDPPGAPKPAGXPGDPGESHKPGRPGPXQPPTGPGKHIPPPGALHHGQAAAPEPRTPEPGPQGPRGPQEHPGPRGSLPWPHNPRGISSRHPHPW

SEQ ID NO: 275558 - protein, 66 aa, Zea mays
  Clone ID: MRT4577_1828C.1.pep
DFENDFIVYAINFDTLFWIYIYHIRKNLKTMSNSFSLKPIVFNLILIRNNLKGINKIENKYHLGLL

SEQ ID NO: 275559 - protein, 248 aa, Zea mays
  Clone ID: MRT4577_182900C.1.pep
MSKSFGFPTLEDGLSMLSKDELADSLAYNSLKGLILSNALRAQKDAEDEGCTIALNNLRSEVIELRNEAKREISDQRTKYLEKNIEELRISKEKCFEKSMDCVKRIKISFANVGAYSSEENFIMGDPEGPIEWTSHEAEAFEEVLNGRGDICAFLGAREIAAILERIGCEHVKSLAQTEAALSIEDTKDPSAEASLVGGKIFTDIWENGGREMAQEIIRKSVKDTHDAREAAEAAEKTADLERRIGID

SEQ ID NO: 275560 - protein, 139 aa, Zea mays
  Clone ID: MRT4577_182901C.1.pep
VGSPFLISEDKKVVAETKLSLLEEKNLGFLESVSKTNTEKISREILEGLSEDTGDSDSYDAESGGEDSEDRPWRPSHAVFGKSTIKQSHLANMRGRYFWDLSIVRADEGEKTCPTPEENEVVIFRSFFKAGLRFPLSNF

SEQ ID NO: 275561 - protein, 136 aa, Zea mays
  unsure (1)..(136): unsure at all Xaa locations
  Clone ID: MRT4577_182902C.1.pep
GALCFKAPTGGIYIINLGKTWEKLHLQPGVICPLENPGDLFXHTAPPYMQRAVLKIAQYTGAHSIIGRDTPGTFTNXLQTSFNEARLLILTDPRTDHQPIKECALGNIHTIAFCDTDSPMRDVDIGIPANNKGRNS

SEQ ID NO: 275562 - protein, 862 aa, Zea mays
  Clone ID: MRT4577_182903C.1.pep
MAKTNTEKITREILEGLSEDTGDSDSYDVESGGEDSEDRPWRPSHTVFVLKIYEEYLHQLTPKAIIRMRIFVWAVKSQGLEPNAKSFCNMHELLYETKPWGKEQYHNNFGCYSFGARSGSSCSVPTFRKRWPGDWMKEWFYVKNDLKAREDIKDIIMRPIWQRFGLQKPKVDIDEAAEECQRAFGVVCSFIGTRDLIQEHIAFRVWPLVEKWEMPKETIIKSDEGGLVRMKYTFRYEGKFVEPDDDWLKCIEATSDELLGPYSKAEDTALSAAFGGRKKKRLNRVFDAIGFVYPDYRYPIRGQKRKGTASVKEVASAAPSEPAQKRKKMKVLTHRPHYIEPVTVPEFVGETSSATEAKEPTHLRNTEELAAMPETEKMEEPRAEETKTSEVLSPSARVEVPMPTPKAQKDLTTTPKRKRMVNMLDVLETIKSSSSTSKIAVEAPKTEIEAEAAKSQVETETGLSEPAKREFLEIGKETEKDSVEEILSEKTTIPIPEASSEAPNYVLRHASGKNLTEKEMREAQFYAQKLKYPKWALIFNGSGEEDFLYCLPDSKEISVCREMARNFGFPTLEDGFSVLSKDELADSLAYNSLKGLILSNALRAQKSAEDEGCAMALNNLRSEVIELRNEGLEKDKILHSLVNKIKEDEAASKAQAEVQKREIEDLRKQLAEAKEKCAVAEAKREIGEQWTNHLEKNVEELRASKERCYEKSIECVKKIKTSFTNVGTYSSEENFVKGDPEGPIEWTSHEAEAFEEVLNGRGDICAFSGARGIATILESRGCDHVKSLAQAEAALSSEDIKDPSAEASLVGGKFFTDIWENGGREMAQEIIRKSEKGIHDARNVAEAAEKSADLERRIGIDY

SEQ ID NO: 275563 - protein, 36 aa, Zea mays
  Clone ID: MRT4577_182904C.1.pep
EFMIKRYRSIKPNLYIVQFKINCTQKTSCTCYASKH

SEQ ID NO: 275564 - protein, 119 aa, Zea mays
  unsure (1)..(119): unsure at all Xaa locations
  Clone ID: MRT4577_182905C.1.pep
LERSATPSSSIRRGRAHVPRAHPLACGRAIIAFLFVFGASGRPSLSPAARTGEHHAPRTQKPYRKIRISGFCIACAPRRRAGAAAVGKPAVGGSDACCTGVVVXRAAPPVVDVGGRGRL

SEQ ID NO: 275565 - protein, 90 aa, Zea mays
  Clone ID: MRT4577_182906C.1.pep
LIGLFVCLSVCSITNYQTTASLNWPNYNPINSLPRIAAIYLGAVSRLWPREIDPSCWWGQGGPWPPAPWECVEHSCRILPFERSPRRWSS

SEQ ID NO: 275566 - protein, 31 aa, Zea mays
  Clone ID: MRT4577_182907C.1.pep
YSISVSDRKCFLVGPPTSRYETPPIFIICKK

SEQ ID NO: 275567 - protein, 101 aa, Zea mays
  Clone ID: MRT4577_182908C.1.pep
LNQSLLSPLLQRGEAHFFCVPIHHFTAFSKSLLNSRHIKQTRTHASSKMPPMGPAGGNTSTHLCYTYVRHIHFVAYYAQRKPASPDSRNHSNGFPRLIDRI

SEQ ID NO: 275568 - protein, 44 aa, Zea mays
  unsure (1)..(44): unsure at all Xaa locations
  Clone ID: MRT4577_182909C.1.pep
GLKAEHSNFIVKGAKXQTLALFFIFIMVDHMRKMKNNAIVCNIG

SEQ ID NO: 275569 - protein, 216 aa, Zea mays
  unsure (1)..(216): unsure at all Xaa locations
  Clone ID: MRT4577_18290C.1.pep
EARNSARGTFPPASSPPQHRETRVGLETSRGPLHPPPTQATQAHDEKPETQTTGAPPTTEHGNTKTKGPSSTPTNPQQXHAGSQGPRPRDPKRAETPXNTRPRRHPKTDSTETPXKRDKPAPPTEKKLPPKPXQASHKQDPQQKGKKPRRPTRDKKPTPKARPTPRREPKPKKSXRPKNPDRKTTEGQTDPEPKKKKNGGEKNRPKKKGAPPQNHQ

SEQ ID NO: 275570 - protein, 256 aa, Zea mays
  Clone ID: MRT4577_182910C.1.pep
MSFGSVGMEEEGGAGASAEEIRRLPAEVNWEMLDKSRFFVLGAALFSGVSSALYPAVVVKTHLQAAAGVSAAVAAQVVWTPVDVISQRLMVQTPDACRYRGGADAFRKILLADGVRGLYRGFGLSILTYAPSNAVWWSTYAVAQRCLWRAVGTERSESCACLMAVQGASAALAGGTAALVTMPLDTVKTRLQVMEADAAARPTLASTVRGLLKEGGWAACYRGLGPRWGSMSLSAATMVTTYEFLKRLSAKEGSLG

SEQ ID NO: 275571 - protein, 59 aa, Zea mays
  Clone ID: MRT4577_182911C.1.pep
YILRLMNRVDRANRLLISDNISDSISTNDDEFKGALEHIIVDYRLSDPTRPRSRGSTGE

SEQ ID NO: 275572 - protein, 94 aa, Zea mays
  unsure (1)..(94): unsure at all Xaa locations
  Clone ID: MRT4577_182912C.1.pep
PRPHEAVCCCPAXXGRLSCXCSPGPSXDDQXGTTXAPXXRPLPPRSXRRPLPXVXXAXXASXXPPGRRXSRXRAXXPPXRTXXRAGAQDXXVPR

SEQ ID NO: 275573 - protein, 328 aa, Zea mays
  Clone ID: MRT4577_182913C.1.pep
MSFGTVGMEEEGGAAAAAEEIRRLPAEVNWEMLDKSRFFVLGAALFSGVSAALYPAVVVKTHLQVAPPPQAARATAAAILRRDGLRGFYRGLGASLGGTVPARALYMATLEATKSSVGSAAVRLGVSEPAASAAASAAAGVSAAVAAQVVWTPVDVISQRLMVQTPDACRYRGGADAFRKILLADGVRGLYRGFGLSILTYAPSNAVWWSTYAVAQRCLWRAVGTERSESCACLMAVQGASAALAGGTAALVTMPLDTVKTRLQVMEADAAARPTLASTVRGLLREGGWAACYRGLGPRWGSMSLSAATMVTTYEFLKRLSAKDGSLG

SEQ ID NO: 275574 - protein, 55 aa, Zea mays
  Clone ID: MRT4577_182914C.1.pep
IRCGTIPYSEDSSGCAECCVVLCSGDRVKVREKNEVNQTNTGNKQPAETTRGGQA

SEQ ID NO: 275575 - protein, 76 aa, Zea mays
  unsure (1)..(76): unsure at all Xaa locations
  Clone ID: MRT4577_182915C.1.pep
VTMPLXHREPRLQVMEADAARPTLASTVRGLLREGGWAACYRGLVPRWGSMWLSAATMVTTYEFLKRLSAKDGSLG

SEQ ID NO: 275576 - protein, 107 aa, Zea mays
  Clone ID: MRT4577_182916C.1.pep
RAAAARNSGQVSHAQQEAAAPKKNVMSLRLNSSSPSFYPSCALYQDFSVATHKPDLPTGGSYKIPSSSMKMDDYLILPSGSMGKGRTSMDYCGHDMVHAPGPVKDPL

SEQ ID NO: 275577 - protein, 81 aa, Zea mays
  Clone ID: MRT4577_182917C.1.pep
LQRDSPFLRTAKCGDGNRIRDIKVMSLGGYETALLRSVRPKTGGRKQKRVLQACTSSRQTNGIASSYRMERLAAIEPVSLA

SEQ ID NO: 275578 - protein, 61 aa, Zea mays
  Clone ID: MRT4577_182918C.1.pep
TSDFPLSQYLMQAVVLRAARTLIYDGICLPLPTALFVWDPLFGAASLFSFLKGGGPSLRIF

SEQ ID NO: 275579 - protein, 93 aa, Zea mays
  Clone ID: MRT4577_182919C.1.pep
YRVSFACFCLPVSRDYVCRSSFNALLSGYCRHSVKGAREQARPLKPEPWNVRFSFRAKNRSYRPHHRKQVQAESSADHALRKCRLLVVRSVVL

SEQ ID NO: 275580 - protein, 69 aa, Zea mays
  Clone ID: MRT4577_18291C.1.pep
SRKTKPHAWGDTDDSEQTIFTLNLPFRLMYKPITPQPLVPSNHAWIATRSGSGPSRLINTHKLIHKGTL

SEQ ID NO: 275581 - protein, 132 aa, Zea mays
  unsure (1)..(132): unsure at all Xaa locations
  Clone ID: MRT4577_182920C.1.pep
RKKVHKIQLGRGPXKKKKKKKLKKKRVGLVGAPGVLGVRVRVLGARGRRVLAPWFVRAWCGVSRWRCXRSRSRWRFGRPPRWACPPLPVGGLRVRVLGCRAGAFXLVCVLKKKTKKKAEPVGPPAXPLWPLA

SEQ ID NO: 275582 - protein, 58 aa, Zea mays
  Clone ID: MRT4577_182921C.1.pep
QTWFCRCCDLTYNSFGLIPLFREGSRRFIPLSKKNCILQEEIQKGKLLMIHLMYKIFR

SEQ ID NO: 275583 - protein, 55 aa, Zea mays
  Clone ID: MRT4577_182922C.1.pep
VGYYVSPHRTLLFVVRIRAINAIPPQDRGIMQLLRLRKILNGVFLQVNRATIIML

SEQ ID NO: 275584 - protein, 100 aa, Zea mays
  unsure (1)..(100): unsure at all Xaa locations
  Clone ID: MRT4577_182923C.1.pep
RTARRPARAACXKXXEAALCXXCXXPFPVXRAGGASXGFKEGGXXHRYSXHSPAIGXSATAARPAXRVAXARARPRARFVQRAARRGXRVASWAAWPRRA

SEQ ID NO: 275585 - protein, 93 aa, Zea mays
  unsure (1)..(93): unsure at all Xaa locations
  Clone ID: MRT4577_182924C.1.pep
MKWMFKEDHSLEHRCVESAKIRAKYPDTVPVIVEKVSGSQIVDIDKRKYLVPSDITVAQFMWIIRXRIQLPSEKAIFLFVDKTVPQSSLTMGQ

SEQ ID NO: 275586 - protein, 108 aa, Zea mays
  Clone ID: MRT4577_182925C.1.pep
PFLKFTAPILVQAHTNGARRGEKKTRGEIAAPLAEPPATLLIHQRSTHRSRGEDRRRGALPNRRHQTRCWCKNWTTRAKNQSCAYKQKGGPPYYPDRTLFRAGVVMNL

SEQ ID NO: 275587 - protein, 63 aa, Zea mays
  Clone ID: MRT4577_182926C.1.pep
MGAAARKPAAAGVLPIWLCLVCASRAQPYIGVNYGEVADNLPSADETARLLRSTSISRVRLYG

SEQ ID NO: 275588 - protein, 76 aa, Zea mays
  unsure (1)..(76): unsure at all Xaa locations
  Clone ID: MRT4577_182927C.1.pep
MARALCRLPRRGLWLLLAHHLFMTTDCQEANYGALLRELCLTQFQVDMEAVGETLXCDXGRTIRSYKALTDCTWPM

SEQ ID NO: 275589 - protein, 150 aa, Zea mays
  unsure (1)..(150): unsure at all Xaa locations
  Clone ID: MRT4577_182928C.1.pep
MLNINLFRTDKGDNPDLIRESQRSRFASVELVDEVIALDKAWRERQFELDKIRQELNATSKKIGKLKASKQEEEAKKLMESTDEIKKRLTGKEVEVXEAKSTLDAKVTTIGNIVHESVPVSNDEANNKIVRAFGEKRVEDNLKNHVDLCR

SEQ ID NO: 275590 - protein, 70 aa, Zea mays
  Clone ID: MRT4577_182929C.1.pep
IQVSTLVRPPKFELHSIFSFSETLLETGALTIGETIIFATFEQNLHLSQADLMDQEIVYEEASDTLPSMH

SEQ ID NO: 275591 - protein, 94 aa, Zea mays
  unsure (1)..(94): unsure at all Xaa locations
  Clone ID: MRT4577_18292C.1.pep
MIRLFNDGQPVTNSWDTQEGKLEQGQQMLTIFKNHEDDTTNVEELDFYVRWEKALQENIRLQQPXLPSILRSWRIPTLRVLWPMNDMHLQRSTR

SEQ ID NO: 275592 - protein, 54 aa, Zea mays
  Clone ID: MRT4577_182930C.1.pep
HNKIYKYQLCILDIISTFSTYSTSNHLLFQQGHSHILFYYNTALTPLPYEIQTF

SEQ ID NO: 275593 - protein, 218 aa, Zea mays
  Clone ID: MRT4577_182931C.1.pep
MLDINLFRTDKGGNPDLIRESQRSRFASVELVDEVIALDKAWRERQFELDKIRQELNATSKKIGKLKASKQEEEAKKLMESTDEIKKRLAAKEVEVQEAKSTLDAKVTTIGNIVHESVPVSDDEANNKIIRTFGEKRVEDNLKNHVDLCRMLDIVALEKGADVAGGRGFYLKDEGVLLNLALINFGLAFLSQPGFKPMQTPFFMRKESRSKESPRGRG

SEQ ID NO: 275594 - protein, 81 aa, Zea mays
  Clone ID: MRT4577_182932C.1.pep
MLDINLFRTDKGGNPDLIHESQCSRFTSVELVDEVIALDKAWRERQFELDKIRQELNATSKKIDKLKASKQEEEAKKLMEI

SEQ ID NO: 275595 - protein, 89 aa, Zea mays
  Clone ID: MRT4577_182933C.1.pep
DGEKTTHGNQGQKKTGATGGNTDTGPPNYRKKPEHTRKACKGRPPNLRQGELGDGLGAPGNGGLGEPPGEDKAHGGLDPTGGEGGLFGA

SEQ ID NO: 275596 - protein, 112 aa, Zea mays
  Clone ID: MRT4577_182934C.1.pep
AQGPPPPAGPGPPPQEAARAAPPQPSGGPRPPSRGPQEPGGETHPSPQGRSPPDQTGPPRQPQMRHSRKTQSQTNPKPPRVGGCASLGAQLLCQGAGLPPLAGPPPPLTGPG

SEQ ID NO: 275597 - protein, 86 aa, Zea mays
  unsure (1)..(86): unsure at all Xaa locations
  Clone ID: MRT4577_182935C.1.pep
MVWGSGVCAKRIVVDSRHRMLGRLSSIIAKELLTGHKVVVARCEXEICMSTGLVRDKMKCLRCXRKRTNTMPCHRRIHFRATGKML

SEQ ID NO: 275598 - protein, 75 aa, Zea mays
  Clone ID: MRT4577_182936C.1.pep
YQHFFLKNRNKRETRGNIQNTKDNTDQHHREPECIFITTETHATHERKEVHEPRTTKYIQTAQGKNRQQENKHGQ

SEQ ID NO: 275599 - protein, 123 aa, Zea mays
  unsure (1)..(123): unsure at all Xaa locations
  Clone ID: MRT4577_182937C.1.pep
QGEFNYRKALWSPEEDXKLKHYILTDGLGCXSAGPVKAAVQRNGKSXRLGXINYLRPGLNRGMMSQEEEXDVLIYLQAKLGNKWAQIAIHLPGRTDNEAKNYWNSYLTKRVTPEAQSAVVQFQ

SEQ ID NO: 275600 - protein, 62 aa, Zea mays
  Clone ID: MRT4577_182938C.1.pep
LCACLFPPVLLEFWLLAVLLTVQKSIFYNALKVSFIQFEGLCHCVFLLEGQFSSSLVFCTGW

SEQ ID NO: 275601 - protein, 54 aa, Zea mays
  Clone ID: MRT4577_182939C.1.pep
NTYKMHLHVNTVKSCHLKFYTQKALSTSKNRRNFLLVSIRHFKTTNSFLYSISK

SEQ ID NO: 275602 - protein, 229 aa, Zea mays
  unsure (1)..(229): unsure at all Xaa locations
  Clone ID: MRT4577_18293C.1.pep
MFAAALNCRSPGGNQPCGGGDECMAILSESSNNIEEIDASTFLGNACEVPASSHFKVLIVDDCQHMDKEGWYAIYNSLEGIPESTIFVMITSDIEKLPSNSIEWYFIVFVDIGAIDKAVEEAMFGVFTNAGQVCSATSCLLLHEKIAKQFLDRLVGWAKIIKVXDPLEEGCRVDSVISDRQYEKIKXKFISTXESEGATNLYERISRALHSGIIWINFLHLQWDPGGID

SEQ ID NO: 275603 - protein, 173 aa, Zea mays
  unsure (1)..(173): unsure at all Xaa locations
  Clone ID: MRT4577_182940C.1.pep
YVFLLCFLYMAYSGWIWLMFPGFLLXLLIFMLWNKHYRHGRSVGAFEIITPPRRRTVEQLLALQQAISQLEAHVQAGNIFLLKLRSLMLAAFPQSTNRVAAALVAVAAIFTFVPLRTIVLLILLEEYTRQMPVRKKSSEKLVRRLREWWLRIPAAPVQLVKPRETRRWRSRLR

SEQ ID NO: 275604 - protein, 625 aa, Zea mays
  unsure (1)..(625): unsure at all Xaa locations
  Clone ID: MRT4577_182941C.1.pep
MKFMRLGTRPDTFFTAADSVRSVCTEVATDLQILVDNCLYHLHKFPLLSKCMLLQALCADAGDVVVELPGFPGGAEAFEACAKYCYGITITVSARNLVPLRCAAAHLGMSEAADRGNLAAKLDAFLASCLLRRWKDALGVLHSTRHHAPLCEDLGLTSRCVDAVAALVASPDTAPPPRSTSASPWWAHDVAELGVDLFWRIMVAVKATGAVHEKTVGDALKAYARRWLPNVAKDQPLDRDAADVKQVATRHRLLLEKIVSLLPAERDAVSCGFLLKLLKAANILGASKASRAELVRRVAWQLEEASVSDLLIPSLSCVSDTLYDVGAVSAILDEFALRCAALPPAPALXVREPRRQPGALGRXRRSRSAESVSFDGTRRSLSAAPVSQGGLVQVGKLVDGFLIEVAKDPNMPMDKLLAIAEAVPDSARPEHDGMYKVVDTYLKAHPEMSKSARKRLCRVLNCRKLSEKACAHAAQNELLPLRVVVQVLFFEHARAAALASGGHAVAAAADLPSNIRALLSKSGSSEDDEGGPRRRAXLRALAAGASPGDDWSVEGPRRAASKIATLRMKLAEDEDEDRDADEFARKAGLPRSASLRFRAFCAIPAGKPRRMLSKLWPLGRSGVSH

SEQ ID NO: 275605 - protein, 412 aa, Zea mays
  Clone ID: MRT4577_182942C.1.pep
MAGGRGSSAARLALLLLVVVTAAGAVAGGKVVHVEEAHRRSMLANGLGSAPPMGWNSWNHFQCDGNGEVVIRETADALVSTGLAALGYRYVNIDDCWAEPQRDAKGNLVANTKTFPHGIKALADYVHGKGLKLGIYSDAGFQTCAKAQPGSLGHEELDAKTFAAWGVDYLKYDNCNNGDLKPLERYPEMSRALMKVGRPIYFSLCEWGDMHPATWGATYGNSWRTTNDIADTWDSMIATADQNEVWSEYARPGGWNDPDMLEVGNGGMTNSEYVVHFSLWAISKAPLIIGCDVRHMSRETYAILANKEVIAVNQDPLGVQGKKVRMEGSSEIWAAPLSEYRTAVLLLNRHAKDEATITAHWDDIGLPAGTPVEARDLWLHETLDATFTDKMSFDVAPHSCRMLVLKPRIQIQ

SEQ ID NO: 275606 - protein, 105 aa, Zea mays
  Clone ID: MRT4577_182943C.1.pep
KHCRTSQRASTFSLSPASTFTITTPFHLLTSQSKAPSTFFSVCVCLNKSWAVLFCGSFFRRLVPSLYGLFRRTNAPYHCCMHKVPNVVFVLTPRNLAIPSNIFRS

SEQ ID NO: 275607 - protein, 489 aa, Zea mays
  unsure (1)..(489): unsure at all Xaa locations
  Clone ID: MRT4577_182944C.1.pep
MAGGRGSSAARLALLLVVVVAAVAGGAVAGGKVVHVEEAHRRSMLANGLGSAPPMGWNSWNHFQCDGNGEVVIRETADALVSTGLAALGYRYVNIGALASLRGSXLILETLFFFWRXKKDPYELNWITKRVLVDPHVSDDCWAEPQRDAKGNLVANTKTFPHGIKALADYVHGKGLKLGIYSDAGFQTCAKAQPGSLGHEELDAKTFAAXGVDYLKYDNCNNGDLKPLERYPEMSRALMKVGRPIYFSLCEWXYCNGTGVRLSITMTWFRGKRADLTRSPSXGDMHPATWGAAYGNSWRTTNDIADTWDSMIATADQNEVWSEYARPGGWNGNDPNMXEVGNGGMTNSESFVHFSLWAISKAPLIIGCDVRHMSRETYAILANKEVIPVNQDPLGVQGKKVRMEGSSEIWAAPLSEYRTAVLLLNRHAKDEATIAAHWDDIGLPAGTPVEARDLWLHETLDATFTDKMSFDVAPHSCRMLVLKPRIQIQ

SEQ ID NO: 275608 - protein, 95 aa, Zea mays
  Clone ID: MRT4577_182945C.1.pep
CKLNFVRKKFLGEGFPPKDWGREFWCLKRVNPSGGCCGQGIFLFLLEIRVFFERGSLVLHPFPFGNKGAPGNCPGFLCGFCTGENFKVYRGFGPF

SEQ ID NO: 275609 - protein, 52 aa, Zea mays
  Clone ID: MRT4577_182946C.1.pep
NINRRPLIFGVFIKHFGPPIRLNDFFLSKPYPCRVKISPRPGIFWGMPTPLI

SEQ ID NO: 275610 - protein, 97 aa, Zea mays
  Clone ID: MRT4577_182947C.1.pep
FPQRKLPRLPMFLSGTTTTASSLPAPLNMMGSISQKSYYCLMPPPPPFFADTTRQRPAETKKRHGACVQEKGIEVTALASSWPAGNVDGRVGGRVGP

SEQ ID NO: 275611 - protein, 155 aa, Zea mays
  Clone ID: MRT4577_182948C.1.pep
VVFSVLLLAVVSVLAATATMAEYHHQDQVVYTPGPLCQPGMGYPMYPLPRCRALVKRQCVGRGTAAAAEQVRRDCCRQLAAVDDSWCRCEAISHMLGGIYRELGAPDVGHPMSEVFRGCRRGDLERAAASLPAFCNVDIPNGGGGVCYWLARSGY

SEQ ID NO: 275612 - protein, 84 aa, Zea mays
  Clone ID: MRT4577_182949C.1.pep
LANVINDKVGIREGLITTSHAITATQKTCDRPSSNDWTGGTAASFNIIPSTTGAAKAVDKVLPVLNRKLTGMSFPLPTRDVSDV

SEQ ID NO: 275613 - protein, 138 aa, Zea mays
  unsure (1)..(138): unsure at all Xaa locations
  Clone ID: MRT4577_18294C.1.pep
LDGVKVNHVLXGEVWALQVLVLLLAMGHERRPQSLEGQLELDSHGYVXAKPGSARISVKGVWFAGSLQSKKYCQAISRXGSGCMDALSVEPSVQVVGAQEVKFYCLLVGVASSIPSNSQLPVLKADGDDCAVYVHGLS

SEQ ID NO: 275614 - protein, 76 aa, Zea mays
  Clone ID: MRT4577_182950C.1.pep
INVRIGRRQICRKHAIWGRKESKLDEESAEFHQSIRPDDAVRTETGTITIEVEATLGGRCRGREEGRDGEFAFVPN

SEQ ID NO: 275615 - protein, 101 aa, Zea mays
  Clone ID: MRT4577_182951C.1.pep
RVWNYCLPKNFRWLVKNLTVPKAAYPLGYLKIQTNFYRFLFAKKNKNFFCPPAFLAKNKCFFFWKKKKHVLYFQTKNLFGKFFFALGVFFGKQGLFPGPPP

SEQ ID NO: 275616 - protein, 100 aa, Zea mays
  unsure (1)..(100): unsure at all Xaa locations
  Clone ID: MRT4577_182952C.1.pep
LEAGRERAVEADPYLPGSDELLAVADVLLASQRLLPSGRPDPVGVLQLQPAPGLDPAAAKRSFHRLSQLVSSPRNPRPAADTALHFIQEAFADXSPATLR

SEQ ID NO: 275617 - protein, 258 aa, Zea mays
  unsure (1)..(258): unsure at all Xaa locations
  Clone ID: MRT4577_182953C.1.pep
MRVAERKRARRRGNRRRRPRLRRPRQPKRWRRLDAASSSSSITEPAVEEQAKQIEALSLAPSVDDAAGEEGPPLLDDSDDSQIQAVISGGTVYESATTFEDLKLSPELLKGLHDEMGFSRPSKIQAITLPMILTPPLQDLVGQAHNGSGKTTCFVLGMLSRVDPQHKIPQAICICPTRELAQQNKAVLMRMGKFTGITCACAIPPAQKDYMPISKMAPITDQIVIGTSGTLIKWITHKKLATRDIKILXVFDEADHML

SEQ ID NO: 275618 - protein, 125 aa, Zea mays
  unsure (1)..(125): unsure at all Xaa locations
  Clone ID: MRT4577_182954C.1.pep
MGSGKLQKRLASSVLKYGKGXVFLDPNEVSXIFMANSLQNIRKLVNDGFIIRKPQKVHSTSRTRRAHDAKHKGTHSLYRTRTGTRDARLPTKILWIKTMPVLMRLLRKYREAKNIDTHIYHDMYM

SEQ ID NO: 275619 - protein, 113 aa, Zea mays
  unsure (1)..(113): unsure at all Xaa locations
  Clone ID: MRT4577_182955C.1.pep
AVPAGEARSVEYRDARFKLQQWPHPRSPSSPPPRPCRPPRRCASHQRNPSSMRPGPPPRPXPTPASPIRLSPVDIPTVAPLLVSPSWRLASAPSVVNAFGSSSPTXRHSGTSS

SEQ ID NO: 275620 - protein, 94 aa, Zea mays
  unsure (1)..(94): unsure at all Xaa locations
  Clone ID: MRT4577_182956C.1.pep
LAHAXDACMSIATPPRARHMVSSPPPVLISCGGRAGGKPSLAVRCECDRSRTNYNSWLPDKTQGTIGRQAGRPAGQYNRHATRQRFHQRLLPSG

SEQ ID NO: 275621 - protein, 663 aa, Zea mays
  Clone ID: MRT4577_182957C.1.pep
MKERSSLCESAADGNWGLKYKRKRSKLTVSPSNENEATSPTSDSPMSHGSTKKKLKHDTNISPSAKKIRGHDGYFFECVECDLGGNLLCCDSCPRVYHLECLNPPLKRLPPGKWQCPRCRPKKGSLKMLGNAEVGTSKHEKSTRTYAGTTSGSPPSHTKVSFKTRNSTQDKTGSKKKKKGGARDLMNGGETNTKNNEVEKKKTLILHLKKRSTKELSENTKPSKSEFVELSEEKIVKHGSVLKLKKHPHRMDLSPSKSKTRRQSSQRESKRSGTKKIKYSMSDDDSVSSSEPSTSLDNSESPPKRKHSDGKAPSSSTKKGKKKVKFVEKKHSEEQGVVGDKMMTTQEDQQVDRILGCRLQMSQINPPSHASLEQFESANLQVDGMVLPHASAGIPNRPHDGTESSRNGTIEDICADESANHSGHNLEMRKDTDSKSHEKESHKREQVKKILSVCSGDETNIMRDDQVVRENVSASKKGEDETSDLPAEKDDTILPVTRACTMIRTNQDHTDESKQHGKIEQITNKDYNDAGYEFLIKWVGKSNIHNSWVSESEVKILAKRKLENYKAKYGMSLINICKEQWCQPQRVIGLRASVDEVEEVLIKWCGLPYDECTWERSDEPTLMKYSHLVTQFKNFECQALDKDVVKDYANARNRHELNVLVDQ

SEQ ID NO: 275622 - protein, 144 aa, Zea mays
  Clone ID: MRT4577_182958C.1.pep
MHGGLPRINTTLVLLETSGWRTSKILVRSIHSSSVDIVTKISSVHALHLARSLAYHNRIDSIYVRTATVPWFYFVEHLERTEWHGRRCGLGEHMGSNVGMGRHGRRRTAGVDDTGAERGRAGGLTELASIGTVGEGAGLRGLPP

SEQ ID NO: 275623 - protein, 61 aa, Zea mays
  Clone ID: MRT4577_182959C.1.pep
FSPPRDSRVSECQYVKTVRGNLGTFAHVERLQATYSVRCEAKDLLSGSSLCIVAKGPWRTI

SEQ ID NO: 275624 - protein, 105 aa, Zea mays
  unsure (1)..(105): unsure at all Xaa locations
  Clone ID: MRT4577_18295C.1.pep
VPYLIIENEKDSTAKDYDNMLTDCCATGAWKLCVMYNHTGXTLRCCHHKDWLGYPRPTPYPTDISSAQRATLFQEHKTGASPGPMAAERYPGKDRTGSKRDFPLS

SEQ ID NO: 275625 - protein, 81 aa, Zea mays
  Clone ID: MRT4577_182960C.1.pep
FLSKKIIVWQQFVGDDQISSTSKHRMVDLSNCLVIRAHQMIRLSYAKSFFVDIGCSVLVRRKGLRAIPVAVEVEVRIGPAQ

SEQ ID NO: 275626 - protein, 134 aa, Zea mays
  Clone ID: MRT4577_182961C.1.pep
GPSSRASGSPLRGPSLSGALRGAFRPSAPPPLRGSPARRSPPSGSRRSHARLGPRGGSLKGPPPGCRRRRYTMTSAEAPEKYCLLRAVRRRRLRCSGWPVARSPPGLSPSVLCSQSSFMLATGASIAAMYVCGP

SEQ ID NO: 275627 - protein, 84 aa, Zea mays
  Clone ID: MRT4577_182962C.1.pep
MVDSKATSAVTLRTGKYMTNRLLARKQFLLEVIHPDRANVSNAELKERLAYAYEVNDLNTILCFKVRTHLRGGKFNWLRLIYDN

SEQ ID NO: 275628 - protein, 78 aa, Zea mays
  Clone ID: MRT4577_182963C.1.pep
TRLNGTEVLRWTKIPGLNPRAAALCANALKGCPQLRRYHLGLGRGLTACLGRRGVVEDRHKHLPTHRLLRRPCCTNIS

SEQ ID NO: 275629 - protein, 62 aa, Zea mays
  unsure (1)..(62): unsure at all Xaa locations
  Clone ID: MRT4577_182964C.1.pep
NHDTFGKEYIPRFILTLTKEILEGEYQHTYXLXGAKSGKLNMHIKWTPHPIYQKPHTDQTNF

SEQ ID NO: 275630 - protein, 697 aa, Zea mays
  Clone ID: MRT4577_182965C.1.pep
MDLVGSLLLSMARLLDPSGLHFVGWLVTAGSIGLAALIYALLRLQREAALYWTKATREKRAAWRRLRCPSSCHSWSEDYFHGGQPSTCCVCLSSLGSTQGVDMVHRCSVCGVAAHSNCSPRAEKDCKCVAQAGASPLLHHWSERWVELDDNPEISSSCYYCDEPCGVPFLGVSPIWRCLWCQRQIHVDCHAKLLKETGNTCDLGLLRRLIVPPQSVKEIGQGSGISGMLNSIKDGFANSTVGNRRRSRKKKKKKKHPGGKINSIPTKFSVIDSVLEGFARLKGLDGKYALAKPLSQHSVKQTYRSVIPNGRVRKYELVDLPQDSRPLLVFINGKSGGRNGPSLRRRLNMLLNPIQIFELSASQAPEVGLQLFHNVKHFRILVCGGDGTVAWVLDAIEKQNYESPPPVAILPLGTGNDLSRVMRWGGGLSSVERQGGIYALLNDVDHAAVTVLDRWNVTIKEKNGTEGECTKQIKFMTNYLGIGCDAKVAYDFHTTREEKPDKFCSQFVNKLIYAREGAKDMMDRSCSDLPWHVSLEVDGKNIEIPEDAEGVIVMNIPSYMGGVDLWQNDNDHNDDFRLQSIHDKILEVVCISGTWHLGKLQVGLSRAHRLAQGKVIRLHLHSSFPVQVDGEPWIQPPGCLEISHRGQMFMLRRTSEEPTGHAAAIMSEVLVNAECNGVIDASQKRLLLHEIALRLSS

SEQ ID NO: 275631 - protein, 85 aa, Zea mays
  Clone ID: MRT4577_182966C.1.pep
EQGYRLRGSVNGVCCYKSTPSWSPVNSLSMALFGAICDVDLKDGYVIHEKRLYLLSKKGPKLISLAWRVKNEKKKKKKKKKKGGR

SEQ ID NO: 275632 - protein, 71 aa, Zea mays
  Clone ID: MRT4577_182967C.1.pep
HLHTPICHNSVTEWAGALTTAKSLSLWASSNMCWSLSLIIITTSKAVAILSTSRPILPAPINLPGTVAPFA

SEQ ID NO: 275633 - protein, 100 aa, Zea mays
  Clone ID: MRT4577_182968C.1.pep
PRRRPSSDVMWGEGCPCPFYLRWTNDCSEGLERRVASLPSPQQSSLFVCFDHKFCLPSCIQERIVFTHTKQQRSTCFQSFDFHVFKTQPVQMCSAFNCSC

SEQ ID NO: 275634 - protein, 61 aa, Zea mays
  Clone ID: MRT4577_182969C.1.pep
KQALGQLFGETPLPYQKFDQNPARCNKPKQGVRHNGPQPPSITVVFRFTNLVHLLYQQNFR

SEQ ID NO: 275635 - protein, 158 aa, Zea mays
  Clone ID: MRT4577_18296C.1.pep
GKTPKFCFFLPEWSPPDVPGFKCPCCHGFQHACPINGVVETPLGLAGNPPKIFCFWAPVPPLLKSRLRLLFCKVPSCSCPGGKMFPSPGLRPPACPCKKFGGLIKAQGVFFRFFLPKFVKKRGLTFPRRFLGLTPSPPPCFVSVKGGRGVGTHKPFFF

SEQ ID NO: 275636 - protein, 139 aa, Zea mays
  unsure (1)..(139): unsure at all Xaa locations
  Clone ID: MRT4577_182970C.1.pep
ARAVRQLRHCTAAQLAPARPVHHQGAINHSVGLHSNXRALCKILTPITQRGVQPLHEKLDCRINQNFGSIDALSXKMNAEGAALQGXNEMRLALDKKAKKLSVETTANKDPLVTKGASLVPLXLGIDVLEHSYYLADKK

SEQ ID NO: 275637 - protein, 59 aa, Zea mays
  Clone ID: MRT4577_182971C.1.pep
RWAQKVGQASLKNNPDSKKGEQRFFLKTKIARLLAFFLLKSFTRWFPNFLILHQFPFLG

SEQ ID NO: 275638 - protein, 110 aa, Zea mays
  Clone ID: MRT4577_182972C.1.pep
GEPMAPWFGSDGDKSRCLNKEDKSARRPRRCECDARHGQVPRRASPSSKTCGILCPLARFPVGGLAKSLLPVLSKLILFSHWCRAHGHRRGQLLGPIARCDANQQMVFLG

SEQ ID NO: 275639 - protein, 213 aa, Zea mays
  Clone ID: MRT4577_182973C.1.pep
MHMALSSRSSFAADVLLPATMSYRQPCSGASSYLGSQPAAPFPSAAFGAVAQLDVFDCLSSDEGVGVPAAVPGAFAPPPPLMPAERVVPDAAAGYSSHTRSAAAVAGEGSRTTHRIAFRVRSDEDEVLDDGYKWRKYGKKSVKNSPNPRNYYRCSTEGCNVKKRVERDRDDPRYVVTMYEGVHNHVSPGTVYYATHDAASGRFFVAGMHQPGH

SEQ ID NO: 275640 - protein, 104 aa, Zea mays
  Clone ID: MRT4577_182974C.1.pep
MSAGGAFGGNRGVRPVPPEKGVFPLDHLHECDLEKKDYLGCLKSTGFQSEKCRQFSKKYLECRMERNLMAKQDMSELGFRIVDEAGTSPDKNSKPESPPNQPKD

SEQ ID NO: 275641 - protein, 70 aa, Zea mays
  Clone ID: MRT4577_182975C.1.pep
RPGRVQDSEMIGSYAPNTDKQPTYVKKFQEEEAPSGMLARGHYNAISSFVDDDKKKHLEFEWSFDIAKDW

SEQ ID NO: 275642 - protein, 66 aa, Zea mays
  Clone ID: MRT4577_182976C.1.pep
LAFCRRWLDRLGESKYLMALKNLCDLGIVDPYPPLCDIKGSYTAQFEHTILLRPTCKEVVSRGDDY

SEQ ID NO: 275643 - protein, 52 aa, Zea mays
  Clone ID: MRT4577_182977C.1.pep
QDQRDQWVLLCGNEAANQAISNYSSVHSLHPEKIREEYRAFILAIKASELGL

SEQ ID NO: 275644 - protein, 51 aa, Zea mays
  Clone ID: MRT4577_182978C.1.pep
AGAEVGVGDLLLLIRVIRAIKDTAVMPGTRRIAVHLLLLEEVSCHDRGQGW

SEQ ID NO: 275645 - protein, 255 aa, Zea mays
  unsure (1)..(255): unsure at all Xaa locations
  Clone ID: MRT4577_182979C.1.pep
MKTAILLAAGALASPAVAGVHKMKLQKVPLSEQLKHANIQEQAKALGQKYMGIRPETHADQVFKAPYVADGTHPVPVTNFLNAQYFSEISLGTPPQSFKVILDTGSSNLWVPSSECNSIACYLHTKYDSSASSTYKKNGTSFEIRYGSGELSGFVSNDVFQIGDLKVKHQDFAEATSEPGLAFAFGRFDGIMGLGYDTISVNKIVPPFYNMIDQGLLDEPVFAFYLXDTNEGQESVATFGGIDESHYTGKLIKLP

SEQ ID NO: 275646 - protein, 70 aa, Zea mays
  Clone ID: MRT4577_18297C.1.pep
HISFQGMIGGHVYYFLEDVYPRMTGRRPVKTPSFIKALFADDNVGGAQPPNAGIGAGARFGAMGLDPQAQ

SEQ ID NO: 275647 - protein, 99 aa, Zea mays
  unsure (1)..(99): unsure at all Xaa locations
  Clone ID: MRT4577_182980C.1.pep
LFRPVFLVPGAVGPRLVPRSVGGWRRRRLLRSVAVVPAWRLACGPLGCRPWSASVGAPSGCSAAGGGAPCFXLLLLLPVVGCVCRNKNGLGIGVPPPCV

SEQ ID NO: 275648 - protein, 72 aa, Zea mays
  Clone ID: MRT4577_182981C.1.pep
SRGGPRASGIEFFLAGHKTPYTCRPGTPPGRTRSTRPWGRNSGPLTGPLPQNRGPVNQPLAPPAGVRPPGPP

SEQ ID NO: 275649 - protein, 81 aa, Zea mays
  unsure (1)..(81): unsure at all Xaa locations
  Clone ID: MRT4577_182982C.1.pep
IMTGTLLSDTDDDLSSVHSGKYSPVHYRQVLASRRCRPAPAARXCRGWAAAAPNQTRPSFGRWCERTECLHSKRGGRSRGS

SEQ ID NO: 275650 - protein, 50 aa, Zea mays
  Clone ID: MRT4577_182983C.1.pep
VMLQLRFHPGEAGTFRSRCRTCGRECAGTLGSAAQPRVLLQLRFPPYGGT

SEQ ID NO: 275651 - protein, 127 aa, Zea mays
  unsure (1)..(127): unsure at all Xaa locations
  Clone ID: MRT4577_182984C.1.pep
KKFRPEPPKTRCPWVQEWNGMGNKHRFSLVWPATKLANKMPAKTLRDGCIKRPRSYPHGQDPPPPFVFPFCRAARICTCPGPNHRAKQTLLLVTCKTGKNFFFLYKKKKKKKKKKNTKKKNQKXXXX

SEQ ID NO: 275652 - protein, 161 aa, Zea mays
  Clone ID: MRT4577_182985C.1.pep
HGVVRAEEDAETVYACIDLVSTIIQRKLRKIKEKDSDHGRHMKGFNRLKVREPVIEPVVEDVEDSTDSSVGEEEEEDDLIKEIVRTKTFEMPPLTVAEAVEQLELVSHDFYGFQNEETGEINIVYKRKEGGYGLIIPKKDGKAEKVEPLPTEQLNEHSFAE

SEQ ID NO: 275653 - protein, 77 aa, Zea mays
  unsure (1)..(77): unsure at all Xaa locations
  Clone ID: MRT4577_182986C.1.pep
MALSGMGGISXFITDERNCPNKEQERLRHNEELGNLRTRNQREKGLTPYERKKYGWKMFYIXKVGYDDDYGHMETVS

SEQ ID NO: 275654 - protein, 48 aa, Zea mays
  Clone ID: MRT4577_182987C.1.pep
CINSIVGWLLTIWDNKLQKCSSNKGILERGHMFNQVKHQATKKHIVYR

SEQ ID NO: 275655 - protein, 110 aa, Zea mays
  Clone ID: MRT4577_182988C.1.pep
FRNFRGVSPPAGRGHKGPRAKQGTETLTERAEPTKGARPPSKKKKGTAKKSPPLGRGAPPNRGNPGGPNPQPEFSNSGGQKPRGKKRGYGPGTPNNHKGGGENPPPPDPG

SEQ ID NO: 275656 - protein, 60 aa, Zea mays
  Clone ID: MRT4577_182989C.1.pep
RWHSHMRWILSFHEYEFDVLRVICSSPFVMNQGRSPEISLSHLILKLLALLEIRILRDRG

SEQ ID NO: 275657 - protein, 48 aa, Zea mays
  Clone ID: MRT4577_18298C.1.pep
LVSIPLPPTLPVANCEARVQFLTRKICYIEFVLNGSWRSLYIYPPDDA

SEQ ID NO: 275658 - protein, 78 aa, Zea mays
  Clone ID: MRT4577_182990C.1.pep
QMLKDHRVHHATRLCGHVLLHAQRDGDDAVHCSSSRSQARKQTAAMPALYSAEQDITDAHRPLGRVQKRVAARPGRRR

SEQ ID NO: 275659 - protein, 68 aa, Zea mays
  Clone ID: MRT4577_182991C.1.pep
RLCDCVYRRFMSYFRARQKHFASMETQATSFCGRSMVSVGKLFLGSEPSPLVVKSMPFRSATKWKDLP

SEQ ID NO: 275660 - protein, 86 aa, Zea mays
  Clone ID: MRT4577_182992C.1.pep
DRPSMAEVVQVVSKSVPAPDVPPEKPTFVWPPDERVPRSSFDDITEMMSDLHESHRWEETSSSDALAASAIIRRKAWAESVELYCL

SEQ ID NO: 275661 - protein, 36 aa, Zea mays
  Clone ID: MRT4577_182993C.1.pep
MALTRIGLAGLAVMGQNLALNIAEKGFPISVYNRTT

SEQ ID NO: 275662 - protein, 84 aa, Zea mays
  Clone ID: MRT4577_182994C.1.pep
PNLKGKMVFLHHRMPPPPPKMALLRLLTAGVHQNIPHPFGQPGGGQKTDPFFFILRTTFIILELVSKAIAPSRSLNPRQIVGSC

SEQ ID NO: 275663 - protein, 482 aa, Zea mays
  Clone ID: MRT4577_182995C.1.pep
MALTRIGLAGLAVMGQNLALNIAEKGFPISVYNRTTSKVDETVQRAKAEGNLPVYGFHDPASFVKSIQKPRVVIMLVKAGAPVDQTIATLAAHLEQGDCIIDGGNEWYENTERREKAMEERGLLYLGMGVSGGEEGARNGPSLMPGGSFEAYKYVEDIVLKVAAQVPDSGPCVTYIGKGGSGNFVKMVHNGIEYGDMQLISEAYDVLKSVGKLTNSELHQVFSEWNKGELLSFLIEITADIFGIKDEHGDGYLVDKVLDKTGMKGTGKWTVQQAAELSVAAPTIEASLDSRFLSGLKDERVEASKIFQGDYYSTGSPVDKAQLVEDVRQALYASKICSYAQGMNIIKAKSAEKGWGLNLGELARIWKGGCIIRAIFLDRIKKAYDRNPGLASLLVDPEFAQEIMDRQAAWRRVVCLAINNGVSTPGMSASLAYFDSYRRDRLPANLVQAQRDYFGAHTYERVDMPGSFHTEWFKIARNISNN

SEQ ID NO: 275664 - protein, 114 aa, Zea mays
  unsure (1)..(114): unsure at all Xaa locations
  Clone ID: MRT4577_182996C.1.pep
DAARYAKSVVDRASENAAVKGYRVQHATAGRKIPSAALLIKKYGSPISRCTKWVQTMMAQKMKELQLPQINQXNKANLSTYSKQQQFVSLNQLSTMNPGAYLQQQLLPKKTASY

SEQ ID NO: 275665 - protein, 482 aa, Zea mays; identical to SEQ ID NO: 275663
  Clone ID: MRT4577_182997C.1.pep

SEQ ID NO: 275666 - protein, 192 aa, Zea mays
  Clone ID: MRT4577_182998C.1.pep
MALTRIGLAGLAVMGQNLALNIAEKGFPISVYNRTTSKVDETVQRAKAEGNLPVYGFHDPASFVKSIQKPRVVIMLVKAGAPVDQTIATLAAHLEQGDCIIDGGNEWYENTERREKAMEERGLLYLGMGVSGGEEGARNGPSLMPGGSFDAYKYVEDIVLKVAAQVPDSGPCVTYIGKGGSGNFFQMGHNGI

SEQ ID NO: 275667 - protein, 133 aa, Zea mays
  Clone ID: MRT4577_182999C.1.pep
MMGNKTGKPVFSELKSTEFSLLESTLVQDHCAIPTCVPLDFLKAITSDFSKEQELGRGGFGVVYKRLLKNGKAIAVKKLSEMNLDDDQFHNEVTYLFGLKHKNIVQLKAYCAESRWEAIELRRKYVMAESRKR

SEQ ID NO: 275668 - protein, 60 aa, Zea mays
  Clone ID: MRT4577_18299C.1.pep
MVSISVLEHQMSQRAMEDIGTRGVALEVNVEQFASTGASSGIELALDVSQSPGAIISFYQ

SEQ ID NO: 275669 - protein, 1055 aa, Zea mays
  unsure (1)..(1055): unsure at all Xaa locations
  Clone ID: MRT4577_1829C.1.pep
MGVPAFYRWLAEKYPMVVVDVVEEEPVEIEGVKVPVDTSKPNPNSLEFDNLYLDMNGIIHPCFHPEDRPSPTTFGEVFQCMFDYIDRLFVMVRPRRLLYMAIDGVAPRAKMNQQRSRRFRAAKDAADAAAEEERLREEFEREGRKLPPKQQSQTCDSNVITPGTEFMAVLSVALQYYIHRRLNYDPGWKQIKXEHKIIYVLPGQRNLSGFNPNTRHCLYGLDADLIMLALATHEVHFSILREVVYTPGQQDKCFLCGQVGHLAANCEGKVKRKAGEFDEKGGAIVPKKPYQFLNIWTLREYLEYEFRMPNPPFKIDFERIVDDFIFMCFFVGNDFLPHMPTLEIREGAINLLMAVYKKEFPSMGGYLTDSCTPDLSRVEHFIQAVGSYEDKIFQKRARLHQRQAERIKREKAQAKRGDDLDPHVRDDLIVPIQRFQGSRLASGAVPVPYEQNGSHKDNKERNSRARKAARVSTSGSSIASALVEAENDLEAQECENKEELKSMLKDALREKSDIFNSDNPEEDKVKLGEPGWRERYYEEKFGARTPEQIEEIRRDVVLKYTEGLCWVMHYYYEGVCSWQWFYPYHYAPFASDLSGLGQLNIKFELGTPFKPFDQLMGVFPAASAHALPLQYRRLMTDPNSPIIDFYPTDFEVDMNGKRYSWQGIAKLPFIDEDRLLAEIKKVEHTLTPEEARRNSIMCDMLFVNGSHPLSPYIYSLNSKFGHLPDKRRNEIKEKLDPSASGGMNGYITLCSGDPCPPIFRSPVDGLEDIMDNQVICSIYNLPDHHKHIAQPPVGVIMPKKIVEAGDLKPPPVLWHEDSGRRPHDNSNRQNPSGAISGRQLGEAAHRLVINSLNAQGRGQHSGTSMPYRTIMNGLHHLDVASPVSDQGMRPQVGQSAGPPGWYVPRGSVSNGQPPAYASSGSGHYQYESSGHSQYEQGNHGRQQSHPYARDGFHDTRGRVPPAYGYQQSNMYPSGPGLYGQPPSAYPGVHGGGYQPPPYGGGQQWQQQSYSSYAVRGPYGGRPPPTRADSGSQQPQNRYGALDRSNNRRPSSGYRR

SEQ ID NO: 275670 - protein, 44 aa, Zea mays
  Clone ID: MRT4577_182C.1.pep
VKLVFAKRCRSRILRHQDRPNSWSNDNNSYMSKLAAVFLENAEG

SEQ ID NO: 275671 - protein, 96 aa, Zea mays
  Clone ID: MRT4577_183000C.1.pep
QDSNLFSKKTQSGSPLSSSTRFHGSGPAGSRVKSAIGASSAIIWISTRIQPPVPMLREQEDPKETKKENLNAVELKSGEDGAGIGQGTEIGILEPN

SEQ ID NO: 275672 - protein, 49 aa, Zea mays
  Clone ID: MRT4577_183001C.1.pep
VGNNQAKHASLISFSIRMDLGRSPWRETTPRCYRKMVAANMGESTPDDS

SEQ ID NO: 275673 - protein, 63 aa, Zea mays
  Clone ID: MRT4577_183002C.1.pep
FYSILQIIQYIFDPSRLASQLFRRPRSTRYIFFPNRAKNYYRINGQLASSSPLRALHTRVPVC

SEQ ID NO: 275674 - protein, 154 aa, Zea mays
  Clone ID: MRT4577_183003C.1.pep
MALTRIGLAGLAVMGQNLALNIAEKGFPISVYNRTTSKVDETVQRAKAEGNLPVYGFHDPASFVKSIQKPRVVIMLVKAGAPVDQTIATLAAHLEQGDCIIDGGNEWYENTERREKAMEERGLLYLGMGVSVFSSLLINAPCSKGDVHNSDKSR

SEQ ID NO: 275675 - protein, 160 aa, Zea mays
  Clone ID: MRT4577_183004C.1.pep
LVEDVRQALYASKICSYAQGMNIIKAKSAEKGWGLNLGELARIWKGGCIIRAIFLDRIKKAYDRNPGLASLLVDPEFAQEIMDRQAAWRRVVCLAINNGVSTPGMSASLAYFDSYRRDRLPANLVQAQRDYFGAHTYERVDMPGSFHTEWFKIARNISNN

SEQ ID NO: 275676 - protein, 81 aa, Zea mays
  Clone ID: MRT4577_183005C.1.pep
QNGTWRHGKCSSTLYRTSMLCPAISLLNSHISPLLLGECILSYQLSDEVLDHVQKHKMCLNDARILCDWHDSPFKNYAPGQ

SEQ ID NO: 275677 - protein, 149 aa, Zea mays
  Clone ID: MRT4577_183006C.1.pep
MARSTRLVASTATALLLLLLSACSCRAAGDSPSAVVLAVRKDGATGQYLTGFRQRTPQVPVTAVLDLGGGTLWVDCDAGYVSSSYARVPCASKLCRLAKTGACATSCVGKPSPGCLNDTCGGFPENTVTRVSTGGNLITDVLSVSTTFR

SEQ ID NO: 275678 - protein, 84 aa, Zea mays
  Clone ID: MRT4577_183007C.1.pep
FARFILALFKNVESNVEVKGFYVDTLFVSPIQVNQAQKQGGRTNRVYGGINPYMSSPCPMELILSKKEKPVKKKVEFQFAPRNA

SEQ ID NO: 275679 - protein, 74 aa, Zea mays
  Clone ID: MRT4577_183008C.1.pep
QKSGHVLGDGVSRGATTPQAQPYKSTNKVEFYGPLGLGKPMEEMLMAGNANPNPPPAAAPSAPGAQTQSQRGGG

SEQ ID NO: 275680 - protein, 46 aa, Zea mays
  Clone ID: MRT4577_183009C.1.pep
RSTVSISFVYIVYNMNRLVSFWYVLNLEFSHVSWLVNGIVDDVEFY

SEQ ID NO: 275681 - protein, 92 aa, Zea mays
  unsure (1)..(92): unsure at all Xaa locations
  Clone ID: MRT4577_18300C.1.pep
YIKRQPLEEEARRGWSHSLSRVSLLVTPNHRLLLLLLXPLHIRHPERPVHPLLVLATSSKRSHKSQPSRFSLCRLRSLYTDSRRRNAARGGG

SEQ ID NO: 275682 - protein, 74 aa, Zea mays
  unsure (1)..(74): unsure at all Xaa locations
  Clone ID: MRT4577_183010C.1.pep
METKIFSLLMLLALSTCVANATIFPQCAQATLXSXLFPPYLPSIIAPLCENPSLQPYRLQQAIGTRNIPLSPLV

SEQ ID NO: 275683 - protein, 120 aa, Zea mays
  Clone ID: MRT4577_183011C.1.pep
MSVSYSNLTNSNQQQQGNRMEKHNPYIVLEGRESGYMRGEGMKKMNNSWKYNGSSSLISYEKQTIRIEFSSLQVTALVPTITGMGDHVSGRVRGYVHCQVHSGEEQVVQVEPHIEEFDSI

SEQ ID NO: 275684 - protein, 86 aa, Zea mays
  Clone ID: MRT4577_183012C.1.pep
MENERGELVDLYVPRKCSATGRIIRAKDHASVQLSIGKVDENGRYTGDNQVYAISGFVRAMGESDDSLNRLTQKDGFLKSVWSASR

SEQ ID NO: 275685 - protein, 69 aa, Zea mays
  unsure (1)..(69): unsure at all Xaa locations
  Clone ID: MRT4577_183013C.1.pep
FSSTVGALASPPSSSSFLGSQLXKSXVSANVTYHGESSSSNSRFXAMSSKEVEXSNMIDQSRWKGMDIP

SEQ ID NO: 275686 - protein, 119 aa, Zea mays
  Clone ID: MRT4577_183014C.1.pep
KAFFWPLFFSPPVFFWEKILFFFWGGGQKGINFLPIFFQAYFETGPSFFKNQKPTYLPGGGPKQWGFFEGKPLKINPFPRKFGQKRGFFNVKNFCYKIPPLLISKGFAPFVFKKKNHFL

SEQ ID NO: 275687 - protein, 84 aa, Zea mays
  Clone ID: MRT4577_183015C.1.pep
SEGGKSASALGFLRVLWAGDILRLLMLMLRGVRASALPQGGGGLRMPRPHGGTSRHPRCRRGIVLGRGRLRLRALGVQGRHGRT

SEQ ID NO: 275688 - protein, 85 aa, Zea mays
  Clone ID: MRT4577_183016C.1.pep
RPTRPKQPGCPSSASPSRYMYLCAPARSWGSCSTMDRPNSARSPDPLLGTDCRTSCSRDLTTMCRIVVSASGALHGALLPSGYSR

SEQ ID NO: 275689 - protein, 44 aa, Zea mays
  unsure (1)..(44): unsure at all Xaa locations
  Clone ID: MRT4577_183017C.1.pep
KHNMGVXLRFXRLNKKSNKGFXRPLSITAVQKHXHXQVRAEPCG

SEQ ID NO: 275690 - protein, 338 aa, Zea mays
  Clone ID: MRT4577_183018C.1.pep
AYRDILSCEFGSGRLRAATASPSILSPPLRPHERRTSRTPPPPPATIGAGALLWSHRANPQPRGRRRPAPVMAQTNGNDPFSPPVSQERVVITNKHGERLVGLLHHTASNKIVVLCHGFIATKNDSLILDLAEALTKEGISVFRFDFSGNGESEGQFEYGNYRKEADDLHSVVLYLCQKSYDIAAVVGHSKGGDVVILYASVHDDVGTIVNLSGRFDLRKGIEERIGEGSIDKINKEGYLDVKDKSENASYRVTKESLMERLNTDMRAASVSISKGCRFLTVHGSADKTIPVEDAHEFAKHIPNHELRVIEGANHNYTSHRKEVADAVVDFITSNVTV

SEQ ID NO: 275691 - protein, 130 aa, Zea mays
  unsure (1)..(130): unsure at all Xaa locations
  Clone ID: MRT4577_183019C.1.pep
LNLCFPNGIIHGAGILYNILRDSTFAHTIRIFHTKLVVXRDFIQLLTTFLETSSYLTPVWLTXTPSLTRHXVYSLGIQALEIVSQLRNTPSLTITTSFFYHAAAYLPVHAITNLXQGDLQVLADPHLQAD

SEQ ID NO: 275692 - protein, 208 aa, Zea mays
  Clone ID: MRT4577_18301C.1.pep
RGRAAASGGALIPAPSSMSCPHSVRRLHSLPWVGTARPRRLCRRHPSLARRGRQQQIRQPRSLRFWQSWRPTRLCCRRPLLARLPSSTGALKVETTLEESTELWILLACGSDGVDHRTAEVGLDGLDAVFSFPATVEMVRLGRGVLLPGSGGGGARRLPWMSMGLVLRQGALVLPRRLGRGRGGGGDLICVARRARDAREGIPAGLEG

SEQ ID NO: 275693 - protein, 229 aa, Zea mays
  unsure (1)..(229): unsure at all Xaa locations
  Clone ID: MRT4577_183020C.1.pep
PTRPVFRFDFSGNGESEGQFEYGNYRKEADDLHSVVLYLCQKSYDITAAVGHSKGGDVVILYASVHDDVGTIVNLSGRFDLRKGIEERIGEGSIDKINKEGYLDVKDKSGXWGLGSYCCAITYSLSFVFFFTVLPAGXNASYRVTKESLMERLNTDMRAASVSISKGCRFLTVHGSADKTIPVEDAHEFAKHIPNHELRVIEGANHNYTSHRKEVADAVVDFITSNVTV

SEQ ID NO: 275694 - protein, 50 aa, Zea mays
  Clone ID: MRT4577_183021C.1.pep
FIGECVFHLRVAGQSPFPSGSTERLICPENVYKRARVTCAPLLRRTWDCV

SEQ ID NO: 275695 - protein, 59 aa, Zea mays
  Clone ID: MRT4577_183022C.1.pep
FKEYKAVEMGLFEMLKQFIDDFLCKKRHCDLLDRSVLIVRVDVRCLGDAFFLIALPVFC

SEQ ID NO: 275696 - protein, 60 aa, Zea mays
  Clone ID: MRT4577_183023C.1.pep
DKTIYMRGSFNYFFENPPPLTLEGMHLNITYIHSFFPLYYTSFVFVLLSLNWMVIPLEEN

SEQ ID NO: 275697 - protein, 68 aa, Zea mays
  Clone ID: MRT4577_183024C.1.pep
QEVVVSFSRFFNSFRILFAAIDQTRSVPGEAGGGGAGSMQRPPLSLLRGARRRRNGRKRESGDLARPG

SEQ ID NO: 275698 - protein, 51 aa, Zea mays
  Clone ID: MRT4577_183025C.1.pep
HQTPPLEILNKNQFTPSPTKHGGKTKQSMNNLPTSYLHLPISNVTHALLIT

SEQ ID NO: 275699 - protein, 75 aa, Zea mays
  unsure (1)..(75): unsure at all Xaa locations
  Clone ID: MRT4577_183026C.1.pep
SFISVTNTTFFCRRVLPLEAHKYTYADAPYIVFSKVHGSSQRLHLISQGPCCRTVAAPINRLMLQLMVHHAQLXS

SEQ ID NO: 275700 - protein, 204 aa, Zea mays
  unsure (1)..(204): unsure at all Xaa locations
  Clone ID: MRT4577_183027C.1.pep
MEIGCKEEIYTCKHDKLLGTCDTPWTLFXDIDKHHVAXYYVQVRGQTCHQCRQKTLGHHTSCCKCQIVQGQFCGDCLYMRYGENVLEVKKNPNWICPVCRGICNCSICRTKKGWFPTGSAYRKVVGLGYKSVAHFLIATHRASSDNSEDSSPAGKEKSLSAKSESSCISDHDGPDANERPEDGETSSKAKVNKSNPPQCEEEEF

SEQ ID NO: 275701 - protein, 55 aa, Zea mays
  Clone ID: MRT4577_183028C.1.pep
QGAVWFQNPRARWRSKQLEQDFDRLRAGHDDLIAGRDALLAENDRFRSQEWPNKA

SEQ ID NO: 275702 - protein, 60 aa, Zea mays
  Clone ID: MRT4577_183029C.1.pep
GNISLTFGAKTTYCKLNMGIMFIHTLNHKALALGNFTPCPGEGGWGGFNYPSYFSPRLPI

SEQ ID NO: 275703 - protein, 110 aa, Zea mays
  Clone ID: MRT4577_18302C.1.pep
HNLGRYEQEGKCMEPGVVSLADILGTRVADHVPQTPNKISEDMIRCIAAIYIRLRDVPSAAAQHAFFPSPCSSFSSASGLSSKYTADVWSWSPRCRRESFTEAWQVQDHE

SEQ ID NO: 275704 - protein, 115 aa, Zea mays
  unsure (1)..(115): unsure at all Xaa locations
  Clone ID: MRT4577_183030C.1.pep
SFDESTASIKASSRKKETGKSAVLTDVYPWDDESDIKXMQEAVHSVHMEGMAWAASKLVRVGSGIKKMSLRFTXVSDIXVSINCRIEAPLPQEPFKKKVPSSGSVAFDKVNSSGF

SEQ ID NO: 275705 - protein, 129 aa, Zea mays
  Clone ID: MRT4577_183031C.1.pep
QPEQRAQELDVQRGHVVSVGVSVDHGRQRLRDRGADGQLPPPPPLPVDTPTGTGYSRRALNTGMHESELLLDAVAVQQHEEQVAAMDTGIGAPVGTYALGMSCGVARRANSERIEWLPDYGSVGFGYSQ

SEQ ID NO: 275706 - protein, 65 aa, Zea mays
  Clone ID: MRT4577_183032C.1.pep
KVLKSTSNYVLTKSHPNSNKLANGSQNRERGRRTTCHGVEIREAARRGERNTAGHRGHHVANRRR

SEQ ID NO: 275707 - protein, 45 aa, Zea mays
  Clone ID: MRT4577_183033C.1.pep
IANSRNSSYLVPVVFGGVFWAMLMWWVGVDIVVVLYGTLFKYRSL

SEQ ID NO: 275708 - protein, 75 aa, Zea mays
  Clone ID: MRT4577_183034C.1.pep
LVPLLLLLGGFLPPASASSPSVSALPSPFPDLGVALSTADLREAAYEVLVAASRTTGGKPLTYVPQSSSVAAGAT

SEQ ID NO: 275709 - protein, 66 aa, Zea mays
  unsure (1)..(66): unsure at all Xaa locations
  Clone ID: MRT4577_183035C.1.pep
RCRVFSLVLXGRLFFFFYLECLSFSGSPNSAKTLLLNYNPHWWXXXXXFYEFXXXXIWGGGGIVGL

SEQ ID NO: 275710 - protein, 39 aa, Zea mays
  Clone ID: MRT4577_183036C.1.pep
AFTHMFKSMGFLSVSTLFILVPCNDHMNLVLAKAKLVCP

SEQ ID NO: 275711 - protein, 57 aa, Zea mays
  Clone ID: MRT4577_183037C.1.pep
DVHYTDFERKRHIGLTIGAWLFSSRTTQKHQYMAFSNSLRHTNETLLLSRTWTPLPT

SEQ ID NO: 275712 - protein, 67 aa, Zea mays
  Clone ID: MRT4577_183038C.1.pep
YALRVWLDPEKMAAQNLSATQVMSALSANNVQTAAGNDNGYFVTYKNKVETTTKSVEELSNLIVTSN

SEQ ID NO: 275713 - protein, 463 aa, Zea mays
  unsure (1)..(463): unsure at all Xaa locations
  Clone ID: MRT4577_183039C.1.pep
MALLVLKCTGRDSFSATENFEKDGISSLSEAVTAVRVRIECGLLTEAFMYHRSYCSKVKEQHSANMTHTEDAFEGSWIYHVEMMMVEFCTICIERNLVDKMIDLPWDSEEEKHLHKSLFESAHEAPMDPIGSLLVVYYLRRYRYLEAYVDRSLQKFEQKELENATEEIASKIRAIAQWRESLVAKCLDMLXEVQRESGEQIQFARTAQISSPAHVGKSQNPVMDLSTTFTSVLQNKSSLFSKNNALTDSSGLIRSSHSERKVPSALQTRAPPHGSPISNMRSTVGGKFPTVGQNVDSPFLRGAKGISSRKGETGFKEGIKYADHDPLPMYLNLSSGDTPTKDYRTSLLKAEANKTTYFQGQDSVGKGEFHFGSRAVKPFNLNGTGAGQNGLAKISGYAGFREDYKVPTKENILSFSKKSSVGGAEASKGVSRWRSDESSEEERTNRESGAPLVTRRRPRFSRR

SEQ ID NO: 275714 - protein, 156 aa, Zea mays
  Clone ID: MRT4577_18303C.1.pep
MDTVAPRLSRSSTRYGPISSSAASFSGPVRKWRKAWVPLTGTGTGTAGSGGGSSRGDNKVVLFRWTPVNGCSGGGGGTDGGMELAAAGASTCRRRYVPAAGEAQSTTKKGTSSELNLNLELEDPDDDTDADMSTDEPRDVEDNSARLESRLKRKAF

SEQ ID NO: 275715 - protein, 162 aa, Zea mays
  Clone ID: MRT4577_183040C.1.pep
MVWFLFGRLSLLGFLFLGGLFGAWGGCRAQPSRFVFPFWVCGFFFRLWSFRFVWFLAWFALPGWFPFGGVFSVFFFFWFVLFGLFCLFFLPPPFFLFFFVCFVLFFFFCFWRMGSGKRIRKTKKIKRAKWKKQKRKKKKKKKKKKKKKKKKKKKKKKKKRKK

SEQ ID NO: 275716 - protein, 98 aa, Zea mays
  Clone ID: MRT4577_183041C.1.pep
LELQPVLSGVAVGCGWQAFVAYVNVGCYYVVGVPLGVFLGFYLDLGVKGIWSGMVIGGTMMQTLILLWVTFRTDWTKEVENARARLDKWDDKKQPLLA

SEQ ID NO: 275717 - protein, 233 aa, Zea mays
  Clone ID: MRT4577_183042C.1.pep
IKELDDLRRAHFLVKKEITNTNLCTSIREEINILLGELEKKKRGLANPLTASTSNSQQRQTKINKKRKVMQKQEHHKGQEDRMQGQLSGLAEKPEKKQRKPQQEQQQEQENKPEEKKQKQEDGPEEKKPKHEDKPEEKKRKQEDKSEEKQQQKKQKHHKWLRQRTPMLPAQGYPAMWNAAMRSDLEPPPYAATHGVHHGYHHPVQPGWPGVHCASPFIGPSTPWYPPPQFYPR

SEQ ID NO: 275718 - protein, 159 aa, Zea mays
  unsure (1)..(159): unsure at all Xaa locations
  Clone ID: MRT4577_183043C.1.pep
SSQSSGQQQSSFRPPAPRGRGARVFGGRYGDQPRKIYCLFCGEDKGHTTRMCQITIQKXKEIAEAEARXNQPKQVLHTASCHSPYIPKYVGNHPTTSVASASHSQASWPQLPPPPPLQPTYSRSQYPEGRQYTQQQRELREESEACTVNSTVPESKHIY

SEQ ID NO: 275719 - protein, 70 aa, Zea mays
  Clone ID: MRT4577_183044C.1.pep
MSALFNFHSFVTVVLLLICTCTYLKMHFPSLLIRRTGFRGFFWKAARIGERLSPWVAIGCSVMGISILFW

SEQ ID NO: 275720 - protein, 70 aa, Zea mays; identical to SEQ ID NO: 275719
  Clone ID: MRT4577_183045C.1.pep

SEQ ID NO: 275721 - protein, 103 aa, Zea mays
  unsure (1)..(103): unsure at all Xaa locations
  Clone ID: MRT4577_183046C.1.pep
RFYLSSQNQVYTNLXGNRAHAANTGWAMLALIDAGQAQRDPAPLHRAARVLINLQSEDGEFPQQEIIGVFNKNCMISYSQYRNTFPIWALGEYRCRVLGAGKR

SEQ ID NO: 275722 - protein, 73 aa, Zea mays
  Clone ID: MRT4577_183047C.1.pep
NDNNRYLSRSKKTSPCTLDATSHHCLNQGHFNIRTTSKNMKTTNGMQRSPLTWEHRFGTNLSTVQCTPYFNVP

SEQ ID NO: 275723 - protein, 70 aa, Zea mays; identical to SEQ ID NO: 275719
  Clone ID: MRT4577_183048C.1.pep

SEQ ID NO: 275724 - protein, 136 aa, Zea mays
  unsure (1)..(136): unsure at all Xaa locations
  Clone ID: MRT4577_183049C.1.pep
LIAAGRTFESSPAIRKXCSFLLSKELPSGGWGESYLSSQDQVYTNLKGNRAHAANTGWAMLALIDAGQAQRDPAPLHRAARVLINLQSEDGEFPQQEIIGVFNKNCMISYSQYRNTFPIWALGEYRCRVLGAAGKR

SEQ ID NO: 275725 - protein, 254 aa, Zea mays
  unsure (1)..(254): unsure at all Xaa locations
  Clone ID: MRT4577_18304C.1.pep
MVESPYRLRHRRLMDTVPATASGDPAPGHGGSNGMPIMVSILVVVIICTLFYCVYCWRWRKRNAVKRAHLERLRPLSNSDLPVMDLSTIAAATNGFSKENKLGEGGFGPVYRGVLDGGAEIAVKRLSARSRQGAAEFRNEVELIAKLQHRNLVRLLGCCVDKDEKMLVYEYLPNRSLDAFLFGTRKTAHLDWKMRQSIVVGIARGLLYLHEDSCLKIVHRDLKASNVLLDNKMNPKISDFGMXMIFEDEEIEVI

SEQ ID NO: 275726 - protein, 124 aa, Zea mays
  unsure (1)..(124): unsure at all Xaa locations
  Clone ID: MRT4577_183050C.1.pep
VCIRKASVSVSKELPXRWWGESYLXSQDQVYTILKGNRAHAANTGWAMLALIDAGQAQRDPAPLHRAARVLINLQSEDGEFPQQEIIGVFNKNCMISYSQYRNTFPIWALGEYRCRVLAAAGKR

SEQ ID NO: 275727 - protein, 757 aa, Zea mays
  Clone ID: MRT4577_183051C.1.pep
MWRLRIAEGGGDPWLRTKNAHVGRQVWEFDASADPDPAVDAARRAFAGSRGHLKHSADLLMRIQFAKENPLELDLPAIKLGEHEDVTEEAVSTTLRRAISRLSTLQAHDGHWPGDYGGPMFLMPGLIITLYVTGALNTVLSSEHQKEIRRYLYNHQNEDGGWGLHIEGPSTMFGSALTYVTLRLLGEGPDSGDGAMEKGRNWILDHGGATYITSWGKFWLSVLGVFEWSGNNPVPPEVWLLPYLLPFHPGRMWCHCRMVYLPMCYIYGKRFVGRITPLVLELRKELFKDPYSKIDWDKARNLCAKEDLYYPHPFVQDVLWATLHKFVEPVMMSWPGSKLREKALETAMQHVHYEDENTRYICIGPVNKVLNMLACWIEDPNSEAFKLHIPRVYDYLWLAEDGMKMQGYNGSQLWDTAFIVQAIVATNLTEEFGPTLKLAHNYIKKSQVLDDCPGDLNDWYRHTSKGAWPFSTADHGWPISDCTAEGLKASLLLSKISPEIVGGPIEANRFYDAVSCLMSYMNDNGGFATYELTRSYAWLELINPAETFGDIVIDYPYVECTSAAIQALTSFRKLYPGHRRKEVDNCISKAANFIESIQKSDGSWYGSWAVCFTYGTWFGVKGLIAAGRTFESSPAIRKACGFLLSKELPSGGWGESYLSSQDQVYTNLKGNRAHAANTGWAMLALIDAGQAQRDPAPLHRAARVLINLQSEDGEFPQQEIIGVFNKNCMISYSQYRNTFPIWALGEYRCRVLGAGKR

SEQ ID NO: 275728 - protein, 85 aa, Zea mays
  Clone ID: MRT4577_183052C.1.pep
VENRRQPKRLKIVATKTSKGRKLPMPAQRKRGVSHSDEEYSSGKDSDLPSDADFKHRSKRPDRLHQKSVGRSDVAPINSHNELRT

SEQ ID NO: 275729 - protein, 51 aa, Zea mays
  Clone ID: MRT4577_183053C.1.pep
TIETNKQHIKWIPVSTIEQQGSPRYFSSLCSLLFIHVLLSRQFFLNVYMLL

SEQ ID NO: 275730 - protein, 64 aa, Zea mays
  Clone ID: MRT4577_183054C.1.pep
HPRGIHSAVPVAFSLAPHVVRQAYKSFGGFMVSAERERAARPAKDVGVRGCVPEVVARCQPQLA

SEQ ID NO: 275731 - protein, 143 aa, Zea mays
  Clone ID: MRT4577_183055C.1.pep
SSLKETNNWVRRIPKQCVLNQRDLDDHGQYITIHHSTESPDTHHVLSHCCQTLPFKAPVSRTCIVADISLIRPRTPAIIPSYPRFPVTVCVGPFRVTLRKLFGTLVPISSKLPVVFAEDLRPELVILENGFSHLWKCCLPSCR

SEQ ID NO: 275732 - protein, 139 aa, Zea mays
  unsure (1)..(139): unsure at all Xaa locations
  Clone ID: MRT4577_183056C.1.pep
MPGDCFCVHCFGVAGATWREGAHAXASPRRXAAPSPPAPSHSTRSXGYEGLLARASPQDLXGGRGGGGRLLLRFLLPLALLDDEXDHIEAXGRLREXAPLLRVIDPPVSSSLPXCATRACDSDIQRPSCCARVRMCALE

SEQ ID NO: 275733 - protein, 74 aa, Zea mays
  Clone ID: MRT4577_183057C.1.pep
FYLDIFVLFCITIPEETHSYEFVHSSVNQAVTKKKSEEHMFFFFVDTAFENRPSIGGGKIKGQVPLPLVILAVF

SEQ ID NO: 275734 - protein, 91 aa, Zea mays
  unsure (1)..(91): unsure at all Xaa locations
  Clone ID: MRT4577_183058C.1.pep
GXPAPXITSSGTNAGXTXSXGFLSYDXXCTALXGEAALXXRXRLTKLPAXAXQLELADAAMQKXDRSGAEXPHXTQQWKVRCAAGEAEGER

SEQ ID NO: 275735 - protein, 105 aa, Zea mays
  Clone ID: MRT4577_183059C.1.pep
VNVWAIGQDPARWAEPEKFMPERFLEKEVDFRGRDFDLLPFGAGRRICPGLPLAARMVHLMLAALLRRFEWRLPADVERNGVDMSENLGVTLGMSTPLQAMAMPI

SEQ ID NO: 275736 - protein, 52 aa, Zea mays
  Clone ID: MRT4577_18305C.1.pep
KTFFLFKAPKPSSCLRSSSLVPCLPLSRLPVPVFILADPVESLSSIFKMAGP

SEQ ID NO: 275737 - protein, 258 aa, Zea mays
  unsure (1)..(258): unsure at all Xaa locations
  Clone ID: MRT4577_183060C.1.pep
MADIMLSSEKLRARLLQEGLCEAVVRECESIMMSELLELHNHIKSQQQQHSILIDRLRQLETEKVELERTVVHETKERETLGYANSRQSDFYSVLSGGSTTESDPDTASHMAEVETEEDEVTYFDTRDFLSAESLRSASCQRRELIAHGFGSEYVGDSVTNTVKTTKYPFVLRRDKLPEPKEKEKHIGLWSIIRENIGKDLSGVCLPVYFNEPLSSLQKCFEDLEYSYLVDHALHXGKQGDSLMRILHVAAFAVSGYA

SEQ ID NO: 275738 - protein, 127 aa, Zea mays
  Clone ID: MRT4577_183061C.1.pep
RPLRPALRASRTSSPSQSHLCYSHRSSVSFFGGTRWTTHTRLPDDARHTRATRCAKSKLRRVLLCQPPTACFAEFTMEVGDELVRLDKQRRVRRWRIHFRRGRAGSQQLGVKPTGMEEQRRSPARVT

SEQ ID NO: 275739 - protein, 89 aa, Zea mays
  unsure (1)..(89): unsure at all Xaa locations
  Clone ID: MRT4577_183062C.1.pep
MADQANQPTVLHKLGGQFHLSSSFSEGVRARNIXPSVSPYEXRRFATRXNYITQSXLWEPLQWPVSRLRMHMFPRECTNSAFCAQSCQI

SEQ ID NO: 275740 - protein, 124 aa, Zea mays
  Clone ID: MRT4577_183063C.1.pep
MATPLARAPLPGALLRPAPAVLRLATRCRFRATAASGEGAAGPMLRTCKNCKQQYDPSVNHPYACRHHTAHFGGETKRKFESVYAGGTMDTPNSGKVFQYWHCCGSEDPFDVGCTASPHCSYDD

SEQ ID NO: 275741 - protein, 76 aa, Zea mays
  unsure (1)..(76): unsure at all Xaa locations
  Clone ID: MRT4577_183064C.1.pep
GYAVGGAISWLDSTQLTKVXEFQANMKELQGICNPIIAKMYQAXGAGMGAPAGMIEDAPSGGIGAGPKTEEVDDIG

SEQ ID NO: 275742 - protein, 99 aa, Zea mays
  unsure (1)..(99): unsure at all Xaa locations
  Clone ID: MRT4577_183065C.1.pep
IHWPIYYTALNRQNHWVTHLITLVNHPPLHTCFNSXEASTDGLSNQSSKLIGKRDGQWDAPLTGALRAVTGRVTLTFASTLATALSACFLSFLATFVGF

SEQ ID NO: 275743 - protein, 225 aa, Zea mays
  Clone ID: MRT4577_183066C.1.pep
MEAVCGSVWVTSSLPRSPKSTLSLFRSTHQHLTAFPSQSHLFLYHPPPYANAKTLRARTSSKPAIFLPHLIASLEQVDQTYIMVKPDGVQRGLVGEIISRFEKKGFKLTGLKLFQCSKELAEEHYKDLKQKSFFPKLIDYITSGPVVCMAWEGVGVVASARKLIGATDPLQAEPGTIRGDLAVQTGRNVVHGSDSPENGKREIALWFKEGEVCEWTPVQAPWLRE

SEQ ID NO: 275744 - protein, 145 aa, Zea mays
  Clone ID: MRT4577_183067C.1.pep
YPAGGWCAAPWGASGGFSPRAGVAVFSPTPPGWVLPPPCPRSSLGASRRGGFRPLRPRCMRRPCWPGTTGGCRNRSGVLFPPPPLFFLGAGPPFRDFVLCLFQSSLFFFFFFLFSPFFLVFHFFCFFFWFIKQQFFIFHFSFLPK

SEQ ID NO: 275745 - protein, 35 aa, Zea mays
  Clone ID: MRT4577_183068C.1.pep
VEAILRHLMCYMNFLALIDPFFMLTISPGSYCSAS

SEQ ID NO: 275746 - protein, 261 aa, Zea mays
  Clone ID: MRT4577_183069C.1.pep
MMVRARDAARALLRLAGARAGVHRDYFPPLARATFARAFLDFRKTGNKEAIEKDKARLTDELSRGYFQDFAEIRENAGKIATASKVIIPEVDAVKFPDLDVDSPDGGALHLPLVAPTLQADDGEAGDHKIPGASLVCLSFRASSLKMAESWSLPYLDAFGAAKNMHVYEVSFIDSWVLSLSPMRRAFLKAMRKSNNPRRHVVYAFGDHYDFRKKLQIINLLTGYIYLVDGLGRIRWQGSGSATQEELSSLTACTSILLDEK

SEQ ID NO: 275747 - protein, 84 aa, Zea mays
  Clone ID: MRT4577_18306C.1.pep
ISLPTFCPMIGLTRGTLIFMLRIYTVHWNLGAHTWDLVSTYTYNKCSTMAWNHLTTLDHTLQVSQLASISPSQINYSPLATHDT

SEQ ID NO: 275748 - protein, 208 aa, Zea mays
  Clone ID: MRT4577_183070C.1.pep
GQTCSTDELSRGYFQDFAEIRENAGKIATASKVIIPEVDAVKFPDLDVDSPDGGALHLPLVAPTLQADDGEAGDHKIPGASLVCLSFRASSLKMAESWSLPYLDAFGAAKNMHVYEVSFIDSWVLSLSPMRRAFLKAMRKSNNPRRHVVYAFGDHYDFRKKLQIINLLTGYIYLVDGLGRIRWQGSGSATQEELSSLTACTSILLDEK

SEQ ID NO: 275749 - protein, 64 aa, Zea mays
  Clone ID: MRT4577_183071C.1.pep
HAHLFLLDVLVVIFAQQLENPFKQGLVGQTAHGVYVALVHDPFSHDSSCCLRGRICHVQTGPGT

SEQ ID NO: 275750 - protein, 54 aa, Zea mays
  unsure (1)..(54): unsure at all Xaa locations
  Clone ID: MRT4577_183072C.1.pep
TLHDLSTRIAHLLALHLVFALLAVPSVNAIYNEKXMIXQGSLDLLSDTNMEDFA

SEQ ID NO: 275751 - protein, 57 aa, Zea mays
  Clone ID: MRT4577_183073C.1.pep
YRLIGRLLFTNEDLSSCSKIFKWLSLRGRLDHDPYPTFSHLLLPLKIRVIDAIQVQC

SEQ ID NO: 275752 - protein, 447 aa, Zea mays
  unsure (1)..(447): unsure at all Xaa locations
  Clone ID: MRT4577_183074C.1.pep
MGEQGTGLKRGAGARTWPENARSWARPRQEIVGERVLHLTSLHASIWDIVEFGAQVPNVGDKDYDLDEIAQIRHFNSQATTILLASLCREEYNKVQGLNSAKEIWDVLKTAHEGDEVTKITKQETIDGELGRFVLNQGEEPQAMYNRLKTLVNQVCNLGSTKWDDHEMVKVILRSLVFRNPTQVQLIRGDPRYKLISPEEQVGTSTPEIQPIAFKATEEKKEESTSSRLPIDASKLDNEEMALIIKSFRQILKQXEGKDYKPRSKRXDSDRGDDKRGKKKENKRYYKKKGGDAHVCREWDSDESSTDSSSDEDAANIAVNKGLLFPKVGHKCLMAKDDKRKKVKSRASTKYTTSSDEGSSSGDEDNLLTLFANLNMQQKEKLNELIGAIHEKDELLDSQEEFLIKENKRHVKVKNAYAQEIEKCEKLIKSLAFAMTLFPTLELRMLV

SEQ ID NO: 275753 - protein, 305 aa, Zea mays
  Clone ID: MRT4577_183075C.1.pep
MTLIIKSFRQILKQRRGMDYKPRSKRVCYKCGKPGYFIAKCPMSSDSDRDNDKKGRNKEKKKYYKKKGGDAHVCREWDSDMSSTDSSSDEDATNITVNKGLLFPKVGHKCFKAKDDKKKEEIEKCENLTKELSICHDTISNLRTKNVSLTAKVEKSNVCHDSIVNLKDENASLIAKIDKLNESISSLRDENDRLISKVKDLNVCNDVVSNLRNENAILHAKIEELNACKPSTSSVDHVTICTRCRDINVDAIHDHLALIKQQNDHIAQLIAKINEHEIENEIFKFARSMLYSGRCPSIKDGIGFQ

SEQ ID NO: 275754 - protein, 424 aa, Zea mays
  Clone ID: MRT4577_183076C.1.pep
METTTSHRKAPSRESSAKGREESPPRVKSHRSGDKKKMKKVVYYETDSSSPSTSRSDAASATSRCQERKKFSKIPLRYPHISKHAPLLSIPLGKPLVFYGDDYCMWSDKMRHHLTSLHASIWDIVEFGAQVPSVGDEGYDSDEVAQIRHFNSQATTILLASLCREEYNKVQGLKSAKEIWDVLKTTHEGDELTKITKREMIEGELDRFVLNQGEEPQAMYNRLKTLVNQVCNLGSTKWDDHEMVKVILRSLVFRNPTQVQLIRGDPRYKLMSPEEVIGKFVSFESMIKGSKQIVNLEQGSTSTSKVQPVAFKATEEKKEESTSNRLPIDASKLDNEETALIIKSFRQILKQRRGKDYKPHSKRVCYKCEATTSGGKSKEKKKYYKKKGGNAHKEKLNELIGAIHEKDELLDSESRLEGVVNRQI

SEQ ID NO: 275755 - protein, 911 aa, Zea mays
  Clone ID: MRT4577_183077C.1.pep
MILKVFLRRKISRDISVEYLGSISGKNLKGITREISGQYFWKEFEGDNGETFVSKFEKISRFEFLGCYNSQATTILLASLCREEYNKVQGLKSAKEIWDVLKTAHEGDEVTKITKRETIEGELGRFVLNQGEEPQAMYNRLKTLVNQVRNLESTKWDDHEMVKVILRSLIFCNPTQVQLIRGDPRYKLMSPEEVIGKFVSFELMIKGSKQIVNLEQGSTSTPEVQSVAFKATEEKKEESTSSRLPIDASKLDNEEMALIIKSFRQILKQRRGKDYKPHSKRVCYKCGKPGHFIAKCPMSSDSDRCDDKRGKKEKKRCYKKKGGDAHVCQEWDSDESSTNSSFDEDAANIAVNKGLLFPNVGHKCFMAKDDKRKKVKSRASTKYTTSSDEGSSSEDEDNLLTLFANLNMQQKEKLNELIGAIHEKDGLLDSQEEFLIKENKKHVKVKNAYAQEIEKCENLTRELIICHDTISNLRTENVSLIAKVEKSDVCHDSITNLRNENASFIAKIDKLNESISSLKDENARLISKAKDLNVCNDAISSLRNENAILHAKIDELNACKHLHLLLIMFLFALDGKAPVAHDNKGYILYPVGYPEHKIRRIHAKKSHYVSHHAYMYKNETSSSRHSTHIKMPKKKSPTASNESNVSFKTFDASYVLTNKSGKVVAKYVGGKHKGSKTCVWVPKVYESGGSSWIINSGCTNHMTGEKRMFSSYEKNKDPQRAITFGDGNQDVGVTVFRRCDDSVAFKGVLEGQLYLVDFNIAELDTCLIVKTNMGWLCQRRLAHVGMKNLHKLLKGEHILGLTNVHFEKDRVCSACQAGKQVGSHHPHKNIMTIDRPLELLHMDLFGPIAYISIDEKTTDQANDGGKKSFEVPSAREKVKETRNPKPGVKKKTCKVKVDRVKKSYGASRITT

SEQ ID NO: 275756 - protein, 109 aa, Zea mays
  Clone ID: MRT4577_183078C.1.pep
RGPLGNPQKQRVLSPKPPKGVFYQMGGQLNRGGLGKGLPKAPRGKVRFRGINLLAQWGPRVFSLRGEISPPLLKKRGGGPQKCFPIQPPGVFYPFFLGFPWALGRFPPG

SEQ ID NO: 275757 - protein, 85 aa, Zea mays
  unsure (1)..(85): unsure at all Xaa locations
  Clone ID: MRT4577_183079C.1.pep
CSLFFFXKRRRSGPGTTCCSYIDQITQGLRYADYCRKIISSGWNMLQVQGCKLFNHHPIYTKNNNHNKNRGGMRITFFFYLSKLC

SEQ ID NO: 275758 - protein, 61 aa, Zea mays
  Clone ID: MRT4577_18307C.1.pep
KLNICRHFMDTMMQWGMTWHAKSQFEYHDCTYINVYRLCKDCIESRLEILILYDLLLLIVS

SEQ ID NO: 275759 - protein, 340 aa, Zea mays
  Clone ID: MRT4577_183080C.1.pep
MSSDSDRGDDKKGKRKEKKKYYKKKGGDAHVCREWDSDESSTDSSSDEDATNIAVNKGLLFPNVGHKCLMAKDDKKKKVKSRASTKYTTSSDEGSSNEDEDDLLSLFANLNMQQKEKLNELIGAIHEKDELLDIQEEFLIKENKKHVKVKNAYAKEVEKNKNLTKELSICHDTISNLRNENGNLLAKVEKSNVCRDSIVNLKNDNASLIAKIDKLNESISSLKIENASLISKAKDLNVSNTFISNLRNENAILHAKIDELNTCKPSTSSVNHVTICTRCRDIDVDAIHDHLALIKEHNDHIAQLTAKINEHEIENENFKFARSMLYNGRRPGIKDGIGFQ

SEQ ID NO: 275760 - protein, 85 aa, Zea mays
  Clone ID: MRT4577_183081C.1.pep
TSQSCRYVLWFEPHSFGCRILCDNEEAVGRSLLPVKSRGEAGDVVQGIHGSEQTRIPASFTCSCVCSRAEKNSTHLSSPVLQSSG

SEQ ID NO: 275761 - protein, 337 aa, Zea mays
  Clone ID: MRT4577_183082C.1.pep
NEGIVPGLMTYGAVVDGLVKCGRVEDAWKVAQEMGGQGLAPSEFVFSAVITGFCKSGEVDRALMVGETMVAARVKPNVVLYSAMIDGFARSGRMTEAEKLFEEMVDAKCIPNIVTYSSMVRGYFHIANSSRALSTWEEMIKVGCVPTAISYSILISGLCDVGRLKDAMMVWKNMIGRGCAPDTIAYTSMMKGLCMSGMVDGGLRLFNDMLAKGDAKPDVISYNVLLDALIRTNDLPRAMDLLNQMLDQMCDPDPITCNIFLREIGVLKGKGREFLKGLVMRLCYKNKYRAAGDVVMVMLAKYIVPEAVIWYTIVTGVCQTKRVQKVVDNCWDEIWRP

SEQ ID NO: 275762 - protein, 117 aa, Zea mays
  unsure (1)..(117): unsure at all Xaa locations
  Clone ID: MRT4577_183083C.1.pep
VGHLSFQFFCAGVITASCGTDLDSGIALIGYGIASXATSRVFIKNLFGATWGENGFLRMRTYIPCKNGICALAMQPSYHHGWANLRIISLRHIKTCGVCIVSYNKKCILLPFCYKTV

SEQ ID NO: 275763 - protein, 92 aa, Zea mays
  unsure (1)..(92): unsure at all Xaa locations
  Clone ID: MRT4577_183084C.1.pep
MTTAGRPICAPAKXGTQQKGTLIFGPSQNXSLQDILSHTCLXPRNDSLQTQHELQNMNLNEELEERALMHYSFYDKSYSEXRDRRKRSSHLL

SEQ ID NO: 275764 - protein, 48 aa, Zea mays
  Clone ID: MRT4577_183085C.1.pep
KKFMITWLDEIVKGKEITVIQERSYIFFCQPNNEDVVTYLCDILHYEV

SEQ ID NO: 275765 - protein, 46 aa, Zea mays
  Clone ID: MRT4577_183086C.1.pep
LNKSNINEMCNSIFCTRQLLRFATYEGQLLFFFLSILETKAANFLG

SEQ ID NO: 275766 - protein, 181 aa, Zea mays
  Clone ID: MRT4577_183087C.1.pep
MAFAARAALVRVLPPRPSPTSQPKQLKQGLGGRGGSSLAVRAKDSDDFGALLSEKLDAQAPEKRDGRDGFGREASSVEEAHLLLLQFGYHQLWFLIGVELDSDKSYSALIYGTSALVAIWISSIVVSALDSVPLVPQVMEVVGLGFTIWFTSRYLIFKENRDELFTRVSSIKKQILGSHEN

SEQ ID NO: 275767 - protein, 232 aa, Zea mays
  unsure (1)..(232): unsure at all Xaa locations
  Clone ID: MRT4577_183088C.1.pep
HDLRKAKRQNLSESCPRRCTPSSSRTTRRQRVLLPVPPRSTRRATCSPVPAQLQLPARSSSPHITQATRRSGQRPPCRRGAARAPRSTRRRRRRGTRRRRRRRAAXSTTXRDRRGQLSGHGAGAHRLPARRHLPPAAAQGARGQPLRRRRXRGRDVDTEVRRPRTVALPAPAAAAAAAAAPATHRPCRLWRWRRSSSRSSRRWACSTACPTSGRRSSTPGETCPSIKYSVAG

SEQ ID NO: 275768 - protein, 193 aa, Zea mays
  unsure (1)..(193): unsure at all Xaa locations
  Clone ID: MRT4577_183089C.1.pep
PGSRFIVNHLAGIFEDGLIDAVHLRLVPYGNARVASXTARSLAIDAWPDLDVHFSFIYCVEDLVVKRRYKDWESCFEKLGLDPKPVTECYKSEHGHKLELKYANQTDALEPPHRYVPWVVVDGQPLLEDYENFEAYICKAYKGTPPKACEGLGRLQMALETAAEARNGVSYNSGVSKLATAEAGGGEHKVGEY

SEQ ID NO: 275769 - protein, 382 aa, Zea mays
  Clone ID: MRT4577_18308C.1.pep
MAHARILLLALAALATATVAVASSSSSSSFAVSNPIRPVTERAASTLESTVLAALGRTRHALRFARFAVRYGKSYESAAEVRRRFRIFSESLEEVRSTNRKGLSYRLGINRFSDMSWEEFQATRLGAAQTCSATLAGNHLMRDAAALPETKDWREDGIVSPVKDQSHCGSCWTFSTTGALEAAYTQATGKNISLSEQQLVDCAGGFNNFGCSGGLPSQAFEYIKYNGGLDTEESYPYQGVNGICQFKAENVGVKVLDSVNITLGAEDELKDAVGLVRPVSVAFEVISGFRLYKSGVYTSDHCGTTPMDVNHAVLAVGYGVENGVPYWLIKNSWGADWGDEGYFKMEMGKNMCGEYSIHFITTKEREEISCFRLYSALALTRY

SEQ ID NO: 275770 - protein, 249 aa, Zea mays
  unsure (1)..(249): unsure at all Xaa locations
  Clone ID: MRT4577_183090C.1.pep
MAGPRRLLLLLLLPLLVLLGAHPPQCGSAEEGTKVSLELYYESLCPYCSRFIVNRLAGIFEDGLIDAVHLRLVPYGNAHVASNSKISCQHGPYECLLNTVEACAIDAWPGIXDHFSTRVVVKRQYKDWESCFEKLGLDAKPVTECYKSEHGHKLELKYANQTDALEPPHRYVPWVVVDGQPLLEDYENFEAYICKAYKGTPPKACQGLGRLQMALETAAEARNGVSYNSGVSKLATAEDEGGEHKVGEY

SEQ ID NO: 275771 - protein, 210 aa, Zea mays
  unsure (1)..(210): unsure at all Xaa locations
  Clone ID: MRT4577_183091C.1.pep
INIFRSWITLSLKARFRDLIASSSIKRRAQTAEYRPSTKLGIHYSHRNPNGATTGRHMTMQEYYCYQFHYRKDQPNPYLCYGLLSSQAKVDARAAIEESRLHYIAQNQKNLRMESIQGIADTVSRGCINGDEMGRRVVLPASHIGGRRYMLQNYHDGLEICGKYGPPDFFVTFTCNASWPXITGSIFQHGQQXDRSDVVTRGLHLKLHEL

SEQ ID NO: 275772 - protein, 335 aa, Zea mays
  unsure (1)..(335): unsure at all Xaa locations
  Clone ID: MRT4577_183092C.1.pep
MDSRLAIAALLLLASASSAAAAADGGKVAVALYYESLCPYSARFVVNHLAKVFADGLREVVDLTLVPYGNARIHPGGEISCQHGPYECLLNTVEACAIDAWPDLXYFSHLLNSAPSXDFFHARRSLRNSGKTCNKPIVDRLIKMNLPSTNXCDQSFGGANRHHFCSFLKQILYSTSSQGFSGCPLRRCCWVQDVHFSFIYCVEDLVVKRQYKDWESCFEKLGLDAKPVTECYKSEHGHKLELKYANQTDALEPPHRYVPWVVVDGQPLLEDYENFEAYICKAYKGTPPKACEGLERLQMALETAAEARNGVSYNSGVSKLATAEDEGGEHKVGEY

SEQ ID NO: 275773 - protein, 83 aa, Zea mays
  Clone ID: MRT4577_183093C.1.pep
VILQYIDEVWAGTGPDVLSVDPYKRAVARFWGAYIDDKEETACLGMLFRCANEEERAAGVSRAREALDSLDGSFLDCSKGRSF

SEQ ID NO: 275774 - protein, 92 aa, Zea mays
  unsure (1)..(92): unsure at all Xaa locations
  Clone ID: MRT4577_183094C.1.pep
AXXNRLKNRQRISNRCQFCGQFCAQVRTSVAQPSTLFAAVLIPGLPPDCATQRSSHRTAPATVQVIHPMWKPKVLNISDKSFASLKEVYRRT

SEQ ID NO: 275775 - protein, 64 aa, Zea mays
  Clone ID: MRT4577_183095C.1.pep
ISNSPLITNQVINYFGKGKKLGEVLRTFTACSKSSVSFPRKNISTEQFAHICFLAENEDQFLLD

SEQ ID NO: 275776 - protein, 37 aa, Zea mays
  Clone ID: MRT4577_183096C.1.pep
VPFPIFSHKEILLFKRIEEVLAHAFEGRCPLRSPSKL

SEQ ID NO: 275777 - protein, 259 aa, Zea mays
  Clone ID: MRT4577_183097C.1.pep
MGRGKIEIKRIENSTNRQVTFSKRRGGLLKKANELAVLCDARVGVVIFSSTGKMFEYCSPACSLRELIEQYQHATNSHFEEINHDQQILLEMTRMKNEMEKLETGIRRYTGDDLSSLTLDDVSDLEQQLEYSVSKVRARKHQLLNQQLDNLRRKEQILEDQNTFLYRMINENQQAALTGEVKLGEMAPLAMLQPPPAFAHSATAYYGGESSSSGTALQLMSAAPQLHADDLGFRLQPTQPNLQDPAAPCGGLHGHGLQL

SEQ ID NO: 275778 - protein, 122 aa, Zea mays
  Clone ID: MRT4577_183098C.1.pep
IYPDDQARLLNLIKRLYSCHIPLARCQQCRPVILCPCMSTARSLHTQGHCVLHSTDSSVSDTLPGSALLIRTGSIRDPFQSLAQAQYTEMSDLSISSLLYQPSPYTIDLNRQNTSLIYKNRL

SEQ ID NO: 275779 - protein, 47 aa, Zea mays
  Clone ID: MRT4577_183099C.1.pep
MAPKCREDSPRLYKPVEEEPAAEKTTAGKKPKAEKRVPAGKSAGKEG

SEQ ID NO: 275780 - protein, 638 aa, Zea mays
  unsure (1)..(638): unsure at all Xaa locations
  Clone ID: MRT4577_18309C.1.pep
MAANGEDFRGPLLLGARDDGAAWWGRDGADPPRGRRSSSRPWTALAIAAALLALAGVVFLLSSSSYGGRPGGXRPGAAAAARRSPQEVESAVGAAAADDARCSEVAAAALRAGGHAVDAAVAAALCLGVVHPMSSGMGGGAFVVVRDAASGQAVAFDAREAAPAAATPDMYAADPAAKYRGALAAGVPGELAGLHAAWSRYGRLPWRDLVAPAIRLARDGYEVVPYLARALQECEGDVLADPGLRAVFAPGGRRVLAAGKTCRNPALAAALERVAEEGAAALYGGAVGEALVRDVRAAGGVMTMDDLRGYRVDVGAALRADAMGFTFLGMPPPSSGTLGMALILNILQGYSSLEFLKELLGIHRVIESIKHMLAIRMDLGDPDFVDVTGDVAEMLSTTFADKVRQRIVDNTTFPPGYYFPKWSQLDDHGTSHLCVVDGDRNAVAMTTTVNAYFGAKVLSPSTGIVLNDEMDDFSVPAKRTPDRLPPAPANFIAPGKRPLSSMTPLIILKDGELAGVLGGSGGTNIIATVVQVFVNHFIVGMDPLAAVQHPRVYHKLIPNVVTYENQTVGDGEVIALGGAARAFLEERGHRLRSTDSGAVCQFIVHELAEPPAAPGHGVFRGRLTAVSDPRKGGSPAGL

SEQ ID NO: 275781 - protein, 34 aa, Zea mays
  Clone ID: MRT4577_1830C.1.pep
LSLPLYTRSNFIYACMLPHICSDSTLSLASLSIT

SEQ ID NO: 275782 - protein, 93 aa, Zea mays
  unsure (1)..(93): unsure at all Xaa locations
  Clone ID: MRT4577_183100C.1.pep
MAVFLDAHKPYLIAIAIHIIGTCLFLIFKAALHDCMSTSLFIFXRIADGSLIDVPTAIAHQRKNMRSMSGXSLSSSXLALISNTLSSNTCNLT

SEQ ID NO: 275783 - protein, 63 aa, Zea mays
  Clone ID: MRT4577_183101C.1.pep
SDNGWLRSLLTVVNEIPLHTRSVPVAPIKSNNRLKGGALSVVDNRQKLYGAPISCPRLKRRLL

SEQ ID NO: 275784 - protein, 740 aa, Zea mays
  unsure (1)..(740): unsure at all Xaa locations
  Clone ID: MRT4577_183102C.1.pep
LGTSRPAGLNLLGGGVPPFLGAVATLLELNLSYNPFAPGPVPATLGGLSDLRVLWLAGCNLIGPIPPSLGRLANLTNLDLSTNGLTGPIPPEITGLASALQIELYNNSLTGPIPRGFGNLKELRAIDLAMNRLDGAIPEDLFHAPRLETVHLYSNKLTGPVPDSVARAPSLVELRLFANSLNGALPADLGKNAPLVCLDVSDNSISGEIPRGVCDRGELEELLMLDNHLSGHIPEGLARCRRLRRVRLSSNRIAGDVPDAVWGLPHMSLLELNDNQLTGEISPAIAGAANLTKLVLSNNRLTGSIPSEIGSVSNLYELSADGNMLSGPLPGSLGGLAELGRLVLRNNSLSGQXLRGIQIQSWKKLSELSLADNGFTGSIPPELGDLPVLNYLDLSGNELSGEVPMQLENLKLDQFNVSNNQLRGPETYRSSFLGNPGLCXWMMRSIFMFAAAILVAGVAWFYRRYRSFSKSKLRADRSKWTLTSFHKLSFSEYEILDCLDEDNVIGSGASGKVYKAVLSNGEVVAVKKLWSTAVKKEEGSASASAADNSFEAEVRTLGKIRHKNIVKLWCCCSCRDCKLLVYEYMANGSLGDVLHSSKAGLLDWATRYKVALDATEGLSYLHHDCVPAIVHRGEFCNQTTTEGRRPGRXVTARGYWENVTXLMTIKRVRCYMFKADRIIMPQMQLPRWRCHVSEARRWRCHDCKILAVDVELFGEKDLVKWVCSTMEHEGVEHVLDSRLD

SEQ ID NO: 275785 - protein, 82 aa, Zea mays
  unsure (1)..(82): unsure at all Xaa locations
  Clone ID: MRT4577_183103C.1.pep
MFLLIFKFYILVSFIFILXFKLXLHCSLFSLINGYIIINXWFILFFFIFXFFFFFFIFIFLFAFFFFIIFPFAFLFFFSMSL

SEQ ID NO: 275786 - protein, 197 aa, Zea mays
  Clone ID: MRT4577_183104C.1.pep
MEIQGDHGRARDDFCVGRDGGSGWGGRRWLGEQRGRDHGRGHRPGSVHGSRGEREKVWGGGDVKKQSSCLQRAQAQKEDGSDDMGGGWGGGIGAVDRRRLGAATHEGLDQAGTDRSEPPQRETASSGGDSWGSESMIIGRQQSFPREALGVYGEKASRDGNKMIAICIYHQLKVISLFATFFIYVLSEYHVKTVPYL

SEQ ID NO: 275787 - protein, 80 aa, Zea mays
  Clone ID: MRT4577_183105C.1.pep
AAGSLPFPLATAPQHLQGEAASLTTVPHTISPGVSRRIEHRLPAARGVHRNRTRRREAPAAIARRRLARRPEPDATEQDA

SEQ ID NO: 275788 - protein, 75 aa, Zea mays
  Clone ID: MRT4577_183106C.1.pep
DQRRNTCVKQKGGFFKKVVHKPCPPPNMRYQMGGSENFAAKAQDKVNNVKKPVLMGFTGLTFKHRSGTSWKLALP

SEQ ID NO: 275789 - protein, 135 aa, Zea mays
  Clone ID: MRT4577_183107C.1.pep
SYARRSRGRSGPSIVLYSYVAWNCVRTVLLLSGQLCEIFVQVVDDAFVRRPHADARTRRRGVIVGLTRGFLRPVEPVILLLIDPSYIYISLIILLGLGGELDPRGDVVRLGSIRRVSQASRRSVTSCSSMLRSQR

SEQ ID NO: 275790 - protein, 59 aa, Zea mays
  Clone ID: MRT4577_183108C.1.pep
FKIGTVPVQSQESCDLCLEDNLPLIRTIHCKGQCSYHNGITIPVMNVLHDEPDTAYLVK

SEQ ID NO: 275791 - protein, 86 aa, Zea mays
  unsure (1)..(86): unsure at all Xaa locations
  Clone ID: MRT4577_183109C.1.pep
MADEIAKAQVARPGGDTIFGKIIRKEIQAKIIFEDDRCLAFHDISPQAPTHFLVIPKKHXISQISVAEDDDESLLGHLMIVGKKCA

SEQ ID NO: 275792 - protein, 47 aa, Zea mays
  Clone ID: MRT4577_18310C.1.pep
KLYLGTLQNTVTRAGNNIKLIPQRVRGCQVMLHVMVKTKVQFIIHCI

SEQ ID NO: 275793 - protein, 101 aa, Zea mays
  Clone ID: MRT4577_183110C.1.pep
SRGLQRAMMEARVAPFTPVGCRSSGWTIVRLRRRELAIRGRQWIGQVLRRLDNDSVSRSAMPSPQRGGQPERCEPKSMSDTQRRSAGVRPESRTARQRRQW

SEQ ID NO: 275794 - protein, 56 aa, Zea mays
  Clone ID: MRT4577_183111C.1.pep
INKYISAATIKFTRQKIEDCGAENTVKPGDVIHSRECGYRVLYKKRNRQIVHYEPR

SEQ ID NO: 275795 - protein, 146 aa, Zea mays
  Clone ID: MRT4577_183112C.1.pep
IGYLEAGPMENTNRKKIATNLSFCPVPWRRQLAHVPANPRRWPRAVTLRKKTQIQGLTAKEEDATPHLRSDEEKAIAAEVFENELSREMFLKLKNLNMRVVWLRRQICFVECLFLLEEVATIIQLKLTKVYRRFLLLFCLNFSKSQ

SEQ ID NO: 275796 - protein, 54 aa, Zea mays
  Clone ID: MRT4577_183113C.1.pep
VQESGAHFRFLQCSITWIISFLNPYTLLVKTGATSYEVNLPLLYIVYVVVDSFF

SEQ ID NO: 275797 - protein, 73 aa, Zea mays
  unsure (1)..(73): unsure at all Xaa locations
  Clone ID: MRT4577_183114C.1.pep
WPLRPARSRNNVSSFYKLRIQYVRDVCVSRNSMMLPSWTSAVSPNVVVIAVVGGYPPTLTNPRAERIIPRVTX

SEQ ID NO: 275798 - protein, 45 aa, Zea mays
  Clone ID: MRT4577_183115C.1.pep
LFLVQAFACHCKLSGMPNGTSTGDRVWFAKGGTPFFMTLAIGSVN

SEQ ID NO: 275799 - protein, 508 aa, Zea mays
  Clone ID: MRT4577_183116C.1.pep
HWVPRGRPGCIIENHSDDVRLCMYAIGYGSYLITPAHLFKANNGELTFRSTRGVYKMRNSVEVKLHHVKGRDLVIIQLPKDFPPFPQKLKFQAPNRENKVCLVGVNFQQNHSSCVISESSTIAPKGNNTFWSHWISTTDGQCGLPLVDIKTRSIVGVHSLASVNTNVNFFVSMPEDFNTYLGELVSKNEWEKGWQYNPNLISWNGLNLVSSAPKGAFKTAKLVEDLSFDVTEQGIQHETWLTKNIQQNLQVVAKCPGQLVTKHVVKGPCPHFALYLSTHEDAEKFFRPLMGKYDKSRLNKAAFVKDLTKYAKPTYIGEVNTDLFERAVEHVIRILRDVGIQTCEYITDEDEIFKSLNMNAAVGALYTGKKREYFSEYTQEDKAEIIKQSCERVYEGKLGIWNGSLKAEIRPIEKTEANKTRTFTAAPLETLLAGKVCVDDFNGQFYSQHLYGPWTVGITKFYGGWNRLLEKLPDGWIYCDADGSQFDSSLTPYLINAVLYIRLRFMGP

SEQ ID NO: 275800 - protein, 221 aa, Zea mays
  Clone ID: MRT4577_183117C.1.pep
TRSYLITPAHLFKANNGELTFRSTRGVYKMRNSVEVKLHHVKGRDLVIIQLPKDFPPFPQKLKFQAPNRENKVCLVGVNFQQNHSSCVISESSTIAPKGNNTFWSHWISTTDGQCGLPLVDIKTRSIVGVHSLASVNTNVNFFVSMPEDFNAYLSELVSKNEWEKGWQYNPNLISWNGLNLVSSAPKGAFKTAKLVEDLSFDVTEQGIQHETWLTKSIQQN

SEQ ID NO: 275801 - protein, 112 aa, Zea mays
  Clone ID: MRT4577_183118C.1.pep
MKHLAAYLLLGLGGNTSPSAADVKAVLESVGIEADDSRLDQLISELEGKDINELIASGSEKLASVPSGGAGGAAPAAGGAAAAGGAADAPAEEAKEEEKEESDDDMGFGLFD

SEQ ID NO: 275802 - protein, 80 aa, Zea mays
  Clone ID: MRT4577_183119C.1.pep
RGKKFNLHINGSGVTGSTYNLSMSHEPYLLNSNIQKFYPNRLIQQHRDHPPTGKGDQFPWAPTASVVSVPAQKYLPGRPL

SEQ ID NO: 275803 - protein, 108 aa, Zea mays
  Clone ID: MRT4577_18311C.1.pep
RAEFPPNGNVGVDGMVRVIGHELAEMGFNPLAKAWYAGGDPLFPPEIADLFEGIFGPGGGGGYPGQLLTDGGFGGAFKVNGVGGGRFLVQWVWNPVVRFWSGPNGVDQ

SEQ ID NO: 275804 - protein, 93 aa, Zea mays
  Clone ID: MRT4577_183120C.1.pep
LRSRGAHSLSLADTVDNVMGIVIGAHGTTSTLITFMVRHLANEPDVLAKITQEQDEIAGRNGRDGALTWEDVSSMKYTWRAALETLRTVPPVF

SEQ ID NO: 275805 - protein, 593 aa, Zea mays
  Clone ID: MRT4577_183121C.1.pep
MGVTTAGEAVCKSPARASVIVRLNAAFLAFFLFAYVALLLHPKYSGLLDRGATSLVRCTFRDSCPPPSPSNQQLSRKLGGVAANKVAEEERIVNAGRAAAMFDELRGRLRMGLVNIGRDELLALGVEGDAVRVDFERVSDAFRWSDLFPEWIDEEEDDEGPSCPELPMPDWARYGGDVDVVVASLPCNRSAPGWNRDVFRLQVHLVAAQVAARKGRRDGAGAVRVVLRSQCEPMMDLFRCDEEVGREGDWYMYKVDVPRLEEKLRLPVGSCNLAMPLWGSGGRGIHEVLNATSWSGGRRPRREAYATVLHSSDTYLCGAIVLAQSIRRAGSTRDLVLLHDHTVSRPALRALSAAGWTPRRIKRIRNPRAARGTYNEYNYSKFRLWQLADYDRVVFVDADILVLRDLDALFAFPQLAAVGNDGSLFNSGVMVIEPSACTFDALMRGRRTVRSYNGGDQGFLNEVFVWWHRLPRRVNYLKNFWANTTGERALKERLFRADPPEVWSVHYLGMKPWTCYRDYDCNWNVADQRVYASDEAHARWWQVYDQMGDHMRGPCRLSERRKVEIAWDRHVAEELGYTDQHWKINITDPRKWD

SEQ ID NO: 275806 - protein, 100 aa, Zea mays
  unsure (1)..(100): unsure at all Xaa locations
  Clone ID: MRT4577_183122C.1.pep
GGRFEGRPGPXKKKKKKQEVEEEEAGEVAPMVLTRPSSALFFSCSSSACLRQLNPLLSVACCAWSGPRATPPALPQNLRRLRPVCLACQLNLRRECENAL

SEQ ID NO: 275807 - protein, 70 aa, Zea mays
  Clone ID: MRT4577_183123C.1.pep
KKKQKKKKKTKNFRKVRAAELLRFRFRCGDGLQRCGCGARHWACATVLNDTVIRFQFDTPYRAQRVNCLA

SEQ ID NO: 275808 - protein, 72 aa, Zea mays
  Clone ID: MRT4577_183124C.1.pep
RRDNSQHRWQACLQSDLSRGRVREAEPSSSWAAVPDPFSQDMVYVPIPDAGEPNRKLGPPTGMLKNRPTITL

SEQ ID NO: 275809 - protein, 159 aa, Zea mays
  unsure (1)..(159): unsure at all Xaa locations
  Clone ID: MRT4577_183125C.1.pep
KQLSQLRELFVRFDLDGDGSLTKLELAALLCSLGXRPAAGDEIHTLIAAMDADGNGTVEFDELSSSLAPLLLGPCRPAVAVDHAQLAEAFRAFDRDGNGFISAAELARSMALMGHPICYAELTDMMKEADTDGDGVISFQEFTAIMGKSAVDFLGLAAL

SEQ ID NO: 275810 - protein, 40 aa, Zea mays
  Clone ID: MRT4577_183126C.1.pep
VVSVIFVIEKGYNENPSEVGLKTRSVEEISKHNDAWVGGF

SEQ ID NO: 275811 - protein, 109 aa, Zea mays
  Clone ID: MRT4577_183127C.1.pep
GSFLALDLVGLASYSSSRDTMVTNSGATPVGESQVTFRPLHPTFAAECNGIDFSQPVSEENVEIIRKGLAKYGVLVFRRAELDDARHVALARQLGELDRSTVFVIACQK

SEQ ID NO: 275812 - protein, 52 aa, Zea mays
  unsure (1)..(52): unsure at all Xaa locations
  Clone ID: MRT4577_183128C.1.pep
RPSQGMDRRDEVRGERIDKMVRXGECIGLTRPPPPIRVVEEGAEKDSAKLVH

SEQ ID NO: 275813 - protein, 74 aa, Zea mays
  Clone ID: MRT4577_183129C.1.pep
YVKASMARMLCSRSAVLARRLGTQPQHDVVLSRRHNHTRQCAVKVLEEDAAGPSAPATDASEQSRRLEEAIDSA

SEQ ID NO: 275814 - protein, 123 aa, Zea mays
  Clone ID: MRT4577_18312C.1.pep
NYRILFPSNHTYRRIVFPPNIVLYENTALHTSKHIADGIFSYTSMQQPNYRGSVENGSPHPNPNYENCFSCLQCWNTKNNFHSLDLDVASLMRSFLRILPDAFLGISATNATHASADAWADAW

SEQ ID NO: 275815 - protein, 84 aa, Zea mays
  unsure (1)..(84): unsure at all Xaa locations
  Clone ID: MRT4577_183130C.1.pep
KKKKGAKRGYCXTRRLIAYPTNNSMTHLFFSRELLRDRPAIHPRIHVAPNQEHXEGRREGGRGRERMASGKLKRRRAGVGGGVI

SEQ ID NO: 275816 - protein, 50 aa, Zea mays
  unsure (1)..(50): unsure at all Xaa locations
  Clone ID: MRT4577_183131C.1.pep
LFKITIXXXLNFFFKRACFXHXFXXSHKYPXXXHSFPXFTXXFIXHPFIL

SEQ ID NO: 275817 - protein, 49 aa, Zea mays
  Clone ID: MRT4577_183132C.1.pep
GKAAQPVLLVHGSPPRRLRCGKKICYFAALTYIHESPWYDMRTRLTCSR

SEQ ID NO: 275818 - protein, 240 aa, Zea mays
  Clone ID: MRT4577_183133C.1.pep
MASAATATLPKVQLRPRCNSYFQALNPKVTGQVHAHTKTCVACKCPTHIHGLLVSAGGRRTFLPVSAVGSGQGSSVTEADRKSDLSLENVKTSVVSRDDEKINVRVQLPGKATQKVFDEALTFLARDAPPVPGFRKSKGGKTSNIPSSILLQMLGKSRVTKFVLQEILSITIEEFVKKENLKVKPEIQTTQSEGEMESAFAPGSAFGFNVVLQLETPDSDDPEEKPGSDDDLQEESGSSE

SEQ ID NO: 275819 - protein, 51 aa, Zea mays
  Clone ID: MRT4577_183134C.1.pep
RRIQYKQLPPVNMQELPSHIGVRKGGRNHQMGIRSWSRNTLRKFPARLVIE

SEQ ID NO: 275820 - protein, 258 aa, Zea mays
  unsure (1)..(258): unsure at all Xaa locations
  Clone ID: MRT4577_183135C.1.pep
FQQVMATSPRSDILMNLPALEKLETMLLVSLDSHXSQNNSFWYLNXAEFHSVGXWIAFTSQSSXADQRNQSFKESKKSFQRSEDKWWLPEPCVPDSGLSDCMHRELQQKRDQASQIHKMAMEINSSLLSEMQVPLSYLETLPKSGRVGVGDTIYRYMSSGDQFSPEHLLNFLSLSSEHDALEIADRVEAAMYVWRRKASATHVVSKWENVTELNADGDKNLVLASRARSLLLCLKQRFPGLSQTTLDTSKIQYNKDIG

SEQ ID NO: 275821 - protein, 78 aa, Zea mays
  unsure (1)..(78): unsure at all Xaa locations
  Clone ID: MRT4577_183136C.1.pep
XMTFXXLKTANLISSSFKXPILNQFSXXLXXXXXXXXXGXKIMXXFXXXXXLXGFXVRXRQVPHFFXXRGFLRLFSLV

SEQ ID NO: 275822 - protein, 147 aa, Zea mays
  Clone ID: MRT4577_183137C.1.pep
MAPKSLLVVAALLAVVVSACQLPRGATALEASPSTNTNTSLIVSGTVPCATGNSIDPATVPAFPNALVQLVCGGKVVGSATADSAGAFVFSQSSASRDLVAAAMHNLCRVVVVTPLGACDRSLAAAAGTLSAPLKLVGITTGSGSGS

SEQ ID NO: 275823 - protein, 89 aa, Zea mays
  unsure (1)..(89): unsure at all Xaa locations
  Clone ID: MRT4577_183138C.1.pep
HPQHRRLLHQRQQQNRSQHRNLNGAGDRGSHRSSHQDHLRKDPYANLMLQREKDWVSKIQMMQLQSTDPYLDDFITXNYFEKLEKLSAA

SEQ ID NO: 275824 - protein, 58 aa, Zea mays
  Clone ID: MRT4577_183139C.1.pep
TPAGEMDSGGPIKKLVVRKETYINVDSIERAPQLIFRGHISIFVRLPLFFYDKFGFIR

SEQ ID NO: 275825 - protein, 37 aa, Zea mays
  Clone ID: MRT4577_18313C.1.pep
LMPVIETINFVSVHLKSVKFFEWQLPIVDYEHVCLGL

SEQ ID NO: 275826 - protein, 731 aa, Zea mays
  Clone ID: MRT4577_183140C.1.pep
MGRGGIGGAAAMAMAMETADPARAFVKDVKRIIIKVGTAVVTGMNGRLAMGRLGSLCEQVKQLNFQGYEVILVTSGAVGVGRQRLQYRKLIHSSFADLQNPQMNFDGKACAAVGQSVLMAIYDTLFSQLDVTSSQLLVTDRDFKDPSFGDQLRETVFSLLDLKVVPLFNENDAISTRRQPYEDSSGIFWDNDSLAALLAAELNADLLIMLSDVEGLYSGPPSDPQSKIIHTYVNEKHGKLISFGEKSSVGRGGMQAKVSAAANAASKGVPVVIASGFATDSIITVLKGEKIGTLFHNEANLWACSKEATAREMAVAARDCSRRLQKLSSEERKQILLDIADALEANEDAIRSENDADVEAAQVAGYEKSLVARMTLKPGKITNLARSIRKTADMEDPISHTLKRTEVAKDLVFEKAYCPLGVLLIIFESRPDALVQIASLAIRSGNGLLLKGGKEVMRSNAILHKVITGVIPDTVGKKLIGLVTSKEEIADLLALDDVIDLVIPRGSKSLVSQIKATTKIPVLGHADGICHVYIDKSADMDMAKRIVLDAKIDYPAACNAMETLLVHKDLNKSEGLDDLLVELEKEGVVIYGGPVAHDKLKVPKVDSFRHEYSSMACTVEFVDDVQSAIDHINRYGSAHTDCIITTDRSAAEAFLQQVDSAAVFHNASTRFCDGTRFGLGAEVGISTERIHARGPVGVDGLLTTRCILRGSGQVVNGDKGVVYTHKDLPLQ

SEQ ID NO: 275827 - protein, 237 aa, Zea mays
  Clone ID: MRT4577_183141C.1.pep
ETRGSAQCVAGESVPPPSAAATGRPAPGTCTRTASSLSRPTSHPPAAQTALPYPPVPRLAARSCRSLRRAHRLLTSTSGSAIPAPVLHRIATLYLKLGARGDARRVLEERTRRRPAREDDAAVQAKRREAYTKVRELHAQIRAAGYVPDTRYVLHDIDEDAKARALMYHSERLAIAFGLVSTPPGTPLRVMKNLRICGDCHNAVKLIAKVAGREIVVRDNKRFHHFKDGACSCGDYW

SEQ ID NO: 275828 - protein, 74 aa, Zea mays
  unsure (1)..(74): unsure at all Xaa locations
  Clone ID: MRT4577_183142C.1.pep
ACAPPPPCXCRSGPHPASPCAGGSGPPSPPRPSPARPRAPPSSPPPPPAPPRPSSRPPSPSRAPSGRSRDTELA

SEQ ID NO: 275829 - protein, 61 aa, Zea mays
  Clone ID: MRT4577_183143C.1.pep
TILFLKPTMVLKYGGWGYKSKFNNRKFRFNLIVMRKLYNYKRGYLLVMIKYFEYNLSFNIQ

SEQ ID NO: 275830 - protein, 82 aa, Zea mays
  Clone ID: MRT4577_183144C.1.pep
PTRPNSSSSTRFQFDSSSSIQRLPPVRIEERRKNRHRTSSPVQAGGVRFQFIHPTPPACTYRRKKEEPSPYVLAIICTGAKF

SEQ ID NO: 275831 - protein, 119 aa, Zea mays
  Clone ID: MRT4577_183145C.1.pep
ERALASAIDQYRSSSLAILTAEITLGRHLSNTLIYMQTNISYNKVNTFCTSKMKSAKRYYNINKHMDHRRIYLRKFKTVVLIILTYETCVLLFKQSAAPYHQLGMIKGKFLFAVLYRTF

SEQ ID NO: 275832 - protein, 738 aa, Zea mays
  unsure (1)..(738): unsure at all Xaa locations
  Clone ID: MRT4577_183146C.1.pep
MEEHVLQVKQVFQKLKDHQLKLKLSKCRFAQTTLEFLGHIISAEGIATDPEKVQVIRDWPIPNNVKEVRSFLGMAGYYRRFVAHYGIISKPLTSLLKKDQIFVWNDEAQKAFEALKAALVQAPLIXWRPYLQHGEFXIKTDQQSLTHLEDQKLSTIWQQKAITKLLGLQFRIIYKKGVENRVADALSRRPNLCTDGSKLQLNVLATSTVVPSWLTEVTNSYEENEEAKSILSTLAAGDTIEPFTLVSGVIKHKGRIWLGSSNQVQLKVMTALHDSPIGGHSGFPVTYHRIKKLFYWAGMKGQIKEFVQSCEICTKAKADRNRYPGLLLPLPIPDQAWQVISLDFISGLPTSRRFNCILVVVDKFSKYAHFLAMSHPFTALSVAKLFLSQVYKLHGLPLSIISDRDPIFTSNLWQELFKLVGTKLCLSSAYHPQSDGQTEWVNQCVEAYLRCFVHGCPKQWSNWLSLAEFWYNTCFHTALGQSPFEVLYGHTPSQLGLSTIEQCQSADLQTYLATRQLMLQRAKLHLQRAQDRMKKQADKGRSERVFQVGQRVFLKLQPICQSSMGSRLNTKLSFRYFGSFLITKQVNPVAYKLALPEGSAIHPVFHVSQLKSAEETRITTDATMPDLLQELKIPTEVLESRLLRKGNKVIPQLLIRWSNWPASLSTWEDEHAIKQQFPRAPAWGQAVCQGEGDVSSTGHLNTGKDAAMEEADAEVQEAKRSTRAKRPNPKYIENVWMN

SEQ ID NO: 275833 - protein, 255 aa, Zea mays
  unsure (1)..(255): unsure at all Xaa locations
  Clone ID: MRT4577_183147C.1.pep
IRHEGIHESVEYGAPASATTHTQNGFGESKGCHVKSALENTHVSEPFSHHDTEENISKIGGCMHTSQQDNGMEDAIENPLISLSTPSCKHEGALSEEAVHTMKDYAGTCSSNPRVPMQLHDDLAFPGPEKSGDESVNVEVKVHHGSKLSQLGSTDLLDGTELLHQGHNHKDRSNEDMIEQVASEPCTNGDDIVEAAAATKCLESGAMLVPSEERSNLNDRQLTPKLESPDIXGIWPLTVIKMLAIWTMDLLWLLL

SEQ ID NO: 275834 - protein, 123 aa, Zea mays
  Clone ID: MRT4577_183148C.1.pep
LGSELSTSFSVPFSRSRQLSSVLAYSPHGNQIGICGHSCRPSRPERSALLPWTAIGIVCLGRQPHRLLWPTWQCDAAPDRQHIFCVLGPRVCAFIGCPADNSRWDEQALSGTGRRHDGVHVSS

SEQ ID NO: 275835 - protein, 46 aa, Zea mays
  Clone ID: MRT4577_183149C.1.pep
IFFINFCSFIIVLKRENNSRKSGSPISLTGQSPAKSATVQAGWWRV

SEQ ID NO: 275836 - protein, 63 aa, Zea mays
  Clone ID: MRT4577_18314C.1.pep
RGSYLRSETDFCGTSVEHSWLIGNQVLNALLGVLASAADAATIADATANTMSHELVVIVPTGD

SEQ ID NO: 275837 - protein, 68 aa, Zea mays
  Clone ID: MRT4577_183150C.1.pep
NSRVGRAPRRGAPLFVIFSQPPLHPSTHPSLFFFFFFFFFFFFDLKQGLTLFFCPLVKPTVHAMQVHI

SEQ ID NO: 275838 - protein, 108 aa, Zea mays
  Clone ID: MRT4577_183151C.1.pep
VHRLIPMGVGSWFIITTQDTASPQLMFTVCFILHTSSIVLDRKKQFTKAWHSFFMGGTLGSEDGRGVQDRLQGTIWGPAYCGPLQQRGERSRRASMIPCRKGCTSWLG

SEQ ID NO: 275839 - protein, 369 aa, Zea mays
  unsure (1)..(369): unsure at all Xaa locations
  Clone ID: MRT4577_183152C.1.pep
MVSTARAALPTPHLSLASSSRRRPHLXSRPPPHLXPARRXATSIAAGSSASPQQHQVTTRLGDVIEAQQFDRDALNEIFEVAREMEAVERGSHGAPSRVLEGYLMATLFYEPSTRTRLSFEAAMRRLGGEVLTTENAREFSSAAKGETLEDTIRTVEGYSDIIVLRHFESGAARKAADTANIPVINAGDGPGQHPTQALLDVYTIKREIGTLDGIKLGLVGDLANGRTVRSLAYLIAKYQNIKIYFVSPDVVKMKDDIKNYLNSKGVEWEESSDLLEVASKCDVIYQTRIQKERFGERIDLYEAARGKYIVDKKVLDVLPKHAVIMHPLPRLDEITVEVDSDPRAAYFRQAKNGLYIRMALLKLLLVGH

SEQ ID NO: 275840 - protein, 118 aa, Zea mays
  Clone ID: MRT4577_183153C.1.pep
ARDSCIHRVGFNSTIIHKHKHSHNTAYARQPRRIYGLFTPEHTNGRVHNTLGALMRGQTHTRCITTRDYNAKGTLHGEKRYQNLHWHVTVNRRSDCFIRPTTLDMNREPRVSQIPMSF

SEQ ID NO: 275841 - protein, 26 aa, Zea mays
  Clone ID: MRT4577_183154C.1.pep
ISPYKCTLLNSLILDQEDYIKEKEKL

SEQ ID NO: 275842 - protein, 60 aa, Zea mays
  Clone ID: MRT4577_183155C.1.pep
ARHTGACYFADLSFLATFLPWLCRFTFGACSKCKPSKFHLYCPLDATTSCGGVSFLSTMN

SEQ ID NO: 275843 - protein, 63 aa, Zea mays
  Clone ID: MRT4577_183156C.1.pep
PCISKNGSHSNLKDSMKIIIPGKNNGINNELHSSISSAIIHTRRILAILEALFSLKPSSVGTS

SEQ ID NO: 275844 - protein, 108 aa, Zea mays
  Clone ID: MRT4577_183157C.1.pep
NKKFSKGFFKGPGGWEGTLCPLGLNKIPGNLGIPVSDWNWGPTNILRFFNLVKQTAPQIFFPGSGTLKICPIFQVFSRGAGNVNFHGPPWGCPPEAGIKPFGQGFPSA

SEQ ID NO: 275845 - protein, 25 aa, Zea mays
  Clone ID: MRT4577_183158C.1.pep
FSRQKHSDHRRGALHGLIILTLTKR

SEQ ID NO: 275846 - protein, 341 aa, Zea mays
  unsure (1)..(341): unsure at all Xaa locations
  Clone ID: MRT4577_183159C.1.pep
ISWDASPPPSGXGXPQSSIDSSGAAATTVTITSLAPSCTVTSRSAKTSVSSSAASDGSGWSNGTGAGGSAGKPHKGGDPXWKAILAARARDGPLAMGPLRLLRRLGCGDIGTVYLNKMSGGGAGNGGAARPCWFAMKVMDKASLESRRKLSRAQTEREILQLLDHPFLPTLYAHFETDRFACLVMEFCPGGDLHALRQRQPGKHFPEHAARFYAAEVLLALEYLHMLGVVYRDLKPENVLVREDGHIMISDFDLSLRCAVSPTLVRSSLNSDARNAQAACIQPTCFMPKLFGQRSKKSSGAKKSKSKGGEPRQQQAPTGLPELVVEPTGARSMSFVGTHEY

SEQ ID NO: 275847 - protein, 95 aa, Zea mays
  Clone ID: MRT4577_18315C.1.pep
MDTQMSERRSIYAENTFDAAREILYQVEYGYKHANVFYFDGWDGIGASAALKEAAKRLKSSASKFDSVLHLDCSLWKSRRALQKAIAEEIKLPHS

SEQ ID NO: 275848 - protein, 61 aa, Zea mays
  Clone ID: MRT4577_183160C.1.pep
RCTKTSFTCYAATDTLDILIRAISDGNAEHPGACCHLRLYNSSSREHMKLSIMYKATSCVH

SEQ ID NO: 275849 - protein, 101 aa, Zea mays
  unsure (1)..(101): unsure at all Xaa locations
  Clone ID: MRT4577_183161C.1.pep
RTAMLEASSQALDXTYKTGVXHEAINNIRHNKXTMTVQDARHIXLGVSENSTREEIEQEYNNXIVEKNGNXGSFDLQSEGHRANECLETACHKNTQDEPPN

SEQ ID NO: 275850 - protein, 84 aa, Zea mays
  Clone ID: MRT4577_183162C.1.pep
SRCCTQLYQRQGGLCPSSDTTDDMILWSGNKGRHILLPVPSITIVETSAIFLTRSIRCEGESGNLATVSFIVHVLQLQTVTRGS

SEQ ID NO: 275851 - protein, 213 aa, Zea mays
  Clone ID: MRT4577_183163C.1.pep
MAVGKNKRISKGRKGSKKKAVDPFTKKQWYDIKAPLLFTSRNVGKTLVSRTQGTKIASEGLKHRVFEVSLADLQNDEDQAYRKIRLRAEDVQGMNVLTNFWGMDFTTDKLRSLVRKWQTLIEAHVDVKTTDNYMLRMFAIGFTKRRPNQVKRTCYAQASQIRQIRRKMVEIMVNQAASCDLKELVNKFIPEVIGKEIEKATSSIFPLQNVYVR

SEQ ID NO: 275852 - protein, 200 aa, Zea mays
  Clone ID: MRT4577_183164C.1.pep
SAAAEAKGGSGPGPGRPSGGSAQNGTSAKGRVPVLINGSYANANSADAGDGNGMRASARNAAGSTHQLRSGTAALGNTVAVSSLNQTASAVAVAAREGNGTATAGNNQTFLIQAPADNKNHSSVASDGSNSSPTNKQNESPASPQGSTSTVKDQSARGPTPAAIVPVKADANAGRRMKADWTENMAGCDLFYGNWVRDDS

SEQ ID NO: 275853 - protein, 104 aa, Zea mays
  unsure (1)..(104): unsure at all Xaa locations
  Clone ID: MRT4577_183165C.1.pep
ARLDAPQPFHSGPGRVSLLRPRSLLSWYVAGGSSWCGALNAACTVHREPIVEIRACLRASPXRGSVXSAGVRTCRPVDCLLASACRKRSMAGQRQGPGVPPRRA

SEQ ID NO: 275854 - protein, 214 aa, Zea mays
  Clone ID: MRT4577_183166C.1.pep
SLGSRSIRNSETPAAWEWKSRGRRSHRLSLLPWLRRQPFPRCSATTTFCARSSYASASPPVSSVPLSSAGAGSATPPIRPSSADSVTSTRPVSSASTSPPRPAPPRACGSSRFVRSRSSPPPPAAPAPSSTPSRDPRPLSTTAAVAASSSPPSMTATTPRTRSAARCLRAGTPPWFRRPRRRRRSSSTTTRSASSTTTVNSFAMMATAAPTSAW

SEQ ID NO: 275855 - protein, 325 aa, Zea mays
  unsure (1)..(325): unsure at all Xaa locations
  Clone ID: MRT4577_183167C.1.pep
MGAGKGGDGGEAAPEAAQPVVLKMKLHCAGCAHKVKKAIKRVPGVDSIVTDVAANTVVVVGTADAGALKARLEAKTNKPVEIVSAGGAPKKPXPPRSPSRTPAPASXEKKGVKSASPNEEEKEKGKKQQAEEKEREKEKGKKQQVESVLLKIRLHCDGCAYRIRQRIGKIKGVKDVVLEANAKDEVEVTGTMDIPNMVSYLKEKLNRDVEAVALPVRKDGGGGGSEGEGEGKDDKKHSGGGKDKVVAGAAGDDRMDKGKGIEASAAGPSTAAAAAYMSAPAGASTYHVAPPHGYVAYEQAPPPASYYPYPYYGYGSGDGMGPPTA

SEQ ID NO: 275856 - protein, 65 aa, Zea mays
  Clone ID: MRT4577_183168C.1.pep
KESIGRIGTRVRVIVTSERYQISAVGTSSYVSYRSLWQHAHIQMVFSYIHGGTQVRYRYIRFLVS

SEQ ID NO: 275857 - protein, 45 aa, Zea mays
  Clone ID: MRT4577_183169C.1.pep
AEYVIQYSVVVEPRMATAYVEHHPEQINVVLRDVGPAVDEHEPDQ

SEQ ID NO: 275858 - protein, 392 aa, Zea mays
  Clone ID: MRT4577_18316C.1.pep
MEVPWLLLVHGSVTALVVVSFLCGQWPIFEGTFIQSINHFLTFGAYHYLLRFVQSVCGTGARDLVLGVEGYCCDRPNPILQVFYVAIIGVTYFIIVQTSFQYIPGYYVSGLHRYLSVVAVSVGAILFVLTSFSDPGTVTAENVSQYVSSYPYDNIIFVEKECSTCKITRPARAKHCRICDKCVARFDHHCGWMNNCIGEKNIRYFVAFLVWHFLICLYGALILGFILAGEIKERKIIYILTVYYGIDNSFSGLFPHVAQWLLAVHNTQILLSVFLAILALLLGGFCAYHAHLCLTNTTTNETFKWQDYIIWMKKENEAKADAATLRSSIGSANSDAQKAPPSKWRTFFMRSRTPSMEPVVRNNIYDRGMITNLCEVVVPLSERKAFSRMKSD

SEQ ID NO: 275859 - protein, 46 aa, Zea mays
  Clone ID: MRT4577_183170C.1.pep
KKKKKKKINKKKKKKKKKKGKKKKKKKKKKKKKKKKKGAAALFFFF

SEQ ID NO: 275860 - protein, 104 aa, Zea mays
  Clone ID: MRT4577_183171C.1.pep
MMNILGTCRSYLTEGEEKKQLIGMARATSDHAFNATIWDVLVDPSYQGQGLGKALMEKVIRTLLQRDINNITLFADNKVIDFYKNLGFEVDPQGIKGMFWYPRF

SEQ ID NO: 275861 - protein, 112 aa, Zea mays
  Clone ID: MRT4577_183172C.1.pep
MEGPFESLNVSVAGGIFLFMLKKKKKKKKKKSDASKETYSLSNELADSLLNESLCLVLGSEGNGLSAETLQACELVNIPMEGTFESLNVSVAGGIFLFMLQPKGQIDRTSTP

SEQ ID NO: 275862 - protein, 265 aa, Zea mays
  Clone ID: MRT4577_183173C.1.pep
MASEAAPRVVVDECRGVLFVYSDGTVVRRAQPGFATPVRDDGTVDWKDVTFDEARGLALRLYLPRDRGAGAGRRLPVFFYYHGGGFCIGSRAWPNCQNYCLRLASDLGALVVAPDYRLAPEHRLPAAIDDGAAAVLWLARQGGGDPWVAEAADLGRVFVSGDSAGGTIAHHLAVRFGGSPADLAPVAVRGYVQLMPFFGGVARTRSEAECPADAFLDRPLNDRYWRLSLPEGATPDHPVANPFGPGAPPLDAVEFAPTLVVVGGP

SEQ ID NO: 275863 - protein, 110 aa, Zea mays
  Clone ID: MRT4577_183174C.1.pep
RPGDNLLTIPLNHSDTTLLTTHSTFASLSSEKCTSADTAADISALVPNLLRPMQTRIESVRDTITTKIDHTAADIDNDDENINYISSDTVTAMQACNLVDANAGDSALLA

SEQ ID NO: 275864 - protein, 88 aa, Zea mays
  Clone ID: MRT4577_183175C.1.pep
DGSESGGHTVTDAGAILHAARVLIGPGAPILLVLQRWRGDADSCYGSKNRWRRTGDVTQTDPPDGKADGQPPAHELLPADGHGDCLSW

SEQ ID NO: 275865 - protein, 69 aa, Zea mays
  Clone ID: MRT4577_183176C.1.pep
SPISEFTSPTPPSGGHLTNKKGATMNPQCSDLAVKKETLRGPNGPNRGRRINRQPRHSLLVPGCWHHHP

SEQ ID NO: 275866 - protein, 75 aa, Zea mays
  Clone ID: MRT4577_183177C.1.pep
VRQFARFIHGWEWFGWRGVQEAKVVVSVTVTNKQRIGKTNGQVGQQASASRVAAAVQRYAREGRSPSLDPAAAES

SEQ ID NO: 275867 - protein, 48 aa, Zea mays
  Clone ID: MRT4577_183178C.1.pep
VRTAQPRREAWLRFTAVRYMVPRRFLSAVPASSHRASLAHWRGSHPVH

SEQ ID NO: 275868 - protein, 70 aa, Zea mays
  Clone ID: MRT4577_183179C.1.pep
NFLRLGIPGSFQNKGPSIEFNNGGGGALSSSFGGGGGVIFRWGATGPKKEQFGAAPFGGGWPNKVLKWVG

SEQ ID NO: 275869 - protein, 93 aa, Zea mays
  Clone ID: MRT4577_18317C.1.pep
SHDTRPTCRRVECSWSRSSHLRTPNSIMQSLISVHYEISSVLSKCSFYTCSNRAPIQESVPNSKLLSVSPFFSMSVRTGVLVSCRLRCGPGSM

SEQ ID NO: 275870 - protein, 95 aa, Zea mays
  Clone ID: MRT4577_183180C.1.pep
GAQQGKVSKFWGARTFPVFLGKNFGTRNFQLKFCDLNQKLQFTQGSGKKKWRIQTPIEAHGVKNFWRTTYPLTLGQLGEGPHSLKEKGNPFFFGG

SEQ ID NO: 275871 - protein, 49 aa, Zea mays
  unsure (1)..(49): unsure at all Xaa locations
  Clone ID: MRT4577_183181C.1.pep
KKSNPFRGQNNPVSVPPQWETFXTGMGSFRAPPPPVPLEQVNPYWDQFD

SEQ ID NO: 275872 - protein, 52 aa, Zea mays
  Clone ID: MRT4577_183182C.1.pep
QNVICLFLDSYSCFNREKALLLLFSPLCGLPLVHEYVPHKFFFVCPPVFPGL

SEQ ID NO: 275873 - protein, 143 aa, Zea mays
  Clone ID: MRT4577_183183C.1.pep
EKGEGGQNKREKEKRSRDPNTGGGKKRERTRGARGKKKSNKGGTAKTKRKKRNQTKEKQRGSRVWGRGRPQGKRGTSPREGKGNGVGGNPWSQGEKGKGKGQGRPGKDFPQIQARLEPNFVVGLFFGDNVVPKLFTKARGNDQ

SEQ ID NO: 275874 - protein, 360 aa, Zea mays
  Clone ID: MRT4577_183184C.1.pep
MCGPSATMTRSSPSSSSPSSSPSPRRPSVSLSTIWMSSSLSLSHWSLPAAPAAADDESPGMAGPESSAPPPMSGSRSLSAAGSFTGGAGSPSSSSSSAQSPVGSTPGMGSLPPRIQSSSSSTPAAAAELDVFLHRGAAAGPGEVEDGRRRRNSARKRRPSRGVRATEEDDEFGDLYTDILIPTQPPTSKSALSNPVTVETLPRPPPNPNPSPVAAAAAAGVEEDDDWILGGSDPIPGVDPTGDWADEDDDEGDPAPPVKLPAADNDLDPLMGGGAEDSGPAIPGLSSSAAAGAAGSDQWDSDSEDDIQIVLNETDGRRGLGDDEGDDEDGEDLVIVADGPHITGIDEQDWGEDPVAAWAQ

SEQ ID NO: 275875 - protein, 64 aa, Zea mays
  Clone ID: MRT4577_183185C.1.pep
GVFFPPRRGHHVSMTPVPRRKPPCRGHLVWVHETALNVLRGVVPLTCKTKCRGIKESQLGPPHM

SEQ ID NO: 275876 - protein, 84 aa, Zea mays
  Clone ID: MRT4577_183186C.1.pep
PPPWVIPVERIPREKVNGSPVKGGIPPPKVIVPKLKLAKGRKGLLDPKARGRPPPKAKGKFSSGEVASPPAGGAAPGAFFQEIE

SEQ ID NO: 275877 - protein, 75 aa, Zea mays
  Clone ID: MRT4577_183187C.1.pep
GRPWLVRWDLYSENMHFSLPKFQRGIVQLMMVSTAMPVWDAISARVAREYLYSTVLRYFLFLQTKSMGNNAVGGL

SEQ ID NO: 275878 - protein, 79 aa, Zea mays
  Clone ID: MRT4577_183188C.1.pep
LTQWTNFFGSSMGQPKRRRVFLIPIGYESVSQIKTQGWQTTLFLYKLTAPCHKHYLNRKGPKPLGNQPFPAGIFFFFLN

SEQ ID NO: 275879 - protein, 122 aa, Zea mays
  Clone ID: MRT4577_183189C.1.pep
MAAGAGKSKEADPARCRRHPKHRHAAGVCPFCLRDRLSRLSAAAASASASSSSSSPCSSWEDAVARSSAQVPRPRRGSLALLLRQEGREAASAAAALTAGSRAEHEERKAKRGSFWARLQQQ

SEQ ID NO: 275880 - protein, 111 aa, Zea mays
  Clone ID: MRT4577_18318C.1.pep
MPVHVALLAVPAVAAGFLQAFQFAFLLWPFNLALPLARHLPQACIAFRGVASLYGAELRRYAGAAARAAVPVLQPPSHHRYASLRLRGVQQRAHGDAVVAHAMVALVDISY

SEQ ID NO: 275881 - protein, 45 aa, Zea mays
  Clone ID: MRT4577_183190C.1.pep
MFSMLGFFVKAIVTGKGPFKNLADPLVDPVKKKAWAYAPNFVPGK

SEQ ID NO: 275882 - protein, 137 aa, Zea mays
  unsure (1)..(137): unsure at all Xaa locations
  Clone ID: MRT4577_183191C.1.pep
RARCGTWACPSAPGPGRGPPCHPRACPPAPGRSAAAVLFFFLARPDLSRARAEPQGWRWXPPPPRRRXARASERQVVCPPPLFLACXLLLALSLGLPLALFLARAVLLVPAPLLAASLCLAPSVSLCXRRGPPPPRA

SEQ ID NO: 275883 - protein, 76 aa, Zea mays
  Clone ID: MRT4577_183192C.1.pep
SHLRALLSHSRIRGAEPASRALPMVSGPSAASPYRRPRRWRRGERSSAPWKEASVCRRPGGGGGCTDAQGKSAFPA

SEQ ID NO: 275884 - protein, 97 aa, Zea mays
  Clone ID: MRT4577_183193C.1.pep
VFCRPKFNFPAPPKFFLPRKWGFPRFTRAGSLRSKSGGGFFPFGVPPKLLGSPGSLLRGAPGRAFLGAVVLAPSPVGMGTPPFCFPPSFFALCPLIF

SEQ ID NO: 275885 - protein, 69 aa, Zea mays
  Clone ID: MRT4577_183194C.1.pep
LCFLIEFTTEHLGSTIQFGVDNLCMHVVNALLRNHLVCLYHLGVVQWFMFSVIKTTFKRCLNYVYTSKL

SEQ ID NO: 275886 - protein, 114 aa, Zea mays
  unsure (1)..(114): unsure at all Xaa locations
  Clone ID: MRT4577_183195C.1.pep
MRIRITIHIRQRGIQVXNARYELYXLQHVIHADGQMPTDXTIVRGDDACYTXFIETVAXRHEPRAVIADLDPTVIDDVRTXHYRQFLLPEHLIRDMEDAMQPLSXRGHYSIVNT

SEQ ID NO: 275887 - protein, 53 aa, Zea mays
  unsure (1)..(53): unsure at all Xaa locations
  Clone ID: MRT4577_183196C.1.pep
GAQAPEDIVLHKLXNQNVLHCICAIIIITNKHFFIKEDYCTGWLDKKTRPAGG
